United States Patent Application Publication US 2008/0008996 A1 - sequence listing, part 5

SEQ ID NO: 27310 - DNA, 419 bp, Zea mays
tagcttgagaactatgtatttttctttattacatcacaatgattatagatttataggatagataagtcacaatcaacatcacatgcacccagccacaagatttagacaattagaccgcatcaagtgataagtatgcattatgtagacaacaaattccagcaatcctccattcctcattgtgcccagcgaccatcgaccaacatcattgacactacctgctgctgcagttatattgttgtttcctgcagtttaaaaatagagaataaagagaataaattgctacttcatgcagtttagtttatattgactacaagaaaataaatgaatagataccagattgtcctcttgaatatcttgaagacaagaaccaaagctagttggttgcttttttttgtcatcaactctcaaaacatgaatag

SEQ ID NO: 27311 - DNA, 346 bp, Zea mays
ttctttcgctaacatgcatgcgaatgagagaactcaactgtggcatcacactcctttagatagggaccgtgtctcaacgtgcatcagtctttctagagacgcgaggctaagacaccgctgcttaacaagttaggaaccaacttcccactggacaatactctgatatcctgtgccatttccagcctatgcaacacttctctgacaagccccagctgcaaccttacattacccacttctttatgcccccatgactgcaatgtgcgagctaaccttttacgcttcaatgacacatgctccaacggacaggagctcccaactggcaagctccaggacgcacccaccacct

SEQ ID NO: 27312 - DNA, 434 bp, Zea mays
agcttaattgtgtacgtcctctactctaaaacgacatatcactgttcttagcttcctgaaccttatcagaatcatagtagattcttccgagcaagcaatacgcccactgccgtacacacgacaacggagatcaggccatctcgggatctcaagcgttccttccatgttaatggctcagaaactttcctcaagacatcctggaactgcagtctggtgtcatccagtgatccagagttgttgatcactatgtcggcttccgacctcttccagtccaacgcaagttgtgcgttgaccctgttctgagcttgttcctcagaacacccgtctcttgacatcaacctttgaatctgggtttctgggttaacccagaccacagttactggatttgtccatcgatctatcttggtctcaaacaacagcgggatgtccaagat

SEQ ID NO: 27313 - DNA, 376 bp, Zea mays
  unsure (1)..(376): unsure at all n locations
catagcctcgatgacaatctcattcggcaccattggagcatgggccttgagtcgcataaaccttcggacatatgcttgcaagtattcctcatggtcatgcatgcactataataaggcttgggcagttactggcttgctctggaaaccctgaaagctggttaccagcatgtccttcagcttttgccatgacgtgatcgttcccgggcgaagagaagaataccacgtttgagccactctcatgactgccgtgatgaatgatntcgccatgacagccatgttgccaccatatgatgatatggttgcctcgtagctcataaggaactacttcngatcagaatgcccatcatacatgggaagctgcagtggcttgtatgat

SEQ ID NO: 27314 - DNA, 422 bp, Zea mays
agcttgaagccatgggaagtagcattttttatttatatacgaatggactcaagcctagctacgggtgcataagtttctccaaaatccaaaccttcgacttgtgaataacccttggccataagtcgtgctttgttccttatcaccacaccatgctcatcttgcttgttgcagaatacccacttggtacatacaacattttggttaggacatggaactaaatgccatacctcattcctcgtgaagatggtgagttcctcttgcattgctagcacccaatccgagtctcttagtacatcctctaccctatatggctcaatagaggaaacaaaagagtaatgttcacaaaaatgagcgacacgagatcgagtggttacccccttatgaatatcaccgaggatggtgttcacggggtgatctctttg

SEQ ID NO: 27315 - DNA, 448 bp, Zea mays
  unsure (1)..(448): unsure at all n locations
tcgcacctctgaactaactcggctgcgtcacttttcgctgtttgacatagaatcctgacctgaagaccttcccgactagcgttttggatgctgcgtgtattccacattgcccggcgtgaacctcctctaaaagtcgcttcccagtggatgggacaatgcacttcatgatgacgcctgatgcatcccttctgtataatgtttccccaatgagtgtgtagtgagctgactgtctatcgatgcgctcggctgcatttttgtcatctggttcctcttcattctttatatacctggtgatcggctntctccagtcatcagagtctgattctggttgatttacgatattgcactcttctgtctggtccattgagatgttcggttgtggtatttcttgcacaaagactccatgtgggacctgagttcgactggaccctatcttggacagtacatc

SEQ ID NO: 27316 - DNA, 391 bp, Zea mays
  unsure (1)..(391): unsure at all n locations
agcttgtgaagattcttcatcccaatatgggcttgtctgtgatgccatagccaacccatattagtcttagcaattaagcaagtatcgagttcagctctattgaaatcaactaagtatagctgaccctctaatactccccataatgctactgaatcattacttctttcaaagatagtaacacctatatccgtaaaaagacagatgtagcctattttacataattaagaaacagaaagcaaattgtattctaaagaatctacaagaaacacattggaaatagaatggtcaggtgatataacaattttaccaagtcttttgaacaaaccttgatttccatccncagatgtgatagctttntggggatcttcttttttcatcgaggaagagaaca

SEQ ID NO: 27317 - DNA, 457 bp, Zea mays
cttcatcccaacatgggctagtcggcggtgccagagccaacccatgttagtcttagcaattaagcaagtgtcgagttcatctctatcaaaatctaccaagtatagctgaccctctaacactcccttaaatgctattgaatcatctcttcttctaaagacagtgacacctatatcagtaaaaagacagttgtagcccatttgacataattgagatacagaaagcaaattgtaatctaaagaatctacaagaaaaacattggaaatggaatggtcaggtgaaatagcaattttacccatacctttgaccaaaccttggtttccatccccgaatgtgatagctcattggggatcttggtttttctcgtaggaagagaacatcttgttctcccctgtcatgtggtttgtgcacccgctatcgatgatccaactcgagccccctgatgcataaacctacaaa

SEQ ID NO: 27318 - DNA, 411 bp, Zea mays
  unsure (1)..(411): unsure at all n locations
agcttatgaagattcttatccctttatgtttcttcggcggngccagaaccaacccatgttagtcttaacaattaagcatgtgtcaaggtcagctctatcaaaatctactaagtatagctgaccctctaacacacccttaaatgctattgaatcatcacttcttctaaagacagtgacacctgcatcggtaaaaagaacagtgtagcccatttgacataattgggaaacagaaagcaagttgtagtctaaggaatcaacaagaaaaacattggaaatagaatggtcaggagatatagcaattttaccatatcctttgaccaaaccttgatttccatccccgaatgtgatagctcgttggggatcttggtttttctcatatgaggagaacatccttttcttcccggtcatgtg

SEQ ID NO: 27319 - DNA, 444 bp, Zea mays
  unsure (1)..(444): unsure at all n locations
cccgcctggcagatggtgcaccggacagtccggtgccccatggccagaaaccctacttcttgttnttcagctgtttttaaatcggttttcgttctaacttatgggtgagttctaaagtgacacctagcactgtatgtgagtgtgattgtgcaccaacactacactagaactctcttggtcaaactactcatcgacaacccctctttatagtacggctaanagagaataaaagacctaactaaatcgcaagtgtccacatctccttgacactcggactccgtagagcttcaccttttgtttcatcgttttagccgtcgcttcgagttcttatctccgggattgttttcacgttgtagtacttctacctgtcatgcgacctaacttaccatttgtctctgcaaaacatacgttagtcacatataatattacgttgtcattaatcac

SEQ ID NO: 27320 - DNA, 421 bp, Zea mays
gcttgtgaagggttcttcatatccctctatgtgctaatcggcgatgccacatccagcccatgcaagtcttagccattaaacatgcatctagaccggcctcttcttttgctaaatcaactaaataaagtttgccgtctcatacacccttaaaagctagcgaaccatcacttttttaaagacagacacatctatatttgtaaacagacagatatatcccatagcgcacaattgactaacagatagtaaattatatcctagtgactctgctaaaaacacattagagatagagtgctcattagaaattgcaattatacctaaccctgtaaacttgccctgattcccgtcaccgaatatgattgaatcttgggaatccttattcttgacgtaagaggtgaacatcttcctctcacccgtcaaatgg

SEQ ID NO: 27321 - DNA, 359 bp, Zea mays
gcgcggaccgttcgggccctttctgttgtccgtccgcaacactataatgactctctgacagaaccaatgcagaaatacaagtttccattacggactgtccgaaggaaaagcaaagaccgtccaagccctcgcgcggaccgtccggccttatgcgcggaccgtccggtcggtaagaaaccgataaacccgaaggtaacgggttcggagaaatgaattataggggcctcgcggaccgtcctgtgtgcacgaccggaccgtccgcgactggctctgtctgacatctgacgacgcattaaatgcaatatagccgttgatatagccgttactgctgaccgttgcattttcagcacgtgatctac

SEQ ID NO: 27322 - DNA, 398 bp, Zea mays
  unsure (1)..(398): unsure at all n locations
acgcagcagccaaccgccgnatgctcttgtgtatgatgagaaacacgactaacggccccagctccagataatgattgcatcgcctttgtcaacccaaatcacatgaccccagctcccaagcattttttctttatcaaaggagccacaacaatcagcttcaggaatccttcctcaggtcttatcctggaacacctcagcctgccttcctgtcataaaggccactgattctgcacttctactctcaataaaaccatcaatttacctaaaaatagcacgacattcagtcgtgtgggctgtgttagagaaacaagatcacactatatactctataatcgatatacatagagatttttgtgaaaaaaacaactctccaacagcctagggaaagggctaaccaa

SEQ ID NO: 27323 - DNA, 376 bp, Zea mays
gtctcatggacaaggcatcctgcatggatccaagtcataaccaacataatcccgctttcaacacgaatacaatcaactcttgacctcgcgcgagtgctagaaaaatcactcgacttctaccgagatcctgattagcaagcagctactcgacctagcatactactattcatctcaaaaacgaatactaagttcatgcaactagaggtctcagcaactcctacacttaagtgcacattacaatcctacaagcattaagtgtagtaaagtagcatataataataccggtatgcataaaaccggtgcttgccttcaattgctggtgctgcggcgagatcctcaatagcagcctctaaagcctgctcctggtcctcctctt

SEQ ID NO: 27324 - DNA, 389 bp, Zea mays
  unsure (1)..(389): unsure at all n locations
gcacataagtnagtaagaaacatctaggtgtcagcacaaaatgagacgtaaaatatgtttcatgcagaaacattgaccacttagaattacagcttcacgttacagtaactagagaatacaattgcactccctctggtctagattgtaaggtgaaatggtctttctagatacatagcatttattatgtatgtagacattatgtatacttttttctcgaacgggcaggagaagctccgatcattatattaagaagaaaaaaggtgggggccaaaatagaccagacttaaatagacataatggctatctagatgtgtacaccaggcttgtacctacaagagtcaaaatgaattgccatttgaatggaggagaacaatacaaactgacctcaa

SEQ ID NO: 27325 - DNA, 318 bp, Zea mays
tcatgcatgtataggagagaagatagagattcaagtattaccagcttgtccatcacgttccacgaattactgacatatatatgtatgaagcatgggaaactggctacatgtcgtaccagagtcatacgatgtgcaaatactttctttagatgttgtttgtgtcgggcttcaaactctatgactatgattgtcggataccataataaaggtacccccaatacttttaagcatggctggaaaacatcttgaaaacagactgtaaagaccggttagcgcagttcaaagttgaagcctcgtctagggacgtgatctcgtctc

SEQ ID NO: 27326 - DNA, 402 bp, Zea mays
agcttctcctagacgagtgctgttcttaccgctgagagcgaagctgccacatattataacagaggagcccctggcgttggaggagtcagtgtcgctaggtctatcaaatattgcttcaactcctccaaggctttctgctaaactggttcccattgaaaaacttcagccgatttcagtacttcgaaaaatggtaagttctctctgtcgatctagatataaatactgtgagagatgccagccttcctatcaatcattgagccctcttttttgtacttggtggcttcattcaaaggataatcttcgatattgataggattacctaccaactcctttagatagactagaccgcccaaaattttcctttcttacatcaaaaaaacatttttctgggtcaacttttat

SEQ ID NO: 27327 - DNA, 451 bp, Zea mays
tcctggacatgcaccgcacttactacagagtgtgattcttccacattcagtagcagatgagcccctggcgctggtggagttatggttgttaaatctatcagatactgctgcagctcttcgaaagctctttgctgagctgatccccattgaaaaactttggctgacttcagcacttcatagaatggtaaatttctctttgctgatctggatataaattgattcaaagatgccaatcttcctgttagccgttgagcccctttctttgtgcttggtggctccattcgaagaatagcttcgattctatttggattagcttcaatacctttcgttgaaactagacaaccaagaaatttccctttcttcactccgaagacacacttctctggattcagcttcagaccagcttgcctaatattagcgaatgtctcctgcagatcagcaatgtgatttt

SEQ ID NO: 27328 - DNA, 291 bp, Zea mays
ttccctaagttttttcctattgggaaacttagtgacgttcttcttcccgagataaggcttcccgttgctgatactttttgaagctggcttcttcaatacaatatttttgactttactcgcttttcccaaaccgtttaaaataccttcacagtcaaccattacggatccgcccgctccatataagttaaagggcctctatcttttgaactattttgttgaaacccccaagggactctcctttggagaatcagaccatcccccattttcagattgggcctcttgctgccctgg

SEQ ID NO: 27329 - DNA, 382 bp, Zea mays
gcacttgtctttgtatttacttagtttcttcaagattggttcgatatgtgggacggttaggaagtgtacccctggaatgagatcaatctgatgctcaatcctacgaaggggatgtagtccaactggtgtttcttgtggaaacacatcttcaaaagcctgctttagatcaaccacaacactacgaagagatgttatgtcggtaggagaaattatagcttctttgttcacaagttcatagagcacttgatatgggttgttcctcacttctctcagctcagatcttgtggcttgcataactagatgttctccctctttcttctttctatctcttaaatctggcttgtagcactcgctcaccgaattgtggatggcactcaatttc

SEQ ID NO: 27330 - DNA, 376 bp, Zea mays
  unsure (1)..(376): unsure at all n locations
agcttctaaatggagaacacgttatttgtttgactaacgngcacttcgaaaaagatagaccttgtgcagcttgtcaagcacgtaaacaagtgggaggagcgcatcacagcaagaacgtgatgaccacttcaagacccctggagctgctgcatatggacctcttcggacctgtcgcctatctgagcataggagggagtaagtatggtttagttattgttgatgatttttcccgcttcacttgggtgttctttttgcaggataagtctgaaacccaagggaccctcaagcgcttcctcaggagagctcaaaatgagtttgagctcaaagtgaagaagataaggagcgacaacggatcctagttctagaaccttcaagt

SEQ ID NO: 27331 - DNA, 336 bp, Zea mays
  unsure (1)..(336): unsure at all n locations
tcgtgtttgcacccccatcatgtttgtaatcacgttttgcttgttcttctatgatcctgttatggttctgattggcgctcaataagctgtactgatccaagacccttgtaagaagtgagtcaccatcaatatcaaacgcgaatgatttccgttcggattatgcctccgtggaatgtacattcatttatgctcaacccccaacaagtcttctcactatctgttctaactgcagaaaaactgcacatttatgtcattaaacatctctgtaccacagtatgatcagatngcctactcttttcatgtgctaattggcctcatacttgctgacttcctgtt

SEQ ID NO: 27332 - DNA, 425 bp, Zea mays
cgcctatgaattattcaatttgattcaagcaccatctcttaacatagattttctatggataaatccaacacaagagatggtatcagttgcacaagcactagattcttatttagcaaccctttatatgtggaagacatgtgagttgctaaaaataaagaaacctcataatatggaataaatctcccttgatccctcatgcataatacattttcgaatgacatggatttagatatgcatggctattcaatgaaggtcaaaggtataattctaagccatattatggcgagtgtctattatagaagaatccaatccaaattacctagatagagagaatacttcacatagttttgaattgttgaccatatgataataataatttttctctcagctggacctttaatttttaaataacaactgctgtatac

SEQ ID NO: 27333 - DNA, 429 bp, Zea mays
gatagaactaatggtgatttaatcaatgaattgactgatgctctaaatgaatagaatagacttttagaaaagcaagatgatattttatatgaagagcatgataagtttgtaagtgtgcaaaagtctcttgctttaaaggttaaaaggaatgaaatgctttctttggaattatctgcttgtcatgaaactgtgtctagcttaaagagtattaatgatgatttaaatgctaagctagaagtagttaataaatctagttcttgtgtatagcatgttgtcatttgtaatatgtgtaaggattttgatggtgatgcatgtgttgagcaccttacttctattacaaaattaaatggtgaagtggcatgtcttaatgcccaacttaagacttgcaaaatgactttgataagttaaaatttgctatggatgcctaca

SEQ ID NO: 27334 - DNA, 435 bp, Zea mays
agcttgtgcaaagtccactcgaactaatcttcggagatacccgacctcgctgcaacatgactccagaaggtccaacacaacaagcattgaatgaattcagaattattgcagagcatatcagttcaagagacctggttcaagagtttttggctttcaaagtttttcctagtttgaaagaatgggaaatgccgaagctgaagggggagaagaaagaaggtgaacttgtgcgtttaccttactatttcaagtttaagaaatactttaaaacaccttgccaagagtggctggatacaattgaagtaatgtgtaatgaaatacttggcaactactccaaacaagaagatcaattgatgactgcggctcttggcacccgtccgaagcgaagactgaaccgagtgctggacgccttgtgttttgaataccctgactatgaaa

SEQ ID NO: 27335 - DNA, 462 bp, Zea mays
  unsure (1)..(462): unsure at all n locations
tagctggctttattgaaaaaaaaacattagataaatcttttcctttaacacacctttataagggaattgaatcttcacttcttctaaagattgtaacaccaacatcggtaaataagaaatttgaacccatttggcataattggaaacaaacaataaattgtaatctaaaggatctaccaagaacacnattgacattgaatgtttaggagtaatagcggttttacctagatcttttacttgaccttgactcccatcactgaatatgattgaatattgagagtctttatgtttttcataagatgagaacatcttcttctcacctgtcattgtggttgtgcatccgctatgaattacctatattgtgcctccggatgcataaaccaacaaaatataattaggccttgttcttaagtacccaacttgacttgtgtcctttcatattatgtacaagcacctatggta

SEQ ID NO: 27336 - DNA, 436 bp, Zea mays
  unsure (1)..(436): unsure at all n locations
gcttgagaagggccttgggccatgtataaatataaacacanaaacttgactaatgagctaaaaacttgcaatggggtcacacccaccgagagcatagtaccccatcattcatcctctcgccaggtggatacacaatactctcgcgatctctccactcccattgtgtgtcaacatttctggtattggttaagctgagattatgcttgacctgtcccataccagggcatgtggccagctaaaaggtccttatcaggaggccaacaatcggagcagttcttatacgacatagacatgcgaccttttctgctcaacgtctggtctcattttaaactatttctcaaaacttgtacttgtcagaggtaccttgctgaaatgatgaattcatcaaggccttttgatgccttcatcattctaaaccttttttctcttgtaaaat

SEQ ID NO: 27337 - DNA, 307 bp, Zea mays
tactaactgccatacctgtcatagcaacatcacatgccatcacatcttcttcataccataccagtaacttggcctttcgcatgctggggattggatatgattggacctttcaaaaaagctcaagggggatatactcatgtactggtggcgattgacaaattcactaagggcttgttcggttaactctaatgcatgttgattgttctggattgtatgctttcgacctcaatcttactatatatgtcaccttgtctacattcccttcaatcatttttattggtatcaccgatcatgcccataagtatat

SEQ ID NO: 27338 - DNA, 162 bp, Zea mays
agtcaagccactcttttctgctcagtctccgcaaatctttattctacgtgactgcggctttgctattcaagatttttctgggggtatctccattgcattccaactagagccgataagcatattatcgccctctatatactactaagggacttcaggggcgaa

SEQ ID NO: 27339 - DNA, 394 bp, Zea mays
  unsure (1)..(394): unsure at all n locations
ttctacacaagcgatcggatggtgtatgctacttctagtttaacaattaaatcattgttgacacctttaaaagtagaaatggtctcatgacaagtagatagtgcaaaagaaagcatttgatatctcttaacttctgaagcatacgatttttgtgcctcaacaaatctatcatgctcttcatacaacaaatcctcttgcttttctaaaagtatattcttttcattcacggcatcgagtaattcattaattgtgactatcgtagatctatctangcccttgaacaaacatgaataatctacttcatcctcatcactagattcgtcctcacttgaagaagcatatgtagagttgcgagtacataccttcttctctcttgccataatgcatgtgtgac

SEQ ID NO: 27340 - DNA, 436 bp, Zea mays
  unsure (1)..(436): unsure at all n locations
agcttctaaagggagaacacgtgatatgtcttactaatgtaactttcaaaaaagatagaccttgtgcagcttgtcaagcacgtaaacaagtgggaagctctcatcatgccaaaaatgtgatgacaacatcaagacccctggagttacttcatatggacctcttcggacccgtcacctatctaagtataggaggaagtaagtatggtcttgttatagttgatgatttttcccgcttcacttgggtattctttttgcaggataaatctgaaacccaagggaccctcaagcgcttcctaaggagagctcaaaatgagtttgagcttaacgcgaagaatataaggagcgacaacggcgttcaanttcaaaaccttcaagtggaggagtaccctgaggaggaaagaatcaagcacgagtttttcgcttcctacacaccaca

SEQ ID NO: 27341 - DNA, 344 bp, Zea mays
  unsure (1)..(344): unsure at all n locations
gaccgacttgccactggagctcctaccatggatctattcgcccgatcgcttacataagcatcggcgggagtaagtactgtctagttattgtggatgattattctcgcttcacttgggtattctttttacaggaaaaatctcatacccaatagaccttaaagggattcttgagacgggctcaaaatgagttcggcttaaggatcaagaaaataagaagcgacaacgggacggagttcaagaattctcaaattgaatgcttccttgaggagganggcatcaagcatgatgtctctttctcctacacgcctcaacataacggtgtaatggagatgaagaatataact

SEQ ID NO: 27342 - DNA, 471 bp, Zea mays
  unsure (1)..(471): unsure at all n locations
ctaagcttggaatagtgccgaagcttcctggaggccatcaagacatgcatacaataccttctccagctctgtataattattctttgacaaactaagaacctcggatacaaaatatattgtggcctgcctcttgacttgaccatcatgcttctcctggacaagcgctgcacttaccgctgagtgcgaagctgccacatataataacacgggagcccctggcatcggtggagtcaatgttgttagatctattaaatactgtttcaattcttcgaaagccttctgctggattggtccccattgaaagacttcggccgacttcagcacttcgaagaatggtaaatttctctctgctgatctggatatgaatctattgagagatgccaatcttcctgtcaatctttgagcccncttctgtgtagttggtggctccatccgaagtatagcttcaattttacttggattagcttcaat

SEQ ID NO: 27343 - DNA, 339 bp, Zea mays
atcgcatctagggcttgtctaacctagctgagataaccgccaacaaagccagtgaaatagcttatcttggatcacactcgacaagtcttagttttaagctttcagcacttatattcttactttttatgcaattgctggttcttgaaacatgcatgagggactgtacttagggggaagaatcaaaaactcacatgcctcatgaaaacccctagtgcagagccaaaatgccaatttcaccatttgcctattttctctaaaaattatctagcctacggcaaaatattttgaaaattatgagaaaatatatgaaggtgccaatacctgtcccaccaagtgttt

SEQ ID NO: 27344 - DNA, 392 bp, Zea mays
ctatatgcaataccagaaatttgtatatgcaatgcaagcttgacaacaccatttgagatctttaataaaatttctgaaatcaagtatgtttaattcattcctcaacatgcaaaagcgggttttatcaagtggcttagtgagaatattcgctaattgatcttccgacctcactccttctaaaataatgtctcctttagcaacatgatctctaaggaagtgatgacggatatcaatgtgcttggtgcgagagtgttgtacaagattattagcaattttaatagcactctcattgtcacacaacaaatgcacctgttctagaactacaccatagtctagaagagtttgcttcatatataataatttcgtacaacaagcacccgcggcaatgtatt

SEQ ID NO: 27345 - DNA, 270 bp, Zea mays
tctcaatacccaactttaacacccatcttttctatattcatccatttctacaaaggttttcttagaatacatctaagtatgtccttcttttgttatcacttccaccttgatagtcacgtacatggaagtgaataggttaaactggaaactcacaacttacacataaacatgtgtcaaaataaagtgtattccacaaactaactcaaaaagaaaaaaaaattcttgcacttgattgctctccacagattacagaataaactcggccatatc

SEQ ID NO: 27346 - DNA, 262 bp, Zea mays
cttcatgccaagccatccaagagaaagctttggtgaaagaggcaatgttcttaagtctgcatcttctgaagtgaaatccactaagtagaggttgttgtatctaaatcccttgaataccattgattcatcatccatttttgttacaataacctctgatggagtgaataacattgaagtccaagatcacagagttgtcccactgataataaattgatactcataggtgcaactaagagaacatttgatattgataaatcatttg

SEQ ID NO: 27347 - DNA, 329 bp, Zea mays
ccctattattctgatcgactaacctataaatacttaagcactctaaggaatttccaaatgactattcttttaaaattacaagcaagctgatccatgctaagtccataatcccaaccgccattgaataataaaccaacagtctagcaccacacataaacctatctccacaaagtctggagcaagcgccttggaagcccccacatacaacctcatgcgtcgccagcgccttggaagcctccacatacaaacggataccaacctcacgcgttcctagtgcttggaagccccactgcactctatttccgaacagataatttttgacctggggt

SEQ ID NO: 27348 - DNA, 329 bp, Zea mays
gtttttctgctaccgaaagtacttggttctctggtctctatgacgcaactagctagaattataacccgcactcttcccttccttttctatattccttataccttttgtccttcattgtacaacttcctgcccttggacctctttttgaaaaaaaaactctactcgacgggttactcctacatattcaggtccaaaaaataactaacatgataaaatatattttgacgaaacacatgttaatcgcggaatctgttaaagccatataccttcggaacatggattgaacgaatctaaaatactatggcaaaacgagattttgaataaaccaa

SEQ ID NO: 27349 - DNA, 409 bp, Zea mays
  unsure (1)..(409): unsure at all n locations
taatcatagatggagtctgcattgctaccgttctcaaacatatgtgcggcaactctgcacttctggtgggagagaattcatggttgactgcatcggttcaccaagtgaagtagaacgagtgctcatctatcctctccaagatgtgaatgaagatgctcctccgcatgcattatcttcgatgaatgtagagcggtgggtatacgcatgggtcgttgcagttgtcttgcatcaactgtttgtgggcggcttcacgattctagtagatgtacctctgacgttacctcagttgcctactcgacatggaagactcgacaacaacctctgtcacctactgcagcaactcaaacaactattctttggtcatgttgatgtcggagtccaacgaagacatcangacaacagatgattc

SEQ ID NO: 27350 - DNA, 340 bp, Zea mays
ctcactaatgttcaaatccaaaagataaccttgtgcagcttgtccaccaaggaaacaggtgggaggctctcatcacaccaaaaatgtgatgaccacatctaaacccttggagatgctgcatatggacctttttggaccccgtccctatcttatcatacgaagaagtaagtatgggttagttattggtgatgacttttcccccttcacttgggtgttctttttgcaggaaaagtccgaaacccaagggacccttatacgctttctcaggagatcttaaaatgagtttgagctcaaagtgaaaaagaacatgagcgacaacgggtccgagttcaataatctt

SEQ ID NO: 27351 - DNA, 432 bp, Zea mays
ctcacatttctgttgctcatttatatacttcaatttgtataattggctcaagtcataattttaaacttttcatcccctcttttcttattttcttgaattatgctcatggggctcacttatggttgtcattatggttgtacattcttatctttttaaaagactcaatttgtttgatcatgatacttttaagtatatactcggtgaattctttcttacttaagttaacttgatgctcatgcttactttggttcacataaaataatggttcttgggttggtatgtgagagaaaccctatgtgacactgggttgtcacacgaatccacgatttgatcgatgcgatgcatagggtatggaaccttctgacatgcttttgttataccattgtagtctacacacatccgccatttccctcctgtctttcttacaagcac

SEQ ID NO: 27352 - DNA, 403 bp, Zea mays
cgctaagaaatgcacgtgtgtcattgtttagatgcgaacttctctatatgactgtgatctatgaattgcatagaaagttgcgcataggtcccccgttaaacgagtgtatggaatgtctttagatgatcgctagacaaactaatgaaatgccgtattaatataaaaaaatgcttactgcccgagacgttgtggtgtggtggctatgtatatgacattgttagtctgtgcttataagtgttaaaatcgctagtcaataacgtttggctaattaccacccacatatgatccgtggcggtacacgtgtctctcgcctttatattatcctgctagccgtgtgtcctataaaacgcggggcgattattatttattaatacatatgcatccagcattgtatttaaagacc

SEQ ID NO: 27353 - DNA, 199 bp, Zea mays
tgaccgctgtgttgccataagcggcaatgatttgcggatgccctattatactctcggacactgaaatgtgaagcgtccacttgtcattgatgctgtattctacaaagcgaatgtgtcttttcggaccatcggcgttaagccttctgccatatcggaatctaaatgcattatttcaaacgaattattattggaaggggct

SEQ ID NO: 27354 - DNA, 367 bp, Zea mays
  unsure (1)..(367): unsure at all n locations
gcatgccaaacatggaaacaagatggtgctcatcatccacatatgaacatcatggcgactgacaggccactggtattactccacatggatttattcggcccgatatcttacataagcatcggcgagagtaagtactgtctagttattgtggatgattattctcgcttcacttgggtattcttcttacaggaaaaatctcacacccaagagactntgacaggattctcgagacaagctcaaaatgagttcggcttgaggattaataagataagaagcgacaatggaacagaattcaagaactcacaaatagaaggctttcttgaggaggagggcataaagcatgagttctcttctccctacacgccac

SEQ ID NO: 27355 - DNA, 435 bp, Zea mays
agcttctccaccaactcaagataaggataaggctcaaaatgatgaaggagaaactcaagaagttgagccacctcaagaggagagcaatgatcaagggggagatgcccatgatcaagatgaggaagatgaacaagttccaagatcgccacacccaagagtccaccaagcaatccaacgagatcaccccgtgaacaccatcctcggcgatattcaaaagggggtaactactcgatctcgtgttgctcatttttgtgaacactactcttttgtttcctctattgagccacacagggtagaggaagcacttcaagtttcggattgggtggtggcgatgcaagaggagctcaacaatttcactaggaatgaggtatgtcatttagttccacgtcctaatcaaaatgttgtatgaaccaagtgggtcttccgcaacaagca

SEQ ID NO: 27356 - DNA, 438 bp, Zea mays
tactcagcttctaagggagaacacgtgatagggttgactaacatacaattctaaaaaatagaccttgtgcagcttgtcatgcatgtaaacatgtgggaggagcgcatcacagcaagaatgtgatgaccacatcaagacccctggagctgctacatatggacctcttctgacccgtcgcctatctaagcatatgaggaagtaagtatggtttagttgttgttgatgacttttcccgcttcacttgggtgttctttttgcaggataagtctgaaacccaagggaccctcaagcgcttcctcatgagagctcaaaatgagtttgagctcaaggtgaagaagataaggagcgacaatgggtccgagttcaagaaccttcaagtggaggagttccttgaggaggaatggatcaagcacgagttctccgctccctacacaccac

SEQ ID NO: 27357 - DNA, 436 bp, Zea mays
  unsure (1)..(436): unsure at all n locations
agcttaagtttcacaggatcacctattcaccccccctctaggggctctcaattggtatcagagccattctcttcaagaaagggactaaccgcccgaagagatggatcctatagggaagggaatcgtgatcaacgataaggagaaggagtccttcttcaacgagcccaaagatgacaagcctaccgacaccggctcgggccatagacggaaggaagggaagaagaagaagacaaggcgcatcaaggagatcgtctactacgacgacagcgacgaatcttcctcttcccaaaaggacaacgacgacaacgactatgataaacaaaagacggctaactcaaacttttcttttgattattcgcgcattccgcatagctcanatgctcatttgctccccattccacttggcaagcctcctcactttgatggagaggactac

SEQ ID NO: 27358 - DNA, 434 bp, Zea mays
tctaaagggagaacacatgataggtttgactaacgtgcatttcgaaaaagatagaccttgtgcagctcgtcaagcaggtaaacaagtgggaagagcgcatcacagcaagaacgtgatgaccacttcaagacccctggagctgctgcatatggacctcttcggacctgtcgcctatctgagcataagagggagtaagtatggtttagttattggtgatgatttttcccgcttcacttgggtgttctttttgcaggataagtctgaaacccaagggaccctcaagcgcttcctcatgagagctcaaaatgagtgtgagctcaaagtgaagaagataatgagcgacaacggatccgagttcaagaaccttcaagtggaggagttccttgaagaggaagggatcaagcacgagttctccgctccctacacaccacagc

SEQ ID NO: 27359 - DNA, 107 bp, Zea mays
tttagctttgggctacacccaagtgtatgctaaattctatactaaggtaacgaagcattactttacaaactgatatgtgtgccatattgaaataatggctctcattc

SEQ ID NO: 27360 - DNA, 469 bp, Zea mays
  unsure (1)..(469): unsure at all n locations
tactcaagactgcttcatcgtactgcccttgatcatgacaaatctaatgtttacttatttattattataaacaaatggttatgcgtgtttctgaggaccttcaaatgactatggcccccatcaagtactcatgtgaagcgttgtacatcaaagggatgaacaatgcaccgatgcgaggggaggggagtctaagggtacctttggtaaagggcttataacccttctaatagcatctacaacaacttttaaattatatgttgccataagatcaagattggaatctccttaaaaataataaatctaaaaatgacaatactccaacatcttcctataatttttctaaagctctttgnatatggcaacatctatgtgctctgctgatgcattggaacagtcaatgtcgctagactgcaagccgtggccatagccgctgttgatggcgggctcaacgtgatcaacaacatggttc

SEQ ID NO: 27361 - DNA, 351 bp, Zea mays
  unsure (1)..(351): unsure at all n locations
tgagaggaactgcccaaggtgtttctttttactagatcttttgtgacaaagcataccccccaccgaaacctcttccaaagatgaagtattttaaaaaatctacaaaaatgtttttagaaaaatattactaaaggccctacanaaaccccaaatcagttcactaagtggagagcacaatagagccatcaaaatttctctaagtcccaaaaccaaccgtaacctaaagatcaaatgtgtacaccctttgtgttggcgcccaaaccacttggtccaaataaccaaaaagggcctattacccaaggcacaccccttaaaaatatgaaaccaaccaacgtcgtttgacatggttgg

SEQ ID NO: 27362 - DNA, 448 bp, Zea mays
cttcctttaaaaacatataaaactacttctcttttctgccgaagctttcctttacaaaacataaaaaactacttctcttttctgccgaagcttccctttacaaaacataaaaaactacttctcttttctgccgaggcttttctatacaaaacataaaaaactacttctcttttctgccgaagctatcctttacaaaacataaaaaactacttctcttttctgccgaagctttcctttacaaaacataaaaaactactactcttttacacaacgattcataaaaaaccagttctcccctatactgaaacttttctttgtgccaaagcaacgaaacttttcactttggcacacaacatatcgtaacaagtcataaaaaggcacttctctgaagactttttgccgatacagccacttgggaacacaaatgctatgaatgaatgactatgta

SEQ ID NO: 27363 - DNA, 329 bp, Zea mays
agcttatgtcttgacttgattgggctctcccacttgggctccagcttgcccctggactccgtcctagctgttcggacgagtacgaggtccccttcgctgaacttcctcaggatgactgcgtggtcgcgccatgctatggtctgggcttggtattcgtttagggcctgtagggcgaacacccggtctccgtcaatgagatcttttgaaggtggctcgtccacgtcagggacggctgacggaactgtacgccgggacccatgctttatttcttgcggggtcatgggctccgatccgtatagaaggcggaaaggagtgaacccagtcgccct

SEQ ID NO: 27364 - DNA, 394 bp, Zea mays
  unsure (1)..(394): unsure at all n locations
agcttaagtgagatagttataaaatggttctaaaaagggacttacattacattcacacccttgaaataccaaagaccctcaaaagaccctggataaccctaaattcaaaccctagggggctaagtgcaaaattagtccacttttggactaaagtgcaaaaaccatgataataaagtgtcctaagtcattaggctcacaatcatgaagattggcaatccaaaacttgagattcggacttaagtgcaaaagagccacacttgacccntttgatgaagtctgaatttcagtgtgattgattcaactttgagcccatgtatcttccaaattagtgagaatttaccctacgtcaccacactaaaattgtaaacctatcaaaggagaacaacttttctta

SEQ ID NO: 27365 - DNA, 315 bp, Zea mays
  unsure (1)..(315): unsure at all n locations
atttaactttctaaatgttttataactaataccctctgcctttttattttcaaatcaactcattttggtagaaatacagcttcacgctagatagtccagcatagagacgacaacggtgaattctcagtcggagaatagctcctcatctcatccccgcgaagaaaacttttctggcggaggacattgttttcccattcctagtccccgcggtgataaatccccgatacggatccccgtcccgacgtanattataattagaacatatatcttgtggtattaatataaaatatgatcactaatatatatcgtcatatg

SEQ ID NO: 27366 - DNA, 318 bp, Zea mays
agcccatgctagttatagctattaagcaagcatctagaccggcctcttcttttgcgaaatcaactaaataaagtttggcgtctaatacgcccttaaaagctagtgaaccatcccttcttgttaagacagacacatctacatttgtaaatagacacgtatatcccatattgcgtaatggactaacagatagcgaaatatatcccagagactcaactaaagacacattagaaattgagtgctcatctgagagtgcaattttacctaacccttgtaccttggcgtgagttccctcaccgaatatgattgaatcttggggat

SEQ ID NO: 27367 - DNA, 460 bp, Zea mays
tttatctcacttgcagctccacctgaccagctgaaatgtcaacctcttctccttgactgaagcgtccaattctaccataaagttcttcacaatcaagtgctctcctttcataataaaagccaatgcgctaggaatgaaatccctcatgaaaacctgcaccaatgtataattataatgtatttttgcatgcacaggcacaattataattcatgcatgagataactaagatgtatttttgcaggaatgcaataatgtacacatgaatactcaccatcaggattataactgccatttacgataaccatagacgcaaaacaaatagtaatagaagggtgtattgaataatataaaaatagcatggaaattttaaagttggcagcactggcaacacttcgactggatacggaaaatgtcagtatgtcacctggtcatagttcagtgctgccccctgagacttgtc

SEQ ID NO: 27368 - DNA, 338 bp, Zea mays
agcccctcccataatggttatttaagggcagaacatgtctactatgacaaaggatacttgctcagtcctcgcatttggagttgtgctgagggataagggcaactcaatcttgaccaagggtaatgtgccctttcttccaaacaatacatggggatgtcagctggctgacacaagctatggatgatacccataccatcgaaggcatgctaaaatgatgccaccttgagttccattgtcaatgaggacctcgtgcaaaatccatcctgctacattgcaaaataaaaaccaccaccgtctgaatgtggggcacagagaacgtccatgtcccttggtggggg

SEQ ID NO: 27369 - DNA, 376 bp, Zea mays
  unsure (1)..(376): unsure at all n locations
tgatggacgaactgagtggtgaaacgtacattgtcaatgctgttgcgaacaatggtcacaaacaacatgaaagactgggacgaatgtttgccacacgtggagtttgcttattaataagacagtacattctacaacttatttatgcaccttcgaaattgtatatgggtttaaacctattgctcccatatatatgttgccccttccattgcatgaaagaaccaatatgtgaagctttcaagcgtgctgcatatataaataagatacatgagaagaccaaggaagcaattgagctcatatcattgcgcaaggctgcatgtatgaacaagcatacgaagaaagtgttatttgaccnggtgacttggtttggattacttgc

SEQ ID NO: 27370 - DNA, 426 bp, Zea mays
  unsure (1)..(426): unsure at all n locations
agcttagatattagtttgctattctcagctcaanggatactgcataccttaattcctttgtagccaagcctttcgccaagccctccggctacaagaacaaatgcagcattgcaggcttcttttatcccagctgtttccagtgaaacaaaattgtcattgccaaaagtcaaaacctcccctgaaggcacctgtaagtaaggtatggcgaagtttattagttgtgtcatcaagaagagaggaaaaataaaggaagtagagaattacccaaaataacttaaagaacatccatttcaaattattaattcaaactattcatagaacaactcccatgaaaaggatagatatttaggccacactaaggagaggctagcttttatctattagttaggagaggctagcttcttggtttttaaaaactaagaatct

SEQ ID NO: 27371 - DNA, 438 bp, Zea mays
  unsure (1)..(438): unsure at all n locations
cgatgatgagtgtgtctctcagctggaattgaatgagatgatgcacgtgatgactgcagctnttaaataaataccaagactctgcgacgacattctatgagcagcttgatcgacgagtngctgaacttgttacacgcatggacatactggagcctcgttccccaccaccaactccatccccagctcactctcctgtggacgacgacgacgatgacgatgtttatgcaccgccgcgacaacatctcgcacgtaatcgacaaggtatgggaggtaatggtagacgtcgtcatcataatcctgaaccataccatgatccatttgctaagattaagttctctattccaccgttcatgggttcttatgatgctgaagcttacttatactgggagatgacggtagaacacatatntaattcccatcttggtcctgagcagcata

SEQ ID NO: 27372 - DNA, 213 bp, Zea mays
aattcattataggtgctgctattatctgacaaactatgtgttgttaccaccttaattaacctatttgtactacaatgcctttgtccatggtcgggctgacgccctacattgctactgtcgatatccctttagactgagtgggggagcaataaggtcacgtctgacaccttgttacactacaatacaaagatagtctagaccgctctcacaatt

SEQ ID NO: 27373 - DNA, 368 bp, Zea mays
acgataaacaaggtcagttcaccttataaaatcactagtatagctgaccctctaacactcccttaaatgctatggaatcatcacttcttctaaagacagtaacacctgtatccgttaaaagacagttgtatcccattttacataattgtgatactaaaagcaagttgtaatctaaagaatctataagataaacattggaaatggaatggtcaggtgatatagcaattttacccaatcctttgaccaaaccttgatttccatccccgaatgtgatcgctctttgggggatcttgtgttttctcatacgaggagaacatcttcttctccctgcatgtggttgtgcaccgctgcgatgatcacttgacccc

SEQ ID NO: 27374 - DNA, 352 bp, Zea mays
cggaacttaagcaccgagctgcacatatgtgcaggtcattattgtttcatccaaggtactacctggctggaaaaaaaggggaaaggagatggcgaactcactggttaacaaacatgtcgaagtccctccctctgctcgcatcgatcaaattgggactcactgtgggtgcaaacctgtattcctcacgcctactcaggtataccaattaaatgaaagatccaccgctcgcgactttttatcaacctttggatgtactgtaacactatccttggcttgggaagcaggcacatccaagggctgaccactgttggaacacatcgcgaccgcgagttactcgatactcttttaaaca

SEQ ID NO: 27375 - DNA, 364 bp, Zea mays
  unsure (1)..(364): unsure at all n locations
aacacactatcatgaaagggatccttagatggcacaaaggtaatggatangtgtcataagtgatgtacctttgcgttttaccttttcaaggggtttccagacttgtgttggatttagaattcatttgcaagctcttgttggcataattgtgacatatgtccaagatatcaaattaagattgtcatactaactgaaagataaatcttgatacctggagtctagatgtcacctatcattttcttatcacatcaagaggcatcatgaaaattgcacaagtatggattatgcaactagtgatcatgtatgaaaaatatcaatcgaaaaacaccaatggatacaatttgatagataaatagatcactta

SEQ ID NO: 27376 - DNA, 109 bp, Zea mays
tgccagtctgacacatagctttaggaggtatcttagtaaaatgatcacctggatgttattaatatttgagaacattaattacctttccaaaaggctaggaacactttgt

SEQ ID NO: 27377 - DNA, 377 bp, Zea mays
  unsure (1)..(377): unsure at all n locations
gagaacatgtgatacgtcttaccaatgttcatttcgaacaagatagaccttgtgcagcttgtctagcacggaaacaggtgggaggagcgcatcacagcaagaatgtgatgaccacttcaagacccctggagctgctgcatatggatctcttcggacccgtcgcctatctaagcatagggggaagcaagtatggtctaattatttgtgatgacttttcccgcttcacttgngtgttctttntgcaagataagtctganacccaagggaccctcaagcgcttcctcaggagggctcataatgagtttgagctcacagtgaaaaagataaagagcgacaacgggtccgagttcaagaaccttcaagtggaggaagttctt

SEQ ID NO: 27378 - DNA, 442 bp, Zea mays
  unsure (1)..(442): unsure at all n locations
agcttgtctagacacagaccgcanaatcctaataggcgtcctaaaatatagttagcttaccatggaaaggtaaacgaaaaccaagcaaatctaaacaaaaacgagacaaaacgtatttttaacgctgctatcatctccaggaagacacgcaaccttggcatgtctcaatgtcggcgtcggcgaagccttgcagtgagaagtgaaaacagaaaagaagaaaagaagtggtaaaatagggtagcagaaaataataacagtgaagaaataactttgagactaaaaaatcttctgatctgatcaatggtcaactttctgtgtagtggtggttgttaacatatttttattgacatttttcagaatcgccacttgtagaggctagtagaaatatctcttttcacatgcgggtaataaaggaccgtcagtgagaatcaatttgtactag

SEQ ID NO: 27379 - DNA, 387 bp, Zea mays
  unsure (1)..(387): unsure at all n locations
tcacaagtgcgcattcgatcgatttgagtgccgagagacttagcactgtgttcatttgagtattgcaaactcttgtgctcttgatttggattttcattctcactctcacccccattcccattattgtaatgttgaaagggaaatgtgcccttgggccatttctaagtattttggtgtttaagtgccaacacaagtggtgtaagtgttaaactgtgccaaatggtgaatgaagtgcaaatcaacacaaaggtatgattctagacttagtacattgttttctgtgtactaacatatttgtctaagtgctagaatcagagaaaagacaaaagaaaaaagggacttggctgtgcagccaagactctacgcagtctgngtgcaccggacagt

SEQ ID NO: 27380 - DNA, 315 bp, Zea mays
  unsure (1)..(315): unsure at all n locations
acgatcgctcgcaagtaagcgcaccttcctattattcttctgaactgttttagattatcacgccgagggccggccggcatatttgtctgcgcggtttctatgggagtgatggatttttggtttgtttatttttgtgcgagaccatagattcngtgtgtgtattgctcatcttgcgaagttcgcgaaggttttaggcaggtttctgagacgcgagtgtttttttgtccttcctgccatttaaacctacttttcacgcccggattttccccatctttatattagttgacagaagcgtttcgtgagagagttagtata

SEQ ID NO: 27381 - DNA, 337 bp, Zea mays
aacatgccctctggagcgcatataattcatcaaatgtcacctgcttcgctatttctaacaacaccggagggattgttgaaaacaccatacccatgccccgttgatgcctaaaccaacaagaaaccctctgtcactctgtgagcaaacttttgatcccttgaacttcttggtaagaataaatatttacaaccagatactctataagcatcaactctttggttgttccaatgaaacactctatgcaggcttttgtacttttgtgaagataaaacgggtgatagctgacaggccgttatacccgcctcacccaaaattggtagggcttgactcatcacat

SEQ ID NO: 27382 - DNA, 483 bp, Zea mays
tctaccatgatgtgattgtccctggtcggagagaagagtaccatgtctgggccacacttcggactgccatgacgaaggacttcgccatgattgcggtgttgcctccgtacgaagatttagttgcttcgtagctcatcagaaactgcttctgatctgagtgcccatcatacatggggagctgaggtggcttgtatgatggggggccatggggtagcctgcagttctgctgatagaggagaagcatcatccaaagcaaaatttccatgatggaaatcgtcataccaatcatcatcattgtagaaattatcttgacgaagctctctttgtggaggtcttcggtcctggtcatcttgagtaagatgacgtatttcttcaacaacttcatcgatcttcttctgtagatcggaaagaccaagcatcttctctctcttctttcacctgttgatggatagcttcagatcctgatctctggccagctcttct

SEQ ID NO: 27383 - DNA, 424 bp, Zea mays
  unsure (1)..(424): unsure at all n locations
agcttggttcgcgcggcctgtcttcacagttcaaaacagcccgcgccagggaccaaagcaaacagctcgcgcccgcctccttccccggcgccaaaacttctaaaatatttcccgcgcgagcgccagaccggagccaaaacgaaactacattagcagcgaaccccgcggcggcaaggctaaaaaacgcgcataacctcgagcgccgctcgcctnccgccatttccttcccaaatctaccttatcatattataagcgcgcgtagccttggcagctcgacgcatcttcgcctccgctcaacgctcgcccacgcncccagcccccaaccgatccaagagaaaccttctcgcctccgcgggacgattcgccagggagagcaaaggtagcagaggcgccatggactgctgcaagtcggtgacgccgggcg

SEQ ID NO: 27384 - DNA, 357 bp, Zea mays
  unsure (1)..(357): unsure at all n locations
actgtaagacaatgagcgagaacctcgcgacttaaagcatctgccaccacattagctattcctgggtgataatgaatntccaagtcataatctttgattagctcgagccaccttctttgtctcatgtttagctctgattgggtgaagatatacttcaaacttttgtgatctgtatacaaatggcacatattccccagaagataatgaaggcaaatcttaagggcaggaactaccttagtggtggggacatgntctcaaatgcttcgagttaagaacaatggcaacataaaaatgtaaatgctaaagtccttcgtccttcgaagcattatctnccctcgggtataatgaatttcggac

SEQ ID NO: 27385 - DNA, 413 bp, Zea mays
agctttctcaccatatatagcatgcttaatgaaacttcgtagaatgatgcagtttaatacgaaaacttggtcatcaagctgactgttgaccttctgaccagtcggcactaaagtaggtcggctgcctttctggtagatgtggttaagtcggctttagaagcattggaaactagacttcaatagctttccaaaaagtacttatgtgccttcatagcttttgggaatcaaaagatatgactgtttcttttggacggttctattgcgctggactgactcggatatagctcttcttgctgattcacccttgatatgttttggccttcctctttggtgaacctaggtaatatcaacatacacgacttaggtagcataaaattctcattagtggttaaatgaaattcataaagtagcgc

SEQ ID NO: 27386 - DNA, 379 bp, Zea mays
  unsure (1)..(379): unsure at all n locations
acctangtaatggtcaatggggagtagctctctttgggcagaaaaggaatcacgacttgtgggtaaagtgcacaacctctgcagagtgtttgaaaactgatatatcagtcgtgctcgcggttatgagcggccaagggagctccagtgattagagatgcttgatcagagatgttcgtgattgcaggtggcaatgagattgatggttcttgggtntgactctggtaatggtaagaggtactctctccgtttggaaagggagtacgttaggttaataacgtgggctaaatctaaaacttggctttcctactagtaacaataataatctgaccaactaaaagcaattgcttgacttacgcccacataaagctagttcactaca

SEQ ID NO: 27387 - DNA, 425 bp, Zea mays
  unsure (1)..(425): unsure at all n locations
gctttatatgggagaagatgtatgaccccacttaaatggtctcaagcaggagaaagggaaatttttgggccagacttggtacttgaggcaaaggcaaaagtcaaggttattaccaagaacttataagctgctcaggccaggcaaaggagctatcatgataaaaagcggaagcctctacagtttgaagtgggagatcatgtttatctcaaggtatcaccaaccaagggtgtccagagaatctggatcaagggcaagttagcttctcgttacattggaccctatgagatcaagcangttgtggacctgtaacatatcaatttggaatgccacctcacatgtcagatagtaacaatgtgttccacgtatctcagctgcggaaatgtgttcgtctacccactgagatgctgtcagaaccaaacattgag

SEQ ID NO: 27388 - DNA, 405 bp, Zea mays
  unsure (1)..(405): unsure at all n locations
tgcaagagacacctaattgtgtggtgatccttgcggtgtcttagtgacccgtgagattaagaanaagcattcaaccggtctaagtgaccgatcgagagagggaaagggttgaaatagacccgacctttgtggcctcttcaacagggactaggttctttggaaccgaacctcggtaaaacaaatcatcgtgtctccttgtgttgatttccatttgatttgttttcccctctttcctctctctaacgtttccttgcgagtattgatttgagtttgctcccatacatcatccgcacacttagcaagagaaacaatctttcagacttgaatttaattctaacgctaaccccagcctttagtgtgtgtttaagtttgcaaatttcaggttntgcctattcactcccctct

SEQ ID NO: 27389 - DNA, 432 bp, Zea mays
agcttgtgaagattcttcattccaacatgtgctaatcggcgatgccagagccagcccatgttagtcttagtaattaagcaagtgtcgagttcagctctatcaaaatctactaagtatagctgaccctctaacactgccttataagccacgcgaatatcacttcgtctaaagacatgttcacctacatccgtaaaaagacagttgtagcccattttgcataattgagaaacggaaagcaaattgtaatctagagaatctacaagaaaaaacattataaatggaatggtcaggagatatagcaattttacccaatcctttgaccaaaccttgatttccatccccgaatgtgatagctcgttggggagcttggtttttctcaaaggaggagaacatattcgtgtaccatgtcgtgtggcttgtgcacccgctatc

SEQ ID NO: 27390 - DNA, 292 bp, Zea mays
  unsure (1)..(292): unsure at all n locations
ttcgtaacattcagcaccttcttctaaggcttctttatatatttgatatacatgccaaagncgggtntggtgattgttctaatgtgattgaagcctaccttctctagtgtatatgtcatgcctcgggatcctatcatcgtgcaataattgcctcaggcattgatgaccccttcgagctctcctaattctttttctgcccaagttagtgcccctccgacatcctcgctggcatatgatctcccttccgaagtagcaccaacagaggagaaaattntcttcagataatcacagc

SEQ ID NO: 27391 - DNA, 381 bp, Zea mays
  unsure (1)..(381): unsure at all n locations
agcttgtgctgtcgtgcctgatgctgggtttatgtcatcccgtacctcgtcgaccttatagcgcgatctcgagggtcgggatgctgacttggattgtcctggttccatggaagtggctgaaggcccgtcaaccttataggtggttactgcggagagcctagacctccagaatggtgctgacacatgcccagcccccgagggtgtcgccggggatgacttatctcgggtgaagaatgtaagccactgcccagcccccgagggtgttgccggggatgatccggctcaagtgggcagtgccaaatatgacccaccccccgagggtgcccgagcggngtctncttcttgcacctncatggacgttcatgcgggttcgccttcaca

SEQ ID NO: 27392 - DNA, 318 bp, Zea mays
  unsure (1)..(318): unsure at all n locations
tnccagtaattttccttattaagaagaaaataatactgaatgcgaaaagctgctgtcggggtaggatatttgtcagtaaatatgcttcgactctggcacagtactattgactgtgcgagcttcggactcttctctgaagtcccgttgtaggtgagtgtgctgactcccttctggctgctggcctcgttgcgttggtggtggaggtagaagcttgtgccaagatgcctgaggttggcttgccgaagcaacagaagctgcaggggtggtgcctacatactctagaatgtaaggcgaatggtacgaagcagtatgcatgac

SEQ ID NO: 27393 - DNA, 432 bp, Zea mays
  unsure (1)..(432): unsure at all n locations
gacctgcaagcgtgcaagctnttctgcaaaatataggctttgattcttgataagccataccttgaatccctctagccagcataaccttgagagtcttttctttagtcaagtaagtcttgctgagtaattccatactcagggctttttctctattgtttttcacgatatagtgttgtgctgctgatgatggtgttaagtgccggtgggctcggccttcttataagtctaaagaactcccttacatacttcttattgaggatggtcacttgagctagcatatatttcaaacttatacttttgtaatcactctgataaattaatgtaaaattcttgtaacttgtaaaatttggaaataagatttccgctgcaaaaatattggtggagtgatgagtgtacttaatcttgcggccctggttgaagtggttatcccat

SEQ ID NO: 27394 - DNA, 406 bp, Zea mays
  unsure (1)..(406): unsure at all n locations
actatatcaactcaacacanatggatcatttatgcacatggacttgtgatgtccggcgaagacattctacaacttgagtaccaaaataagtgataatatgaaataaagcataaacaccatgatcaaaggcatatatataggatgtatgctataaatcaatccaagtctacgaatctaagacatttagctcactacgcaactcacaaaatgtgctctcatctaaaggcttggtgaagatatcggctaactggtgatcagtgctaacatgattaatatcggaatctcctatttgntggtggtctctcaggaagagatgctagatgtctatgtgcttagtgcgactatggtcaataggattatccgccaagaggatngcactctcattatcacataggagtgggacttt

SEQ ID NO: 27395 - DNA, 419 bp, Zea mays
agcatgtgaaggttcttcattcccacatgtgctaagcggcgatgccacagccagcccatgctagtcttagctattaagcatgcatctagaccggcctcttcttttgcaaaatcgactaagtaaagtttgccgtctaatacacccttaaaagctagtgaaccatcacttcttctaaagacagacacatctatatttgtaaatagacagttgtaccccatgttgcataactgactaacagatagcaaattatatccaagagactcaactaaaaacacattagatatggagtgctcattagaaattgcaattttacctaaaccttttaccttgccttgattcccatcaccgaatataattgaatcttgggaatctttattcttgacgtaggaggtgaacatcttcttctcccccgtcatatg

SEQ ID NO: 27396 - DNA, 255 bp, Zea mays
  unsure (1)..(255): unsure at all n locations
caaaccaagcacacacttcacttatattcacccatattaacctattcgtgaagtatcggctccattccatgtcatttcgtgcctcaattcgaattccaaaccttctatggcactatttctcgttcaaacagccgtntcgcgtcgnttgacatctcgatcgtcatatttctcgttatctgtgccatatttctctgtgtatgtatttattcacatttcatatacttatgactatgtgactaatatgtgctcacctct

SEQ ID NO: 27397 - DNA, 447 bp, Zea mays
agcttgtgaaggttcttcatcctcacatgtgctaagcggcgatgccacagccagcccatggtagtcttagcaattaagcatgcatctagaccgacctcctcttttgcaaaatcaactaagtaaagtttgtcgtctaatacacccttaaaagctagtgaaccatcacttcttctaacgacagacacatctacatttgtgaatagacaattatatcccatattgcataattgactaacagataacagattatatccaagagactcaactaaaaacacattagatatagagtgctctgatgaaatagcaattttacctaagccttttaccttgccttgattcccatcaccgaatattattgaatcttgcgaatccttgtttttgacgtaggaggtgaacatcttcttctcccccgtcatatggtttgtgcatccgctgtcgataatcctg

SEQ ID NO: 27398 - DNA, 399 bp, Zea mays
agcttgcggaccgggtggttcgggcgaagggctccgatcctcctcgctgtcatagcgtcccccatgcctggggtggtagcctcggcacaccctctcgtcgaggtgggctcgacggtcgcggcgatggtgctcgttgccgagactgcccggggccgcaggcgctgtgtcccgcgtgcacccggtgtggaccgaggcttcccgcgtgaatcgggaagtcgcagcgcgatgctctggggggcatccctgccttcgggaggcagagctttcggtccgtcggaccgcgacatcctccaggagattcttgagttctccctggatacgccgtccctcggtggtggatggttccggcatcgctcggagtaggattgctgctgcagccaggttctggccgaccccact

SEQ ID NO: 27399 - DNA, 436 bp, Zea mays
  unsure (1)..(436): unsure at all n locations
agctgtggacccgtagacctaccaatggaattgccacctcacatgtcggcagttcacaatgtatttcacgtatctcagctgcgaaaatatgtccgcctacccactgaagtgctacctgaaccagatcttgagatagaaccagacttatcttatcaagagtacccagtcaagatattggatcagaaggagagatcaacatgggcaaggtcaatcagaatgtataaagttcagtggagtcaccattcagcagaagaagctacatgggagactgaggattntctacgctcccgcttccccgactttctgcccaaaggagtcggtacgtaaccccaaaaccccacccccacctgccctttgcatacaattataagaaaaacttagataaccaggatagtctaagttgtggatttaacttaaaaaggggcttcttctgaag

SEQ ID NO: 27400 - DNA, 490 bp, Zea mays
tgaagctggattaagcgctatgacgaaggaggatcttgctgatagtcttgcatacaatagcctgaaggtgcgagaattgtatatttagaaatttacaatttttgaatcattcttttattcttatactaattcttgtatatatagggtttaatattgagcaacgcgctgagagcgcaaaagaatgccgaagacgagagctatgatattgctttcaacaacctacggtcagaggttattaagctgagaaacgaagctctggaaaaggataaaattctgcttacattggtggacaagataaaagaggacgaagctgcctcaaaagcccaggctgaagcccaaaaacgcgaaattaaagatcttcagaaacagctagctagagctaaagaagaacatatacttgaagagacaaaacgagagcttagtgatcaatgggctgatcatttagaaataaatggttaagagcttcgtgcatcccagagaagatgctatg

SEQ ID NO: 27401 - DNA, 278 bp, Zea mays
actcctcttgagtgtcgcgctattggtgcgcctggcgatgcctttctgaaagggaaatatggtcaaaccttttcctaaatgaatttggtggttgaattgcacaacacaaacaattggactaactaatttgctctaaaatataagttctacacgtgccaaaggttcaacacaaaccaatataaagtccaagatagggttcaaaagaaaagagcaaaagaaaccgaaggcttgcctggtctggtgcaccgcactgtactgtgtgccaccggacattgttc

SEQ ID NO: 27402 - DNA, 398 bp, Zea mays
  unsure (1)..(398): unsure at all n locations
gaccttgaatctcagctgaacccctgtgattgagaccctagcttcggaccgaatgtgctatatcttggtgtgtacgaagccatcgtcacaacagtggaagtgagttcaccggangtgggtgccaatgttggtccttgtcctcgatgctatacacctgaacacgcaacactatgttccgattatagcctttatcttcaagcataattttcttactatgatgtccataatgaggtaacacgggtatcttttctttagtggcttagatctaacccatactgtgtattgaatgacgtaatcatattcagactttatattatttcttatctatacatgtataattttccgtttttgttactctacttggctacaaaggtaaagtgatgtactcaatgtacatt

SEQ ID NO: 27403 - DNA, 447 bp, Zea mays
  unsure (1)..(447): unsure at all n locations
ntatcaaatggacgtgaanagtgccttcctcaatggacctatcattgaagaggtctatgttgagcaatctcccagctttgaagatagtgagtactctaaccatgtctataagctttcaaaggcactttatgggctcaagcaagccccaagagcatggtatgaatgcctgcgagattttcttatcactaatggcttcaaagtccgcaaggccgatcctacanctctttactaaaatggtgcaaatgatttgtttatatgccaaatttacgttgatgatattatatttaggtctactaacaaatctacttgtgaagagtttagtaggatcatgggttaaaaattcgagatgtcaatgatgggggagttgagtatttcttaggatttcaatcaagcaactccaagagggcaccttcatcagccaaaccaagtacattcaagacattctta

SEQ ID NO: 27404 - DNA, 403 bp, Zea mays
agctttctcgactaagtcggggtcttggcctcatgaacgggcgaaagtactcgtaagcggcaagggcgaccgagccgagggattcccacgcctctgggatactgatacctcactcgggccttccgcgagaagcaactctcgctcacacaaacatccctgttaccgacagagagtccagatgctcgaaacaagaggaaaaaagacgcaacttcgcaagcacggcgagggtgtgtttttctggcctcggcggccgcagaaggcacacgctacaagacgatctgatcctgcaggctcgggtcttcacgctgaagggagccgtagcaccctcggcatcgacgacgtcttcagcaaagtacgacccatcctatgacggcgacgcggtccaaggactccttcgggaatc

SEQ ID NO: 27405 - DNA, 436 bp, Zea mays
  unsure (1)..(436): unsure at all n locations
gacatttcaatacatatattacccaatcaagactgctcttgtatgaggagaaagatattgtaatgcagcgggtaaatccattatttgaggactataatagtgtattttatggccccctttcgtggaaaatagttagtacttgagccacacacaggatgctctttgatcaatagctatataaacacacattgtgtcttgcttttttgattgagaattgtatgtggctaatgttgtttgttagtccgtatgtccacaatgattaactctcaatggtcgtgccctatgggatcnataaaatgatagcaatatgtcatctttgatgggttccatatacggaacatatagaaattatacttggagaaattctaaagcgacaatcttgcatctctcatcaatagacttcacaagagcatttataacatgaaccaagtaatcc

SEQ ID NO: 27406 - DNA, 250 bp, Zea mays
ggtggatacgcgaaacctgaaaacttaaactttatcccgccaactagatcctttgattagtggttagaacaagatgaacaattattgaagtataaaaactaagttcttgctagtaaagagaatagcttttaaataatgcggaagtgatctaatcatacaactcataaatctttgattacatagccagaaagcttatatgaaaaagagcactaattcaagttcttttcttgcggagtgttgcttcacttaa

SEQ ID NO: 27407 - DNA, 366 bp, Zea mays
  unsure (1)..(366): unsure at all n locations
gtgccaagcttgcacatataataacaaaagagcccctggtggtggtggagttaatggtggtaaatctatcaaatattggttcagtctctcgaaagctctttgttggcttggtccccaatgaaagactttcgcttgattcaacacttcgaaaaaatggaaatttctctctgctgatctggatatgaatctatngaaagatgccagccttcctgtcagtctttgggccccctttttttgatttggtggctccattcgaagtatagcttccatcttacttggattaacttcaattccctttgttgaaaccaagcattcaagagattccccttctttactccgaagacacatttttcttgattcagcttt

SEQ ID NO: 27408 - DNA, 467 bp, Zea mays
  unsure (1)..(467): unsure at all n locations
tntgacacaatananactctattctactattntcaaaatctcttcaagtggagctgatccatttatcgctatggcctttattttctccccctatggcatcaagcaccaaaacgggatcaatcttggccttttaacctcattgcctcaccaaagtcttcaattaagagcaaatggcaataagatttcatgagatgaacttggaattagttaccctctcatcggagtgcagtggaagtctttcatggtccaagtccaccttttccctttcaattctccttcgagactaaattatcaaactcaagcacaaggttagtctcaaagggtcaagttgtaacacatctccccctaaacatgtgcatcactatgcaacggacttgtgaggtccagngagtgtttgacaacttgacaccataataagcaacatatgcaaaaataaggaacatgatcaaagcaaactacatgttgct

SEQ ID NO: 27409 - DNA, 433 bp, Zea mays
agcttcgattcctcgctcggggagcttcactgagttgtgcacactcgtctccgagggttggatggggttggggaaagctggactgaccggtctatggcggcagtggcttgggtggccgcggacacgccgcgcacgggcaaacggcggtgaactgagctccggtgaggcttgagcgtgcgcggaagagtgtaaccgacgcctgggagggctttatatgcgcgggcgcgggacaaggcgccggctggccgttggcgcgatgcggggcacgtgggggcgcgcgcgggcgtgctctggcgagctcagagcgcgtcgaacacgtggctcattgcttctgcccgtgttcttccctctgctgagcggccaaaacgtacgaatcttaccctatcgcctgtgggcgatctcttccctgcacctagagctacctatgtcatgg

SEQ ID NO: 27410 - DNA, 322 bp, Zea mays
  unsure (1)..(322): unsure at all n locations
aggttgaagctttgggtggttgagagagtccattcaatttttatttactcacgctataaatattccatgatctatatccaagaatgacccacaggtattttgaattattaaatctaaaactcatatcatctcggggaaaatattgatgttggtggaaataaagaattaattctatgccgaaaagtctaggccttcaacatggaggaaagcccaaggatgggtacaattatgcttttagtgcaagtatcntaaattatcatttcttatgtggcttgtggaggcacatagaaaaagaaagcacttccaatgttttaaattatgt

SEQ ID NO: 27411 - DNA, 441 bp, Zea mays
  unsure (1)..(441): unsure at all n locations
tacggacctatgaaactcagcttcaagaagaaagaagaatttactgcgaagnttgaagctgaagtcgaaaagagttcgaatttgcagaaatcattgaaggagcttcatgataaatgtctagacttcggcaaccgatgtgtgcaacggctgaagcaggtcttcaatttagtttgagccagttctgaaaattttgaaccttcggttgaagacctgccaagcaccttcgaacatattgatggcgaagttgatgctcttgatgaagttatagctgggcacggtgacttttgtgccctgctagcttctcggggtacaactggtgctttcatgaaaactggttgcacgcatgggaagatcgtgaatagatctaacttcaacctatcactagcagatttaactgacatccccagcctggcccaaagcattggaaatagattcataaca

SEQ ID NO: 27412 - DNA, 429 bp, Zea mays
agcttgacattgcttccctgttggtagccaatgcgatccttaatgccaggacatctcccactatagagcatgcttctagcaaatttaaatttttcattctctatctcatgctcattagttaattgagctatatgatcattttgttgtttaattaaagcaaggtgatcatgaatagcatcaatattaatatctctacatctagtacaaatagcaatatgttcaacagtagatgtagagagtttgcaagattttaattcatcaatcttagcatgtaaaatagcattctcatttctaagactggaaatagaatcattgcaaacattcaagtctttagccttagaaattaaattatcattctcagttctaagcctaacaattgattcattcaatttatcaatcttagcatttaaactagcattgtcatttcta

SEQ ID NO: 27413 - DNA, 494 bp, Zea mays
  unsure (1)..(494): unsure at all n locations
tctcgccgctgacgagctcgcccgcctgcgctcgatgccagaccagctccagccaccacaggcgacgagccgaccatcgacgtgaccctcgtgacttccccgacatcaccgaccagcccactggaacttcaccgtcgccggtaagccgtgccgcgacgttttccctttctattactgtttcggtgaactaaggaccgcgggttagatgccagaaaatgccagggggttaagtgttaagccacagactcagttgaatagtagaccgaggactcgtttgtaaggaaagaaaaaagttttaaccagggacccgagtgcaaagaattttttcttttgctttcgaatntataagttattttaaatctgcagcaaacttgataaatgcataacttgaagagtattcatccaaatttggtcaaatcaattctgatagacttagtaaaatatgaactatcaaacaaaaatagtaaaccccatggtttctatactcatttcta

SEQ ID NO: 27414 - DNA, 424 bp, Zea mays
agcttataggttttctgagatgactacgggcttctgaggaagaatccaccctaggcatgtcagatcaatccataactccagtcagagtgatgacagacgaagctagattcaaaggccacaacatatctcacaatcttcagggcaacaacaaagctctttcaggccaccagctccaagaggcagaggccgcaggggttcaaaggaagatatggggatcagcccacagaactctattgcttattctgtggtgaggacaagggccatactacaagaacatgtcaggtcaccattcagaaaaaaaaaagagattgccgaagtagaagcgcgacagaatcagctgaagcaggttttacatactacttcgtgctactctccctatatactagaatacgtgggtaatcaacctgcagcttctgtcacttcg

SEQ ID NO: 27415 - DNA, 308 bp, Zea mays
  unsure (1)..(308): unsure at all n locations
ttcagggcttccacacaaagtcagtgactgcatnaagcttattccagtgcacgcaagaccatgaggagtacttgcaggcatatgtccgaaggttcttgtgactcatagcccacgcgccaacggtgcctaacgagatcgtcatataagccatgatcacggtgctccgaccaggaccggcagcacaatattttgtaaggaagccaccacaaaccttggagaagcttctacaaaagatggataagtacatccgagctgacaatgattctcgctagagaagggaggaagcttacaggaattctaagattact

SEQ ID NO: 27416 - DNA, 431 bp, Zea mays
  unsure (1)..(431): unsure at all n locations
agcttgacaacaccatntgagatcttaaataacatttctgagatcaagtatgtttaattcattcctcaacatgcaaaagcggattttatcaagtggcttagtgaaaatatgcgctaattgatcttccgacctcactccttctaaaatgatgtctcctttagcaatatgatctctaaggaagtgatgacgaatatcaatgtgcttggtgcgagagtgttgtacaggattattagcaattttaacagcactctcattgtcacacaacaaaggtaccttttctagaactacgccatagtctagaagagtttgtttcatatataaaatttgtgtgcaacaagcacccgcggtaatgtatttcgctttggcggttgacaaggcaacactattttgctttttggatgtccatgatactagtgatctcccaagcaaat

SEQ ID NO: 27417 - DNA, 451 bp, Zea mays
  unsure (1)..(451): unsure at all n locations
tgaggcatgaagcttgcccccggatattggtcctttttctatccttgatatatacggaccagnggcataccgacttcagttacccgaaaccttgtctgcagtacataatgtgttccacgtgtcacaattgaagaagtgtcttcgggttcccgatcgaaccattgaagtaatggatgttgccctagaaccagacttgacatattctgagcaccctattcgagtcttggatcaaaaggacagaattacccaaggaaaactctcaagttttacaagatacagtggaaccagcattcagaagatgaggctacatgggaaactcatgactttntagaaaggaacttcccaggctttntagcctcatgtaatttgtaaagagtatacaatngtggtaataaaggattgagccccaaaccacccttgccttgtaccaagaataaggaaataaagacat

SEQ ID NO: 27418 - DNA, 357 bp, Zea mays
acagatagatggtctgactgagagagcctgccagatgcttgcagacatggtgagagcttgtgctttgccagactagttacgttgagaccttaggctgccttatgccgaattctcctacagcatcagttagtaagctagtttgaagatgtcaccggtgcaagcactctatgggagaaagtgtcgaactccgctgcattgggactagacctgcgaaatgcatgtgtttggtccatacattttgcttgtaaccgaatagaatattataatggttcgagagaagttgaagactacacagtccacgcagcgacgctatgctcacaccagaagaagagatttgagttcaaagtgggagattat

SEQ ID NO: 27419 - DNA, 439 bp, Zea mays
agcttcgggtctttagccttgcaactgttgttaatatgacccgaaacaatctgagaatcagttttaaggatcgccctcctgatccccattgcctttagtttccgaagacccaggagcaaggcttcgtactcagcaatattatttgtgcagctgaagtccagtcttgctgcatagcaagttttaaccttggacggtgaaaccaaaacagcagctgctcctgctccgaaggttccccaggagccatcacaaaacactgtccatgcttcggcatctttattcgcttcttcgccctgagcccctggcgtccagtctgcaataaaatctgcccatgcttgagactggatcgaggatctgtgcacataatcaatgtaaaattcattaagctccgcagcccatttttcaattcggccagtagcttctttatttctcatgatatctt

SEQ ID NO: 27420 - DNA, 270 bp, Zea mays
gcaatgtatgaattcaaaataattgtagagaatatcagtacaagggacttggtccaagaattcttggctttcaaggtttttcctagtgtaaaagagtgggaaatgccgaagctgaagggggagaagaaaaaaggtgaacttgtacgtttgccttactacttcaaatttaagaaatactttataactccttgccaagagtggctggatactaatgaagtgatgtgcaacgagatacttggcaattattccaaaaaggaagatcaattgatg

SEQ ID NO: 27421 - DNA, 351 bp, Zea mays
  unsure (1)..(351): unsure at all n locations
cggcagtcagctgaatatagacggtcattgaaagaaatacttgggttccgccagcctgtgaccatctcatcatcaattgctgaccatgtattggatgatggtaagtagacctcactagttacttggcgatgggaatctagcccctttaagaaccacttgccatcatatacaactccaatgaaaggcaccatcccattgttcatttcagtaacacaagcccatctgttcctatttggatcataaacttctgcagactgcagcgtcctctgtattccttcacactctcctncagcaacatagagacaattgtttattacacaagaaccaaaaaagtgacgtttcctcatcata

SEQ ID NO: 27422 - DNA, 439 bp, Zea mays
  unsure (1)..(439): unsure at all n locations
ctcagcttaanagtctggttaaatctgcataatatccagccagtccaatgaaacttcggacctgatgaacaatggtcgggggtttccactccaaaatgtccttgactttgctggggtctaccgcaatccctctggcagatagaacatgtcccagaaattgaatttcctccagccaaaacgcgcacttgctgaacttggcatacaactgatgttcccttaggcgcgttaatacgatccgtaaatgttgggcgtgctcctcttcattcttggaatatatcaaaatgtcatcaatgaagaccaccacaaacttgtctagctcgggcatgaacaccgagttcatcaaatatgtgaagtgggccagagcattcgttagcccgaaagacattaccagatattcaaacaacccatatcgcgtagtgaacgcggtctttggtatatc

SEQ ID NO: 27423 - DNA, 351 bp, Zea mays
gaaaatctgggataatcggcagtattaaccattcagtccaaggaaacttctgacttgatgtacaatggttggcggattccactctagaatatccttgaccttgctgggatcaaccgcaattcccttggctgacaacacctgtcccagaaagtggatttcctccagcccaaatgcgcacttgctgaatttagcatatagctgatgttcccttaagcgtgttaatacgatccgcaaatgccgagcatgctcctcttcattcttggaataaatcaagatatcatcaatgaagaccactacaaatttgtcccacttgtgcatgaataccgagttcatcacatatgtgaagtgggc

SEQ ID NO: 27424 - DNA, 467 bp, Zea mays
  unsure (1)..(467): unsure at all n locations
tctccttgtcgtcatcgactttgacgtagaaccattccgatttccagcctgccggccatttgcttcgatagctgatcacaggaaattttgtagttctccgatatgcaaaattataacaaccaaaattctcatgtagcccatcctttctggccttagtttggtagtgtagctcgtgtactcggcagaaaccttcggcaaatggctccaccccctggcttcggagagcccaaatataaacactaagcctaacaatagcgttaggggttagttgatgaaaatagattccaaacttttgtagcacatcagcaatcatcctattcaaaggaaatctcaaaccagctttgaggaaactcttaaaaatcactatttcatctttttctggcttcggggtaatctcttctccaccaaagcgaatcatctntntctcatcttcactgaagtagtccgacttcaccatctttgggaaa

SEQ ID NO: 27425 - DNA, 438 bp, Zea mays
gacccggagcaccagagccgcagctgccacctgctgcgacagaactttttttgccttctcaccgcttatattttggcgttcactgtttatttttccgtgtaagatctgcatccccttaagaacgctctttgaacttattcgacctctatttctgcggtataaggtctgcatccccttaggaacgacttttgaacttcttcgacttatatttcggcggtatttggctctgcattccctttggaatgacttttgagcagaaaacttacgctgcgctcccttacgaatgacttttttgtaccttccgcaatcttaactctgcattctcttaggaacgacttgtgagcttccgcaattcttgagcttcgtaagtctgtgaagaagacatattccatcctgatagaagcaaaataattacaataatttaaaactaaacttaca

SEQ ID NO: 27426 - DNA, 386 bp, Zea mays
aagatagaccttgtgcagcttgtcaggcaggtaaacaggtgggaggagcgcatcacagcaagaacgtgatgaccacatcaagacctggacctcttcggaaccgtcgcctatctaagcataggaggaagtaagtatggtttagttattgttgatgacttttcccgcttcacttgggtgttctttttgcaggataagtctgaaacccaagggaccctcaagcgcttctgaaagggaattaggcttacacctagtccctaaataattttggtggttgaattgcccaacacaaaccaatggactaactagtttgctctagtgtataagttatacaggtgctaaaggttcacacttagccaataaaaagaccaaaaagtgggttcaacaaa

SEQ ID NO: 27427 - DNA, 431 bp, Zea mays
  unsure (1)..(431): unsure at all n locations
agctntgggcacccatttgaacttcatctttctttcacccgcagacagacgggcagactaaaagaactaaccagatcctagaagatatgttgagagccggtgcgttgcaagacaagtcaggatgggacaaaaggttaccttatgcagaattctcctacaacaatagttaccacgccagcttgaagatgtcaccgttccaggcactctatgggcggagttgtaggactccactgcattgggaccagcctggagagagacaggtgtttggccccgacattttgcttgaagccgaagagaatatcaaaatggttcgggagaatctgaagatagcacaatcaagacagcggagctatgcggacagaaggagaagagaactgagttctgaagtgtgagactacgtctatctgaaggtgtcacctatcaggggagtc

SEQ ID NO: 27428 - DNA, 424 bp, Zea mays
  unsure (1)..(424): unsure at all n locations
ctaagcttgaaaagagaaggatgacctcaaccgttagctgggcgagatataggaaacagtggttcaaatgtgtttggatgcgcaaggcgtgcangaccgtgttgccgtgctagagttggaattatcagttgcgaagacttatcgcgaaaagctagaaactaagacgcgggctagcatggatcaagcccattcattgtttgttgaggcctatcgtgaactgggtgtaacgacgcccttcgataggtctaggaagagctaggcacctgcttccttggctggttacaagaggagcttgcaagtcttccagacattgtgacggggctgatggcctatgcttccctcgttacctacgaggacgatgtcaatgctctattccacanaggctaccaacatttcaagagaattgagcagtgtagtctggact

SEQ ID NO: 27429 - DNA, 410 bp, Zea mays
gcttatgaagaatcttcattccaacatgggctagtcggcgatgccagagccaacccaagttagtcttagcaaccaagcaagtgtcgagttcagctctatcaaaatctactaagtaaagctgaccttctaacactcccttgaatgctattgaatcatcacttcttctaaagacagtaccaccaacatcagtaaatagacagctgtagcccatttgacataattgggatacggaaatcaaattgtaatctaatgaatctacaagaaaaacattggaaatagtatggtcaggtgatatagcaattttacccaatcctttgaccaaaccttgatttccatccccgaatgtgatagctccgttgggatcttggtttttctcatatgaggagaacatctttttctcccctgtcatg

SEQ ID NO: 27430 - DNA, 214 bp, Zea mays
agcttctcactcttctcattccatacaagagcaaagaatacactccgaagacacaatccaagcattccatcctctccaagctcccaaatcaaatcaagtgcttaatgacttgagagagggtgattcgtgtttcttttagtgcttggttgctatcttcttctcattctaaacttctcaagtgttttgtaaagcaagcgagagacacctaaatgtg

SEQ ID NO: 27431 - DNA, 429 bp, Zea mays
agcttctaaagggagagcacattttgggactaaccaatgctcattttgagaaagacagggattgtagcacatgtcaagcaagaaatcaagttggcacccaccatccacactaaaacataataacaacaaacatgccactggagttactccacatggagctattcagcccgatagcttacataagcatcgaccggagtaagtactgtcttgtaattgtggatgattattctcgcttcacttgggtattctttttgcaggaaaaatcacaaaccccagagaccttatagggattcttgagacgagctcaaaatgagttcgaattaaggatcaagaaaataagaagcgatcatggggcagagttcaagaactctcaaaatgaatgctttcttgaggaggagggcatcaagcatgagttctcttctctctaca

SEQ ID NO: 27432 - DNA, 251 bp, Zea mays
  unsure (1)..(251): unsure at all n locations
aagctcttgactaatctggggagtaccgctaaccctctggcagatacaacaaggcccataaattgaaatttcttctaacgacacgcgcacctgcttgacttggatacaactgatgcccccttaggcgcgttgatacacagccgacatgttgggcgtgctcctcttccttcttggaatatatcaaaatgtcatgaatggagaccaccacaaacttgtctaacttgggcatgaacaccgagntcatcacatat

SEQ ID NO: 27433 - DNA, 334 bp, Zea mays
agcttgctgtgtctgtgtatcacattcttattttaaagagacatgtactgttgaggttaaccaacataatctgggaaaataaagggattacaattaagcatgtgtatcactaaaaagatagtttcttttctggaaatcacactctggtcaggtctattttggttgttagctgaaacaagttttcttgttgaaaagaacacaatatgactagactgggtcatgacttcaataccttatcgctgttttgtttaagctgtgtttgtttatgcagtggccggaaatgagttcgtaattattgtatcaactcgatgtaatgattgtgaattaataaaat

SEQ ID NO: 27434 - DNA, 481 bp, Zea mays
  unsure (1)..(481): unsure at all n locations
tgtcgaaggtggtcgaatgagttcaccggaggtgggcgccaatgttggcgacttgttctcaaatgctatgagttaagaacaaggcaacacaaaatgttaatggttaaagaccttcatccttcgaagcattgtctcccttcagatacaatggtcttcagacgaaggttatgaaggacgtatcttcatcatcacaatatataataatgaaggtagaagcatatgaaacatggagaatgacaataatcgtatgacatcatcagaatacttttattctattatcatgaataaacatgaacaatatcgagttacatttataccttcgacttgacagaaggtgaaaatccgagtgtgacgtgcaagtgagtacaggtcagcgtccatagtacggtgttactggtcatctatttataggcccaggacgtagcctatgtaaaantacatccatgctcttcatatatactggttgattatggacaatcta

SEQ ID NO: 27435 - DNA, 432 bp, Zea mays
  unsure (1)..(432): unsure at all n locations
agcttctaaagggagatcacattttatgtatttacaaangctcattttgagaaagacaggatttgtagagcatgctaagccaggaagcaagttggtgttcatcatccgcataagaacatcatgacgactgacaagccactggagctcctacacatggatttattcggcccgattgcttacataagcatcggtgggagtaagtactgtctagttattgtggatgattattctcgcttcacttgggtgttctttttgcaggaaaaatcacaaacccaagaaactttaaagggattcttgagacgggctcaaaatgagttcggcttgaggatcaagaanattagaagcgacaacaggacggagttcaagaattcacaaattgaaggcttccttgaggaggagggcatcaagcatgagttctcttctctctacatg

SEQ ID NO: 27436 - DNA, 268 bp, Zea mays
ttaggacgcacactgcagcccagaccattgagattgactgcctttggaagcaattagctgaagctaattagaagtgcgcactcgcaaaagctaaacgaggtattatcgaacaatggacatattatttggagaatgacgatgaagaacttcgcatatccaaggaaatatgcttttaaaaagatatggactgcgtctgaaacattaaatctatcttcgacggcgttggtgcatattcaaacaatgacaacgtgctgattggctatcctaa

SEQ ID NO: 27437 - DNA, 417 bp, Zea mays
agcttgtgaaggttcttcatcctcacatgtgctaagcggcgatgccacagccagcccatgctagtcttaacaattaagcatgcatctagaccggtctcctcttttgcaaaatcaactaaataaagtttgtcgtctaatacacccttaaaagttaatgaaccatcacttcttctaaagacagacacatctatatttgtaaatagacaattatattccatattacataattgactaacagatagtaaattatatccaagagactcaactaaaaacacattagagatagagtgctcatttgatattgcaatcttgcctaaacctttcaccttgccttggttcccatcactgaatatgattgaatcttgggaatccttattcttgacgtaggaggtgaacatcttcttctctcccgcatat

SEQ ID NO: 27438 - DNA, 382 bp, Zea mays
attgctaactgtcccgacaatgatagtgatcacgatcaagggaacaagagggagaaaaagaagaactattagaaggccaagggcgaggctcatcttggcaaggagtgggattcggactgctcttcgtccgactccgacaatgaaggactcgccgccactgccttcaacaagtcatccctcttccccaacgagcgacacacttgcctcatggcaagggagaagaaagtaagcactcataatactagtacttgtgcttcttcaagtgaggatgagtccagtgatgatgatgaaatagattactcatgcttattcaacggattagatagaaccaacgtagacaacattaatgaattgattgatgccttgaatgataggaatatac

SEQ ID NO: 27439 - DNA, 460 bp, Zea mays
agtcacctgaggcatgcaagcttagagcaatggtgggcaataaggcaagagttgaatgatgtattgcggaacaatttaaactaaaggaggtagcacacttcacaagttgttactttgcagaagaacataatgtatttgctcgaaagaaaaggtaccatgatgatgaacgagagatgcctccgcgtagtgatctttcgatttttcagacaaacggcaaagccgttggtccacccaaggcatatcacctcagtatggaagaacggaagtctgctttactgtacatgttcacaaatatgcctgaggtggagaaataccttgtgtaagacttgatttcttaaactgttcatatgtgaattagtttatgttatcaaatatctcatgtcatacaataatatttgacagcgagcttgatgatcaaaacatgaagtgtgttggtaggccaacagcgagagacatatac

SEQ ID NO: 27440 - DNA, 435 bp, Zea mays
  unsure (1)..(435): unsure at all n locations
agcttagatttcgnttatttcacttactttgttggtagctgcagtaggtcggagcgaaggttgatcagtcgtccgttgtcggacgaccttgtgattcctgtccatcttgaagttggccaggattttggcctggacctccttgatcaacttctctttgtgttcctcacgttcctcatattcttgctgaacttcagctgacatagtctccatagtcggctcgatgatgttgctgagagagacattggagtgatcctttgaaccagccattgaggaccgatttgatggtttttcatgtcttgtctccagggagtcgcaaaaaagtgtgttggcgctgatccgtgtgccaatcactacgaggtgtaccagcggcaatgctctctgtgacagcgggaacagtgggcggtctanggccggacggtccgcatgtgcgcagag

SEQ ID NO: 27441 - DNA, 190 bp, Zea mays
tctccagaaaatggatgaatatatcagagctaacaatgattttctgtatagaagggaagaagcttacagatactctgaaatggctaggggcttccgaggaagatttcaccccttgcctgtcaggtcaattcataataccaacccaagtgatgacaggggaagccaaacacaaaggcaacaacataccttc

SEQ ID NO: 27442 - DNA, 433 bp, Zea mays
agcttaggccggactttcacaatttagagagaaataattggtctcttccggggggtgctacccatagccttgatgtgtggaagctaaaattgaaacgactgagacaaaagatcaaaggttggaataataatgttgtaggccactacaagaagctgaaaaaagatctgatttcaaaaattgacacccttgataaaatcagtgaaacttcgggattatcagatactgatagatttatgaaacttgacctggaatctaacctcaagaagattgtcgatgaagaaaacattatcctcaagcagaaagctagagataagttcatgttagatggtgatgagaactctaaatacttccatttgctagccaagcataaaaagaggagactcaagatcttaactctttctcatcggtgatagttggcgcatgatggtaatgg

SEQ ID NO: 27443 - DNA, 445 bp, Zea mays
  unsure (1)..(445): unsure at all n locations
actcagcttctaagggagaacacattntgggactaaccaatgttcattttgagaaagacagnggttgtagcgcatgtcaagcaaggaagcaaagtggtgttcatcatccacacaagaacatcatgacgaccaataggccacttgagctacttactccacatggatctattcggctcgatagcttacataagcatcggtgggagtaagtactgtctagctattatggatgattattctcgcttcacttgggtgttatttttgcaggataaatctcaaacccaagagaccttaaagggattcttgagacgggctcaaaatgatttcggcttaaggataaaaaagattagaagagacaacgggatggagttcaagaactctcaaatagaaggctttcttgaggatgagggcatcaagcatgagttctcttctccctacacaccacaac

SEQ ID NO: 27444 - DNA, 438 bp, Zea mays
  unsure (1)..(438): unsure at all n locations
agctnggaaaaatctagaataaatcggcagtaataaccatccagtccaaggaaacttcggacttgatgtatagtggttggtggtttccactccaaaatatccttgaccttgctgggatcaaccgcaatccccttggcagacaatatgtgtcccaaaaattggatttcctccagccaaaatgcgcatttactgaatttagcatatatttgatgctcccttaagcgcgttaacacgatctgcaaatgccgagcatgcttctcttcattcttggaatatatcaaaatatcatcaatgaagaccaccacaaatttatccaatttgggcatgaataccgagttcataagatatgtgaagttggcaggagcatttgttaatccgaaagacataaccagatattcgaataatccataccgtgtagtgaatgcgatcttgggtata

SEQ ID NO: 27445 - DNA, 376 bp, Zea mays
  unsure (1)..(376): unsure at all n locations
tatttaacatgatcctcanactgtttctcggtatagaggtcaaccccgtttgagattacatcataatccagattgtttcatgtgcaaattagccaaaagtagccacatatctttttaaacctgtcatctaaacaatcagttgatcttcaatgttgatttctgcagtggaaaggaaatgtttaacagctagttcattgaagtcggttcttgtgggggatagatatcccctgggtccactaaagaagtaaaagacctcacgaaaggcccaagggcccaataattcgtaaggtcattctttcgtgggcctggggaaagacaaccaacaaagaaaagaagatgtgagaccggattggtgcaaacccggacgggccacaac

SEQ ID NO: 27446 - DNA, 257 bp, Zea mays
cccgtgtgatagatttggcacgcgagggtcattaatgataacatttttcctttggctttatgggccaaacatgggtcaaccaagactttcttgtctactagtcctaatgtatcgacagggacaagttgcttgtcaatcttcattttttgaaatctcaatcagccttcatctacaaccgattatatttgcgacagaagatattacagcatttgggttatgaagaaaggaaccatgccattacaatatacacaattttt

SEQ ID NO: 27447 - DNA, 370 bp, Zea mays
  unsure (1)..(370): unsure at all n locations
acgacaatcaatgacttaagtttggcacggacaagatgtatttttaccaattattagacttgacattaaacataatcctgacatatctcatttacaaaatttaaaggtagagttaaaggaacattaaaaagatttatatgtacaataattaaacagtacaagcgtcattaaattaaattacacggatcatcatttttgcttttttgctggccatcgacctgttcaaaaagaaaagaaaaagggtaaaaaaggatggtgggtgagttaattgangggaaatgtatataataatagtatggtggcgtacagagtggtgattacagtgaatctgtgtaaggatagagatatgacggagagagattgctgatgt

SEQ ID NO: 27448 - DNA, 435 bp, Zea mays
agcttcaccatcacctgtcgtaaagaacttaaactatgtatcagaagatggtggtactgcaaatttatcaaatctaggatctggatttggagggcatccatctctggagcagaaaaacaaatctttcaacattaatgagtcaatgactgtccactgtgggtaggttacatgcatcccttgtccatactaaatccacgcttattcaaatagatgttgtttcaaacgtgaatactgaagtgaatgttctgtattatttctatcagctttgttagaggaaagaagcctggccaaggtactggattcgatatcaaggatgatgatctgctagagatggagcaatgccgtgagctagtcgtagcttctgctatttttggtatgcatcacttttcactaatagtatccactctttgccctaaaaaatgtcttcactgtgat

SEQ ID NO: 27449 - DNA, 378 bp, Zea mays
  unsure (1)..(378): unsure at all n locations
ctatatgcagcctatgcagcagacatctctatgggtctattaaccatcttcatggctctattaaccatcttcatgtgcgagactccaaaccatgatctccaacccagctcgtaaaggattttcactggtcccatcatctacctgttgacacttaccagaagtaacgaatgcacaaaatatatagcaagcggatctaaatgagcaaaactaatccatgaataanatgccatgccaaagttgtcgtacgatcaagtgcctctctatcgatcacaccagcaagcattattgtcgcgtagtatcaatgtatgccacatacaagcatacatggtcacatcagtaagtatatctctacagtaaacaacatccttgcagttactg

SEQ ID NO: 27450 - DNA, 429 bp, Zea mays
  unsure (1)..(429): unsure at all n locations
agcttntcgcgagcgtgccggcgtcgntctcttgctcgggattggcgtgtcgcggggagacagcgctcgtcttcgtctcaagcgcgaggatgatgcccggcgcgccccctgttggggtgccggcgctgtcgactcgctcgacagccgacgaggcactgcctcctgcttggccttggttgccccgccttccccgccgctggcggggaagagggcgagatgagctctaaagtcgttcttccaccatgcggggaagacgtcgtcgattctgccgccggcgggcgggttgtctgccgctgttgccgctgccgcccggcggtggaatgagtatcatgtcgtaactgccgtcgaggtacatgaactcaagactcccgatacggagcacctgcccgggttgtagagggtgttggagactgcccatctggagcttga

SEQ ID NO: 27451 - DNA, 396 bp, Zea mays
tcgtgccccgcctgtgggtggcactctccatcccggcgttgtcgaccttcttgcatccgcgtacaatccactcaccgcgtttcaccgaccaccggcggctgcgcaagtaaccacgactcatttgactgttgcctcctgccgtgcgccccttccgcggcttccacctacgccgtgcgctcaggccgactcgccgttggctggctgcatcttcgtgcggtcgggcgaccgggagaaattcgtgcctcgtcgactcgtttcgcgccctggtgctccgttgttgccgccgtggattccataccaacgcgcggtggtgagcgggacctgcgcggcgctcagactcgtggtggccgaggccgggtttaggcggacgagaacctcacggcgtggtccacaagt

SEQ ID NO: 27452 - DNA, 417 bp, Zea mays
  unsure (1)..(417): unsure at all n locations
agctntatatgggaggaagtgcaggactcctctatattgggatcagactggagaaagacagttctttgggcctgaactaattcaagaagcaaaggaacaagtccatataattcgagagaatttgagggtggctcacaccaggcaaaagagctacgctaataatagaagaagaccactagaatttgaagaaggagattatgtgtacctcaaggtgtcaccacttcgtggaatgaggagattcaaagttaagggcaaattgtcccctcgctatattggaccattcttgatctttatgcgagttggggagatggcataccaactcgagttacctgacagtctatcagatgtgcataacgtgttccacgtatctcaactgaagaagtgtctccgtgttcctgacgaacagttaccgatgga

SEQ ID NO: 27453 - DNA, 299 bp, Zea mays
  unsure (1)..(299): unsure at all n locations
ggatgttcgttatgattcatagatctgagctcccttgacaaccatcagaagcatgctaacataatatctttctcctgcagatggatgcacaaaatgtatgcggcctattttaccatggcgttgtctgtgctcccataatcttttcttttcatgccatctccactcggatggaaagtcanggtaagttatggatctaacgttttcatgtctttgattatcaacaaaccactcagttagcatggttcgacgtaagaattcttgtcatagaatttgcgacatgttggccttagcatggtatg

SEQ ID NO: 27454 - DNA, 345 bp, Zea mays
  unsure (1)..(345): unsure at all n locations
aagtgtcttcctcaatggaccaatcaaggaggaggtctatgttgagaaacctnccggctttgaagatagtgagtatcctcaccatgtttgtaaactctctaaggcgctttatgggctcaaacacaccccaagaagctggtatgaatgcctaacatattttactatcactaatggcttcgaaaatagaaaagccgatcctactttatttattagaactcttgacaatgaattgtttgcatgacaaatctatgttgacgatattataattgggtgttctaacgaatctacatgtgaagcaattactaggatcatgacacaaaaactcgagatgtctatgatggggga

SEQ ID NO: 27455 - DNA, 456 bp, Zea mays
  unsure (1)..(456): unsure at all n locations
tgtggaggaccagatcatcaaagcatagtaagttttggatgataagtggtcacccaagttccgttgatgaagcaccagaagaccaatcaaggaaggaatccatgtgggatttcgcaagagaaaggtttgcgtgttggcatcgatgcttcttcaataagctagctgtcaagcgaaagctgaagcctgaagatgatctttgagtagccagaatcagcatttgcaatcggcaaccagatgctcctcaaaggccggatattgttgaagttccatctcctcgaagagtctgcaaagtaaagaaatgtagctgaagtaaagctatacccataacccttttgagctgaatctcgaggacgagattcattttaagtggggtagatttgtagcatcccacaaattcaaatcttggaattttctcaaactcgctctanagttcaaatgaatttcanatttcatttc

SEQ ID NO: 27456 - DNA, 417 bp, Zea mays
agcttgagccgaggcattgcctcaccggatgagtagaatcgacctcgccggacttcggtcacccaccacagcgcatgaaccgagctatctggtgagccattttcaaattcctcgcgcctatgtcttccctgacctctggggaagctctctgacccgttcagttgaactgtaccaccctggttaggccagagccctcgccgccgatgagctcccctgcctgcgcgcgtggaccgacctactccgaccaccaccgtcgatgatccgcaccttgacgtgatcgccagagaccctcggacctcgcccgaccttcactggagcaacctcgccgccggaagcccctctgaccttttcttccgtcgcggtcaccgttccattaggggaaggatcacgggttcgatttattacaaacctatgggg

SEQ ID NO: 27457 - DNA, 397 bp, Zea mays
  unsure (1)..(397): unsure at all n locations
atgtcatttgagaaaacaggagttgtttgcatgccgaggcgggaacaagtggcactcatcatcacacaagaacatcatgactagtgacaggccactggagctcctacacatggacctattcggctcgatcgcttacataagcatcggcggaagtaagtactgtctagttattgtggatgattattctcgcttcacttgggtgttctttttgcaggaaaaatctcatacccaagagaccttaaagggattcttgagacggtctcaaaatgagtttgacttatggatcaagaaaaatagaagcgacaatgggacggagttcaagaactcacaaatagaagacttcttgaggangagggcatcagcatgagttctcctcaccctacacaccacaacaaaa

SEQ ID NO: 27458 - DNA, 425 bp, Zea mays
agcttcgaagccgaagcaactccagctttgtacgaagccatcagctcagaaagtggaagtgagttcaccggaggtgggcgccaatgttggggacttgttctcaaatgcttcgaattaagaacaaggcaacacaaagatgttaagtataaatgcccttcgtccgctgaagcattatctccccaaggatttaatgagcttcgaacgaaggtcataagaaaagtatcacgaagatttcaccttcgtgatcatatttgtaagacaacaaacaatggaaaatgaaacataatgtataaaatatattcacatgttttattatatgaatatacaagtattaaaacataatatttaggcacatttataccttcgccttggcggaaagcaataattcaagcgcgacgtgtcaatgattacaggatcgcgtgaac

SEQ ID NO: 27459 - DNA, 258 bp, Zea mays
cacatacacgaattgcatatgagacaaaaccctgtggtgaggaacaatatcacaacaactttggctgctacagcttcggctcctgatctgggtcaagctgcccagtgccgacctttctaaagagatggcctggcgactggatgacggaatggttttacgtgaagaatgacttgaaatctcgagaagatataaagaagatcattatgcgtcccatctggcaacgtttcggcctgcggaggccgaaggtggaaatgaatg

SEQ ID NO: 27460 - DNA, 433 bp, Zea mays
  unsure (1)..(433): unsure at all n locations
agcttctaaagggagagcacattntaggactaacaaatgttcattntgagaaagacatgatttgtagcgcatgccaagccgggaagcaagttggcactcatcatccacacaagaacatcatgacaagtgacaggccactggagctcctacacatggatctattcggcccgattgcttacataagcatcggcgggagtaagtactgtctagttattgtggatgattattctcgcttcacttgggtgttctttttacaggaaaaatctcatacccaagagaccttatagggattcttgagacgggctcaaaatgagttcggcttaaggatcaagaaaattagaagcgacaatgggacggagttcaagaactcgcanattgaaggctttcttgaggaagagggcatcaagcatgagttctctttccctaccaccac

SEQ ID NO: 27461 - DNA, 336 bp, Zea mays
taagataacacacaatggtagtggagcgatggtgagagtaacgtgtacccttcgtggcaagaggctagacggtggtgtatctgtgctctcggttgacgtgaacctggtctggtcttaagaaccccggtggcgggttgacatatgccagggttaagtgctacatatgtcgtgtgatcggagatcctcaactgagtataatcgattcggatcgccgtaccttcatggttatgaagacttgatcactgacctatacgtagaactctagtaaagatgaaaggattggtaagaaaatggctattacaggtcaagtgcttgaactagagtagaaagaacact

SEQ ID NO: 27462 - DNA, 431 bp, Zea mays
  unsure (1)..(431): unsure at all n locations
agcttgatgaaacaatgtatggattaaaacaagctcttatagcctggtactattgggtaagaaataaaccgatctctctcggtttccatgcatcaaaggcatatatatcattattcttttataacaaagagaatataataatgtttgttcttgtatatgttgatgacattgttgtttatagttcatcaaagaagcccacctcagttntgttgtaggacgacttacaaaaagaatttgctctcgaggacttagaagatcttcaatactctcttggtatataagtgttgacgccttttcggagcgccaaatactcaagaagaaccggcggcggtgctctctgcacaggggcggacagtccgcgcgcggggccggacagtccgcggtctgttgcgaggcgcggtggtactctctgctcaagtgcggacttttct

SEQ ID NO: 27463 - DNA, 374 bp, Zea mays
  unsure (1)..(374): unsure at all n locations
attcggttcattaatacttttatacttcgttcgtttctggtgggggccttcgtcctccgaaggtcctcaaaaacatgatttgacaatggtttccaagtgaattatatgaacaggtattttcggattcagaattatggatatggagcacgaccaggacgaaggctgagtcagacgaaggtcgggggcagccgaagctgtgcgcaaggaagcttctgcgcgatggcagaaaggggaaccgacttanagatgaaaagacttcgggggcctcgacagatttccataagcccgtagcaaatgtaatgggcatgggtgtaattatacgtgggctgcgtcccgcgtttataaatagatgaacagtacttccgtactgttca

SEQ ID NO: 27464 - DNA, 394 bp, Zea mays
  unsure (1)..(394): unsure at all n locations
gctcactgaccacactcccactgattgcggtgcagctagctaatcttgcgatcgagtacgtttacggtcacagtataaactatctataaactgttttgttaagtactcgcatgactaacataatcgttgcacttctaaatcaacgtacgtatgtgcgtacgcctatggtgtatctgaagggtacatgcagtacgagtttacgacttcgtagctgtctacgtaaacgaatgcatgtgtgtgtgcgcgcgcgcgcgcgcgctgaatgaatgctgatgcaaatgccaccgtgatcgttgtccttgcatcggttggtgcanatgccagctgcccagctcggcagctccggccctccgatccgtagccttttgctgtcctggcttttaaaatttctcct

SEQ ID NO: 27465 - DNA, 253 bp, Zea mays
actgcttgcccgtgtcgactgttagttcggacggcactccgaagcggcaaacaatggtttgccagaaaaatttctgggcagtctttgacgttattgtagaaacagccctcgcctcgatccatttggtgaagtattcgacggcgacgaaggcgaacttaaggttcccctgagcggtgggcaggggcccgacgatgttcaagccccagcgctggagaggccatgtatgggcgatcagctttgtatactgcgaggg

SEQ ID NO: 27466 - DNA, 321 bp, Zea mays
  unsure (1)..(321): unsure at all n locations
gaggaggtctctgttgacaacctcgcagctttgaagatattgattatcctaactacatttataaactctctacggcgctttatgggctcatacacaccgctatagcatggcctgaatgcctaatagatttttttatcactaatggcttcaaagtcggaaaggacgatcctactttatttactaaaactcttgacaatgatgtgtttgtatgccaaattatgctgatgatagtatatttgggtctactaacgaatctacatgtgaggaattcagtangatcatgacacagaaattccagatgtcaatgtcgggggagttgaa

SEQ ID NO: 27467 - DNA, 304 bp, Zea mays
  unsure (1)..(304): unsure at all n locations
tgtctagcttggatcacggtgccggtccttctgctcctggtgctgaggaagtgccagtgcctgaatttactgaagctgatcccaatgggtgtgacccatctgacgctgatcccaatgggtgtgatgtccgtgttgttgatgaggatgatgaagaagaggacgaaatccctctgattcggaagaacaaccggtgttacatagctagtggggaaagtagtggtggtcctttctctgccttgtctgccctcactggtctgcaagaatatctctggtgaactttgatcanactcttgaagacatggtt

SEQ ID NO: 27468 - DNA, 429 bp, Zea mays
  unsure (1)..(429): unsure at all n locations
agctttacctagatggatttgcataagaagaagtcggtctagatgcatgcttaatggctaagacttgcatgggctggctgtggcatcgccgcttaacacatgtggggatgaagaacctccacaagcttctaaagggagaacatgtgataggtctaaccaatgttcatttcgaaaaagatagaccttgtgcagcttgtcaagcanggaaacaggtgggaggagcgcatcacagcaagaatgtgatgaccacttcaagatccctggagctgctgcatatggacctcttctgacccgtcgcctatctgagcatagggggaagtaagtatggtctagttaatgttgatgacttttcccgcttcacttgggtgttctttttgcaggataagtctgaaacccaagggacccttcagcgcttcctaaagagagctc

SEQ ID NO: 27469 - DNA, 222 bp, Zea mays
cctttgccaacacctagagcgcgccgtatggacctttctctttctagcgaacctcagagttcactccacatatcttacatgcatgaacatacctgatcatatgtggtatacgatgacaatataaatgtacaagagaatggacatccgctctcacctgcagctatacgagggatatctactctatgttttgagggctcagaccagcgtggacaactctaaact

SEQ ID NO: 27470 - DNA, 375 bp, Zea mays
  unsure (1)..(375): unsure at all n locations
ttgagttaactttgtagaaaatatcgtaatccacgaattaaacattattctgtaaatttgtcaataccttgtaataaatnttaccttttcatccatgaatgcattgctttgatgtggacgaaacttgtacttttntaaccgaaggcgagaaacaccttcccttcttttcatacacaacgaagcataaatctgcttcttttgtattcgccgaagccttgttattaaaaccgaagcaactgtctgtgttctatgatatgatgatgatgatcctatgaatgtctaaatgaatgtatatgaatgcaatgaatgatgtgatgtaatgcgcaagtgaatgtccaaacacacatgtacgaaaccacatccagactctgcatt

SEQ ID NO: 27471 - DNA, 423 bp, Zea mays
  unsure (1)..(423): unsure at all n locations
tgagttatgagggccctatattgcataggaccagtgactctctcaattaaggactttgccacctagatttgtctaggtctactcttatttgcgggacctaggaatgtaaccttaatctttccatttgcaacctttcttagaacatagtgagcattgaaagcaaatggtcttgagtgcttaggcaagggagttggtggtttagctttacagttgtgggcaaaatgaccttcatttccacactcacagcatttgataggcttgtgagtctgctttggcttgtattgagtgatagctctcttttgcacaaaagcattgtatccaataccactcttggtatttntcataacagtgttcataagcagctcattttggaggtattgacccttgttgaactttttgcacacttgtgcaagatgttcattt

SEQ ID NO: 27472 - DNA, 428 bp, Zea mays
  unsure (1)..(428): unsure at all n locations
agcttcttaaggctgggcttctgttccccctaagcaattntgtggttgaagttttaaaaatatatcaggtttaccttcatcaaattactcccgaagcaatcataagaatgggaatcttcgtctgggccgtgaggagccagggcttggagccaaatgcaaaaagtttctgcagtatgctcgaactgttatatgagacgaaaccttggggcaaagagcaataccataataattttggctgctatagcttcgttgcttgctatgggtcaagctgccccgtgccgactnttcggaagagatggcccggagattggatgaaggaatggttctatgtgaaaaatgatttaaaagcacgagaggatattaaggagatcatcatgcgccctatctggcagcgtttcggcctctcgaagccgaaggtgaaattgatg

SEQ ID NO: 27473 - DNA, 378 bp, Zea mays
ttacatgtgccaaagggtctcagcagaccagtatagagactctgaaaggggtcaaataacaagagcaaaagaccaccgaagtgtgccctggtctggcgcaccacactgtacggtgtgccaccggacagtgtccggtgcaccagggaaccaaactctgaacttgccaccttcgggaattctgggagccgcttcgctataattcaccggactgtctggtgtagcaccggactgtccggtgtgccagcggagcaacgactacttcgcgccaacggtcgtctgcaaagagcagttaatgcgctacagtgcacgcagaagtcatagcagagccagaaggcgtatcggacagtgaacagtgactgtccggtgcaccaccggact

SEQ ID NO: 27474 - DNA, 422 bp, Zea mays
agcttaacaacaggggtaatagcctcatgtgttttgcaagataaaagttcattttcaacaagaagattgtcatgatcaaatttcattagagcctagtcctccttgtactctactagactattttgcaactgcctattagcttcatttaaattggcagatttttccttagcatcttttatggagattgtgagctcatttacagcctgatgacatagttttattttcttcttttatttcatcactagcctttataactatgtcatacttggcatttaaagattcattttcatttttcaacctatcacatttagcttttgactttctaatgagttgagcatattctttaagtaagtcagctaactcatcatatgaaggtgaagcaaattcttcatcactatcactatcactatcatcatcaatat

SEQ ID NO: 27475 - DNA, 344 bp, Zea mays
  unsure (1)..(344): unsure at all n locations
tgtgagcgacccaatagacatcgtttagcgtctttttttttcttaaatttttccgataaaggaaactttattaatcttagacaattacattaaaataatataagagtactaacattttttttcttcaagttctcacacaagtgaaaacaaatttatgtccatatcattttcaaggacagcgccgattntttcttataagactttgtgactgtttggttcctatagcgccacaacgtgtctaaacttagtcactcgaattaaaaaaactaattttaaacaaaaaaaagattagataagttctaacgttttaggcagaaactaaacaagccctttagtttatggat

SEQ ID NO: 27476 - DNA, 371 bp, Zea mays
  unsure (1)..(371): unsure at all n locations
ccgtcagcgccacctgcggaccgacctccggctgtttggctttaatatctggttctcgtcccttgagtggggacgcgaacgagagccttccagcggcagcgttcgtcctgggaccatcgctgctgctgtagaggtcgctggcgagtcaccaggagtttgtcgtcccgcaggctctccgatgtggaggttgttcatacccgtgggagtggaaccagagttccgtttgtaatggcaccttgagtgccggtgtatgttcattgcagctgtcggggcctgaacatctangtattttgggtgtaataccatgttnttcctcatttcaagcactangactcgcctgtcngctagctggaccgcttaaccaagtgtga

SEQ ID NO: 27477 - DNA, 313 bp, Zea mays
  unsure (1)..(313): unsure at all n locations
aacacccgttttggctcacgntccatctttttcttcttcagctggtcttcatcggctttattcagaacatcagccactcttttcctttgttgtccttcggcacccttgtctagctgctcgtaatcaggatattcaaagcctagtgcatccattactcggtttaaccttcgcttcggatgggtgccgaaggctgcggtcatcaattgatcttcttttntagagtaattaccaagtatttcattgcacattacttcgattgtgtccagccattcttggcaaggcattttgaaatggttcttgaaattgtaatgat

SEQ ID NO: 27478 - DNA, 359 bp, Zea mays
agcttcatgcaactgctgccagaaatgagatgagaactgcggtcctctgtgtgacactatcttctttggcacaccatgaagacaaacgatccgagacatatacaattctgccaataccgcactgctatagatggttttgacaggtatgaagtgggctgacttggtcagacggtccactactacccaaatggaatcgtagccggctcgagtgcgaggcaatccgactatgaaatccataccaatatcatcccatttccactgagggatctgcaacgggtgcaacaatccaccaggtctctggtgctctgccttaattcttcggcaactatcgcacatagccacatgctctgcgatttccc

SEQ ID NO: 27479 - DNA, 452 bp, Zea mays
gctaatgccggaatgccatacaggaagcttcctcactaatcttatccccccattgtctcatggcaaaaggagatgctcaagtcaaaatcatcaccgatttaaatgatatataagatgacgatgatatcgatgatgttgatgatgatggctattcatatgatgatcttgttagaatgctaggtgaggctgatgactacatgcacaaagaaaaagaaaaatctaagaccttgaaggaaaaggataaaaaccttcaagtgtcttatgaggagctcaagacctctcacaatgacctaaaagaaaagtggagaagcttgcggatgctcaaaaatcatctattgtgcttgaagttaaggtggtcactaaggatatttgagtcacttgtgactaacatgatggaatcacacgtgaatcactatctactaactctatttgtgataaatgcaaatttctct

SEQ ID NO: 27480 - DNA, 404 bp, Zea mays
agtaccaagtctcccacctggaagtctcggggccaaacccctcaggcgtggtagcgtcgcagagactgctgataccgcgccgagtgtagtaaggccatgtcccgagcctcttccagctggtccagcgagtcttctcggctggtctggttgctttggtcgtcgaacaccctcgtcctcggggaaccgtattctaagtctgtgggaaagatagcctcggccccatagactagaaagaacggcgagaaactcgtggctcggcttggcgtcgtcctcagactccagaccaccgagggtagctctttcatccatcgcttgccgaacttgttgaggtcgttgtagatccttggtttaagtccctgcagaagcataccgttggtacgctccacctgcccattcgtcatggg

SEQ ID NO: 27481 - DNA, 413 bp, Zea mays
acattgtctccctgttggaagtgtgagcacctagaggggggggggtgaataagtgatcctgttaaacttaaacttatagccacaaaaacttgtttagtgttagcacaataaatgccaagtggctagaaaggagtctcaacaaaccacaataccacaagagatcaatcgcagagataacacagtggtttatcccgtggttcggccaagaccaacgcttgcctactccacgttgtggtgtcccaacggacgagggttgcaatcaacccctctcaagcggtcaaaagacccacttgaataccacggtgttgtgcttgctttttctcaatcccgtttgcgaggaatctccacaacttggagcctctcgcccttacaattgaagttcacaaagaaacacatagcaggggtggaatgag

SEQ ID NO: 27482 - DNA, 316 bp, Zea mays
tatccctccacctctcctcataggaattgcttatatcatgctagggtaagaatcttggaggtaccgacgaactggacaaagaagagtattcatgttattgtggtcactaatggtgagcacattttacgcctgcgatatctaggttgtcacgttagatttatatgccacacctttttgcttcatgaatcatccgtgcatctgaatatttggctaactgtggagtttgttgcttattaccttttctgtgtgggatcatttatgcatctaatcttttggttaagtgtagagtttaatcttttctgtgtgaaatgtgtat

SEQ ID NO: 27483 - DNA, 423 bp, Zea mays
  unsure (1)..(423): unsure at all n locations
gcttagcccgaagcatcgaanatagatttatgacccaaatttgggtaaatggcgggcgaaaaatggctggtgacgaagctcgaagccaccttaagccagtgagaaacttatatttgttacttttaccttctccttgaaatttgcacctttcttattctattctttaatatgtgtaggatgacgaagctgaagtatgacgaagctgaagcttaatagttgttataatagactttcctgcaaaaaattctggagagatccttgtaataatataattatggaaaaaacttatgtaaatttgtacataccttgtaatatatcttgtctcatttatccgtgtacaatctgctttgctgtgaacgaaactacacttttgagccgaaggcgaaaaacaccttcccttcttttcgtacacaacgaagcatg

SEQ ID NO: 27484 - DNA, 196 bp, Zea mays
  unsure (1)..(196): unsure at all n locations
caagaacccctggagctgctacacatggatctttttggacccgtcgcctatctaagcatagggggaagtaagtatggtttagttattgttgatgacnttttccgcttcacttgggtgttcttcttgcaggataagtctgaaacccaagggaccctcaagcgcttcctcaggagagctcaaaatgagtttgagctca

SEQ ID NO: 27485 - DNA, 415 bp, Zea mays
  unsure (1)..(415): unsure at all n locations
cacatgtgctaagcggcgatgccacagtcagcccatgctagtcttagctattaagcatgcatctagaccggccctttcttttgcaaaatcaactaaatacagtttgccggctaatacacccttaaaagctagtgaaccatcatttcttctaaagacagacacatctatatttggtaatagacagntataccccatatgacataattgactaacagatagcaaaatatattcaagactctctactaaaaatacattagatatagaatgctcattagaaattgcaattttacctaacccttctacccggccttgattcccatcaccgaatatgattgaatcttgggaattcttattcttgacgtaggaggtgaacatcttcttttcccccgcatatggtttgtgcatacgctatcaa

SEQ ID NO: 27486 - DNA, 384 bp, Zea mays
  unsure (1)..(384): unsure at all n locations
gtgaaaagtgccttcctcaacggaccaatcatgaagaggtatatgttgagcaacctcccggctttgaagatagtgagtaccctaactatgtatataaactctctaaggcgctttatgggattaagcaagccccaagagcatggtatgaatgcctaagagatttccttatcactaatggcttctaagtcgaaaaggtcgatcctactttatttactaaaactcttgacaatgatttgtttgtatgccaaatttatgttgatgatattatatttgggtctactaacgaatctacttgtggagaatttagtaggatcatgacacagaaattcgagatgtctatgatgggggagttgaaatacttcttangatatcaagtgaagcaac

SEQ ID NO: 27487 - DNA, 444 bp, Zea mays
  unsure (1)..(444): unsure at all n locations
agcttgagggtgtactcgtctcgacagagctgggccatttaacttacagccagagcataaaaataatatatgtataataattaatttataggtaagtgtaaattaattcatcaatagaaaatagtaattatactcatagctatagagaccacatcaatgtgatagcaaattaacgcaactcaccactgatgaagtcactattaacacacatatctagcaggttggcctatacttatattcgcatataccaatttaacacatagacacaattctgaaagggaaatgtgcccttgggctatntctataattgttatcgtgaataaatgtcctacacaaatattttgaactcttatgtgctaaacgagcaagaagtgcataatcagagacaaggtnatgttctagacttagtgaactatatctgagtactaacatggttatctaagt

SEQ ID NO: 27488 - DNA, 411 bp, Zea mays
  unsure (1)..(411): unsure at all n locations
cagcttacanagaggaaccttcggccattntatacaaacagctttcgtctatagactgcttctccctgtaagaccttcggcgacgaagcatangcccaacagtagcccctttcgcggtgctacatcgtttttcgtaacgagcttgatccgtgaaaaaagtcttttaagcttctgagcgccgaaggtctaaaaaacaccttccctgagctcgttgtcgagaaacgattcaatctcccagcgcgtagcggccccaccttgcagagttactgttcggtctctgcggtccaccacgcagcgagtgcgagcgggtgtccgcctggtggtaaaaatctggcgcttcgcttcttacctgcagactatataatagacgaganggttgaagtaccacagcattcattgtatttgcactgt

SEQ ID NO: 27489 - DNA, 284 bp, Zea mays
gaaatgcttctcgcatcaaaaagcaatggccacctgttccgaatcgtttggccctgacacactgatgctggcgactgggtcaccctttccctttatttggtccgagccataccctccagaataaacatggtcaccccgacagtacccagcctccccgatgtaacaacctcttcaagacctatcttggagacgcgcttcccctacagctctaaatatccagctaaacaaagctggccgacaccgttttctgaggattactaagagactcgtctctcgacagtcga

SEQ ID NO: 27490 - DNA, 278 bp, Zea mays
  unsure (1)..(278): unsure at all n locations
tgcagcatcngcttcggcacccgcagcagtcactatattgggcgctgaagctaaaggcggtgttcgctcgatggcttgcatcacgtccactattcttcggttctttttctcttcaaccttctcctttgcagccgaaggatgttctttcttctgtaaaaatttcatcagttctggtcacagaggacttaacagcttgatgggcagggagtcagtcattacctttaaaatttctgccacttcggcaacagagggtgtcgaaggagcttctttatgtctca

SEQ ID NO: 27491 - DNA, 421 bp, Zea mays
  unsure (1)..(421): unsure at all n locations
agcttctgctcatacaagaatacagaggcactttgtacaatgaaaaatgctntgatgtgcacgaaaagaagggaaggtgtttttcgccttcggctcaaaagatttactgtgggtgtcgtccacaacaaatcaatttatacatggacggaaaggtaaaattatattacaaggtatggacaaatatgtacaatgttgtgttcaactctcaaattacaatcttttgcaaaaataatgcaaagagatcctaagctctattcaggaagtcacaaaaagaagcttcagcccagcatccttcggaatgcacttcggcttactgatctttggcgccaccatcctacagacagacaacggtataaggtaaatgcaagtgtaataaagaaaaatcaaggtaaacaacaggtacaagttttgtaccgagtta

SEQ ID NO: 27492 - DNA, 348 bp, Zea mays
  unsure (1)..(348): unsure at all n locations
acatcgatgatgtgaggcattatctcataaatgttctacacaacaaccacctagatgtagagattgcgagtggcagcctcatgacaagaatgtcatcatggatgtgtggcacatcgatggcaaagtccgtcgccttaaggtcctccccatcaagggtgggttgatcaaaggcaactcggatatagcacatgtacgagcaatgcgatcaagagcaacatggatgcaagcatncacaacatcatgctcaatctaggcaagagtgacctcacgctcaaccttatcaacacgagagaggaagacgatatggagtcctaggtcatgtgctcacattccttcttggcaaggcaa

SEQ ID NO: 27493 - DNA, 425 bp, Zea mays
ttgcatatatattttgttgcctcccaatagtatctccttctgctagattcacattatcctcagtggcattatgttccaaatctacatatccagactgaatatcatctgcttcagcaccaattatacttgcagcccttccaaatgcagcctacaagagttcttgcatgctatccaatcttccatcttggcggtctcgtattggacctgaagtagtcaaatttgcactaatatttggtacatcagcaagttccatagatggtctgtcatatttttcaccatgatgaacctagatagtataacctttaataataccatcatatctcagatgtgtccggacctcatcacaactggtggtgtatctatttttacagtttatgcatagacaaagtatctcgctaccttgtggaaggtcacgggaagcaaat

SEQ ID NO: 27494 - DNA, 434 bp, Zea mays
  unsure (1)..(434): unsure at all n locations
tctaagggagaacacattttgggactaacaaatgttcattttgagaaagacaggatntgtagcgcatgtcatgcagggaagcaagttgggactcatcatccacacaagaacatcatgacgactgataggccacttgagctcctacacatggatctattctgcccgatagcttacataagcatcggctggagtaagtactgtctagttattgtggatgattattctcgcttcacttgggtgttctttttgcaggaaaaatctcatacccaagagaccttaaaaggagtcttgagacgggctcaaaatgagttctgcttaaggatcaagaaaattataagcgacaacgggacggagttcaagaactctcaaattgaaggcttcttgagganganggcataagcattgagtctcttctcctacaccccacaacaaat

SEQ ID NO: 27495 - DNA, 433 bp, Zea mays
  unsure (1)..(433): unsure at all n locations
tagcttcggcaccctggctgtttcaatgtacctgggccgttgtgncaaaacactgatcttctttccctttagcgtagcagagatggccgaagcaacaacatactttcttttattatcctgctctagcgagggataacattaaatctgggtatataaagccaattacattaaaaactctgtttaatcttttcttgcctcgatcttcgaggctaatgtcatggcatcatctttggaccttgtgtaagccccaaacaattcatcactagttgcctcaatatagatcaacaatcaatatgtggctataaaactgagctctgtatctgaaggagtgttcagataaaccaagctgacttgactggaccctgcagcagtttctcttcgtcatctcccagtccctcacaaaaggccacacttctattagcaatgtgctctt

SEQ ID NO: 27496 - DNA, 290 bp, Zea mays
agcttctaaagggagaacacgtgatatggttaactaatgtgcaattcgaaaaagatagaccttgtgcagcttgtcaagcacggaaacaggtgggaggctctcatcacaccaaaaatgtgatgaccacatcaagacccttggagatgcttcatatggacctcttcggacccgtcgcctatctaagtataagaggaagtaagtatggtcttgttatagatgatgatttttcccgcttcacttgggtattctttctgcaggataaatccgaaacccaggggaccctcaagcgc

SEQ ID NO: 27497 - DNA, 362 bp, Zea mays
gaaagctggactacgatttcccttaagcagttttgttgtggaagtactgaaagtatttgaagtctacctttaccaactcacttccgaatcaatcataaggatgggcatcttcctctatgccgcgaagagccaacgtttggaaccaaatgcttaaaggttttgcaacatacatgagttgttgtacgagacgaaaccttggggcaaagagccagatcacaacaattttggctgctacagcttctgcgcccgatctgggtcaaggtgccccgcgccaacctttctgaaaagatgggccggccactggatgacagaatggttttatgtgaagaatgatttaaaaatctcggaagatattaaagata

SEQ ID NO: 27498 - DNA, 383 bp, Zea mays
ctgccgaagcttctacatagcaaaacataaaagactacttcttccttctgccgaagctcttacatagcacaacataaaagactacttcttccttctgccgaagctgttacatagcaaaacataaaagactacttcctctttctgccgaagcttttacatagcaaaacataaaagactacttcctctttctgccgaagcttttacttttacacaacgattcataaaaaaccaattctcttttttgccgaagcaaccactttggtacataaatgctatgaatgaatgcttatgtatgcaaatgccatgatgtaatgtaatgtgcaaatgaatgtccgaagcgtatatccgaagccacactcatccatcattttcttaggagcaaa

SEQ ID NO: 27499 - DNA, 233 bp, Zea mays
aacattcctcgaggagaaaatgaacaagttgatatgctaaccaagtcagcagcacaagggctggccttaccttcggaagtattttatgaaacaataaaggcaccttcggttgaacttcttgaaataacagacctcaatatatctcctgttcatagtgaagattggagaactgagatcatttctttccttcacggtaatgtcctttcagatgacgaagcttataacaagagaat

SEQ ID NO: 27500 - DNA, 439 bp, Zea mays
  unsure (1)..(439): unsure at all n locations
agctntatgtatattggtactgtatcatttgtgatctactattcttccgcggcattttacttgacactttgttgcatccctcgatacatgtgtattgtgtgaccttttttacttaacttaccgaaggaattcctacagcatttttatttcagagaagggatttaccggggttagttttacaatgcttgtaaccacgttctaatgtcttgtgctagctgatctctcattctatatgtgataaggagcaactccttttttgacatatatttccataactgtgttgttggagcaataccctcaaagatccagacatttttgcactttcagatatatcatgccatggtgattaacagttccacacttccagatatatcaagccagggtgattaacagtttcacggaccacagctttcttttttagatcttgtaccatcacgtg

SEQ ID NO: 27501 - DNA, 372 bp, Zea mays
  unsure (1)..(372): unsure at all n locations
gagacttatacctggtgcttgccttatctcttgtaattgctttttaccttataccgcttgtttgcttgcaggatggtggtgccgaagattgataatccgaagcatactccgaaggctgctgaagctactttntaggtctgcctgtatagagcttagaagcatttgtattatctttgtaaaagaaattgtaattgagaaatgaacagtactttgtatacttggccataccttgtaatatatttttacctttccgttcatgtaaaaattgctttgctatggacgaaattngtatcttttgagccgaaggcgaaaaacaccttcccttcttttcgtacacaacgaagcatgtccgtgcataaaatgtgtatattt

SEQ ID NO: 27502 - DNA, 416 bp, Zea mays
  unsure (1)..(416): unsure at all n locations
agcttncccctggtgcaggataatataagctctatcccatcgcttgtgttccatcttgcatcgacccatctggacaggggcacgcggcactaaaattcactagtcggtctggctaagggccccccgggtccgaaacactgacagttggcgcgccaggtaggggcacgctgtgtgttaacgaatacttttccattgagttccagatgggtagctttcagcagcctcttcagcccaggacggtgctccgcttcagaagtctcgagttcatgtccctcgacggcagctacgacatggtactgctccctccacagcatgacaacaaagacagtcgacggctcgcctggcggaggcgaactcgatgacggcatcacctcgcggcagaagaggaacacccgggtttaccctgccaccctcct

SEQ ID NO: 27503 - DNA, 436 bp, Zea mays
agccacctgcggcatgccaagcttcataattctctcatgataatcagagccacttcttccatataaatctacgctcgctagaattgtttgatggcgggcttctctacttcgacaacgatgctgccggcgcttggacctttggtttcagagaaacttacgaaggataacttcctcttatggagagcccaattcatgcctgttctcatgggtgcacaattgatgcgctatctggatgagaagacagagattccgccagaaaagatcacgatcttgggagacgacaagaaactggcgactgtcctcagcccagaatactcggtatgggtggcacaagaccagcaagtgctggcctatcttctgaactcgcttacgaatgaaactctctgacatgttgctaccgtagacacctcgactgaagcatggaaggctcttagtg

SEQ ID NO: 27504 - DNA, 400 bp, Zea mays
  unsure (1)..(400): unsure at all n locations
aagatcttttgcatgcgaaacttctcagctgttaagttctattgctacacaatgtctctgctatactcatatctttccttcattattagttcgatcggcaagcagatggcgtcttggagcctttccaagctaagcatgtcttaacaaggattaatctcgaatgtttagctgccattcttcacaagaaagaaagccactatgacttagatgtatacgcttatgtaaatcgtcaagtctactcggtaagttnttcgtgtccacttcgagttacaatagctggctgtgtaatattattgattccatggtcaatgacattaataatatgcaccgtactgtaaaggtttaaggattacacaggtaagggtgtgctcgtgataccaatgaggtgatacacataccg

SEQ ID NO: 27505 - DNA, 342 bp, Zea mays
agcttctaagggagaacacattttgggactaacaaatgttcattttgagaaagacacggtttgtagcgcatggtaagcacgaaagcaaagttggtgctcaccatccacacaaaaatattatgacaacggacaggtcgctcgagctactccacatggatctattctgcccgaacgcttacataagcatcggtgggaagaagtgctgtctagatattatggatgattattctcgcttcacttgggtattctttttgcaggaaaaatctcaaacccaagagaaccttaagggattcttgagacaagctcaaaataagttcagcttaaggatcaaaaactcacaaa

SEQ ID NO: 27506 - DNA, 235 bp, Zea mays
cgtctatggggtgccccgaggcatgatcctgtgattcatcatctccgagcggtgcattggagcccacccagagaagatcgcagccatcaccagcatggggcccatcaaggacttaaaaggtgtacatagggtcatgggatgtctcgcggctttgaagccgttcatctcgcgcctcggcgaaagaggcctgcccctgtaccatctcttaaagaaggccgagtgcttcacttggact

SEQ ID NO: 27507 - DNA, 346 bp, Zea mays
tagcttcttgtagctgctggcaagatgagatgttaactgtgttcctcgatctgacactatcttcttcggcaccccatgaaggcagactatccgcgacatgtataactcatctaaccttgctccggtgtatgtcgtcttcacacgtatgaaatgggccacctttgttaagcggtccacaaccacccatatggaatcgtagccggcccgggtaccatgtacgccaactatgaaatccatcccgatttcatgccacttccactgaggaatacccaatggctgcaacaatccggcaggcctttgatgctctgctttggttctctgacagctatcacagatggcgacatat

SEQ ID NO: 27508 - DNA, 432 bp, Zea mays
  unsure (1)..(432): unsure at all n locations
agcttataacataattgttccttcttcacaaccgttgaaggatattatgagaaatcgagaagctactggaaggattggaaaatgggcggcagagctcaatgaattttgtattgattatgttcatagatcttcgattcagtctcaagcgttggcagacttcattgctgactggacgccaggggctcangaggaagaaaccaataaagatgccgaaacatggatagtgttttgcgatgggtcttggggaaccttcggagcaggagcagctgctgtgttggtttcaccttctaaagttaaaacctattatgcggcaagactcaatttcagttgcacaaataatattgctgagtacgaagctctgctcttgggtcttcggaagttaaaggcaatgggaatcagaanggccattcttaaaactgattctcaagttat

SEQ ID NO: 27509 - DNA, 329 bp, Zea mays
  unsure (1)..(329): unsure at all n locations
agctgcaacctgagcgcttatagccactcccttatcattctnctggatcttgcacttgcgctatctgtcaacaaaaacagccacttgtacttcttcagattcaacagctctcagtgaatgtcttctggaacgcctcaaagggacaactgcgcccacctctacagaaccggcttgagcagacttcctccttgtcttggcaacaacaggcgaacaagtggcttggaacctcaagtcacagtctcgagcctcagcacataacgagtttctgctggactgcctcacaaggacctcaggtcacaatcttgaacctcaggtcacagtcttggcaa

SEQ ID NO: 27510 - DNA, 451 bp, Zea mays
tctgagtcacctgcggcatgaagcttctaagggagaacacgtgataggtttgactaacgtacaattcgaaaaagatagaccttgtgcagcttgtcaagcaggtaaacaggtgggaggagcgcatcacagcaagaatgtgatgaccacttcaagacccctggagctgctgcatatggatctcttcggacccgtcgcctatctgagcataggaggaagtaagtatggtctagttattgttgatgacttttcccgcttcacttgggtgttctttttgcaggataagtctgaaacccaagggacccttcagcgcttcctcaggagagctcaaaatgagtttgagctcaaggtgaagaagataaggagcgacaacgggtccgagttcaagaaccttcaagtggaggagttccttgaagaggaagggatcaagcacgagttctccgctccctacaca

SEQ ID NO: 27511 - DNA, 404 bp, Zea mays
  unsure (1)..(404): unsure at all n locations
tgagtcagntcttctacagagaagtggtgatgcccaaagaaccgataagggtatgaagcacattcatgagaaaatggaagccgacaaagcaaagtgcttctgaaaagatgaccaaggactaatatggtttaaagatagcatagttttgccaaaagatgctgaagttcgccaacaaattntggacgaagctcatcttagtcgatattccattcatccggggagtactaagatgtatcaagacttaaggcaacactattagtggacaaaaatgaagattgaaatcgctcgctatgtggcaagatgtgacacctgtagacgtgtcaaggcagtgcatatgaagaccgctggaccattacaatccttgcccatcccagcttggaaatgggaggatattagtatggact

SEQ ID NO: 27512 - DNA, 357 bp, Zea mays
agcttctcgaattattttttttactaaaaatcaatttctaaatgattttctctattttataatcagtctggactgctcgccaaaatcagagaagtgcagggtctcgggggtaaaagtcccaagactcagaattcccagccagtggaccgtgggttcatttcaaaataacctatggttcttcacgcaatagcgccacgacgaaggggtataggattacatcggccgttggatcttcactggacgaccgagatattaaaacccaccttgtcggactaaattttatgtggcacacgatatgatcttggctgtctcttcaagatcgacggtcaacaattcgcttgaacccgattgaatact

SEQ ID NO: 27513 - DNA, 420 bp, Zea mays
  unsure (1)..(420): unsure at all n locations
tgcaagctgtgaaggttcttcatccccacatgtgctaagcggcgatgccacagccagccatgccagtcttagcaattaagcatgcatctagaccggcctcctcttttgcaaaatcaactaaataaagtttgccgtctaatacacccttaaatgctagtgaaccatcacaccttctaaagacagacacatctacatttgtgaatagacagttatatcccatattgcataattgactaacagatagcaaattataaccaagagactcaactaaaaacacattagagatagagtgcttattagatattgcaattntacctaacccttttaccttgccttgattcccatcaccgaatattattgaatcttgngaatccttattcttgacgtaggaggtgaacatcttcttctcccccgtcatat

SEQ ID NO: 27514 - DNA, 279 bp, Zea mays
agaatgttgcttctgcagatcagccgaagcctatgctcttatgtgaagatatagcagatcaaagggtactgctggggtctcagttatctgatgagcacgaaaaaactctgataaggtttctgttcaacaacaaagatgtctttgcttggacagccaatgatctttgtggtgtcaatagagatgtcatcgaacattcacttaatgtggatccatctttcagaccaaggaagcaaagacttcataagatgtctgatgataaaactgaaggtgctcgaaatg

SEQ ID NO: 27515 - DNA, 419 bp, Zea mays
ctgcagcttcggacaccaaacttatttcttagggtgtggacaagttttttccccttcgtccgccctcacaatggacagatcccggaaatacctttctctcatattaacaagatgattctctttgatagttgatttaccataaactgaatggcttggtcgccaggggcgatcttcggagtcttcgccaccgctgtccatatcataactttcactgtcaccagtatcttcagacagcccctccagaatttccttggtaatcttttctgtgttggacttcgacatcgctataagaaaccctaggttcttctcttcatcaagactcagcttcatctcagcagcagccttcttagcagcttcagacatcttcggaagcgctaaaaaactgtttttaaaagccgaagcttcaaagctaaaaactt

SEQ ID NO: 27516 - DNA, 417 bp, Zea mays
agcttgactctcgaaatcaaacgaaactccagctcgaagcctacttcgtcagaagaagaaaaaaaacttcggaagaaaagtatttagttcccaaaaaaataatccagaattaaatggctagagtgtgttctaccgctagggttgagcgtgagggaggcgaagctgaaggatcggagactgttcccatctccgaagcgatgcaacgatccggactggtaatttcggaagaaatccccactgctgaaatagaacaggcaactgccgaagcggaagaaggagacattgaggaaactgattccgaagatgattatcatattgccatgccaagtaagcccagccacttggacttcggaaagtcgactgtctctaaggctgatctctccaagatggtgaagtcgggttatttcagtgagagtc

SEQ ID NO: 27517 - DNA, 317 bp, Zea mays
  unsure (1)..(317): unsure at all n locations
acccagctgtgcatatgggggtgtagctatgcgctaatgtggacggcgaanaagtgcttgagctctatagaagcgtggtcggcagcgcggccccaggtcctgacccctgtagcggtgcggccggctccgccgagttgaagccgagctctgtagtgccatggccggtggtatggcctagtcgtcgaggtggccttgaagtttgtgtcctgctgacgtttctttgactttgtagagagccgaggacagtcgacatcatgggcgcatgcccgggatcatcattacctgttactagagtaatttgatgtgacaccggtcct

SEQ ID NO: 27518 - DNA, 314 bp, Zea mays
gcttttaatgacttgtgccaatatgccggatatcacacagataccgatgagaagaagagagacatgttcttgagggggcttaacactaaactacgtgaccgtatcaacacctgtcaggccaatagatacaatgagttggtcaacatggctatctcccatgaggactgcattacacctcgacaggcagaaaaaaagaagaagacccctgtggcaggaccttcatcttatccacagcgcttcaagattgtgttcgacactcagagcaagggaccccaacagcagcagcaactagggaggtgggtgatccgaccaca

SEQ ID NO: 27519 - DNA, 236 bp, Zea mays
agctctcttctgggttttggtgggttggatgacaacccaatctaaggactaacaagtgcgctaaatgatgaacaagggcttaatgcagagctaacagggttcaacacaagtgaacaagtgtgatggtccaaagactgaactatctattgatgatggacatctcaagtgagatggacattgcttaagtgaaactcggtgtgcgttactcatagacaatccaccaaaccaacgatgga

SEQ ID NO: 27520 - DNA, 404 bp, Zea mays
  unsure (1)..(404): unsure at all n locations
gaatataatttccatatcttataccttcactcaaattgttctcgtatcacctctctctaggtcttatctctttactcttggttatgatgcttgtttctataacctctattaccaagggcatccttttgatcttctattcacatgatttattgcagtcaggtcatttcacccttggttcttgcagtattatttttatgctgatggtttctccggtactattcttgntatagatcagatgggacataatgccggtcgcaaaccgttcacagacatctctagcaatatcattagaggtaatagtcaatacacatactgaccattcatcggtgaaacgtagtagtagggaacactaatacacaaacttacattatatgtgatcaaaatgaattgctccgaccaatggt

SEQ ID NO: 27521 - DNA, 360 bp, Zea mays
gagtagactaagcactcgcgctagtggaagttgttattaaccggaatacaagttggaattcaaagagaataattattgaagataccaatggtgaaaatggtaatggtcaagtccaagataagaaaactagacaaatgcaattgtctagatcttctataactagacacaactaaacgtatattcttatttcacttgttcaacaaattttactataatttgctattgctaactcatatttttctttttcccagatcttattcgctatatgggatttggttgtaaatggatttgaatcaagatgactactaaataacgtatttttcaacacttattacttattctataactactaagttattt

SEQ ID NO: 27522 - DNA, 367 bp, Zea mays
  unsure (1)..(367): unsure at all n locations
tgtagcgcatgtcaagcaggaaagcaagttggctctcatcatncacacaagaacatcatgacgaccgacaggccgcttgagctactccacatggatntattcggcccgatcgcctacataagcatcgacggggagtagtattgtcttgtaattatggaggactattctcgcttcacttgggtgtttttttgtaggaaaaatcacagacccaagagacctttgaaggattcttgagacgggctcaaaatgagtttggattaaggataaaaaagataagaagcgataatgggacggagttcaagaactcacanatcgaaggctttcttgatgatgaaggcatcaagcatgagttctcttctcctacaca

SEQ ID NO: 27523 - DNA, 317 bp, Zea mays
cacttatagagcatactttgtagcaaaattaaacttttcattctctaaggcatgttcattaatcttaacactaagttgagctacgtgatcatggatagcatcaacattaatgtctctacatctagaacaaatagtaacatgctccatggtagatgtagacggtttgcaacatttaactcatcaatcttagcatgtaacatgacattttcatttctaatgttggaaccatatcattgcaactttaagatttaaccttagtatcaatatcatttcttattaggctagcattgagtattaacctgtcaacttagcaacaa

SEQ ID NO: 27524 - DNA, 381 bp, Zea mays
  unsure (1)..(381): unsure at all n locations
taagtcacctgcggcatgcaagcttcggagccgaagcagctccagcttgatttttgaacgaagccatcagctcaaaaaagtggaagtgagttcaccggaggtgggcgtcaatgttggggacttgttcttaaatgctatgaattaaaaacaaagcaacataaaatgttaaatatcaatgccctctgtccgccagagcattatctccacaaggatttaatgatcttctgacgaaggtcaccagcataatattacgaaggtttcaccttcgtaattaatcttaccaatataatacaaagttaagtanagcctgaatcattaaagataaatacattacaaataaatgatatcattcacatattttattatatgaatttaagatat

SEQ ID NO: 27525 - DNA, 431 bp, Zea mays
  unsure (1)..(431): unsure at all n locations
agcttatgaagattcttcatccctacatgagccagtcgacggtgccagagccaacccatgttagtcttagcaattaagcaagtgtcgagttcagctctattaaaatcaactaagtatagctgaccctctaacactcccttaaatgctactgaatcatcacttcttctaaagacagtaacacctaaatctgtaaaaagacagttgtagcccattttacataattgagaaacggaaagcaaattgtaatctaaagaatctacaagaaaaacatttgaaatagaatggtcaggagatatagcaattttaccaagtcctttgaccaaaccttgatttccatccctgaatgtgatagctcgttggggatcttggtttttctcataggaggagaatatccttttctcccctgttatgtnggttgtgcacccgctatc

SEQ ID NO: 27526 - DNA, 453 bp, Zea mays
  unsure (1)..(453): unsure at all n locations
gtgagagagattngcttgtgttctttcgagctcttgcgcttggattgctttcttctttcttgcaatcaaactcacttgtaattgaggcaagagacaccaatcttgtggtgtgccttgtangaactttgtgttccaagtgatagaaaaaagaaagctcactcggtccgagggacctgttgatagagggaaagggctcaaagagactctgtctttgtgaccacctcatctgngagttngtttggcagaaccgaacctcggtatacatatccatgtgcacactctttattcgcttgcgattngttttgcctctctctcgcagacttgatatatctcttacgctcaccccgcttgtattgtgattatatttgagaattcagtttcgcctattaacccccctctagcgaacttcacaacaatctgataagacgtggaccaaagcctacctcatcctta

SEQ ID NO: 27527 - DNA, 427 bp, Zea mays
gcttatgaagattctttattccaacatgggctagtcggcggggccagagccaacccaagttagtcttagcaaccaagcaagtgtcgagtccagctctatcaaaatctaccaagtatagctgaccctctaacactcccttaaatgctatcgaatcatcacttcttctaaagacagtaacacctatatcagtgaatagacagttgtagcccatatgacataattgagaaacggaaagcaaattgtaacctaatgaatcaacaagaaaaacattggaaatggaatggtcaggtgaaatagcaattttacccaaacctttgaccaaaccttgatttccatccccgaatgtaatcgctctttggggatcttggtttttctcatatgaggagaacatcttcttctcccctgtcatggtggttgtgcacccgct

SEQ ID NO: 27528 - DNA, 410 bp, Zea mays
  unsure (1)..(410): unsure at all n locations
gaagccggtgaaaaagatgccttctagaaaaatagccatgtcaatgaaattggcattgtttctgcttcattttattctagtggaataactattttattcatatactgaacccgatatacaaaataatagttggactcagaattcaaagttcgcatgctctatatgtattcttttagggagggcaaccatctttagagtagcaattagctgaacctgctaaaaaatctttttgttagccctgatttgggaggatttccccaaaccagccaataatattatattggtaaaatttaaataaagtggacaaggaaaggcgtctttgtaggcaaagagaagagctgaagataggattaccttctatctatattgcagagntngctcgtaccaggaaacacaaaagaaatacaata

SEQ ID NO: 27529 - DNA, 409 bp, Zea mays
tttgataagtaagacaagtgttattcaagccatcctattaatttaatatcactattgcattgcattaatttgattgctcctattaagcatgtctagctatgatttatcctcatatgaaaccttggatagatatgttagtattttactagcactctacctttaataatataatttatatgcttaatcttgcttattatttatatgcaacaatggtaattaaaacttaccttttagcaacatgtcaatgggggtttgtacataaacctcaccctaaagaatgtttctatgagtaatcaccaaggctatattgtgcaaccacaaggtctaacatgggcaatggcttagctaaagtagacttaagatcttggatgggtggatgcttacctagtgtggcacaagaggggtacaa

SEQ ID NO: 27530 - DNA, 364 bp, Zea mays
  unsure (1)..(364): unsure at all n locations
tctctctctcgtgcgcgcgcgaacgctngtaatttctactacgagcacaccctctggtgcgagataacacgagccgcgcttttcccttgtgttccatcttgcgccaacccatctgggcaggggcacacagcgacaaatttactcgtcggtccagggaccctccggggtcgaaacgtcgacagttggcgcgccaggtaggggcctgctgtgtgttaacaaacaacttcccattgagttccatatgggtagtcttcagcaacctcttcagcccgggacagtgcttcgcttcgggagtctcgagttcatgtccctcgacggcagctacgacatggtactcctccccccgcagcgcgacagcagcaac

SEQ ID NO: 27531 - DNA, 425 bp, Zea mays
  unsure (1)..(425): unsure at all n locations
nagcggagtactattatgcaacacattatatgttaaatctattagaacactcgattctgaaatatactacatctaactgcaacatgctccatatataaatcggcatgtctataaagctccatcaacagggaattaagaatataagtaaccacaatgattaatatgctcacaggccacaataaagaatataagtaaccacaagtttaaaaagaatgacattacatagaaaaagctggcaagttaattaggagccaaaagcaagacactgaaccttcggggcttgctttgctgttggtagtggtagagcaaggactacgccgactaaaaatgtatttattttggctactaacgccctgccatcctggctcagggtcatgtactagtcacgccccccgccccatacgaataggatgactcacgtcatg

SEQ ID NO: 27532 - DNA, 347 bp, Zea mays
tgccagccctcggacctggccagacttcaccggatgcctgagatcgaccttgtcggacttcggtcttccgacgtcgcgcgtggaccgacctatccagtgagtcttcgaccaattccttgcacccatatcttctctggcattccgtgaacctctctgacccatccaattgctctatctcgccgagaccaggccggactcctcgccgccgacgagcatccccgcctgcgcgcgtggaccgaccgacttcggccatcttcgacggcgagccgcacaccgttgtgatccccgagacctcccctacgtcctcgaccacttcaccggagcaatctctccgccggtaagcccct

SEQ ID NO: 27533 - DNA, 437 bp, Zea mays
  unsure (1)..(437): unsure at all n locations
agctttcctgcttcacagcttcggcgctgtgtcaaccttcgtatcttttgagcttctccctctctgatacgagtccgaagatacctgttcacacattatactctagaaacactgttaaatcatgtttttgaggaccttcggaagccgaaggcacccaacaggggcagatctctaactgggacgacctggtccaagccttcgccggcaatttccagggcacgtacgtgcgccctggaaactcctgngatctctgaagctgccgccagcagccggnggagtctctccgggactacatccggcgattctcgaatcagcgcaccgagctgcccaacgtcaccgattcggatgtcatcggcgcgttcctcgccggcaccacctgccgcgacctggtgagcaagctgggtcgcaagacccccaccagggcgagtgagctgatg

SEQ ID NO: 27534 - DNA, 355 bp, Zea mays
  unsure (1)..(355): unsure at all n locations
tcaccggctgatggggtactcgtctgcgagcgaggtgctgcagcactcgcccgacctgttctaaagcttctgcaggcgcgcggccgacgcangaagagcgcacgtctgcgggaagggcaaaggcgtttgcgtggcagagaacgactcgtgcgagcgagactgtggtgcggtggagagatctaatgtgaggagtggtggttggccggtccatgggatcctgaagaaggggatccacggcctggaatcactcaagctcangtcgtagctggtggttttcgtttggcggggctctggcgatcatgtttagagttcagtggcagtgtagtcatgcttattnagtggtagcttgtgtgtg

SEQ ID NO: 27535 - DNA, 401 bp, Zea mays
ctgcagctatattcggtcggccctgccttattttcggcccgtgcgccatgggcgaacccctcattttcggcccagacgcaaggccgaacagccatgccgcccgtcgccttgcgcctccgtgccgctttccctccggtccgccatgcccttcacccaagacatacatattaccttcggtgtctttccacacgctcggacttaacttatttccggggccatgcccgaacctcggttttccgcccctgcgccatgggcgaacccctcgttttcggaccaaacgcaaggacgaacattcatgccgccccgtcgccatactgccctttatccaaagcatacgtcgcagcttcggtgtgcttgcacacgctcggacttggctgtatatttgtcgtgcaccaacccac

SEQ ID NO: 27536 - DNA, 431 bp, Zea mays
  unsure (1)..(431): unsure at all n locations
tgcagctntgcataactgcactggagatatatgttactgtgatgcgcactgtgataatcagaagatcagcagtccaaaactgcacaagttagttcaaaagttggcggtgcggggaggtcatgcccgttttgtctttctggataagaggtgctgaacgataggtccaaaccacagcactggatagaacacgccaaaagcaagagatatttcagtttcgctcttgtctcagctcagctcagctcctgccagtcgcaactcgcgtcctctccaaaaaaacagcccacagttgaagcgaaaacacgaaagctcagtgatatttctctccaggtctgcacactcgtctcctatcgagactgtcggcggccatcgtcgcccacgctgtgctcatgtacgtcccgattcttaagtgtttaattntgcggggtattttg

SEQ ID NO: 27537 - DNA, 217 bp, Zea mays
  unsure (1)..(217): unsure at all n locations
cggcccgatagctaacataagcatcagcgggaagtaagtactgtctagttattgtgcatgattattctcgcttcacttggngtgtttnttttgcaggattaaatctcaaacccaagagaccttaaagggatccttgagaccgcctcaaatgaattcggcttaaggaaaataccgatacaagcgacaccgggacggagtctcactactcaccattttt

SEQ ID NO: 27538 - DNA, 246 bp, Zea mays
  unsure (1)..(246): unsure at all n locations
gacacttaaaactcaagctgtagattttgcctgagactattctactactttccnattgtntaagattatgccaagcttctgctgtggtcacatacaacccggctttgtactacgagcccattaacanagaagaaacaacttacccagatgaaatagttcactaacaaatctctatactggttaacattcgtctgatggggcgttatttcttcaagatcagtatatatacaacggatcttaatcact

SEQ ID NO: 27539 - DNA, 382 bp, Zea mays
  unsure (1)..(382): unsure at all n locations
tggattttggagaaacctatgcacctctttctattcttgattcaattcgcatattactcgcctatgctacttaccatggcttcaagctttatcaaatggatgtgaaaagtgctatcctcaatggaccaatcaaggaagaggtctatgttgagcaacctcccggctttgaaaatagtgagtaccctaaccatgtgtataaactctctaaggcgctttatgggctcaagcaagccgcaatagcatggtatgaatgcctaagagattttcttatcactaatggcttcanaagtcggaaagccgatcctacactatttactaaaacaattgcaaatgaattgtttgtatgccaaaattatgttgatgatatcataatctggtctac

SEQ ID NO: 27540 - DNA, 69 bp, Zea mays
  unsure (1)..(69): unsure at all n locations
actaagctcaacggattntagctgcatcctgaactgccctgcgtctatcacggtctcataaactttaaa

SEQ ID NO: 27541 - DNA, 408 bp, Zea mays
  unsure (1)..(408): unsure at all n locations
ctgagctgcagcttataaatggacgtgaagagtgcctttctcaactgtccaatcaaggaagaggtctatgttgagcaacctcctggctttgaagatagtgagtaccctaaccatgtctataggctctctaaggcgctttatatgctcaagcaagccccaagagcatggtatgaatgcctaagagatttctttattgctaatggcttcaaagtcagcaaagccgatcctactttattcactaaaactcttgacaatgatttgtttgtatgccaaatttatgttgatgatatncatattgggtctactaaccaatctacatgtgaagaatttagtaggatcatgacacataaattccagatgtctatgatgggggagttgaagtattttctatgattccaagtcagcaac

SEQ ID NO: 27542 - DNA, 487 bp, Zea mays
  unsure (1)..(487): unsure at all n locations
actacgcttctaagggagagcacattntaggactaaccaatggttcatttgatttagacaggattngtagcgcatgccaagcagggaagcaagttggcactcatcatccacacaagaacataatgacgactgacaggccactggagctcctacacatggatctattcggcccgatcgcttacataagcatcggcgggagtaagtactgtctagttattgtggatgattattctcgcttcacttgggtattctttttacaggaaaaatctcaaacccaagagactttaaaaggattcttgagacgggctcaaaatgagttcggcttaaggatcaagataataagaagcgacaatgggacggagttcaagaactctcatattgaaagcttccttgaggaggagggcatcaagcatgagttctcttcttcctacacgccacaacataatggtgtagtggagaggaagaatcgaactctattggacatggc

SEQ ID NO: 27543 - DNA, 232 bp, Zea mays
tatgtacttgaagaaatcgagaagccatacgaataaccacaccagacatcctaagcacagtggtactcaaagaatagggacctaaattatctcaatgcgacactaattgctacataaaatttcttgggatgaaaatgacattatttgctaccttataagtatggcaaactaattatctttggttaacactacgacgctatgtacgtatcataaatggtggggttgaactcaa

SEQ ID NO: 27544 - DNA, 173 bp, Zea mays
ttttagcgaggcaaaacaccaagcttcttcacagacaccccccgacataagagaggggaatttgctgggcgcaagagtcagggctagagccaagtgcgaagtgcttctgcagtatgcacgaaactctaatatgagacgaaagcaactggcaaaaaacaataccacaacaactt

SEQ ID NO: 27545 - DNA, 394 bp, Zea mays
tcttctctatacttcctaagaccggcaaatacgaaacctatattatacctttgccttcatctgatccacaaccaatgtttatgattctccacatttcctgttctatgtggtccaaccctgcattcttaattctccaagaatcgttagtccacaagcagttatcattaattaccaaaacatcaccaaaggcgcctagatgattcacaatctcccctcttttggtaattgatgacaaaactacatagtatattaaagagaagtttagtctttccaaatctctctcatacctaaggtataatatagaattctggagatgagtttcataggacttatcttgattcgaagttctgtccgagagatagataaatctcaataaacactcagtatgtaagat

SEQ ID NO: 27546 - DNA, 398 bp, Zea mays
  unsure (1)..(398): unsure at all n locations
tggggaatccacacgtacctcgtcgccgncgctgtcacgggaggagcangtgcgagaggggaggagacgcgcccgtttctgaggacccaaaatggcaggaagagagagattttgaatctaattttggggtggtcgcgtgtactggtactggcgtaggaggagaagatcccgccagaaacgtgagatgcacacgtagaggtccacgcccaacaaacgattgttttcaaggtactcgtgttcatcctctatatcattcatttaccgtctcttcttaaagattctctcctccatatcttcatcttcagtaacatcctctatatctcacactttatacataaataacgatattatagatatattttacttntaattgttgtgcatacgtatttatcactctc

SEQ ID NO: 27547 - DNA, 319 bp, Zea mays
  unsure (1)..(319): unsure at all n locations
agctggggaagattcttcatcccaacatggtttattttgcggngccagagccaacccatgttaggcttagcaattaagcaagtgtcgagttcagctctatcaaaatctaccaagtatagctgaccctctaacactcccttaaattctattgaatcatcacttcttctaaagacagtgacacctatatcggtgaataaacagttgtagcccatttgacataattgagaaacggaaagcaaattggtatctaaagaatctacaagaaaaacattggaaatggaatggtcaggtcatatagcaattttacccaatcctttga

SEQ ID NO: 27548 - DNA, 198 bp, Zea mays
  unsure (1)..(198): unsure at all n locations
tgctacaacatggtttttgacatacaaagatactgttggaagacagnttacatgtacccacatccttgcagcccgggaatctaacaactgacaatgtatnttggaaacatgtgtgtgtgtgtgtggtttacaggaactggccatttaggtaaaagaggatactcccagatccctgcanagcaagaagtgtgcccaact

SEQ ID NO: 27549 - DNA, 452 bp, Zea mays
  unsure (1)..(452): unsure at all n locations
tcctggccatagcttcaggattgattcgaccttctttccttcatgcttcccatattatatatgcttctgacccaagtccaaaggtacttgcttacatgtcacacttggaagatattgttaaaacacgttcttgaggaccttcggaggacgaaggccccccaacaatgcatatcttatgaaagtataaattggtttaattccaagcaacctttgcacttaccttatgcaaactagttcaattttgcacttatatatttgctttggtttgtgttggcatcaatcaccaaataaggggagattgaaagggacatagggtcaaaccttttcctaaatgactttggtggttgaattgcccaacacaaataataggactaactagtntgctctagattacatgttctccaggtgccaaaggttcgacacataccaataaaaagttaaagttatggttc

SEQ ID NO: 27550 - DNA, 349 bp, Zea mays
tggatgtgaagtattgttttctctatggaccaatcaaggaagaggtctattgtgagcaacctcccggctttgaagatagtgagtatcctaatcatgtttacaaactctctaaggcactttatgggctcaagcaagccccaagagcatggtatgaatgcctaagagattttcttatcactaatggcttcaaagtcactaaagccgatcctactctctttactaaaaccattgcaaaagatttgtttgtatgccacatttatgttgatgatattatatctgggtctaccaacacatctacatgtgaagagtttagtacgatcatggttcaaaaattcgagatgtctatgat

SEQ ID NO: 27551 - DNA, 404 bp, Zea mays
  unsure (1)..(404): unsure at all n locations
ngccagtacctgtcgaaacacagcacctgccagcactatttctacaaaccataccagnaacttggccttttgcatactgaggattggatatgattggacctttcaagaaagctcaaggaggatacacccatgtataggtggcaattgacaagatcactaaatggatagagttccagcccattgcctctttaacctctgctaaagccgtggaattcatacaaagcataatattcagatttgggataccaaacagtatcatcactgacttgggatccaactctaccagttcagaattctttgacttctgcgagcaaaaaagcattcagatcaagaatgcatctgtagcccatccgagagccaacgggcatgttgagcgagccaacggaacgatatctgatgcactc

SEQ ID NO: 27552 - DNA, 383 bp, Zea mays
  unsure (1)..(383): unsure at all n locations
agatgcagcaaagttagtgggggaatcccttcattggattctcaggaaaggaatggtccaatccacctaatactattggaaaggggtattttgcattgattggtgaaaatccaaactcccttttggattgtactgagagtttattaaagtctctctcaacaaattgtgcttcttttgctccacttgtttacatctttcatgtcatggctctgcagagactcaatgaccttaatagatagaataacgcattttattttctacttgaagatgatgcttgcnaatagataataaagatatagaaaatactcaactattanaggaatcttgcagcctggaggctactaaattgatgcggtttatgatgaatatgtgaagctattatc

SEQ ID NO: 27553 - DNA, 475 bp, Zea mays
  unsure (1)..(475): unsure at all n locations
tgccttcgcctcagtataccatccgcaatccaacggtgtttttgtatcgcgcanatggcaaaattntcacagctgtcaagaagatgctcctcgacgataaaaagggcaagtgggctgatctgttacctgaagcggtctgggcattaaacacgactgagtgcagggcgactgggttcacccttttccgccttctatatgggtcggaggccatgaccccgcaagaaataaaacatgggtcaccacggacagtcccgtcagctgtccccgacgtggacgagcccacttcgaaggacctcatcgacggagaccgtgtcttcgccctacaggctctaaacaaataccaagcccaaataaaagcatggcgcgaccacacagtcatcccgagagaattcagcgaaggagacctcgtactcgtccggacagctcggacagagacccngggcaagctggagcccaagtgggagggccctttcat

SEQ ID NO: 27554 - DNA, 326 bp, Zea mays
  unsure (1)..(326): unsure at all n locations
taccattctatgaaactgtacttgtgagttctgagaccctctattctactctcctccccggcacttttcacttctgtctttcgagtgcaaatctcataagtagaaagaaatcggtagtttaaagtaggccccgctctctctntcagaattctgcacctaggtaccactctagttttcttattggctgactcaagtttcatgtgtttaattggcacagtcaacagatataattttctaaacaagatgttgagtgcactttccaagatagagattggaaaatattacgtcaccaaattcagcacgcggattaagaaccctgtttgatg

SEQ ID NO: 27555 - DNA, 353 bp, Zea mays
  unsure (1)..(353): unsure at all n locations
tcagaagnctaggaatcagccccaacaacgcaggtgcaaagtcttggatacagttgtcattcagccaacaatctttccaaaaaagagtgttagagccatccccaagctatgtcacaacttcttccacaagagatcgcacttccgggcacacatgaatggngaaagaagaccatgatctgctangatcagtttttgtaaccatgaccatcgtgcttgcanagcccagntaggctccagaggtcactgatcccaagaccacctagatctttgggcctagtaaccttctggcaagctagagacaatgacctcccttggccccccttcttctctcaaaggaaccctctttgcaactt

SEQ ID NO: 27556 - DNA, 430 bp, Zea mays
agcttgcatgaagtagggtatataatgaatatataatatgaatgtaataagcaaataatattttgtaggattcgcataacaccaggactggatgtgaacatgcattaacaataataactactggtaaccaggtacatattaaaataatattgtttatttgtctaaattgaaaatataattttatgctgcatgtaaatgttgatgtatttgggttgggctttaaaggaggacaacataagatttccacatgaggttggtgatacaagttctccgtatcacgtagcacatgaacaattggaaaatattgctgcatcgtcagaagctaaaaaggtgagcattgctaaatgattttactgattggtataaatatatgtaagtatgcatatactaaatagtaacgtctattattgtgcagaggttgaattttaat

SEQ ID NO: 27557 - DNA, 475 bp, Zea mays
  unsure (1)..(475): unsure at all n locations
tgtccgacanacccctcatctgcttcactagactcatatttctctgtgagttagaattgatttcgaacgtcagtgagctatcatagcgttacctaatactatgttttcacaatacaaaatactgtagttatatcaccaaacataattagagcaacctagtacaaatacaatgtttcaggtgtgtatcattaagcataactaggtgaagctacctatccatgtcctctatagtatgtacacaaaaaaagattctatcacaaagattcatcaactntattcaacacttatactttgaaaaccaaaattgaatactattaatggcggcacataatccattgtttctgcaaaacatacattaatcataataatctagcatacattagtcacaataatctagtatcgtcattgatcactgatcactgaaatctaactaaggacctagatgctntcacattngaaacaacaactattatac

SEQ ID NO: 27558 - DNA, 286 bp, Zea mays
aaaaaggttggagcgcatgtcagaggaaacaaggtgggcccaccattcacacaagaacatcattgacaccgacaggccacttgagctactccacatggatctattcggcccggtagcttacataagcatcgacgagagtaagtactgtccggtaatatggatgactattctcgctttacttgggtgttcttttgcaagaaaaatctcacactcaagagacctttagggattcttgagacgagctcaaaatgagttcggattaaggatcaagaaaataagaagcgac

SEQ ID NO: 27559 - DNA, 317 bp, Zea mays
tctcaagatcttccaggtgacgttgctttctatcatctgctctcttccaatccttaaggcaagttggtgccttcactgtcttaagtgcaagagaaaaccttctttcttcaattattctcccgaccgtgttgaatggtgcttcaacaaaaccgtggaatcaggaaccagaagaatatctctagcaaaatgagacaatactggaaaaatggacttatgttcccttccaccatctagtaactttaccttatcaccctctaagtgcgatcagtggctgcaagttagtagacagataatgataaattcggcttttgaattcc

SEQ ID NO: 27560 - DNA, 361 bp, Zea mays
  unsure (1)..(361): unsure at all n locations
attgtctcgcatttcaagcgaggaagcacgtcggtgagcattcatacacgcaagatcatactgacgactgacatgccacttgctgtactacacatggacctcatctgtccagtagcttacataagcaccgaggagagtgagtgatgtataaatattatcgatgagtatcttcgcttcactggcgtgttatttttgccagaaaaatctcatacctcacagaccattatgggattcttgagacggtgctacatcgagtaccgctttgagatctattaatggcggcgcaacaatccatcgtgtgtgcaagacatacattaatcatagctatcttgcagacgatagcctcaagcatgtantatct

SEQ ID NO: 27561 - DNA, 211 bp, Zea mays
gagcacctccggggagagagaggagaacccaaccaggaacaacactctaagcgcttagggctaagcaaccccagacaggaagaatgccaaagatacccacaccaaggctcaaaccgaaggcgaccacttaaaacaaacctgacagaacgatgatgccaacagccgagaacaaactggcgaaacaacacaggagaatagagacagaccaaac

SEQ ID NO: 27562 - DNA, 365 bp, Zea mays
ttaatggccaggcggctcccattataaagcatatcgccagccaaattaacatttttattctctagctcatgcttgggaattctatcatttaacttagttatgtgatccttttgttctttaatcatagaaatgtgatcatccatagcatcaacattaatatctctacatctagcgcaaatggtaacatgctcaaatgtagatatagaggggttgcaagcattcaattcttcaatggtaacatgtaaactaaccttctccgttctaagacaagaaattggatccttgcatatatcttgtccttagctatgtttgacattttcaattcaagagcatagcatcttttagctaacaatttttatcttcct

SEQ ID NO: 27563 - DNA, 411 bp, Zea mays
ggcgccaatgttgggactagtctcaatgctatgagtaagaacaagcacacaagaatgttaacgttaaatccgtcgtccttcgaagcattatatcccttttgagaaataatgttccttggacgaaggttgagaaggacgttccttcgtcaaagcgacatatgaacgaggaaaagacacatatgaggtgtaaaagataatatcaacagttatgtattaccatcaactcatttctatctttttattaaggacaaataggaatgttcacaagttacaaaagtaccttcggcttgaaagacagtgaaagtacaagcgtgacgcacaggaaaagatgtccagtcagcgtgaatagtatgggagcactcgtcatactattataggcacgggtcgcatgccatgtacaattacatccag

SEQ ID NO: 27564 - DNA, 334 bp, Zea mays
gcgcaacccagcctatataaaacatttaaaaaccactacttcatctgcttcgggaagaggaatggtactctctacttcagccctcacaatggatattagtgaaatatttcccttctcccttcatttgtcttgttaacactggactttcaaaaacacatgactggtctcatggtcatcttcggatcctcattccactttcacataaagctgcactggcgtggaatccccaatagcccaccgcatatcattagtgatttttcaacgtggtccttccattgtttgtaaaccacaggtgtgggctatagctcttatttcatcattcatgatgacacat

SEQ ID NO: 27565 - DNA, 279 bp, Zea mays
  unsure (1)..(279): unsure at all n locations
ttattggattcaaaactcatatcatctcgganagatattaatgttgtaggaaataaagaatcatcatgtgccgaatatcaaagcctacaacatggaggaaagtcaaagaatggtaaccattatattcttaagtgcaattatcttaaattatcgtgtgtcttgtgagtcacatagaaatagaaagcacttaagcctgttttaaaactatgtcatcattccttgaagaaatcctctcatatggtagaatatgatttaatgattctatattatgaccatcta

SEQ ID NO: 27566 - DNA, 303 bp, Zea mays
  unsure (1)..(303): unsure at all n locations
tatgttgagcaacctcccggctttgaagatagtgagtaccctaaccatggttattaactctctaaagcgctttatgggctcaagcaagccccaagagcgtgggatgaatgccttagagattntcttatcactaatgaattcaaaggcggaaaagccgatcctactttatttaccaaaactcttgacaatgatnttgttggatgccaaatttatgttgatgatatcatatttgggtctactaacgaatctacatgtgaagaaattagtacgatcattgacataaaagttcgagatgtctatgat

SEQ ID NO: 27567 - DNA, 435 bp, Zea mays
  unsure (1)..(435): unsure at all n locations
agcttgttccacanattgctcccatatatcttattatattatacacaggtattgaatatgcttgcttgttggattgaagacccaaactcaaaggcattcaagctccatgttcctcgaatttatgattatttgtggcttgctgaagatggtatgaaaatgaaggtaaccattgttgaatcattcttcttatgtaaaactaattgagagttcctagttacatcaaaggattattatgatggccaatgatgtaattattatcaaggcatgaaagtatccatgcatgcctcatacacttctcatttgtccatgcatggttataaacattatacgttgatgactacattttgtgcgttcgacgcaaaaagcaatcaccaactgtagcacagacatgaatgggtcaactctacttttagaatgcttgatttcaactattac

SEQ ID NO: 27568 - DNA, 438 bp, Zea mays
tatgaagattcttcatcccaacatgggctagccggttgtgctatagccaacctatgttagtcgtagcaattaagcatgtgtcgaggtcagctctatcaaaatctactaagtatagctgaccctctaacacacccttaaatgctattgaatcatcacttcttctaaagacagtgacacctgtatcagtgaaaagacagttgtagcccattttgcataattgagatacagaaagcaaattgtaatctaatgaatctacaagacaaacgttggaaatagaatggtcaggagatatagcaatcttaccaagacctttgaccaaagctggatttccatccccgaatgtgatagctcgttggagatcttaggatttctcataggaggagaacattttcttctcccctgtcatgtggatagtgcaccctctgtcgatgatctaac

SEQ ID NO: 27569 - DNA, 367 bp, Zea mays
  unsure (1)..(367): unsure at all n locations
agcttctaaagggagaacacattntaggattaatttatgttcattnngagaaagacaggatttgtagcgcatgccacgcacgaaagcaaggtggagcccatcatccacacaagaacatcatgacgaccgacaggccgcttgagctactccacatggatctaattcgcccgaatgcatacataagcatcggcgggagtaagtatttgcttgtaatagtggatgagtattctcgcttcactttggtaattcttttgcacgaaaaatctcaaactcaagagaccttaaagggattcttgagacgggctcataatgagttcagctaaggatcaagaaataaaagcgaaaccggaccgagttcaagaactac

SEQ ID NO: 27570 - DNA, 491 bp, Zea mays
  unsure (1)..(491): unsure at all n locations
tcaagccttcgtactgggtccatggtatttctcaagtctttgtgnctcttgccctgcaactcttgtcaacatgaccagaaataacttgtgaattggtcttaaggaccgcccttcttatccccattgctcttaacttatgaagccccagaagcaaagcttcgtattcagcaatattatttgtgcagctaaagtcaagctttattgcatagcatgttctgactttggaaggtgcaactaagacagcagccgcacctgccccgaaggttccccaagaaccgtcgcagaacaccgtccaagcttcggcatctttatttgcttcttcttcctgagcccctggcgttcagacagcgatgaagtctgctagcgcctgcgactgaatcgaggacctangcacataatcaatgctgaattcgttgagttctgcagcacactatccaatccttccagtagcttctctgtcctcatgatgtcttaaaggctggacaaagaca

SEQ ID NO: 27571 - DNA, 323 bp, Zea mays
  unsure (1)..(323): unsure at all n locations
agcttttaaagggagaacatgtgatatgtttaactaacgtgcaattcgaaaaagatagaccttgtgcagcatgtcaagcaggtaaacaggtgggaggagcacatcacagcaagaatgtgatgaccacatcaaggcccctggagctgctacatatggacctcttcggacccgtcgcctatctaagcataaggggaagtaagtatggtttagttattgtggatgacttttcccgcttcacttgggtattcttnttgcaggataagtctgaaacccaagggaccctcaagcgcttcctaaggagagctcanaacgagtttgagctc

SEQ ID NO: 27572 - DNA, 455 bp, Zea mays
  unsure (1)..(455): unsure at all n locations
ntgtatntgatcaaaaccctcttattgcataaattgntctcttatggnggagattctttattatgggaaaagggggagtttgtggcatttgatcaaatttactcttgatagatctcttgatttgccaaaacaagtgtgnttgacatagagataggaaaaagaatttgttttgtgaaaataaaccaagtggtggcagaagtgatccaaatatgccaaatcctatgtgagtaaattggtcttcaatttgcactctntgagaatgaaattgcacttttagttgcttttaaatgtgttggcataaatcaccataaagggggagattgatagggaaatgtgcccttgagcaattcctataaatgttttggtgattagatgcccaacacatattggttttatggtgatacgtactaagcgttgaagagatgcaaagcatgattcaaggattactctacctt

SEQ ID NO: 27573 - DNA, 489 bp, Zea mays
  unsure (1)..(489): unsure at all n locations
ntcgtcagtaccatgttcctgccggtctcatgacaatgaagattgtggagttcctggccctcaagcaagggtcatcgtctgtgagtgagtaccgggataggtttctgcagttgtctcgctatgctcctgaagacgtcaacaccgacgctaagagatagtaccgtttcctgagaggcttggttgaccctctgcagtatcagctgatgaatcacaccttcccgacattccagcacctgattgacagagcaatcatgacagagaggaagcgtaaggagatggaggattgcaagcgcaaaatcagtggaccccagcctggaagcagcaatcgccctcgtttctcaagcaatcaacctcagcagttcaggcagaaccagcgtccacctcagcagcagcagtttcaaaggcagtttcctcagcatcagaatcgccagaacaatcagtcaggaggaggtcagttccagaggcagaatcagcaggcacctcgtcttc

SEQ ID NO: 27574 - DNA, 457 bp, Zea mays
  unsure (1)..(457): unsure at all n locations
cctgaggcatgcaagcttgtggaggttcttcatcaccacatgtgtctagttttatgctacagccagcccatgcaagtcttagcaattaggcatgcatctagaccggcctcttcctttgcaaaatcaaccaaataaagtttggcgtctagtacacccttaanagctagtgaaccatcacaccttctaaagacagacacatctacatttgtgaatagacaattatatcccatatcgcattgaaagtgcattcatccctttttgtgagtnttggtgatctggataacaacacatntaaaggtctaacaagtttgctaagtgttgaacaggaanataagtataatgaacatactcgaatagtgtataatgatcagtgaacanaggttcaacacgagggttaataactaatgagacaatgcaaatggatataatatgatctctatatcgggttggatatatg

SEQ ID NO: 27575 - DNA, 451 bp, Zea mays
  unsure (1)..(451): unsure at all n locations
atgatttgtagcgcatgccaggcggngaagcaagttggtgcccatcatccacacaagaacatcatgacgaccgacaggccgcttgagctactccacatggatcttttcggcccgattgcttacataagcatcggcgggagtaagtattgtcttgtaatagtggatgattattctcgcttcacttgggtattctttntacaggaaaaatctcaaacccaagagaccttaaagggattcttgagacgggctcaaaatgagttcggcttaaggatcaagaaaataagaagcgacaacgggacggagttcaagaactctcanattgaaggctttcttgaggaagagggcatcaagcatgagttctcttctccctacanccctcaacaaaatggtgtagtggagaggaagattcgaactctattggacatggcanggaccatgcttgatgagtaca

SEQ ID NO: 27576 - DNA, 343 bp, Zea mays
  unsure (1)..(343): unsure at all n locations
ttgaaaaccttgttagtctcaaaagtttaattgtagacacgccttctctaaatgtgtgcatataagtgtcgaatacttgtttaacttatgcacttatacttggaagtcttcgggatgattttctatatttgaaccttggtacaagccaaatataaacaattaaaactgtatcaattaaaagagctattattaatcacatgcataatanataagcaatgtgtgcaatatttttatccatatttcgagaatcaagatatttagctcactcctattaaactccacagccttttttattaaaaacttgtgaaaccatcggtaactgttattggagccctatggatat

SEQ ID NO: 27577 - DNA, 341 bp, Zea mays
cggaccttaagcacctggggctgcagcttggattcacaatggagctttattttgtactctaagccctctggtctgggagcaccggactgtccggtgcacaacggacagtgtcccgtgcaccaccggacagtgtccggtgcaccagaggacttcagctcaaacttgccaccttcgggaattttcagaggcgacttcgctataattcaccggactgttcggtgtacaccggacagtgtccggtgcgccaagggaggtcggcctcaagaactcgcctgcttcgggaaactccaacggctagtccactataattcaccggactgtccggtgtgcaccggactgtc

SEQ ID NO: 27578 - DNA, 411 bp, Zea mays
ggaaagaatacaagtcccgctccaagaagggttgctaccagtgtggtaagcccggtcactttattgctaaatggtctatatcaagtgacagtgaccgatgcgacgacaagaaggggagaagaaaggagaataagaagcactactagaagaatggcggcgatgcccatgtatgtcgggagtgggattccgacgaatgctcaagcgactcctccgacgacgaggacgccgccaacatcgtcgtcaccaagggacttctctttcccaacgtcggccacaagtgcctcatggcataggacggcaaacggaagagggtaaatctaactcttcataaatatgaatcttctagtgatgatataatagtgatgacgaggataatttgcgtgttctctttgccaatcttaacatggagca

SEQ ID NO: 27579 - DNA, 220 bp, Zea mays
agcagtagtattagcaaggttctggtgtatttttcttgggaaaatagggataatcaatatgagaatcatgtagatctttgtcatacctttccaacgagtacttatgcgctcgattccgaggtataatttaggagaaatcattgtttgaatccgggtatggtggctgcccaaaaaaaacagattttcaagtgggtgaacaacagtagtattagcaggttct

SEQ ID NO: 27580 - DNA, 485 bp, Zea mays
  unsure (1)..(485): unsure at all n locations
tctccanagtttgtggtggcttccttgcanagtattgtgtcttatgtcctgcgtacactgaaagagagcctaggcagtgaccggcttcttttgaaaaccctgaaagctggtcactaacatatcctttagcttctgccatgatgtaattgtccctggccgaagagaggagtaccaagtttgagctacgcttttgactgccatgacgaaggatttcgccatgactgcagtattgcccccatatgaggatatggttgcttcgtagctcatcaggaattgcttcgggtctgagtgcccatcatacatggggagctaaggtggcttgtatgacggtggccacgggtagcctgcaattctgctaccaagggagaagcatcgtcaaaagcataattgccctgatgaaagcctctgtaccattcatcgtcattgaataggctntcttagcgaagctctcttgtgttgggccttcgatctttggtcatctgagt

SEQ ID NO: 27581 - DNA, 191 bp, Zea mays
acaaataataaattgcttttgtgagacaagataaatatatatcataaatgactacaaaattttatactcataggagtagaaaggtgatgaagtcaaggtggatttgaaagtcgcctagagggggtgaataagcggaatctgaaatttataaacttaagcacacactacaaagtcgggttagcgttaaaaat

SEQ ID NO: 27582 - DNA, 420 bp, Zea mays
  unsure (1)..(420): unsure at all n locations
ngaagccatggtaagtagcataggccaataatatactatatgtctcaagcctagctacgggtgcataggtttcaccgaaatccaaaccttcgacttgtgaatatcccttggctacaagtcgagctttgttccttgtcaccacaccatgctcgtcttgcttgttgcggaacacccacttggttcctacaacattttgattatgacatggaaccaaatgccatacctcattcctagtgaagttgttgagctcctcttgcatcgccaccccccaatccgaatcttatagtgcttcctctaccctgtgtggctcaatagaggaaacaaaagagtaatgctcacaanaatgtgcaacacgagatctaggtggtacccccttatgaatgtcaccgaggatggtgtcgacggngtgaatctcgtgga

SEQ ID NO: 27583 - DNA, 339 bp, Zea mays
  unsure (1)..(339): unsure at all n locations
ttgcagcagcatccacttcaccataccaatcagtaaactccctgccttctccagcacatggcaaacccaaaatcagatgaacccgattttttggtatcttcaggtccttgccagcccctgggcgtatggtcatgtcatgtggatccaatttatccatcaaccacctgttgagtgatctgctctctaaggcatcagttcgcaaatcaaatatgcttgaaaatcccaacctaacgacagcatcgcgctgccgatcgctcattatccaagatgatacaataacatcatagggaatgcagccgatattcagnttctggaagcataaatgaatatgcattaata

SEQ ID NO: 27584 - DNA, 437 bp, Zea mays
  unsure (1)..(437): unsure at all n locations
tcgaggtaccaaatgcacgggagaaggtcaaggatgctgaataatccatagccaagggngaagaagaaggctagcatagtcaagggtgatcgagttgagaacagctacgacacatcaaggatcactacataaggatgtgacttacagccaatgaggtaacagctatagttatgtggtgtaagtcataaggctcaagatcaagctctaaggaggagatcaaggtcactagaaggagaacaagtgtcaaaaccagaactggaagcagcccagaagagctaagttcaacttgatctttagtttgggttgttcctatgttnggagatgttctatgtgacacttacaggatgttggagccaagcgatgtcaatctatatcaagtcaagccgatttgatgatctatgagtccatcactcaagctcatgcatgtgaaatgctat

SEQ ID NO: 27585 - DNA, 406 bp, Zea mays
  unsure (1)..(406): unsure at all n locations
agcttatgaagggtcttcattccatcaagttctagatggcggngccggagccagcccatattagtcttagcaattaagcatgcatctagatcgacattctcttttgagaaatcaactaagtagagcttgtcgtctaatacacccttaaaagctattgaaccatcacttcttctaaagacagatacatcaatatttgtaaataaacaattataacccatatgacataattggcttacaaacaacaaattttacccgagcgattctactaanaacacattagagatctaatgctcggntgtgatggctattttgcctaagcctttgaccttgcattgggtccatctccaagataataatgcttgggaattctgttttgacgacgaagtgacatttcttttctccgcat

SEQ ID NO: 27586 - DNA, 206 bp, Zea mays
gcaacttgacccggaacgggcgccgaaactgttcacccacagcgttggggattgctcttttccccagggcttcgtctcgcataataactcatgaatattgcagaaacttttaacgtctggttccaaaccttgtcttctcgcaacccaaaaaaacactcccattcttatgatggcttcgggagtaaattgatgcacgaagatttgaa

SEQ ID NO: 27587 - DNA, 484 bp, Zea mays
  unsure (1)..(484): unsure at all n locations
tgacatgaggagatggccctcattatttagagcttnctgcttatcctncggcaaaggaagggaaaggatcacaaattccattccaagagggtttgctatcggtgtggtaagtccggtcactatattgcataatgtccatatgctagtgacagtgacagggacgaagacaagaagggaaagaagaagatggagaagaagtactatcacaagaagaaaggtggcgaggtgcatatggtgagagagtgggactccgacgagagctccaccgactcctcctccgacgaggacgccgtcaacatcgncgtcaataagggacttctcttcctcaacatcggcaacaagtgccttatggctaaggaaagcataaggaacgtaacacctagaaccacccctaagtatattacttccgatgatgatggtgattctagtgatgatgaataggacctttctctgttatttcatggtctctctcataaacacattg

SEQ ID NO: 27588 - DNA, 198 bp, Zea mays
agcttcttcccacaagtcgcatcggagtggtgacaagaaaaagaagatgaggaaggtggtctattacgagaccgatactttatcacctttcacctccggcttcgacgcgccctccattacttctaagcgccatgagcgccagaagtttaataagaaccccctacgctaccctcgcatttcaaacatactccattactt

SEQ ID NO: 27589 - DNA, 487 bp, Zea mays
  unsure (1)..(487): unsure at all n locations
ggcacccaggtacattggtccattcctggtacttgagcaatgtgtaccagtggcataccgactccaactacccgaaaccttgtctgctgtgcataatgtgttccatgtgtcacaattgaagaagtgtcttcgggttcctgatcgaaccgttgaagtaatggatgttgtccttgaaccggacttgacatactctgagcaccctattcgagtcttggatcaaaaggacagggttacccggagaaaaactctcaagttttataagatacagtggaaccaacattctgaagatgaggctacatgggaaactcaagactntttagataagaatntcccaggctttntagcctcttgtaaattgtaaagtctgtatagctgtganataaagaagtgacccccacaccacccctgccttgtaccaaatataaggaaataaaagtattctgcgnttcctttttcattacttaccctangacttttaatctcggga

SEQ ID NO: 27590 - DNA, 205 bp, Zea mays
caccgaaatcccaaccttcgactgggagtatcccttggccacaagtcgagccttgttccttggcaccacaccatgctcatcttggttggtgcaaagacccatttggctcctacaacaatttgaataggacgtgggactaaatgccctacctcattcctagtgaagttgttgagctttattgcatcgccacccccaaccgaatctt

SEQ ID NO: 27591 - DNA, 375 bp, Zea mays
atccttgagtcacctgcggcatgcaagcttgacagcgacgtactggagctggagttcttattttattgcctaccaagaaaaacctgtggaggcaggagaaacaaaaactgcccaggcaagcgtgataatgatgatgtcagaccccactttggatggagaaattgattctgctgaccccgaagcaccttctagaatatacgattgtgtcgatcgacgtgcttcagagagaatatcatcccgagaggaagtttttgaagcttatgactatgccgagaaattgacatatgctaaggcggcactagtgttcaatgggaccaacgaagatgactttctatactggcttccatacaacaaagaattatccctctggcggga

SEQ ID NO: 27592 - DNA, 252 bp, Zea mays
atcgtgtacaccacatctaccacagtagccaatgcccttcgtatccgagacactgctggcactacttgattactaactggtttacacggtgacacaggacctaactcttctgaggtgcctgagtcctcggttgcgtactttacctctcccatgtgtgttgtgagaggcgcttgcctcttctctctctctgccgataacaagaattctggatgctccaattctgctacgctggatatcggcttttctgagact

SEQ ID NO: 27593 - DNA, 468 bp, Zea mays
  unsure (1)..(468): unsure at all n locations
tcggatctagcttcggntcattgaccttcggcgcctttatttctgtagaatgatgaggaatacggtaatcagaaatctggcaacgagccaggtaaaagaataaaggtaaagagctatactttgttaagtacgttccgggcttcgtctccagccaactcgcgtctgcctatagcctaaattggggtgatgaacctgtttcgtatgcttcgggcttccgctggaacatcaaccaagtctgatgatgaaaggctgaagttcgacctgttgatggcccttgcgtgattacacccgactnttatgatagcggtagctataccacgagaagccaccagcgcacagaagtctccatggccggttatgacttcatcgaagacatcaacctacttctctacgcattcgagtgccccagggatatcatcggcagagaagctagcttcttcagatgcagctccaactgaagtgaatatg

SEQ ID NO: 27594 - DNA, 431 bp, Zea mays
  unsure (1)..(431): unsure at all n locations
agcttcttctcgtcgtcgatgagttttccttcgtgagcgcctcgtgctagtggtgtttgttcggggtttccatgtaagaaacatggattcatctttggcattggtttatgaaaatgactcataagtcagatccatggaaaaatattacggagaataaatgtcacacatgcaaaaaaaatctaagttgaaaacattattcaaacaaaagaaattgcatgcaaggctcttctttanatactactctctcaatccaaaaatataatttaataaacttggtgatacttatctactactacacattgtgaaagggtangaggtgggcttccggggagatgtagtatatgtttttactataatagatgtagacctaaacacacatgtggtggagtggtagctaccagcacatttgcttgagaggtcgcgggttcgaa

SEQ ID NO: 27595 - DNA, 468 bp, Zea mays
  unsure (1)..(468): unsure at all n locations
actcagcttaaagtcattcctccgggaatgcagagcttatatgttatctaagtaaaaggtgaagagaatctgaagttgttccaaaggggatgcagagtcttactattacgagattcttttattttttgttccatcatatcatcgcatcatgctgcatcataacaccacatcattcatcatcttgcatcattcaaaatagtggaaaagaaaagaaatttctccttcatcaacaatggttaaccttcaaagctaaccatctctttgacaaagaattataaaaggttgctgcaactttacccgttgctattaaacggtaaagaattcctcatccaagacctacaacaagaacttcgagaccaatattgntacttcggcaatggtatttcttatgtaagacttatggcaagaccttcaagtttgataatgctgcttctgcaaaatanggaattttctttatgatgcgtgaaa

SEQ ID NO: 27596 - DNA, 400 bp, Zea mays
  unsure (1)..(400): unsure at all n locations
agcttctgctccctctacctcttgggactgttgttttgaaggagctntgttgnggccctgatgactgggagctatgttgttgactttggggttgacttcctctatcttcacttgggtaggaattgtggatcgacctgacatgcctggggtgaattcttcctccgaagcccctagccatttcagaggacctgtatgcttcctcccttctttggcggaaatcattatcagcctagatatactcatccatcttctgaagaagcttctccagggtttgtggaggcttcctggcaaaatactgagctataggtcctggccgaagccccttgatcatggcctcaatgacaatttcattgggcactgtaggcgcttgtgctctcagacacaggaacccttggacata

SEQ ID NO: 27597 - DNA, 496 bp, Zea mays
  unsure (1)..(496): unsure at all n locations
ggatagctgctataatagactntcctacannaaattctgtttttatctttgtttataanngnggaaaaaacttatgtaaatttgtacataccttgtaatatattttgtctcctttgtccatgtacaatctgctttgctgtggacgaaacttctctctttgagccgaaggcgaaaaacaccttccctttttttcgtacacaacgaagcatgaaaaattttctctttcttcgaaatttttcctcattgccgaagcatctgtcttttttgtgtggtatgatgatgattctatatatgtctaaataaatggttatgaatgcaaatgacatgatgtaatgtatcgtgcaaatgaatattgaaacacatattcaaaaaccataatcatagcccttcatccccttgggaatgattcanatctnnttggcagttacttttcggcttcaccgtttacttttcggtgtataaagcgtgactnttcgctgtanngcctccttaggag

SEQ ID NO: 27598 - DNA, 203 bp, Zea mays
  unsure (1)..(203): unsure at all n locations
ttaatcaaaccacacattacagtcttcgaaatctgttctgacagtagacaggacacagcaacccaggtgtaaaattcataactnttaaaccggtcggcccttaattatgaaattttacacaagccagatcagaaaagcatctacaactttcttataatctacaaagactgattcaaacattaactcaagcaaacaggacagtc

SEQ ID NO: 27599 - DNA, 278 bp, Zea mays
  unsure (1)..(278): unsure at all n locations
agcttatcacctttgaccaaagcgaccaccccgacttcgtgccgagcccaggaaggtacctgctcgtcgtcgacccgatcattggcaccgttaggctctctaaggtcctcatggatggaggcagcagcctcaacatcatctacaccgagaccctagagctcttatgggttgatcggtccgagatccgggctggtgcaacacccttccacgggatcgcacccngaaagcatatcctgcccctcngacaagttgactttcccgtctgcttcggaactccc

SEQ ID NO: 27600 - DNA, 475 bp, Zea mays
  unsure (1)..(475): unsure at all n locations
tattacggacctatgaaactaagcttgacacatagctcatttaaatacctttgatcatatctcttctatatgctatgactaatgtgttttcaagtctatttcaaaccaagtcataggtatattgaaagggaattggagtcttcggcgaagacaaaggcttccactccgtaactcatacttcgccatcactccgagcaactctctattctttgggggagaaatgagcatcaaagaaaagaacttcatccctgnggaagagagtaaaagctcaaaagcttcgctttntggtataatcttaactcatgtattttatgaccaaaggggaagatagcacttagagggctctaatgattccgttttttggcgattcatgccaaanagggggagaaatgagcccaaagcanaaggaccgcaccaccaccaatttcaaaaacttagtgttntcaaagaagtanttatcaattggtatcctatt

SEQ ID NO: 27601 - DNA, 149 bp, Zea mays
  unsure (1)..(149): unsure at all n locations
gcgctaatgcccctangaaatgggctaattttgttttgttacgctcccatggtcacgatacgagggtaccatttaaaccctgccgttattcccgacacaaattaagagaatccctctaaaagcctaatctgcctctatcatgcttttat

SEQ ID NO: 27602 - DNA, 276 bp, Zea mays
atgtgatgaccacttcaagacctctggagctgctacatatggacctcttcggacccgtcgcctatctgagcataggaggaagtaagtatgggctagttattggtgatgacttttcccgcttcacttgggtgttctttttgcaggataagtctgatacccaagggaccctcaagcgcttcctcaggagagctcataatgagtttgagctcaaagtatagatgataaggagcgacaatgggtccgagttcaagaaccttcaagtggaggagttccttg

SEQ ID NO: 27603 - DNA, 373 bp, Zea mays
  unsure (1)..(373): unsure at all n locations
aacaacatggcagtccctcggatctatgtcgactaggccactaacaggatcaagtaccacgtactcactcgatggtgaagcatagagcacatactataaagcatacaaccatacattgaggagtattaaatttagtacaacatcatccgagttatagcaaaagtagtgatcattgttcggaatgcatcgaaataaacctacggtaataaatggaaggatgggaagcctgcccatcactcctcatgctctcttagctgaggagggtccactcgactgtccaacccgtggcaaaatgacgacaantcactcaacaaccatgtctcagagacctgaaaatatgccacagcaagttggatactactctcactgacta

SEQ ID NO: 27604 - DNA, 317 bp, Zea mays
  unsure (1)..(317): unsure at all n locations
gcttctaaagggagaacacgtgataggtcttaccaatgttactttcgaaaaggatagaccttgtacagctcgtcaagcaggtaaacaagtgggaggagcacatcacaacaagaatgtgatgaccacatcaagacccctggagctgctacatatggacctcttcggacccgtcgcctatctaagcataggaggaagtaagtatggtctagntattgttgatgactnttcccgcttcacttgggtgttctttttgcaggataagtctgaaacccaagggaccctcaagcgcttcctaggagagctcaaatgagttgagc

SEQ ID NO: 27605 - DNA, 494 bp, Zea mays
  unsure (1)..(494): unsure at all n locations
tatccgagctgtggtgccaagggtgcggccgcaccgggccttcttaatagagggccccctagccactgtacggtagcattttttcctattaaacctatctattatagacacaaatacgtaaggagcgatgcgttatcgagtagtctcgtttatattctttgaaagggaattaggcttacacttagttcctatatacttttggtggttgaattgcccaacacaaatctttggactaacttgtttgcctaagtgtatagatgatataggtgtaaaaggttcacactcagccaataaaaagaccaagctntggattcatcaaaggagcaaaggggcaaccgaaggcacccctggtgtggcgcaccggactgtccggtgtgccaccggacatgtccggtgcaccagngggactcagacttgaactcgctaccttcgggaattgtcagaggcgactccgttataattcaccggactgtccggtgtacaccggactgtgc

SEQ ID NO: 27606 - DNA, 327 bp, Zea mays
  unsure (1)..(327): unsure at all n locations
ggacattgnntgatccataaacctaaaaccctagtcttctangtaatgcctgccctctaaaataaaatactgactccaaaaaccctagttctcttgagtaccatgaaggagaagtgtnttcncgataccacttgataaagcttttccattactgcattctccttaacattacatgagcattaatggctatatatgattatatatacagaaccaaaaacaactactggttgaataataacgagttgctcgaacactcatctgaagacccacctaccgngaactggttttatttctatanttgtggcacagaaccccactcttctataa

SEQ ID NO: 27607 - DNA, 486 bp, Zea mays
  unsure (1)..(486): unsure at all n locations
tcggcgatggttaannaatttggcagcataacagtgcanatagcatttgttgttgtggtaacttcacacctactcgtctgtttatatagtgctgcaggtaagaaggcgaagcgccagaatttttacaccaggcggacacccgctcgcactcgctgcatggtggaccgcagagaccgaacagtaactctgcaaggtggggccgctatacgctgggagattgaatcgtttctcgacaacgagctcagggaaggtggtttttagaccttcggcgctccgaagcttaagagactttcttcacggatcaagctcgttacgaaaaacgatctagcaccgcgaaaggggctactgttgggtctatgcttcgtcgccgaacgtcttacaggaagaagtggtcttcggctgaagctgttatataagatagccgaaggtcctcttcgtgaacttcggattacaaaccgactaaagatagaatgacctttagtcata

SEQ ID NO: 27608 - DNA, 199 bp, Zea mays
  unsure (1)..(199): unsure at all n locations
aaaaaaaaaaaaagaaaaaagaaaaaagangaaaaaaaaaaaaaaaaaaaaaaagaagaaaaaagggagaaaaaaaggaagaagaaaaaaaaaaaagagaaaaaaagaaaaaaaaaaaaaaaaaaaaaangaaaaggggaaaaaaggaaaagggggggaaaaggggaaaaaaaaaaaaaaaagggaaaaagagaaaaag

SEQ ID NO: 27609 - DNA, 108 bp, Zea mays
  unsure (1)..(108): unsure at all n locations
ggctgcaagcttggttctgccctggggaggagtgctgttgtntttangaaacctaacgggcggctacagcccccgggaatctttgtaaaagctacgtagtgatgccct

SEQ ID NO: 27610 - DNA, 373 bp, Zea mays
cattgcggtaactgaagttatcgataagacgccgccaagggcgtcaatccaaaaaacggcagctgccgaaggtacagcaatcgtcgaaggcgtagcttcgtgggtcgcggctaccgaagccgctacagccgaagatacaaacttaacagccacgattgagaatatcaacaagattctggaagacatggctgcggaagaagctggtgctactactgaaaaaaccatggccacagtgcctgagaaaggaaaagaaatagccgaagacccttcggacgacgaagcctactctttccagaacttagttgggcaaaaactgacgatggacgatatagaagaacttaaagactacgccaagtcttgcggttacaagtca

SEQ ID NO: 27611 - DNA, 377 bp, Zea mays
  unsure (1)..(377): unsure at all n locations
gctttaccaaatggacgtgaatattttctttcttaatggaccaatcaaggaagaggtctatgttgagcaacctcccggctttgaagatagtgagtaccctaaccatgtctataaactctctaaggcgctttatgggctcaagcaagccccaagagcatgggatgaatgccttaaagattttcttatcactaatggcttcaaagttggaaaggccgatcctacactctttaccaaaacacttgagaatgatttatttgtatgccaacattatgttgatgatattatanttgggtctactaacgaatctacatgtgaagaagttagtaggattatgacacaaaaattcaagatgtctatgatgggggagttgaagtatt

SEQ ID NO: 27612 - DNA, 454 bp, Zea mays
  unsure (1)..(454): unsure at all n locations
tcagctccatctatgttatggattggctttgagtttttctattttccctcagcccttctggcagcttcctgactcccatgaatagcaatgggtccttgatccgaaggtatcttcatgcaaaggtaagcaggatgaagaattgcttcgaaagcattgagggtaccacgaccaataattgcattgtaagggtattccatgtcaacaatgtcaaacacaacttgctcagttctggtgttgttgatgaatccgaaggtcactggcatggtgatcttgcctagtgctacaatctgtcttcctccgaagccacagagagggtgtgtagcatcatgaatcttatcttctggctcttgcatttgcctaaaggccttagcaaatatgatatcagctgcactgcctgtatcaaccaagacattgtggaccaganaccctttgataacgcaagaaataaccatag

SEQ ID NO: 27613 - DNA, 421 bp, Zea mays
ccggaccttaagcacctgggctgcaacttgacacaaggtgtcgttttctctctctgacgtcgagccacctcatggacatctgcggcaatatttcggcacatggagaagaaggccgcaaacccgtgggccaggcgggcacccatcccacgttcacgacctcgaccacgaccacgaccacgtggggtgggagatccgcggccaggggaagagcgcgaggcaccaccagcagcagcagcagcaccagcaccggcagacggaccatcagatgtaggaccacgggaactggagggagctttcctgagacgcccaactggattgttgggatcaatccagaaaggagtgtatgactgatgtcgggtgcctttctccaatctgaattgggtcacgaactcaatcatcttcttaatgaatggggcatgaa

SEQ ID NO: 27614 - DNA, 388 bp, Zea mays
  unsure (1)..(388): unsure at all n locations
agctggctaggggtcactctgacgacaaattattttttatagttcatttctgcatctccatgttggttgggtagttgaggcgctggatccatggtttctgttaccgggattntaaatttccacagttcttgtcaccggtccaaaggaaactcgggtagggctggaaaaaaagctcgagctcgacgagctggctcggactcgcagcagctcggctcagcttggatcagctcgacgcttagaatgagcacgagccgagcctatttttgtggctcgtaaaaagagcgagccagctcggctcggcgcagctcgtgagctggctcgtgactcgatctaataacaaattgttacataaaatcctaattagcataaaatattagtaccgagtaga

SEQ ID NO: 27615 - DNA, 251 bp, Zea mays
  unsure (1)..(251): unsure at all n locations
gacactcaagcttgcggccaatggagaagcanaaatccttgaagtcttggctgtctatctgctctcctgttgncgactgttagttcggacggtactccgaagcggcaaacaatgttttgccaaaagaatatttgggcagtctttgatgttattgtggagacaacccttgcctcgatccatctggcgaagtattcgacaacgacgaaggcgaacttaaggttcccctgagccgtgggcaggggcccgacgat

SEQ ID NO: 27616 - DNA, 274 bp, Zea mays
  unsure (1)..(274): unsure at all n locations
caaagccttggggccaagaacagtaccataacaactttggctgctacagcttcgtctcttggtccggggcaagctgtcccgtaccaacctttctgaagagatggcccggggattggatgacagaatggttttatgtgaagaatgacttatcagcacgagaagacatcaaaggtataattatgcgtcccatttggcanagcttcggccttcggaggcccgaaggttgaaatgaaccaagccgccgaagagtgccaaagagccttctgcgttgtct

SEQ ID NO: 27617 - DNA, 423 bp, Zea mays
tgtgattcagtagtcaaccgttgttattatacgactctatggatgtactagacactaatcagatggatgggcctagataagcgtggcaacttattgccgggcacctggccagtgcagacaaggatggcaccaaggaagtacgtcatcttcgacgtgtacctattgttggggcttcgattcctagtctcgcctttccaagtgatggtgctggagctctacaacatccaactgagtagctgactcatctgtccccaacaccttcctgctatcacgacctttgtccacctctatgacacatttgtcaaggtgcacgcgagtctggaactatggcactagttcttcattatcccacagaccggaggggagtcatctacgaaagctagcgacccctatcagtacattcaagtggatctattcgggcat

SEQ ID NO: 27618 - DNA, 374 bp, Zea mays
agcttcgggtctttagccttgcagcttttgtcaatatgacccgaaacaatctgagaatcagttttaaggatcgcccttctgatccccatcgcctttagtttccgaagacccaggagcaaagcttcgtactcagcaatattatttgtgcagctgaaatccagtcttgctgcgtagcaagttttaaccttggatggtgaaaccaaaacagcagctgctcctgctccgaaggttccccaggagccatcacaaaacactgtccatgcctcggcatctttattcgcttcttcgccctgagcccctggcgtccagtcggcaataaaatcttgcaatgcttgagaatggatcgaggatctgtgcacataatcaatgtaaaa

SEQ ID NO: 27619 - DNA, 471 bp, Zea mays
  unsure (1)..(471): unsure at all n locations
ntagatcattnngctattgcgataaataattattcctaataaatgaacttatgaaattganaaaatatcttcacccgatctttctacttgcgtctgtaaaagttaaaatttaagattgctatgctgaagtttcaagaacaaaattgatatgtttttgaatcaactggaatttacttttgtgcgctctgtttgtacatctgcatctacatcgattggtgtgcctagttagaacaacatatattgtatgctcattaattatcgtgatagtctcatgcacacctaaagtattttattactattgctccaatctgccaaaactcgagaacaatattacttcttgttaaaagacgctcgggtttggagccttctctgtattccggngctacgatgcctctcgtgtgctgacgcatgctgaccagcggactcgaanattatcgaaatcagtacgagccctcctgatctctcactctc

SEQ ID NO: 27620 - DNA, 326 bp, Zea mays
  unsure (1)..(326): unsure at all n locations
catgatttgtagcgcatgtcangcaatgaagcaagttggtgttcatcatccatacaagaacatcatgacgactgataagccactcgagctcctacacatggatttattcagcccgatagcttacataagcatcggcaggagtaagtactgtctagttatggtggatgactattctcgcttcacttgggtgttcttcttacaggaaatatctcatacctatgagaccttatagggattcttgagacggcctcaaaatgagttccggtcaaggatcaagaagatcagattcgactacggaactgagttcttatcgctaatctgacgcc

SEQ ID NO: 27621 - DNA, 387 bp, Zea mays
  unsure (1)..(387): unsure at all n locations
gcataaaagccaagttttagtaataaacccaaggtattacccaaaagtactccctccaagaggaaatacccgaaaccacagttatatttatcatcagttaccatcatcatagaagtatccaaaattttctaatcatagagaatcccaaggttgctcttaactgtgagcaagactgatataccagtttctaacactctacagaggttgcacactttacccacgagttgtgatccctttctagtgtaggaccggtaaggcaaccagaggggagggttgaatgggagccaatcagaatttgcttacaaacactgaanatgaacactaaacatcaattgagatgaagcaagtgctcaaaccatgaacacatcagtgaacgagtgatctcat

SEQ ID NO: 27622 - DNA, 415 bp, Zea mays
tcttgaccaccataacgttcaccaagttgtacagctaccactgtcttagatggtatgtacacggcaatccttgacgatgaggaacatgttgaagaggttgtggcgctgtctgatgtcgacgacactagccgaggcactcaaagctcattgcacaatcaaagccttatacgtctcagtcgctgacgtaccaagaacctcttcatcaccatcataagtctctgcaatgttagctccaacagtatcttcatcttacacatcagaagcactaacatacccaccatcactagtagcaatgtatgcccgtttgctgcggtaatctcactgaatatggccaaatccgtggacacggtggcactagatgtcggaggagcaggctatggaagaggagtcataacaggctttgctgcaacacctg

SEQ ID NO: 27623 - DNA, 272 bp, Zea mays
acctaactgatcattggacatggattagatctaaaagggggtttctgaacctggattgagtcacccactgatgaataactatggcttgcttttgacaaaccaaaacatctttagtgggtggttgaatgcactacagataataattattggctaaaattagatgaaacatccaaacaccctatttataagtcagctattagcttttttggcaaataggtaatagttaggagttattgttacctacagatttactacaattttaaccactacta

SEQ ID NO: 27624 - DNA, 385 bp, Zea mays
  unsure (1)..(385): unsure at all n locations
ctctctaaggcgctttatgggctcaagctagccccaagagcatggtatgaatgccttagagatttccttatcgctaatggcttcaaagtcggaaaggccgatcctactttgttcactaaaactcttgcaaatgagttgttcgtatgccaaatttatgttgatgatattatatntggatctactaacgaatctacatgtgaggaatttagtaggatcatgacacataagttcgagatgtctatgatgggggagttgaagtattttctaggattccaagtaaagcaactccatgagggcaccttcatcagtcaaacgaagtacactcaagacattctaaccaacgttgggatgaaggatgccaagcccatcaagacactcatgggac

SEQ ID NO: 27625 - DNA, 168 bp, Zea mays
  unsure (1)..(168): unsure at all n locations
acctgagctgaacctcctctgttcccagaggaatatatttttagacgggnngtcgatgatccgaacctagcgcccctccgtcgtgaactaggactcgtctgccttgttattaatccacggcggctgatctgagattattcatcctcaaaaacgtttggatgaaaatat

SEQ ID NO: 27626 - DNA, 87 bp, Zea mays
tatagatactaagcttcctggcgggtagccgccacagccgagccactctccattgtttcccacacggcccgccggccggtgggggga

SEQ ID NO: 27627 - DNA, 460 bp, Zea mays
  unsure (1)..(460): unsure at all n locations
acctcagagtcacctgcggcatgcaagcttctaaagggagaacatgtgataggtttgactatctttcaattcgaaaaagatagaccttgtgcagcttgtcaagcaggtaaacaagtgggaggagcacatcacagcaagaatgtgatgaccacctcaagacctctggagctgctgcatatggacctcttcggacccgtcgcctatctgagcataggaggaagtaagtatggtctagttattgttgatgacttttcccgcttcacttgggtgttctttttgcaggataagtctgaaacccaagggaccctcaagcgcttcctcaggagagctcaaaatgagtttgagctcaaagtgaaaaagataaggagcgacaacgggtccgagttcaagaaccttcaagtggaggagttcctttgagaggaagggatcaaacacgagttctncgctccctacacaccac

SEQ ID NO: 27628 - DNA, 482 bp, Zea mays
tcagctccatctatgttatggattggctttgagtcagttcagtttttctttgcccttctggcagcttcctgacttccatgaatagcgatgggtccttgatccgaaggtatcttcatgcaaagataagtaggatgaagaattgcttcgaaagcattgagggtgccacgaccaataattgcattgtaagggtattccatgtcaacaatgtcaaacacaacttgctcagttctagtgttgttgatgaatccgaaggtcactgacatggtgatcttacccagtgctacaatctgtcttcctccgaagccacagagaggatgtgtagcatcatgaatcttatcttctggctcttgcatttgtctgaaggccttagcaaatatgatatcagctgcactgcctgtatcaaccaagacattgtggaccagaaatcctttgataacacaagagataaccatggcatcgttgtgtgggtaatccttgagctg

SEQ ID NO: 27629 - DNA, 228 bp, Zea mays
aaaaaaagaaaaaaaaaagagggaaagaagaaaaaaagaaaaaaaaagaaaaaaagaaaggagagagaaagaaaaaaaaagaaaaaaagaaaaaaaaaaaaaggaaaaagaaaagaggaaagaaaaaaaaaaaaaaagaaaaggaaaaaaaaaaaggaaaaaaaaaaaaaaaagaaaaagaaaagagaaaaaaaaaaaaagaaaaaaaaaaaaaggaaaaaaaaacgg

SEQ ID NO: 27630 - DNA, 212 bp, Zea mays
gggaaaaaacaaaaaaagaagagaaaagaaaaaaaaaaaaaaaaagagggaaaaaaaaaaaagaagaaaaaaaaaaaaaaagaaagaaaagagaaagaaaaaaagaaaaggaaaaagaaaaaaagagaaaaaaaaaaaagaaaaaaagaaagaaagaaaaaaaaaaaaagagaagagaaaagaaaaaaaagaaaaaagaaaaaaaaaaaaga

SEQ ID NO: 27631 - DNA, 191 bp, Zea mays
ggatcactctctcttaaggccgtaatcactaatgatcacttgtctcaattgtggaactttggaaaaatggaaaccttgattgtgtcctggaatggattgctaactcttggattgaatgtgaaaaattggagtgcttgggtgaagtcaatggaggtgggtgggcttgtatttatagtccccaaccacttcta

SEQ ID NO: 27632 - DNA, 324 bp, Zea mays
acctataaaactcagctggaccggtcgtccgagtggaatctgcccgatgcgttgctctaaccaggcgcgagcggtgtcggagaggaacagggggaggttgcggatgatgaggttgtcatcgtccgttccacccagttgacaggccagacggtagttcgcgagccacagttccagtctcgtctcccccgagtactttgtgatagtagtcgagggtcggaaccgggtcgggaacggcgcccgtcgtatggctcggctgaaggcctgcggaccgggtggctcgggcgaggaacttcgatcctccccgctgtcgtatcgcccccacgc

SEQ ID NO: 27633 - DNA, 495 bp, Zea mays
  unsure (1)..(495): unsure at all n locations
ntacttagttgattntgcanaagaagaggccggtcttttgcatgcctaatagctaagacttgcatgggctggctgtggcatcgccgcttggcacatgtggggatgaagaaccttcacaaacttctaaagggagaacacgtgataggactaactaatgtaaaattcgaaaaagatagaccttgtgcagcttgtcaggcaggcaaacaagtgggaggagcacatcacagcaagaatgtgatgaccacttcaagacccttggagctgctgcatatggacctcttcggacccgtcgcctatctgagtataggaggaagtaagtatggtctagtaattgttgatgattnttcccgcttcacttgngtgttctttntgcaggataagtctgaaacccaagagaccctcaagcgcttcctcangagagctcanaatgagtntgagctcaaggtgaagaagataaggagcgacaacgggtccgagttcaagaacctttcagtg

SEQ ID NO: 27634 - DNA, 305 bp, Zea mays
  unsure (1)..(305): unsure at all n locations
agctngggtacccaagaccaccgttcttttatggatgatgtgcctagcggaagccaccatgctgactctggccctggaaaccatagaagttaccaggcggaactgcagaaattgttcttgaaccagcgcctccatgaagccacattgctgaattatcactctgatatggaaacaaaaaaacgtcagaatgaaatgaacctccaaaacacaaataggaacacgaaaacctcatgcaactaaagaaggctatatagatccaaccaagggcaccagaagatgaaccagagcactatgtcatcattacc

SEQ ID NO: 27635 - DNA, 498 bp, Zea mays
  unsure (1)..(498): unsure at all n locations
cactaagatactaagctgttgaacctctaggctacagtgcatgacggaacttatgtgagcgtactgcacgaggnaacacttctcatggcgatgacatcaaagacaccttcttcaacaactgttacaatgtatttgtgagactgattattgatatcatcctaaccgaatcataacatgccgaaagacttataccattgcaagaagctcgtagctggtctcggcgtgaactaccaaaagattgatgcttgcgacgacaattgcatgttgttctggaaggagcatgataataccacacattgcatacactgcagtaagtcaagatatgcagtggtgctagatgatgatggaaacgaagttacgacaaaggtgccgatcaagcaactctggtacatgcctatcactccacggcttaagcgtctctttctaaatcaagagacaacacagcacattangtagcatagagaaggcgatcgttatggtcaagatccggatgtcatg

SEQ ID NO: 27636 - DNA, 422 bp, Zea mays
  unsure (1)..(422): unsure at all n locations
agcttacccatgatgaggcatgtgaccagnttaatggtcctcgatcatcaagcctacatcgacaaggtccttaatcgactcagacggagacactacactaagactctcttctcgtgcaagtcacccgcccggtctcagctatatcatttcaacccaaagtttggtacctgacagaggtacatcttttccgatgttgaacccatcacgaccatgatggatccaccatccagttctatttttgaaaaacatcccatcccacttgaagcatcatcttttgttaaaacaaaacattttgtttttctagagcaagactaagcacaagataaacccttttataaaacaggtgatcaaggagaggtaatcaatcttccgaggaaggaaacgcagcaagtgttaacacacaactctattactaatgcata

SEQ ID NO: 27637 - DNA, 345 bp, Zea mays
  unsure (1)..(345): unsure at all n locations
cacctataaaactaagctggcatccaagacataccttgaggaagatatattctttcctccaatcttcactatgtactggagaaatgacaagcactgctctctccatgagttcaaccgaaggtgcctttattgtttccaaaaatacttccgaaggtagagggagcccctgagccgctgatttggctagcagatctgcatgctcattntcacctcttggaatattcttgacagaaaaaccttcgaaagaagcctccaaccttcgaactgtatccagatatttttcaagctttggatctcttgccttgctacttttgtccacantggcaaagatgacttgagaatcag

SEQ ID NO: 27638 - DNA, 345 bp, Zea mays
  unsure (1)..(345): unsure at all n locations
actcagaagaacccccccacgccggccaaaactcttccaccgcgcgggttcaacttttctttgaatgacaaggcggccccacctctcagggagtcacgggggcgcactcacgcacggatcaatccctcgcacgcccgccgttccactgacacctagggcccctgcaccagtcggntgccccttctgtttctcttacatgtgggccctgttggtcagtacccttgttcccgtcgttgctacggaccgagtcttgcggcgggggatctccatggatctcgcatggtcggtgtacttggcccaccgccgactccgcgtcgtgggtgtacaagtaatctccatgcaccc

SEQ ID NO: 27639 - DNA, 466 bp, Zea mays
  unsure (1)..(466): unsure at all n locations
tattctcgagccgagcccgatgttttacttttatatatcacacgtgacaactttcacgaaatattgtcatgtttatcacaacctctacatatgatatatatcatgacatatcgacaaagtttcatgattttctaatttcatttgtgttctatacaatttaaaaacagctatatcacaagttcgtggtcattgttttgtgaataggatgttcgaaaattacgttctgttcctaaataaggccgcaacttatgctcaatgacatgaatatgatttttcattcattgtttcatgttattcgagtaacttgcagttcaaatttgaattatcaaaaaaattcaattaaatgaactaaatttagtagatatatctaatactttgagacatgtgtcaaacttccatatgtatgtccagatactatagaaacatagtagaanacgtatgggtgagggaaaaaatanaaaatatc

SEQ ID NO: 27640 - DNA, 326 bp, Zea mays
  unsure (1)..(326): unsure at all n locations
acttacattacattcacaacccttgaaataccaaaaaccctaaaaaggaccctggaaaccctaaatccaaaccctagggtgttaagtgcaaaattagtccacttttggactaaagtgcaaaaaccatggcaatgaggtatcctaagtcatatggttcacaatcatgaagatttgcaatccaaaacttgagatttggacttatgtgcanaagagccacacttgacccttttgatgaagtctgaatttcagtgtgattgattcaactttgaccccttgattcttcaaatagtgagatttacctangcaccacatcaaattgtaacata

SEQ ID NO: 27641 - DNA, 298 bp, Zea mays
  unsure (1)..(298): unsure at all n locations
tgccaattcttatcanagcagcttcttttaccagcacagctactgcagaccatancccataacatggccattgtgtgctggggaatggacatgattggacccttcaagaaagctcanggaggacacactcacgtgttggtcgccattgacaaattcaccaaatggatagaatacacacccattgcttctctaacttcagccaaagcagtggagttcatacaagatataattattanggttaggataccaaatagcatcataaccaaccctgggatcaacttcactaactttgaattct

SEQ ID NO: 27642 - DNA, 292 bp, Zea mays
  unsure (1)..(292): unsure at all n locations
tacgggcgcataggtttcaccgaaatccanaccttcgacttgggagtatcacttggccacaagtcgagctttgttccttgtcanccacaccatgctcatttgcttgttgcggaagacccatttggttcctacaacattttgattaggacgtggaactaaataccatacctcatttctagtgaagttgttgagctcctcttgcattgccaccacccaatccgaatcttgtagagctttctctaccctgagtgtctcaattgattacaccactcattcttgtcacactatgatg

SEQ ID NO: 27643 - DNA, 337 bp, Zea mays
  unsure (1)..(337): unsure at all n locations
aagcttggcttcgctgcttttcagcctatccaccaaagagagcagnattttgtctttttccttaaggaataacctccgatcgaagaattccaagagccaactggcaactttcatcttcttctttcttctgggcctttaaagcctttcaaaggatgagcacatactaaaaaagaaataagctacaaaaataatctgctttccaacaggttaaagtgttcccaccttcagactgttataggcaaggctatctgcgagttggtccttcatcattgcagataagcctagttcaagctttggatatcctacattgtctgccatctnccgacacacatgaatc

SEQ ID NO: 27644 - DNA, 483 bp, Zea mays
  unsure (1)..(483): unsure at all n locations
ctaagcttctaagggagaacacgtggtaggtttgactaacgtacaattcanataatatagaccttgngcagcttgtcaagcaggcaaacaggtgggaggagcgcatcacagcaagaatgtgatgaccacttcaagacctctagagctgctgcatatggacctcttcggacccgtcgcctatctaagcataggaggaagtaagtatggtctagttatcgttgatgacttttcccgcttcacttgggtgttctttttgcaggagaagtctgaaacccaagggaccctcaagcgcttcctcaggagagctcanaatgagtttgagctcaaggtgaagaagataaggagcgacaatgggtccgagttcaagaaccttcaagtggaggagttccttgaggaggaagggatcaagcacgagttctccgcttcctacacaccacagcanaatggtgtggtagagaggaagaacaaggacgctatcgatat

SEQ ID NO: 27645 - DNA, 253 bp, Zea mays
atttccttttcaggtaaaacttggaacactctttcctgttctgaatgtactctttcataactgtgttgtcaacaaataccacctaaaatctgcgcattgaatgctctttgctatacttacctaacaagtgttgttgcagggggcccaccacactgacctcactgcgcagagagattattacatggcctaatcgaggtaatttattgattgtagcccctctgcggcagttagcctgatataaataatctagcca

SEQ ID NO: 27646 - DNA, 412 bp, Zea mays
  unsure (1)..(412): unsure at all n locations
ctggatatttcttatcagaacactatggatattgtcgtgatnaatgataaattcttcttcacgaagcatgaaaagaagggaaggtgttttttcgtccaagactcaaaaatggtacgtgtttaaagtttcatgcatcgtaaagaattgaatcataaaacaagtatattacatacaggattacagaatattacacaaatcatatatcaaatgttttttgcaatagcacttagtcttccctaagtactatctctgcagcttcgttcagcagtcgatcgacaacctgatccatgatagcttcggccatctttttaatttcgtcgtcatctttaggctgagggcccgaagatgctttggtaggatctgagtgaggacgggatactattacatcattattacagatcgtgaacgaact

SEQ ID NO: 27647 - DNA, 482 bp, Zea mays
  unsure (1)..(482): unsure at all n locations
gtgtctacaagattggtaccgtgagaggatggatgaaggttttatgctatcacagaagntnggactatgtttatttcccttattcactactaactatcttggattggctttgttggatgtgtacttgtgtagcgtcacttgctagcacaagcgcacaaggagcagacactaccacaattggagatgaagagaggtctgattctgaatgtaagcgccaagttcattcttttcttgtcaaattagtatagagttgacaaagagttgtttgctgatttttttacctattgtatccaacttcatnccaaatattttcaggaaatgaagctaaacagaaggtcagaactcatgaagtgaagaactaaagaagtannttgcatgctgtgtataatattaatttatgtgacgttccatgtgacatttgtgtgacaatatgagactggagaatggagatgtgtattttgaaattgtatttctaaactctg

SEQ ID NO: 27648 - DNA, 258 bp, Zea mays
aaaaaaaaaaagaaaaagaaaaaaaaaaaaaagaaagaaaaaaaaaggaaaagaaaaaaagaaagaagaagaaagaaaaaaaagagaaagagaaggagggaaaaaaaaaaaaaaaaaaaaaaaaagagaaaaaaaaggaaaaaaaaaaaaaaaggggaaagaaaaagaaaaaaaaaaaaaaaaaagaagaaagaaaaaaaaagagaaaaagagagaagaaaaggagaaaaaaaaaaaaaaaagaaaaaagaaaagaaa

SEQ ID NO: 27649 - DNA, 302 bp, Zea mays
  unsure (1)..(302): unsure at all n locations
agcttgaatggtattctgcgatggatcttttttaatcttccgngcatgagccagtgctgttctagtagcaccctctaaaggcagtacatgttatgcaataaagttagactttagttgtacaaataacattgccgagtaccaaactcttcttttagggcttccgaaactaaaggccatgggaataagaagggccatcctcaaaactgattcacagttatttcttgccacgtggaccagagtagcaaggcaagagacccgaggcttgaaaagtatttggatgccgtccgaagattggaagcttc

SEQ ID NO: 27650 - DNA, 402 bp, Zea mays
  unsure (1)..(402): unsure at all n locations
taagcatntctcctgaagttctttaaaggatnnctgcaaatttgatattttatccacttcagctttcaggtttgcttcaagatatttcttttcttgatcgaatttttctgactgtcggagcaattcatcctttaacttgttattctcaagttgcacctcagccaaagaaccctccatggtctgaataacanaatctttcttttctaatgcaccttcgtgctctttgaccatgatttcaaggtcttggattgtgaagtccttctttttcagattagcttcgtaattctcaactttntcagctaaatcttgaatgacggctntgnttttctcttcttccagatctntgtgcattnntagaacttngcttaataatatgctctngtgaaatgatcttcgttagaa

SEQ ID NO: 27651 - DNA, 245 bp, Zea mays
  unsure (1)..(245): unsure at all n locations
ataagaatccgatatattatattccactaacatagacctaaccatatcaatgagagttctattctttctttcaacaataccattttgttccggggtatatttggaagagaattcatgtttaataccctctgcatcacaatattcatcaattcttgccattttgaagtccgacccattatcacttctaacctttttgatgtcgaaatcaaattgattttgagccaatatagcanatgaattgaatg

SEQ ID NO: 27652 - DNA, 482 bp, Zea mays
  unsure (1)..(482): unsure at all n locations
gacctatgatactcagctgctctgatcattgactgaaggcttgcttctctctcttttgtggtagaacttnttttcttcttatcatttacatccttacctttgttcttcttgcttggaaaatttatggcaatgtgaccaggttccccacactcaaagcattttctatcattgcagacatttcttcttgatgtttgtgcctttctaagttgacccttctttttcctcatgaatttgttgaatttcttcacaaagagagcatattcctcatcgctttcacttccatttccttcatcttcactttcttcattttcaattgcctttgaaacntttagcttgagagcntattgattccctttcacctttttagccaaactcatagattcggcttgagatntcttgaatgtcttgagtaagaatctctcccaataccttcggtggataggtggtggccatatcactccttactaacatggtcccaatag

SEQ ID NO: 27653 - DNA, 429 bp, Zea mays
  unsure (1)..(429): unsure at all n locations
agcttatccaggggttccttatatttatgttacttaagtctctgatcatttaggcgtagatatttcacaattcgctcttgacaatggattgtggattaccgggaaaactaagacatttacatcatctcccttaacagaagaaatagaagctcgaggtatcgacagagctgagcaaaagcaccagtgcgtatggtccacgtgactgatggatgtgcaaagctccggaatctcctacggggatgatgatctcgtactaggatgatgcgctttgttngcattcccttcgacagaaagaaatagcaacaattcgggctaacagagggactagaaccgacttcttctttcttgatcttacctatgataaatgagaatccgctgccttgttttggtgatgattgaacacatcggaaataatagtatttcaatgga

SEQ ID NO: 27654 - DNA, 455 bp, Zea mays
  unsure (1)..(455): unsure at all n locations
tcacttntctatagccttctaattctatcgggctaactgatagaaagtttataaaaaaggtacggtgcaatcagtgaacctcttactgaccgggcagggcagactatatgagcgagattgattgatagcgctgtgccaacttgcttacaagattttgagactttagtttagtttagtttagtttagtatagtaaatcctcttcataagttatttcgtacaggctattcaaggtctattggctntattgcttatgtggtacttcgaccgcgaagccccgcttatgcaccgagaaagatcgtagataggaaagatctgttatgcaccaacgacggcccgccccttctcttacctttatcgttcatacctcagtccattgctggcttgaatgctgtctctcttcttctctgctcgcgagagtgaataagacgacgacccatcgtggggaggatggaat

SEQ ID NO: 27655 - DNA, 403 bp, Zea mays
  unsure (1)..(403): unsure at all n locations
agctatgaagattcttcattccatcttgngttattcggcgacgcgagagccacgccatgtttgtcttagcaattaagcaagtgccgagctcagctctaataacatctactaagtatagctgagcctctaacacccccttaaatgctattgaatcatcacttcttcttaagacagatacacctatatccgtaaaaagacagttgtaacccattntgcataatcgcgaaactgaaagcaggtataatctagagaatctacaagaaaaacatttgaaatggaatggtcaagagatatagcaattttacccaattctttaaccaaaccctgaatttcatcccgaatgtgatagctcgttgagatctttgtcttctccgagaagagacatattctctccctgcatggg

SEQ ID NO: 27656 - DNA, 224 bp, Zea mays
  unsure (1)..(224): unsure at all n locations
ggcttgcaaaatnttgagatcaatgaatgttgtttggancataactattattctgcggatttcgtgtgctggtgngaaggccacaactaactgagttagtttgccccttcccttaaatagcttaagcacttccagggttcttgtatcgaactataatcagcctaactggtttgtaagctagctagttctgctggatgaggtgttcgctgtatctctgcttcact

SEQ ID NO: 27657 - DNA, 298 bp, Zea mays
aatttaactgtgtgaatgataccacttgaagggagcctcaaaagaatactctccctaaatgagttggctcccttagaaagaagttttctccccctttagagatgaagaaatacttcccttgacagaagatctctacttagaaaaaagcatgtgaaaattagaggtgcaagccatgatttgagaagactaactttccttatgcataggtaatagaatatgagttaactacttatgcatttttagccacatggaagcatatgatatgaaatatagtctaatcaaatattggagaagacat

SEQ ID NO: 27658 - DNA, 453 bp, Zea mays
  unsure (1)..(453): unsure at all n locations
atactacatataaattttactcttcttgtagcgttgtagcaacacgtgcaagtcagntttctttgaaaggaatatggatcaatggtgccaaattttctccttatgaactggtattgaggatgatgcaactaattggatcttatttgccattagttgcttgccaaattttgctttatcatacaaacatgaggatacaatgcaacaaagtgtttaattgatagacatgtgactatgaactctggtgataaaacaagttttggagggattgttgattggacaaacaacctttgtgtcacatgttccctgagttgtttgagatctgtgaatgtaaggatattctggtgaaacatgtggtggaggaaaatgtttggctatctttcagaagatggcttcatgaggatttgttataagattgtgaatatatctgcaagaaggttgctagcctcaacatgc

SEQ ID NO: 27659 - DNA, 284 bp, Zea mays
agcttcccaagctgacctccttcgttgggctgtcatcgtgccggaggagaccgctgacgcggtcgtggtcccaagcccgcctgacctgttgccggcgccgacatcaactcccgccggggccgtcgctgattcccccgcggagccgcccgtcgcttccaacatcgggatggttgaggtgccaccgctcgtggtcatccctgacctccccgttctcggtcacgaggagagggcgaccaccgtcgccgaagtctgtgatcggaggcccgccaccttaaccgagggga

SEQ ID NO: 27660 - DNA, 469 bp, Zea mays
  unsure (1)..(469): unsure at all n locations
natgcaanntacaatatagngttttctgctntagtgatacaattatgcaatgtatggtcatgaactgaatcgaattgacttgcgcttatactttttttatcctttacgtatgttatgtatatgtgttgtttcatttggcatgaacatcagtgatgaagaacgtagaccgaccaccttccaatccaaaacggatcataatccagtctactcaagagtgcttcagcgttgacataccccgtgctccggcggtgactgttagacccgaaacaaggcatgctgctgatgaggatgatgactttacacacactattgtagatgatctagtacgattatatcctctgtctacttatactttgtcaaacactatacgtcatcaatatagagatatacacgtgagagtacaagtcttgaagaataaaaataatttcatatatactacactcgtaaatgacagataacattaattctt

SEQ ID NO: 27661 - DNA, 271 bp, Zea mays
  unsure (1)..(271): unsure at all n locations
aaatatgccccctaaaaaacccatacccatgaccggtattaaaatttgcccaaactcatacccatgcgggtttcgggtacccaacgggttttccatacccactaacatcaacataaaaaataatttatcatgtaaataacaatccatacattaataagctaggataaaaggaacaagtgatacttaatttagcctaanattcgctacatgatgttatttcattagaactattcattaatatactatgagaatattataagaatgatgattt

SEQ ID NO: 27662 - DNA, 439 bp, Zea mays
  unsure (1)..(439): unsure at all n locations
gcttgatctttggaatcgcttgagaaggtttatattttctctgtcnttagggacactttaatagagacgtaggattcatttggaaaccgaactctggtattcaaatcgccatgtattttttacttgtgatttgttttcccatctccctctctaaattctcttgcttgatcatcacctgaatcaatttgtgttgctctcaagttaattccacaatcataagagcaacactagcaagaagaactcttctcccttactataattctattacttcttgttctaacgtttaaccggggatcgaagtgtttgtttcaagtttcgcctactcaccccctttaggcgactttaatactgcataaaattgcaaaattcaatatatggtctaaagtaagcaaggcgattgtggtaaaatcccttaagtgaagttatttttaataggata

SEQ ID NO: 27663 - DNA, 478 bp, Zea mays
  unsure (1)..(478): unsure at all n locations
ntagtgattagagagagtgatntgtcgtgttcatttgagctctngcgtttttattgctnccttctttctcattcttcttgcgatcaaactcatttgtaatcgaggcaagagacaccaattgtgtggtggtccttgcgggaactntgtgttccgattgattgagaagagaagctcactcggtctangtgaccgtttgagagagggaaagggttgaaagagactcggtctttgtgaccacctcaacagggagtaggtttgcaagaaccgaacctcggtaaaacaaatcatcgtgtctcgctctttattcgctcacgatttgttttgcaccctctctctcggacttcgttttatttctaacgctaacctgacttgtagttgtgatttagtttgtaaatttcagattcaccctattcgaccccctctaggcgactttcaattggtatcggaacacggtgcttcattagagtctaaccgctcg

SEQ ID NO: 27664 - DNA, 422 bp, Zea mays
  unsure (1)..(422): unsure at all n locations
atctcatacgaatagctncatcctgaaactgcttcttcctacaagaccgtcggcgacgaagcatagtcccaacaacggagaagggcgaggatgggtctgtctctttcttcttttcttaagctagtaactttgttcttgttggtatgtatcctactctctagggggtattgaccctccaaaagatacaccacctgatcctcgaatcaaacacaccattgctatatatatcttgtgcacactgcgattgatctcgagaatcaacacttggaattctagagtttcatcctatacataacagacttaagtcatgtagctacttctagcaatctcacatagggatcaggttcccaccttactacagtcactttgatgagagagcaagctggcattctatgccatcacaacacttcacaaacttcgtt

SEQ ID NO: 27665 - DNA, 335 bp, Zea mays
  unsure (1)..(335): unsure at all n locations
gcattttgagcaggcaagctgctataatggtaaaggaggatgaaaaggcttcaaagaaaagaaaatccactcctgagccgaaggcggcagctttgaagaagaggaaggttgaaagtccagagccgaagataacggaggcaacagaggagactccttcgacgcctcctgttgccgaaatagcagaaaatttaaaggtaatgactgaatctttacccatcaagctgctaagtcctctggggctagaactgacgaaacttttacagaagaaggatgagccttcaactacaaaggagaaggctgacgggcagaanaaacgaagaattgttactgtcatg

SEQ ID NO: 27666 - DNA, 433 bp, Zea mays
  unsure (1)..(433): unsure at all n locations
ntaacctctgcgagacgcttcctcttttattctatccatggtaaaggcaatatcgcatgtcatattctatgcatgtttaatctacatgttctcttgtatggtgtactgttggtttcctaatttcaatggatggatgtatgtatgtttgtactcgcatatagaacgatttggttgaagagcccgaagaactcgcatgagaagcccctgagcagcagtcggttggtggaggcaagtgtcccttgacctatctctgtcctattcattctttaattcacctcccgcattacacatttatacctaaggatttactagcttttgttatccatgtccttgtttacctatttgggttggatattattgttagcttatgctattgtcaactctaataatgacatgatgagattatcaatgatccatgtttccctctttatat

SEQ ID NO: 27667 - DNA, 317 bp, Zea mays
  unsure (1)..(317): unsure at all n locations
agcttgctgaggagatgaagaatggcgctgcttctattgaaggcgtggaggtcaaagtatggcatgtcagtgtctgtcagcaacggtgcaatctttgagttaactagaaccaatgtgttgtgtgagtctggaatgtgtcaccgcaaattcccatcggnttcactttcacacgccaaagtcccggagattctgtccgaggagggtgctcgcaagatgggcgcgccacccaagaccgacgcgccggtcatcaccccgcaggagctggcggaggccgacggcgtcctctttcggtttcccacgcggttcngtatgatggc

SEQ ID NO: 27668 - DNA, 484 bp, Zea mays
  unsure (1)..(484): unsure at all n locations
actcagcttttaattcatgtttacttgactttaacataaattttatttaattgagcacattagatgagcgtatcatattactttgctcaattaacattgaatcataccgttggaccaagacatcatgagagcatcttagctcctcatgttctttggtcatcttctctaggctgttgtttgttntgatgagagtctcctctagcctgagaagcgtctcacctggttccttgttccttctcaacaacttaaccaagagagctttgtccgctttgttgagatggttgtagaaacggcgaatctcctcttcttccacatcatcggtctcattntccctgtcattaatgtcagtggaagcaatataggaaaatgtaccttgtgatgatgaagattcatccacgctatcatnctcatattccttctcatcatggctttcgtctccaccgtcattgntagcaaataaacatttatcactagtgaagaacaa

SEQ ID NO: 27669 - DNA, 365 bp, Zea mays
gcttcttgggcccagctcccgttatcacttccattaccacctactcacaaccaaagccaacagctagaagggcacacacacgcacaacagcagcgtgattttcgggaggaatccgaagctcgtacagtcaacagtactgtgccagaatcgaagcatatttactgaagaatatcctactcttaatgtacctttatctttcatgacattttattttttgtatgagaaacaagtaacgaaggactaaatttcgatttcttgtaataattgtgcttgcatcaatgagtaaaatatgcctttctcacagttttctgaagctcgaaaatcgttcctaagggagcggagtattagttccgaagctacaaaaa

SEQ ID NO: 27670 - DNA, 469 bp, Zea mays
  unsure (1)..(469): unsure at all n locations
ngaaggacacactaaatagcaagctccagtgtactttgtctctgaagttctcagtttgtcaaagaagaactatacaaaattggagaaggtgctatatgctgtcttaatggcctctaggaagcttcgtcactactttcaagcataccatatgattgttccttcatcacagcctttgaaggatattatgaggaacagagaagctactggaagaattggataatgggctgtagaactcaacgaattcagcattgattatgtgcatagatcctcgattcagtcctaggcgttagcagacttcatcgctgactggacgccaggggctcaggaagaagcaagtaaagatgccgaagcctggacagttgtctgcgacggttcctgtggaaccttcgaggcangtgcagctactggtatagttgcaccttccaaagctagaacatgttatgcagtgaaacttgatttcagctgcaca

SEQ ID NO: 27671 - DNA, 442 bp, Zea mays
  unsure (1)..(442): unsure at all n locations
agcttctanagggagaacacattntgtgactatctaatgnncattnngagaaagacaaagattgtagcgcatgtcaagcagggaagcaagttggtgttcatcatccacacaagaacatcatgacgaccgacaggccacttgagctactccacatggacctattcggcccgatagcttacataagcatcaccgcgagtaagtactggctagttattgtggatgattattctcgcttcacttgggtgttctttttgcaggataaatcccanacccaagagaccttaaagggattcttgagacgggctcaaaatgagttcggcttaagggatcaaaagaatagaagcgacaacgggacggagttcaagaactcacaaatagaaggctttcttgaggatgagggcataagcatgagttctcttcncctacatgccacaacaaaatg

SEQ ID NO: 27672 - DNA, 374 bp, Zea mays
  unsure (1)..(374): unsure at all n locations
tctaaagggagaacacgtgatttgttngactaacgtacaattctgaaaagatagaccttgtgcagctggtcaggcaggtaaacaggtgggaggagcgcatcacagcaagaatgtgatgaccacatcaagacccctggagctgctacatatggacctcttcggacccgtcgcctatctaagcataggaggatgtaagtatggtttagttattgttgatgacttttcccgcttcacttgngtggttcttttgcaggataagtctgaaacccaagggaccctcaagcgcttcctcaggagagctcaaaatgagtttgagctcaaggtgaagaagataatgaacgacatcgggtccgagttcaagaaccttcaagtgg

SEQ ID NO: 27673 - DNA, 233 bp, Zea mays
gtcttagcaaataaacaagtgtcgagttcagctctattaaaatctaccaagtatagctgaccctctaacactcccttaaatgctattgaatcatcacttcttctaaagacagtgacacctacatcagtgaatagacagttgtagcccatttgacataattgggatacggaaagcaaattggaatctaaagaatctacaagaaaaacattggaaatagaatggtcaggagatat

SEQ ID NO: 27674 - DNA, 443 bp, Zea mays
gacctataaaactcagcttctcgactagtcgggacagggcctcatggacgggtgatagtacgcgtaagcggcaaggccgaccgagccgagggattcccacgcctctgggatacggatacctcactcgtcccttccgcgaaaagcaactctcgctcacacaaacatccctgttaccgacagagtccagatgctcgaaacaggaggaaaaaagacgcagcttcgcaagcgcggcgagggcgtgttcttctggcctcggcggccgcagaaagcacacgctacaagatgatctgatcctgcaggctcgggtcttcacgccgaagggagccgtagcaccctcggcatcgacgacgtcttcagcaaagcccgacccagcctcgggcggcgccgcggtccagggactcctccgggaatccggcccgagcagggcggctcaaccggtaccc

SEQ ID NO: 27675 - DNA, 392 bp, Zea mays
  unsure (1)..(392): unsure at all n locations
atgaaataaaaactgantttcttcagatccaatgtcgccacataaaaaatagattgtaccatatgtcattcaaagagaagaataagataatgcaaccctggacaaaagccattcgtaaatatatctcacctatatgtcttatgtacgaaaaatatatatctgaatatatttcatatatatatatatatatgaaaatcccgcagtttgaaaaatatatgtcaccttaacagatccgcaagttgaaaatatatatatgaatattatctcccactgtgccttatgtcaactggcccatttaatatgcaatctcgtttgtgagtacgctcggagggcagtagaaattagatggcggatatgttgtgatggacaggtaaatgntttacccgcactat

SEQ ID NO: 27676 - DNA, 310 bp, Zea mays
  unsure (1)..(310): unsure at all n locations
agcttctgcgcgtcgatctcgcttctctttctagcangcgctgcgcccttgcacgggatcattcctgggaagcgcgtccagccccttcggcgactcgacactccagtcttgttctggacacccttcaacttccgaagggagaccctgacgatcgaagtggtcgggttccgaggaacctaccacgccgtgctatggaggccatgcttcgcgaatttatggccgtcccaactacacctcctgagctaagatgccggccccaacgggcatcaccgtcgcctacgtctaacacgcttcgatgcgactggatgcg

SEQ ID NO: 27677 - DNA, 181 bp, Zea mays
  unsure (1)..(181): unsure at all n locations
tggtggagtcaatgttgatagatctattaaatactgcttcagctcttcgaaggccttctgctggattggtccccattgaaagacttctgttgacttcaacacttcgaagaatggtnagtttctctctgctgatctggatatgaatctattgagagatgccaatcttcctgtcaatctttga

SEQ ID NO: 27678 - DNA, 371 bp, Zea mays
  unsure (1)..(371): unsure at all n locations
agcttagatattttagcgtatctgatttgaatggtcgaaccgacttagagatggaatgactttntagtccataagggtctgagtcataattgtaatcttttgtaaggcgtatgatcgtaatttcttacatgctgagacctgtgcctataaatagtgaacagtactcctctactgttcacgcaatcctgtaactgctaacgcattactctggaattattgctctctgtcaaggcacaggtataaatgtaaccaagcatcattntataatatctcaatntatattatagaatgagcaaatgatgttattcgttcttaatattctctaacgtcttatatgttatatttaatattgcattatgtgtacttctgat

SEQ ID NO: 27679 - DNA, 129 bp, Zea mays
acaatacttgtgagactatagaacatattaaatgtagaaatgaatcttgacagaatcgacccaaaccgaacatagagtacttggaattggaaaacaatatcatgcccccttactctcttttgcatatgc

SEQ ID NO: 27680 - DNA, 403 bp, Zea mays
  unsure (1)..(403): unsure at all n locations
agcttcngttctcagtctgataacttctgagcgtaaattattaaacgcaatttcatagctgtcatcttcggcgctctattgggctcttagtgcgttgcttangatcaggccctatacgananagaattcatataacataaaaggaatgagttgcgtaaaaataacgaggtttctcaagtgtttaattcctataccttcangctgttgtacgcaagactgtctgcgagatcttctttcgtcatggcgcttaatccagattcaagcttctggataccaatacttctggccatttctcggcagacagatagctctttgtngtcangcaggcagtataagaagtcatcttcattcgttccattgaatattactgcctncttcggatattatagttcctttgcataat

SEQ ID NO: 27681 - DNA, 426 bp, Zea mays
  unsure (1)..(426): unsure at all n locations
agcttaagacacatcgagaattgtctgggaccataattaggggtaccctcaagactcctaaatctcagctggtaacccncatcagcacanagctgcaaaggcctgatgggtgcgactaagtcaaggatcggtccattcgagggacgcgatcacgcctcgcccgagcccagcctcgggcaagggcagccgaccccggaggatctacgtctcgctcgaggcccccctccagcaacggacacaccttcggctcgcccgaggcccagtcttcaccaagaagcaacctaggccaaatcgccacgccaaccgaccaaatcgcaggggcatttaatgcanaggtggcctgacacttttatcctgacgcacgcnctccagtcgacagagccgaagtgaccgcagtcacttcgccgctccactgaccggtctgac

SEQ ID NO: 27682 - DNA, 353 bp, Zea mays
  unsure (1)..(353): unsure at all n locations
tcgcacctctgaactaactcggctacatcgntcttcgctgtcngcaatagaatcctgacctgattaccttcccgactagtgttctggatgctgcatgtattccacattgccctgcatggacctcctccagaagttgcttcccagtggacaggagaacgcacttcatgaggatgcctgatgcgccccttctgtacaatacctccccaatgagtgtatagtgagccgactgcctggcaatgcgctctgccgagttcttgtcgtctggttcttcttcattctttatatacttaataatcagcctttctcagtcatcagaagtctgactcggttgatctatgatgttgcactcttct

SEQ ID NO: 27683 - DNA, 380 bp, Zea mays
  unsure (1)..(380): unsure at all n locations
agcttataacaccactatgccatcgaagctcagccatnntggatttgngaagtcgactgtgtctgaagctgatatggccataatgacgaagctaggctacttcagagaagccgagaaggggttgattcgctttggcggngaagagactatcccgaaaccaganaatgatgaagtggtagttnttaagagcttcttcaaagcanggttgagatttcctctgcacgggatgattgcagaagttctggaanattntgagttntatcttcatcagctgacctcctaacgccattgtaggctcagcgtgtatatcatggctcttcgaagtcaaggtgtggagctgctcgccgaagccttctgccgagtacatgaacttcactatc

SEQ ID NO: 27684 - DNA, 447 bp, Zea mays
  unsure (1)..(447): unsure at all n locations
aacccccctcaacctatatagcacagacctatattcttccttactcttttacaatcacttacttcttggaaattttatgagtcaatttatacaggctgcaacttctatccaaaacatgtatgctntactaataaaccgaattcatgcttcttctccatattcttcaaccaattacacaacttctgaatatttcgcatgcgatgcctacttggagaaatgataatcaccatgttatgtggtcgtcattcatactagttatgtacagacccatagcatccttctcaactatagaccacgaatatattcgttctactgtatttccacgcctcctattggaactcncagctagtntccatctatcaagccacatctctaactattctacatcctgtcaatagacaactgttgacagtgagtntatcagacaggcactatactgtcatgctg

SEQ ID NO: 27685 - DNA, 248 bp, Zea mays
  unsure (1)..(248): unsure at all n locations
agcttgagcagtgactgtctttgtctgatacccttggaagctggttatcaacatgtccttcagctnttgccatgacgtgattgttcatggccgaagagaggagtaccaggtttgtgcaacactcttgacggccatgacaaaagactntgccatgactgctgtattgccaccatacgaagatatggttgcttcatagctcatcaagaatcgcttcgggtctgaatgaccgtcgtacaacgggagttggg

SEQ ID NO: 27686 - DNA, 231 bp, Zea mays
  unsure (1)..(231): unsure at all n locations
agatagtaagtaccctaaccatgtatataaactctctaaggcacttgtgggctaaagcaagcctcaagagcatggtatgaatgctntagagatttccttatcaccaatggattcaaagtccgaaaggctgatcctacactattcactaaaactcttgaaaatgacttngttgtatgccaacattatgttgatgatattatattngggtctactaacgagtctacatgtgaa

SEQ ID NO: 27687 - DNA, 170 bp, Zea mays
agctgtcgaacattcatggttgtatatgacaaagaccctggggaatgacgattgccaacgctatcggtgtacaactctttgacgctgcggtcatgctgcctgtgccacctttctgaaagatggtctcggacctggatgactgaatggtctatgctaagaatgacctatct

SEQ ID NO: 27688 - DNA, 521 bp, Zea mays
  unsure (1)..(521): unsure at all n locations
tgtgctggcctcgtctgatcggtataagcgacaatagtggaatcgaggtttgagtgattccttcaccacttggctcanagatcaagcgaagtcctgatagaggagcaagtgggtgcattgaatccaccttaatgtggattatgggtggccggcaaatcaccgagaccacggtaaaaaatctagtgtctcatacatcactctagttatacntgtgttagggggtgcatgttatactatnggttactgcttatgtgagtagtgaatgtcgtcacatacaccactctatttttttggataaaataaaactgaaatgtctatttcttaacaatccaaaacatgatatangcattttctgtagtggtntcctggtgcgtaaaccaagtgaacctttgatggacattntacagaaatggatagtangatgatctgtggtgactgaataactgtatctgagagagtgatgttacgtgccatacctgttcaggctcgtgatgcgtcttgcacagatgtgatctattatg

SEQ ID NO: 27689 - DNA, 396 bp, Zea mays
  unsure (1)..(396): unsure at all n locations
agctntaacccctgtgagacctttccccgtttctttctaaccatggtaaatgcaatatcgcatgtcatatgctatgcatgcttaatgtacttgttctcttgtatggtgtactgttggtttcctaatttcaatggatggatgtatgtatggttgcaatcgcatagagaacgatctggttgaagagcccaaagaactcgcatgagaagcccctcagcagcagtcggttggtggaggcaagtgtcccttgacctatctctgtcctattcattctttaattcacctccctcaatacacatttatgcctanngattactagctttgtatccatgtccttgttacctatntgggtggatattattgntagcttatgctattgttaactctaatcatgacatg

SEQ ID NO: 27690 - DNA, 342 bp, Zea mays
tcactgagctcacacaccgttcctgggtcctttctttcaggtacgccagtctgcgtctcgccaaggatggatcggaggagctcggattagactttccgaccccgcaaacaacagcgtaacccccctttcgcgccgtaaccacctgcgtgagaaataccatggccgcatctggcctgcgactcgtgaacgaactgcggtcccgatcgtgtcgacaccacacaccttagtgcctgccacgtacgatcaccacccgacagctgtggctgtacgatgtgctaagttggatgcaccagactttccttatttttatattcattgtcagttaatgatcagtagttgcta

SEQ ID NO: 27691 - DNA, 261 bp, Zea mays
  unsure (1)..(261): unsure at all n locations
ttaagcgactgangcgtgcagctgaatcatcgtatagattactgatagagattgctagacnactcacagtacangatgcagaagaggctgataagtcatacacgagatgtgttatatctatgtaatatatgtaatcatcgagtacagcaatacctctgacttgcaaaacgatagatccataatatgcgattgcagttaatataatgcgtccatgctataggaatattgatcactatttatatgcacagggcgcaggctgtg

SEQ ID NO: 27692 - DNA, 208 bp, Zea mays
cgtcaagagactgatggtatatggagattctctggtagtcatcagccagataaacaaggaatgggattgttcaagtgcttcaatgggaaaatacagcgccgccgttcgaaaactggaagataaattcgagggtctggagtttcatcatatataaagagatcggaacacggcggccgatgtactgtccaagctcggatacggtcgaact

SEQ ID NO: 27693 - DNA, 491 bp, Zea mays
  unsure (1)..(491): unsure at all n locations
agctngagggcgtntctgcctatcgtcagtgactgcgtacaatagtaaaaggaaccttttcggattagccagaagcgcgaggccctttctgcaaaatcgcctgggcgcgggcgcgagcgcgctgttctccctggacctgngcttgttgggccagaatcggcccagtactgttttatcgttttcctttntcttttcagcagaactttgaaaaactgtagaaaatagtagaaaaatcctaaaattatgagaaccaatttcctaggctttgttatttccatagtatttaataaaaatagttntatgatttttagtttgaacaggggaatttanggtatttaaaatagcctanactattgattctggattttagagaataataataagcccaaatttcccanatntntatgtgagctatcacattattgagaagccttgngtaagtngaattgtttggaccttattgataccanacccaaacaccccctgcctat

SEQ ID NO: 27694 - DNA, 278 bp, Zea mays
  unsure (1)..(278): unsure at all n locations
gtctgtcggaatcgaacgaagctctcagttgaaacctgcttcggaggaagaaagtattatagttccacaagttcataattaaatggccagagtgcgttctaccgccacggttgaacgtgagggggacgaaactgaagcttcggagactgtccccgtctccgaagccatgcaacgatccgggatagtgacttcngaaaagttcctagtgatgatgcacaacaagcaatcactgaagcagaggaagaagatattgaggaaactgatcccgaagatgatta

SEQ ID NO: 27695 - DNA, 278 bp, Zea mays
  unsure (1)..(278): unsure at all n locations
agcttctntatagttggattattatttcctttanacgagatgattgcggatgtttagaagaagtttgggatttatcttcatcagctaactcctaacgccatcgttatgcttagtgtgtacatctgggctctccgaagctagggagcagaaccgcttgccgaaggcttctgccgagcacatgagcttcattatcagacaaaagctatagaagacgagctgcatgagaacttcngctactacaattntgcttattgcagagatgcaaagtctccagatat

SEQ ID NO: 27696 - DNA, 119 bp, Zea mays
cctgcagcaaggcaaccaccttattttacacaaggaagagcgagagcgtacctgacaaaacaacaagccaaaaacagggcctgaacccaaaccctaaggggcggaaaacaaaccgaaaa

SEQ ID NO: 27697 - DNA, 445 bp, Zea mays
  unsure (1)..(445): unsure at all n locations
agcttcacccagcagtatcgaccatgagcgcaccagtgccatgctctcttggacaacttactatntttgagtgctntcggtattcctggtgtctatttttgcgccattntttgggttcttatatacccaaggaacttctttaaagcatccaaccactaattggttgtggtgtctntggtttggattctttctcctttgctattagagtagagacatcattntttggattntgggaagtttaacttgtgcacatggttnttggttgattcaagtgcttcgttgtgtttgtcgatatcactgngaacatctaaccacttattggctcaagtgcatctcggtcgtagcanagacaccaaggcaccaaaggtacctgtagaanggatactagtgaatcaaggagtgagttctggcaccataagacatgtatataagttcatgtcatcat

SEQ ID NO: 27698 - DNA, 521 bp, Zea mays
  unsure (1)..(521): unsure at all n locations
tcagcttctaccgcgcgcgcgtggatatctagagaatgttgagcaatgcgtcttctccttaattgtctgtgcttcttgatcccacacaagggctgttgtgaccctacaactctctgctcatttaaacactcgctctcttatgagcgacaggggttagcacatggtgatagattatccaaatgtgtacttgtgcacgaatgaggttcacatgaatttaagttcgtaattaccaccttatgagcaacatcaagcatgatatggtcatcaactaatttattatgagaatatgacaacatatcatacttttcacctagagccaagttttctaaggttatcacttctacttngactctaagnctagaatttcagttaatttcagtgtaagttgacagcattgataatcatcatgaatattctttgctcataanacagatcataccgtggaccagatctcatagagtctntagctctcatgtttatggcatcttctcaggatgtcgtggtttgatgagagctctcta

SEQ ID NO: 27699 - DNA, 247 bp, Zea mays
  unsure (1)..(247): unsure at all n locations
tatcatatatactataacttatataatgggctcaactcanaatnttaaactnttcattccctttttcttaattttcttgaatttgttcatgggattcacttagggttcttaattagggttgcacattcttatctnttcaaagactcaatngttttgatcatgacacatttaagtatatacttggtgaattctttattacttaagttaatttgatgctcatgcctactttggttcacataaaataatg

SEQ ID NO: 27700 - DNA, 251 bp, Zea mays
  unsure (1)..(251): unsure at all n locations
ctaagctatgagatcttatccaacatggctagtcgcgggccgagccaaccatgttagtcttatgcattaaagcagtggtgagttcagctctatcaaatctacaagatagctgacctctaacnnactccttaatgctatngaatcatcacttcttctaaagacagtgacacctacatcagtaaaaagaccagtggagcccatttgacataattgaaaaacggaaagcaaantgtaatctaaagaatctacaa

SEQ ID NO: 27701 - DNA, 451 bp, Zea mays
  unsure (1)..(451): unsure at all n locations
agctngcttacttggtaagatgtctcttgcgctcttcacgggtttaccggagaggacgttagatntattggaactcataaatactgatgtgtgcggaccaatgagtacgacagctaggggaggattccaatacttcataaccttcactgatgattntagtagatatgggtatgtctacttaatgaaacacaagtctgaatccttagaanagttcanagagtttcagaatgaagtagaaaatcagcgtggcaagaaaattaaagcactgcgatcagatcgtggaggtgaatatttgagtcatgagtntagcaatcatctaaagaagtgtggaattgttccacagcttacgccgcctggaacgcctcagtgaaatggcgtgtctgagcgacgtaatcggactttattggatatggttcgatcaatgatgatccagtcggacctacctttgtcg

SEQ ID NO: 27702 - DNA, 421 bp, Zea mays
  unsure (1)..(421): unsure at all n locations
agctntgtagagtgaaaactatcatgttanttgtgctcatggntaagagcagcatggacgctcacacgattnagaaatttgagggttggttagttngtggttaaatgatgatccttgtttcgagaagatgatgacatgtgatacacataataagtacatgcttttataaatggatttcaatanggatggcaacgagttatatttgaggtcgggtagagtaaatatacgttcgtgatcatacccgcagatattacttaagcctgcccacgactatacctgtgggtcaaatntggtactcgtgttcgtacctggcgggtattgatgcnggcatcgggtactcgtcnggtataagacaaagttagcaacattcatttgaatacanattcgaggaccaccatatgacttatntaatatccatata

SEQ ID NO: 27703 - DNA, 444 bp, Zea mays
  unsure (1)..(444): unsure at all n locations
agcttcagctccatctatgttatggattgcttttgagtcagtccaattgccttcggcccttctggcagcttcctgacttccatgaatagcgatgggtccttgatccgaaggtatcttcatgcanagataggcaggatgaagaattgcttcgaaagcattgagtgtgccacgaccaataatcgcattgtaagggtattccatgtcaacaatgtcaaacacaacctgctcagttctagtgttgttgatgaacccgaaggtcactgacatggtgatcttgcccagtgccacaatctgtcttccttcgaagccacagagaggatgtgtagcatcatgaatcttatcttctggctcttgcatttgtctgaaggccttagcanatatgatatcagctgcactgcctgtgtcaaccaagacattgtggaccagaaatcctttgataacaca

SEQ ID NO: 27704 - DNA, 526 bp, Zea mays
  unsure (1)..(526): unsure at all n locations
agcttatatcatacctgtcctctataaccttctctcttccatctcaatgttagagttgtattntacctatntcctcttggtcgtatcctcttccttgtcgcttgcgagctttccactccatcctttgttgtgttttgtttgtcgtctcctttacccttctcacactctatcctaccttgtgattgcattatgtctgttatctaaaatcttcaacctcccatctcatttcaggagtggtattctacttaatccctcctttggtcataacctcatatntgccacgcgccagcctggccttggcttattctttactatacttgtacccttnggtccttgcactntcacctncttccttacacccttgtctgttatcgcctttaacccttgaatatatgtaacntacctaaatgctacctttgaactattcttaaaagccttcatttctttcgaccaagttagagctatgagtacctatctcntcctttgattctttcgctctttgacgcctacaagtgtgcttaattca

SEQ ID NO: 27705 - DNA, 478 bp, Zea mays
  unsure (1)..(478): unsure at all n locations
gcttaattagttagctatggatannttgtgtgttntatctactanaattctactacgatttaccgtgactaggacgtgttacaatgtggctaggtttcgattttaatatgactatgatgcctgacaagaatcatangctcagacaaatntgcatacgtccaanacttagtaaaatccatcttatatctaaattcaagtccatctcatgtgtggggtgttcacaataagcgatngagcagcatattaagcatcaggaacactagtagttcgttggcgtgttttgcccatggggtagatgggcatatcttagaatacttcgtggaggcatattngaccataagatgtgtactaggtagatagtgaatgcaacatctctctcacagctaaatgatgctgctctacaacaccaactcaactttaaagccggagaaccctttgggtacggcactactgagaacgaatatgtcatactnttgtc

SEQ ID NO: 27706 - DNA, 431 bp, Zea mays
  unsure (1)..(431): unsure at all n locations
catgtgctaggcggcgacgccagaggcagcccatgttagtcttagcaattaagcaagtgttgagttcagctctatcanaatctactaagtatagctgaccctctagcactctcttaaatgctactgaatcatcacttcttctananacagtaacacctatatccgtaaacagacagttgtaacctcatttgcataattgtgaaacggaaagcaaattgtaatctaaagaatctacaagagaaacattagacatggaatgggcacgtgatatagcaatnttacccaatcctttaccaaaccttgattccatcccaaatgtgatagctcgtgggatcttggttttctcgaggagaaaacatcttcttctccctgcatatggttgtgcaccctgcgacatccaactgaccccgtgctaacctcaacaattagtc

SEQ ID NO: 27707 - DNA, 71 bp, Zea mays
accaacatctttgtttcattatcttggtctgcaggcgggattgccataagactggtgtccaccctgacgtg

SEQ ID NO: 27708 - DNA, 346 bp, Zea mays
  unsure (1)..(346): unsure at all n locations
agcttctataacgtacactagctattgtatgagacanaaccatggggcanagagcagtatcacaacaactntgggtgctacagcttcngcgctcggtccgggtcaagctgtcctgtgccaactnttcgaaagaggtggcccggcgactggatgatagaatggttntacgtgaaaaatgacttgaaatcacgtgaagatatcaaaggtatcattatgcgccctatctggcaacgctttggcctccgaaagccgaaggtggaaatggatgaagcaaccgaagaatgccagagagccttcngcgtggtttggctctttattgngacaagggatttggtccaagagcata

SEQ ID NO: 27709 - DNA, 288 bp, Zea mays
  unsure (1)..(288): unsure at all n locations
agttatgaagctagtctctggctcatcctccttcttcatccatatatgatgatatcctaagtagcagtccaacagactcataagctctgaagaagctactgcatctacaagagagtctattctatgtaatggaaattcgtcctttggacaggccttgttaaggtctatgaagtcaatacacattctccatttgccgttggacttcttcaccatgacagtattggctagccacttctgatattntacttctctgatgaccctagcactgagaagtctttttacttcatt

SEQ ID NO: 27710 - DNA, 354 bp, Zea mays
  unsure (1)..(354): unsure at all n locations
agcttgccaatacttgtcatatttacaacatctgccagcacagcaactgcagaccataccagtaacttggcctttcgcatagctgggactggatatgattggacctttcaagaaagctcaagggggatacactcatgtattggtagcaattgacaaattcactaaatggatagagttcaagcccattgcttctntaacctctgctaaggctatggaattcatacaagacataatattcagattcgagataccaaacaacatcataactgacttangatccaacttcacaagtttagagttcttcgacttctacgagcaaaagagcattcagatcaagtatgcatctgtagcaca

SEQ ID NO: 27711 - DNA, 259 bp, Zea mays
  unsure (1)..(259): unsure at all n locations
aatgtcatggcatctcccattatagagcatgcttctagcaaatttaaactcttcattttcaaggtcaagctcggccattntagcaggtaatttagctatgtgatcactttggtgttaatcatggcaagggtgtcatccataacttccatattaacatctctacatctactgcgaatagtaacattatcaacaatagatgtaggtgggtttgagacattcaattcttctatcttcagcattaatataatattctcatctc

SEQ ID NO: 27712 - DNA, 372 bp, Zea mays
  unsure (1)..(372): unsure at all n locations
agcttgtgaaggttcttcatctctacatgtgctaagcggcgatgccacagccagcccatgctagtcttagaaattaagcatgcatctagaccagcctcctcttttgcaaaatcaactaaataaangttgccgtctaatacacccttaagagctagtgaaccatcacttcttctaaagacagacacatctacatttgtaatagacaatatatcccatattgataattgactacagatagcaagtatatccaagagactcaactataacacattagagatagagtgctcatttgagatagcaagtttacctaatacctttacctctggccttgatcccatcaccaaatattatggaatcttgngaatccttgtt

SEQ ID NO: 27713 - DNA, 263 bp, Zea mays
tcagctccatctatgttgtggatggcttgtgagtctgtccaatatctctcagtctttctatcagcttccttgttctgaacgtatcttcatgcatagatatgctggatgaagaaatgcttctaaagcattaagtgttccaccaccgatgaatgcattgtacgggtattctatgtcaacaatatcaaacacaacctgttcacgccttgtattgtggacaaatcctacagtcactggcattgtgatcttaccaagtgctacaatct

SEQ ID NO: 27714 - DNA, 377 bp, Zea mays
  unsure (1)..(377): unsure at all n locations
agcttgagaaatatntatacatggtccgaagagttgaagcttcctttgaagggttttctgtcanaaacattcctcgaggagaaaatgaacatgatgatttgctagccaagtcagcagcacaggggctgcccttaccttcggaagtattttttgaaataataaaagcacctttggttgaacttcttggaagagcagtcctcaatatatcacctgtttacagtgaagactggagaactgagatcatttctttccttcagggtaatttcctttcagatgacgaagcttataacaagagaatagaggcaagagctcgaccatatgttataatagaaggggagctgtacaagcatggagtctgttctcactactcaatgtta

SEQ ID NO: 27715 - DNA, 489 bp, Zea mays
  unsure (1)..(489): unsure at all n locations
gcttcactgcanatctagaaatattcttatgtctcacaagtctaccatnggtctataattggtatctntgagaatacatntggtatcatntacatgtgtgattagactatatntcacatcatatacttcccatgttgctataaatgaatatgttgttaaatcatatctgttacctatgcataaggaaagttagtctaatcaaatcatgtcctcgcacctctattttcatatgcttttttctaagtagtagatctctgtcggnggagtatctcttcgtctttaaaggggagaagtttcttccaaaaggagcactcatttatggggaagtaataatcttactgcttcgacgggatcattgaaaatatttatgaaggcagcttatttcttctactgctttaatgcttctttcggggtgatgccaagggaaagtgtaaacccagcatgaaatgttcaacccccattaaatttacctcagtggttgctttgcta

SEQ ID NO: 27716 - DNA, 297 bp, Zea mays
  unsure (1)..(297): unsure at all n locations
agcttctccgccaatctgagcagttngaacgagaaaagcaagaatttaatgcanaacttgaagccgaagctcaacanagttcagatntgagaaatntattgacgagccttcaagaaaaatgtttggaatttagtaacaaatgcattcaacgattaagaagaaattttcactcagttggagccagcagtgaanaattcaccctctcagctgaagatctaccgaggaccttcgaacatattgagggtgagattgacgagctcgacgaagtcatagctgggcacggtgacttctgtgcct

SEQ ID NO: 27717 - DNA, 252 bp, Zea mays
tatgtgagcatcttatctcatgcgtatatatcaaagacaaccacttgttagaattattataactaatgtgcttgttccggctggcgcaccggcggaccaaatcttggcgaagagtacgcttggagcgcctctattccctccaagcctccatgatggaggccgaggactcgacaaccgtaacccgatttgcacccgcgtgaatgtggacgatgacgcccttgagtgcccttatgttgcctattcattcatcat

SEQ ID NO: 27718 - DNA, 411 bp, Zea mays
  unsure (1)..(411): unsure at all n locations
agcttgacaatagatgagttgttccatacaaaaaggctnntattgaaatctaccaagctcatattaatattgaatggtgcaacanaactgaaagggaaataggcttacaccttttcctaattgatntggtggttgaattgcccaacacanataattggactaactagtttgctctagattatgagttgtacaggtgccaaaggttcactacaaaccaataaaaggaccgagaaaggattcanatatagagagctaaagtcagccgaagtgtgcccttgtctggcgcaccggactgtccggtgtgccaccggacagtgtncggtgcatcaccggacagtgtccggtgcaccagtgactccaactccgaactgctcaccttcngaaattctggaggccgcttccgtataattc

SEQ ID NO: 27719 - DNA, 361 bp, Zea mays
  unsure (1)..(361): unsure at all n locations
aaactaactatntatttcattttctgactttccacactacanaatctcagctntntgctntntcacaccgagaaactagcgagaagctctacaaattgacctttatacgtagacactaagtccgtgtcccagcagttcatccatatagtcacaaaaaatactgttgtatattgtaaagtataatatttatatagtgtagttcgaatatttagatgaggatgagtaagatgcgggagatagttctatatatactaacaacgtatattcgctcatataaacattcgcatgcatatcttatcagtataagcattttcgaagaaagtatggtcggnaatcataagactgaatcgagcatctatgt

SEQ ID NO: 27720 - DNA, 425 bp, Zea mays
  unsure (1)..(425): unsure at all n locations
agcttgaggaacatgatcaaaggcatactaacacatgtatgctatagatcaatccacgttccacgaatataaggtatntactcactacgcagcttacataacctcttttcatccaaagggtttgtcacacccggttttagaacgcaaaccgaatgcgaaccatgtacgtgccangatcagttattcacgtacacagcagctacataatatggacatcatcacacagtgctcataatagtattaataagggagatagtcgattacatcatacgtctgagacgtccatatagctcttacaataaatcaaagtgccgaatagatacgtaaatcacgcggtcttcacaggcaggcgactggtggttgccgctacccacacctagaactcgcgcaaccttggacttctggaagtctcttcacagctcatc

SEQ ID NO: 27721 - DNA, 403 bp, Zea mays
  unsure (1)..(403): unsure at all n locations
ggacttcatcattcacacaagaacatcatgatgaccgagaggccgcttgagctactccacatggatctattcggcctgatcgcttacataagcatcggcgggagtaaatattgtcttggtattgtggaagactattatcgcttcacttgagtgttctttctgtaggaaaaatcttcaacccaagagaccttanagagattcttgagacggcttcaaatgagttcgaattataatcagaatatagaggcgacatggatggagtcaaaactctnantaaggattcttgagaggaggatcagctgagtcttctcctaccactaacaaacatgtgtgagagagataaacttttgattacaggacatctgataatcaacacaattgattttggtgagcatacacgttg

SEQ ID NO: 27722 - DNA, 490 bp, Zea mays
  unsure (1)..(490): unsure at all n locations
agcttagtcccataggttgtaacagatattgtgctaatgtgcagcatgatgagtttctacgaacactagctgtgttgagttcatgtatgaggngcaccctcctcgcaatcgttatgtcctactctatagggcctccagtgtgcagctccttggaaaggtaacaaaattggtattccttgtcccagaagcattcccctattgtattcagttgtgaatgttcatgttgtttctaagtcccaacaaggatatctcacatggttagggtcgtatgctggcttaaatgatcttagtactaagttaaccatgtgttntgangctgctcataacatggaatggtttacattctangattctattgntgcangtaggtactgacccacttgttgtgaatattggagtgacaaactagtccacaatgaaacttatttcagagtgaacctggtactgggacattcataatattcgtntacatttgaatcatatcatatat

SEQ ID NO: 27723 - DNA, 221 bp, Zea mays
  unsure (1)..(221): unsure at all n locations
taagcttaaggagacctatgggtgactacggcttcaaaaatactttctctgcacngaacagggtgaccatcacagacgtatacactcagaccctgactgcgctttgactcttagacccgctctattgagaatagagaagattctggttaattatgtgaagctttccgctcactggtgtttttgcgaaatccaaccaaggacttaacctctcggaactaaat

SEQ ID NO: 27724 - DNA, 439 bp, Zea mays
  unsure (1)..(439): unsure at all n locations
agctntgtgtntactccanaatcgtttagtgaanatctatntaatcttactaaaatgttgctatagtagaaaaccggttagaaccgttaattccgtctagacacgtntaaacacgtctaaacactaaacagagcctcatcgttcatctaccgtttagcgtttaccattgctaanaatntacaagtttttttaattttttaggctagagaaggggatataaaaaggaaaaaacactcgatgagtgagatcacacctatntgggtcgtattttggtcagcgtagaanaatcctattgtcggtggtttgagcctcgctccgacaagtaaatntattgtgtgttccgagctccagacgatgtgcgtggtaggcgcaagaattatactggttggggcagaacgtcccttacttcagtcatcgacggcttgcgctaccgacacta

SEQ ID NO: 27725 - DNA, 448 bp, Zea mays
  unsure (1)..(448): unsure at all n locations
agcttctaaagggagaacacgtgatatgtttgactaatgtgcaattcgaanaagatagaccttgtgcagcatgtcaagcangtaaacaggtgggaggagcacatcacagcaagaatgtgatgaccacatcaaggcccctagagctgctacatatggacctcttcggacccgtcgcctatctaagcatagggggaagtaagtatggtttagttattgtggatgactnttctcgcttcacttgngtattctttntgcaggataagtctgagacccaaggaaccctcaagcgcttcctcangagagctcanaatgagtttgagctcaaggtgaagaagataaggagcgacaacgggtccgaattcaagaaccttcaagtggaggagttccttgaggaggaanggatcaagcacgagttctccgcttcctacacaccacagcanaatggtgt

SEQ ID NO: 27726 - DNA, 315 bp, Zea mays
  unsure (1)..(315): unsure at all n locations
agcttaganaccataccttactcttgatttgcactttgtccatccatgggcatagattcacatntaatcacttgtgttggcactcaatcactaaaatacttagaaatggcccaagggcacatttccctttcaatctccccctttttggtgatntatgccaacacaacatanagcaactagaacaagtgcaatatcacttcaaacaaaaactcagatntattttgattcaatttggcatatatggatcatcctttgccaccacttggtttgttgtgagatcaacctcaaaatcctatctctaagtcaaatccactt

SEQ ID NO: 27727 - DNA, 221 bp, Zea mays
  unsure (1)..(221): unsure at all n locations
aagtctaagtgccatgtgtgtgttgaatcaaaacaaccccgcaagcctcacaaggctgctgaggcgaagagctcggcacctctagaacttgttcattctgatctgtgcgagatgaatgtgaatttgaccaaaggtggtcaaagatactctctcacttttatagatgactccactagagtttgttatgtgtatctctntaaaacaaaagatgaagccgtcaa

SEQ ID NO: 27728 - DNA, 360 bp, Zea mays
  unsure (1)..(360): unsure at all n locations
agcttatgaagattcttcatcctaacatgggctagtcggcggtgccatagccaacccatgttagtcttagcaattaagcaagtgtcgagttcagctctatcaaaatctaccaagtatagctgaccctctaatactcccttaaatgctattgaatcatcacttcttctaaagacagtgacacctacatcagtgaatagacagttgtagcccatcttgcataattgagatacagaaagcacattgtaatataaagaatctacaagaaaaacattggaaatggaatggtcaggggatatagcaaatttacccaatcctttgaccaaaccttggtnnttcatcccgaatgtgatagctcgttgg

SEQ ID NO: 27729 - DNA, 406 bp, Zea mays
  unsure (1)..(406): unsure at all n locations
catttcacatattctagaacagcttccaagacactatccatcctcttttncttggaggtctgggagctggcacttcacagtctgtactttcatttccctgctctgacttttctgctacttttctgctctggtctttggccggctgaatagttcatagccaacggaacattctatgcaggggtggttcacctttacttaattcgacatagcgctcatgccttggttacattaaacttgattctttactcaccaccatgatgcaggacaacttctttctcctgtgtcacggatacaagctgggaacaactatactaaccttgtaactttttgccaggcgaagcatgatactcttttgctcaacctcagattatatgtgttatgctcacacatatgttgaatgtctgac

SEQ ID NO: 27730 - DNA, 241 bp, Zea mays
cataatacattttttattattctgagatccagactaaaaactgccgccttgtcgtcgcctcgagaatggaactaagtatggaggagaatcacttgagtcgcctccgtatcacggattaggccctgtttcaatctcatgagaataaatttagcttcctgctcaactttagctatatgaattgaagtgctaaagtttagtttcaattaccaccattagctctcatgtttagattacaaatgac

SEQ ID NO: 27731 - DNA, 405 bp, Zea mays
  unsure (1)..(405): unsure at all n locations
agcttatcctgtcctgaatgatctacggtatntcngacagtcgacttagaatagttgtagatgaacttatgcacctgtganatgatcaactacgcaaatgggttagtccacgaggtttgtgatggtcgtcaaacaccaaaatctattataggaaatgttgagactatttccctttcaatacttgcctacttccacgttgtggtgtcccaatagacgagggttgcactcaacctctttcaagtgatccaatgatcaacttgaataccacgactntcttncttatagttnttctccctcgttgcaggaatctncacaagttggagcctctcgcccttacaatattgatcacanagaatgcacaagagtaaggttggagagcaacacacacatatctgcatacacaca

SEQ ID NO: 27732 - DNA, 202 bp, Zea mays
  unsure (1)..(202): unsure at all n locations
cttatttcatttacttgagatttctngcatatatcttgagtaagaatttctccccatactttggttggagaacgtgtagattaatcacttattactagctagggcacaatagtgtcatacttcttcggaagagatctaangaacttattagtgaaatccacatacgcgtcagttaaaccaagtcccttgagctcattcacta

SEQ ID NO: 27733 - DNA, 185 bp, Zea mays
cacctgcggatgcgctttaagggaacactgattgtttactaatgtaccttcaaaagatgaccttgcgcacttgcaagcatgtaacaggtgggaggagcgcatcacatcaagaatgtgatgaccacatcaagactcctggagctgctacatatggacctctatggacccgtcgcctatctaagcat

SEQ ID NO: 27734 - DNA, 221 bp, Zea mays
  unsure (1)..(221): unsure at all n locations
cgctcgtatcaaagcttcgcccatcctcatcaaatgagagggaaagactacaagtcccgctccaagaanagttgctacacatgtggtaagcccgggcattttattgcttaatgtcctatatcaagtgacagtgaccgaggcgacgacaagaaggtgagaagatacgagaagaagaagtactacacgaacggccgcgatgcccatgcttgtctggagtggga

SEQ ID NO: 27735 - DNA, 402 bp, Zea mays
  unsure (1)..(402): unsure at all n locations
agcttgtgggtggagcanaatcatcaattgcagagatcattggcgccgcattctccagaaagaagcgagtgaacgttcatcatcatcagctgggtaggccaacctcctggccagcacaagagagctatgccatcccgcgggacgagaccccaccgccgctggacacaagggcgcccacccctcgcagaaactacgccttcatgtccaaggagccggagaagatccaccacatccggcacgggcggcctcagttacatggctggaccggagaggcagcacctcagcagcagcagccgcagcaggtgcgtcaccaacagtacgtgcaacaccacaggcagtactcggccgggccgcagacctactacgagccgagctgcgatgcaacgaaggagatcgtcttcg

SEQ ID NO: 27736 - DNA, 507 bp, Zea mays
  unsure (1)..(507): unsure at all n locations
ctctcgcgagacctctccncatttctttctaaccaaggagaattcattatcgtatgtgatattctatgcatatntactctatatggtccctcgtatggggtactggttgtttcctaatatgaatggatggatgtatgtatgcttgcaatcacatatagaacgatatggtcgaggagcccgaagaacccgcacgagaagcccctgagcaccagtcggttggtggaggcaagtgtcccttgacctatctctgtcatatacattctttaattcaccttccgcattatacatgtatacttaaggantgactagcctttggtatcccatatcttgttacctanttgggtggatattatcgttagcttatgctatgtcaactctatcatgacatgatagatattatgatcgctgttcctttttatatatgtgactgtgcttaagggtcagcggttcatgcttcgtagctgttatgtacgccgaacggcacatagtgatggggctactatataa

SEQ ID NO: 27737 - DNA, 351 bp, Zea mays
  unsure (1)..(351): unsure at all n locations
agctngtggaggacctgatcatcgaagcaaataagtntctggatgagaagtggtcacccaagttttgttgatgaagcaccagaagactaatcaagggaggaatccatgtgggagttcgcaagacanagaattgtgtgttggcatcaatgtttcctcaataggctagctaccaagcganagctagaagcccgatgatgatctttgagtagccagaatcagcgtttgcaatcagcaaccggatgctcctcataggccagattntgttgaagttccatctcctcgaagagtcgcaaagtgaagattcgtagctgaagtannagtataaccataaccctcctaagccgaatctcg

SEQ ID NO: 27738 - DNA, 126 bp, Zea mays
  unsure (1)..(126): unsure at all n locations
agcttcagacanaatcttatgcttatgtctatgtattatcacataccttttctttatcagattaatcaacgtgctattactagactccgactgtacattggcctgagcataatatggagacgaatt

SEQ ID NO: 27739 - DNA, 138 bp, Zea mays
  unsure (1)..(138): unsure at all n locations
agcttctaaagggagagcacttttttatgatttatcaatgctcattntgagaaagacatgatttgtaacgcatgccacacacggaagcatgttggcactcatcatcacactctagaacataacgaccactaacaggcc

SEQ ID NO: 27740 - DNA, 266 bp, Zea mays
  unsure (1)..(266): unsure at all n locations
agctntattcgtttgccagagtagattctcactccagagccgaaggacgacgaggtagtggttntcannaagtttttcagagcanggatatggtttcctctgaacgagataattggagaagttntggataattatgaaatttatcttcatcagctgacccccaatgctatcgttaggctcagcatctacatttgggcccttcggagccaggggatggaccacaattccgaagcattctgccgagagcacgaattgcactatcaaac

SEQ ID NO: 27741 - DNA, 438 bp, Zea mays
  unsure (1)..(438): unsure at all n locations
tatcttatgtcatatgctatgcatgtntaatctacttggtctctggtatggagtactcgtggtttcctaatttcaatggatggatgtatgtatgttcacactcgcatagagaacgatctggttgaagagcccgaagaactcgcaggagaagcccctgagcagcaatcggttggtggaggcaagtgtcccttgacctatctctgtcctattcattctttaattcaccttccgcattacacatttatgcctaanggattactagctntgatatccatgtccttgttacctagttgggtgggatanttatgttagcttatgctattgtcaacttaatcatgacatgatgagatatctatgatcgctgttccatctctatgagagttgtgggacctatagggacctaaaccctatctactgtacccctcactaactgaagct

SEQ ID NO: 27742 - DNA, 410 bp, Zea mays
  unsure (1)..(410): unsure at all n locations
ngcttgtgaagattcttcattctaatgtgngctagtcggcgatgccagagccaacccatgttagtcttagcaattaagcaagtgtcgagttcagctctattgaaatcaactaagtatagctgaccctctaacactcccttaaaggctattgaatcatcacttcttctaaagacagtaacacctgtatccgtaaaaagacagttgtaacccattttgcataattgagaaacagaaagcaagttgtaacctatagaatctacaagagaaacattgganatagaatggtcaggtgaatatagcaatttaccaagtcctttgaccaaaccttgatttccatccncaaatgtgatagctcgttgtggatcttggttcttctcgtacgaagagaacattcttnntctcccagtcat

SEQ ID NO: 27743 - DNA, 267 bp, Zea mays
  unsure (1)..(267): unsure at all n locations
tcagctgtacatggtgataaaatatgaagcttgtacatggatgataatagcgtatntttagtcatactaaggtattcacaacgttgttatacaaatttcaatcgaatacttttcggtctagaatactacnatattctaatatatcatagcattggatgaaattctaaataaacatcattaccaaacatgtccttattactaataaaactattaaactgatttaatttgtgtgaacaacgagatattatataaaccatagtatgaaaa

SEQ ID NO: 27744 - DNA, 390 bp, Zea mays
  unsure (1)..(390): unsure at all n locations
agcttgtcgtcgcgacttctctattctaccccgacgtcctcttcatcngggggagggttgaatcgtcctccataaccgacaacgaaccaaccgtgcctgggaagaacctcctcagcgggaagctcgccgatgaaggaaccgatatcgtaatgcccggcgacatcatgaagccggagaacgagactcggtgcagcctgtatcatgagatgagatctcggaggtgggagaaactccacatgaacgagtcttcagggaaaggaggagactctgccaacgtgatcatcggcaagctcaagagcaagccaagcaggatgcgagacaacgtcgagagaactctctcttctgatgagatctgaacctcgacttcgcccgagccatgaacacaccgag

SEQ ID NO: 27745 - DNA, 178 bp, Zea mays
ctatgtacatagtcaatactgaattcgctaagctccgcagcccattttgcaatacttacagtagcctctctgttgctcattatgtccttcacaaagtgcgatgaaagaacaattatgtgatatgcttgaaaaatatgttgaaactttctggaagccattaacacaacatacaacacct

SEQ ID NO: 27746 - DNA, 351 bp, Zea mays
  unsure (1)..(351): unsure at all n locations
agcttgttgtggttgatttggtcttgaacgtaattagaccacgatgagtgctaagcgaatnttctagcaagacttagatgacatggttagagctatacctattagtgagaagcttttcataggagacgtcaatggacatatangcacaacgagtgcgggtttcaaggcggtttatggaggttttggatatgggtagtagaaacttagaatcatgagggaggagccttagactttgcggtagctnttgacgtgttggtagccaacaccttctttaggaagtgagactcccatttagtaacatatagtagcggctaccactctagtcagattgactttgtcctcacaagaagt

SEQ ID NO: 27747 - DNA, 307 bp, Zea mays
  unsure (1)..(307): unsure at all n locations
ctcagcttccatgcgatttgtaaagcttgttgacattcttgtgagntacatccacatttttatatatttactcaaaagttccagtgtgactcgattcattcaactgtagcatttgagaagccaaatctgcaaactatcaatttaagagaattgctatccaataaaagcacaacataatccacaggatatatttatcaaaaggccaattagattgaacggtaacaagcgtcaaaagaaaagtggatttcaactcatagaagttgtagtgcgagagaagaanacatacatttcggggactactttggac

SEQ ID NO: 27748 - DNA, 407 bp, Zea mays
  unsure (1)..(407): unsure at all n locations
agcttgtgatttatacaatttataacaagtaccatctcttaacatagattgtctatggataaactcaacacaagagatggcattagtagcacaagcactagtttcttatttagcaaccctttatatgtgaaagtcaaacgagttgctaaaatagagaaacctcataatatggactaaatntcccttgaaccctcatgcacaatatantttgaatgacatggataatatgcatgngtgggtcaatgaagttanaggggctgattaatccatattatggtgagtgtctaatatagaagaatcaaatnccaaataactagatagagaatacgtcacataaattttgatttgtcaccatatgataatattcattcaacttccaangtagaccttattcatantcaacatct

SEQ ID NO: 27749 - DNA, 169 bp, Zea mays
  unsure (1)..(169): unsure at all n locations
agcacatcacagccagaatgtgatgaccacttcaagacccctggagctgctgcatatggacctcttcngacccgtcgcctatctgagcatatgagggagtaagtatggtctagttattgttgatgacttnttccgcttcacttgggtgttctttttgcaggataagtct

SEQ ID NO: 27750 - DNA, 341 bp, Zea mays
agcttgccatctaatacaccattatatgctaatgaaccatcacttattgtaaagacagttacataaacatttgtaaataaacagttataacccctatgacataactggctaactaaaagcaaattagaaccagatgattctaccaaaacgacatttgagatcgagtgctcgatagtaatcgctatcttacctaacccctttaccttgccttggtcccattccaaagatgatcgtgtcatggaatattattcttacataggagtgacatcttctcccccatcatgtggttgtgcatccgtatcgatatccagctgagcccgatatcataaacctacaaaatt

SEQ ID NO: 27751 - DNA, 506 bp, Zea mays
  unsure (1)..(506): unsure at all n locations
acttgctaaatccaaaacatgttcaccatttgagattgacatctagcatgtgtaggatgtgtntgaaatcctctgtgttgtcactagtatgctaagtggctatgtctcatgctctgagtcattcactatcttgaatcataagatttgtgtttaaaatcaaaatcaagataagtgaacaatttataaagatcgagatgggtttgcatttgtccccacctttctgtatcgagactgcttccgtcttcacctttggatgaacttgagcanggtagtagatgatcgacaccggnngtttagctactgattgctttctgatatgcccacccggtgaaagtatacaatgcatgcttacacctctccattacatgtttagtgaacttgaatccgtgcaaatccgataatttgaaatccnatgattcaattcaatatgttctacatgatagtgacactgttggggacttccctagttaccttgactgcactagtgatttctactactatatgct

SEQ ID NO: 27752 - DNA, 307 bp, Zea mays
  unsure (1)..(307): unsure at all n locations
agcttacctatgacgaggcatgtggccagttaanatgtcctcgatcatcaagcctacatcggctcggtccttaaccgacttagacggagacactacaccgagactcccctctcgtgcaagtaacccgcccggtctcgtctntattacttaaccccaaagtntggtacctgatagaggtacnaatttcagatgtttaacccatcacggccgtgatggatccaccatcataagtcttttctttgtaaaaatcctcatccagtgtgaagcatcacctttttcaaaactaaaccttttgttntctaaagca

SEQ ID NO: 27753 - DNA, 116 bp, Zea mays
aagtgggaggagcgcaccacagcaagaatgtgatgaccacatctagacccctggagctgctacatatggacctcttctgaccccgtcgctatctaagcatacgaggaagtaagtat

SEQ ID NO: 27754 - DNA, 266 bp, Zea mays
agcttgaaggactgcttctgcttgagagcttccgaacgtgaagacttgttcggtccacggagtcgctttatccgagcgcgagttacttatcgcagaaggtgatgagtgaggtatccgtatcccggaggcgtaggagtccctcggctcggtcagccttggctgcttacgtgtactccgtcgtttccaggatccgctttccgaagtagtcgagaagcacgaaagaaatcctgctaaaaagagagtcctttttcgaggaaaaattcgac

SEQ ID NO: 27755 - DNA, 194 bp, Zea mays
  unsure (1)..(194): unsure at all n locations
agcttataaagttagatttccatatgcaaccagtcccacatcatttgaanattcctagaagaagttattgccaaaatactgaaggctgcgcagaagtcaaacagccacacggaaatcagctctgcagatcttccgaagaggctccttcacattagctcgtgaagatactatttgtttgtgtctatacctcccta

SEQ ID NO: 27756 - DNA, 377 bp, Zea mays
  unsure (1)..(377): unsure at all n locations
agcttatgtccgacggcttgtctgctatccgtctgacataaacgaaccatcgaacttgcatcggtctactgtagtgtctactacctattctctgacagaatctatgtatgttttaacagattcatattaatgtgtgcaagaaggaataatttcgataatgtaaatggtttagatctagttatttccgatggtctaatgtaattatacattttgagggtaatgattaaaccgtcgaatacatggttgtttaatattacttaatatcatcatactgttatctactatagacaaattgtgttagtgacttattatccgaattatgtaatacgacacatgcagctntatatatagtatgaaagtaaatttattatgtatac

SEQ ID NO: 27757 - DNA, 235 bp, Zea mays
  unsure (1)..(235): unsure at all n locations
taaaagagcattccccatactctctacacctaagtatggtcatggtagagtactttccctcttttagcacaccgagtcacaannaaccctgtgtaaactcccttttcagaggaacatctgcaaccttagtagttgggtccggtgagataatatttgctattgcaacaggaacttctgatctcatcanagaatataatatgacttctttaccaacctaataaaatatgcgaagtaa

SEQ ID NO: 27758 - DNA, 455 bp, Zea mays
  unsure (1)..(455): unsure at all n locations
agctntaactctcgcgagaccttttcttatttctttctaaccatggtaagtgcattatagtatgtgatattctatgcatatatacttcatttgttctcttgtatggtgtactgtttgttccctaatttgaatggatggatgtatgtatgcttgcaatcgcatagagaacgatccggttgaagagcccgaggaactctcacgagaagcccctgagcagcagtcagttggtggaggcaagtgtcccttgacctatctctatcctattcattcttctaatcacctcccgctttacacnattatgcctaaggatngactagctntgttatccatgtccctgtttacctattagggttggattattattgcttagctatatgctattgcgtaactctaatcaatgaacatgatgagatatctatgatacgctgttgccctctctatgatgatgtatactt

SEQ ID NO: 27759 - DNA, 319 bp, Zea mays
  unsure (1)..(319): unsure at all n locations
agctntggcaccctngccatttcaatgtaccttggtcgatgtatcanaacctttatctnntttcccttcggtgtggcagagatggccgaagcagcaactnttcttttctttccctactttcgcgagggatagcagtagtctgggtatataaagccaattacatcananaccctgtgtaatcttttcttgcctcgtcctccaaaggctaatgtcatggcatcatcttcggcccttgtgtaggccccaagcaattcatcactagttgcctcaacaaagttcagccaatcatcgtttggctaataaattgatctctgtatct

SEQ ID NO: 27760 - DNA, 261 bp, Zea mays
  unsure (1)..(261): unsure at all n locations
agcttgacgatgactcaggtgttatgattgcagaanaggttcaacacaaggctaaggagaccaggaagaaggaagggaaggatgctgacgatgccaagcctaagaagggtaccattgcttgtttccctgtcttgttactcttgttaacgttgttttcttggctgcgtcatctgatcagaaacatggtttcaggttgtcatccncatgaaagatctctcctttcagccgccaaggcgcgcttntctactggaagatggcact

SEQ ID NO: 27761 - DNA, 277 bp, Zea mays
  unsure (1)..(277): unsure at all n locations
agcttctatagggagagcacattgtgttactaacanatgtgcattctgagaaagacaggatttgtagcgcatgccaagcacggaagcaagttggtgctcatcatccacataagaacatcttgacgactgacaggccactcgagctcctccacatgtgacctatcggcccgatcgcttacataagcatcggcgggagtaagtactggctagttattgtggatgactattctcgcttcactcgngtattctntntacaggaaaaatctcaaacccaaga

SEQ ID NO: 27762 - DNA, 324 bp, Zea mays
catcactcgacccggatccttaagtcacctgcggcatgcagcttgacttaggtttactatcatgacgctgcctatcgatgaagtagacacaaccatacccagtcaccgacggcgaactccatgcctacgcatagaggaggcggtcacaccgtcacagtcctccgctaggaagagatcacgatgacggagcatgccgttgactatctatgtgcgagctgtgtccgcatgaatggagcaagcgtgtgcagttcccggacatagaccacctgacatggcgtcgcacgtatggcggtatggaacatgttgagcagtactctacccatg

SEQ ID NO: 27763 - DNA, 360 bp, Zea mays
  unsure (1)..(360): unsure at all n locations
agcttgaagccatggtaagtatcatatgcaaataaaatgcgaattgattctagcctaactacgggtgcataggtttcaccgaaatccaaaccttcgacttgagaataccccttggccacaagtcgggctttgttccttgtcaccacaccatgctcgtctggtttgttgcggaaaacccacttggttcctacaacattntggttatgacatggaactaaatgccatacctcgttcctagtgaagtagttgagctcctcttgcagtgcttcctctaccctgtgtggctcaatagaggaaacaaaagagtaatggtcacaaaaatgagcaacacgagatcgagtatgtacccccttttgaata

SEQ ID NO: 27764 - DNA, 249 bp, Zea mays
  unsure (1)..(249): unsure at all n locations
ttctttgacctattatgtgccatctactatataattcatcaacctgcataccatgaccaacctaaggattgattagtattctattttcctgtcctctgttaccctttgggaattgaatattatgattagntctatgctagcgctntactttaattaatgaacatgatgagatacaatgatgatactatgactttattctggatatgatgatatacatgtggcattttaagggactcgagtggtttgtcg

SEQ ID NO: 27765 - DNA, 402 bp, Zea mays
  unsure (1)..(402): unsure at all n locations
agcttatgaagattcttcatctcaacatgggctagtcggcggtgccagagccaacccatgttagtcttagcaattaagcaagtgtcgagttcagctttatcaaaatctaccaagtatagctgaccctctaacactcccttagatgctattgaatcatcacttcttctaaagacagtgacacctacatcagtgaatagacagttgtagcccatttgacataattgagatacggaaagcanattgaatctaaagaatctacaagaaaaacatnggaaatggtatggtcaggtgatatagcaatnttacctcaaaccttgaccaaaccttgagttcatacccgaatggatagctcgttgggatctctggtttctatatgaagagaacatctcttctnccctgcat

SEQ ID NO: 27766 - DNA, 343 bp, Zea mays
  unsure (1)..(343): unsure at all n locations
agctngaacagatntatgtntttgtacaatatggcgcattcttttctcatccttgagtatggtttcttaatttaccatatttattntccttgtccagcttgcaaagaagggagaacaattcattgatgtcccttatgttgtgaagagtatggatgtgtcatttagtggcatattgagctctattgaagctgcgacgattgaatagcttanaaataatgagtgcacacctgcggacctatgctactcattgcaggtacttgcatgctcttaaactattcccccttgtggataataattgngtatgctttcttgacagtgacactgatgaaagtcctaatttctc

SEQ ID NO: 27767 - DNA, 185 bp, Zea mays
  unsure (1)..(185): unsure at all n locations
ctcagctttaagggaaaccattntggactaaccaatgttcattgtgagaaatcacagtttgtatcgcatgtcaagcacggaagcaagtnggcgttcatcatccacacaagaacatcatgacgaccgacaggccgcttgagctacttcacatggatctattctgtccgatcgcttatatcagcatc

SEQ ID NO: 27768 - DNA, 425 bp, Zea mays
  unsure (1)..(425): unsure at all n locations
agcttgttagatctgattctataggacttagcatcatgaaaggcaagggttcagtcattacctctagaatttctgtcacaccaatacaagttgtcgatgggtctcttcagaatgcttcgacggagaacatctttcttcttgtccacggcttgatgacataatctntctttccttagatgctgaaggttctggtgtcaactttggtttctttggtaaccttttcttcttgtccttctcgaaagatctttgctcttgcctntaagaatacaactcttntttcactcccctgcctcttcgtcagtctctcatagcnggatctcgagccagggcatcatactcgattaccttcgttctctctggccgaggcagcgcattaccggcctcttctagataattccaggatacatacacatgatcatacctca

SEQ ID NO: 27769 - DNA, 196 bp, Zea mays
tagtcactttgtggcgctcgatcattctgtgaacgagcttgatccgaggaaaatcttctaagcttccggatgcctaagatacaagatacaccttccctgagctcgttggcgagagacgattgatataatcgtcggacacacgaaccatcttgcaccgattacactcttgccagtgagtcaccttgtccagctatgt

SEQ ID NO: 27770 - DNA, 402 bp, Zea mays
  unsure (1)..(402): unsure at all n locations
agctntatcanatggacgtgattagtgccttcctcaatggaccaatcaaggaagaggtctatgttgagcaacctcccggctttgaagatagtgagtaccctaaccatgtctataaactctctaaggcgctntatgggctcaagcaagccccaagagcatgatatgaatgcctaagagaatttcttatagctattggcttcaaagtcggaaaagccgatcctactctctntactanaacaattgcanatgatntgtttgtataccaaatatatgttgatggtatcatatatgggtctactaacaaatatacttgtgaagagtttagtaggataatggtacanaaattctagatgtctatgatggnggagttgaagtatttcttaagaattcaagtcaagcaac

SEQ ID NO: 27771 - DNA, 262 bp, Zea mays
acactcttcgatagagtgtcgagtatctttgcgccaacgctatctcgaatgcatcttaaagctccttcgtcaattccaccaaagaacatagctcctgtctagtagccacacgatatcccatattcttgtagctccttctcagactctgacaatccttgtgctaccaggttccgaaggtcaaagtcccctttttctgtaacagcatcagcaatctttatccctttgtcaggcactgcgggcgtgaccttctccactgccacag

SEQ ID NO: 27772 - DNA, 224 bp, Zea mays
  unsure (1)..(224): unsure at all n locations
agcttctaaagggagaacacgtgatanggttgactaacgtgcaattcgaanaagatagaccttgtgcagcttgtcaagcaggtaaacaagtgggaggagcgcatcacaacaagaatgtgatgaccacatcaagacccctggagctgctgcacatggacctcttcggacccgtcgcctatctgagcatanggggaagtaagtatgggttagttattgttgatgac

SEQ ID NO: 27773 - DNA, 289 bp, Zea mays
  unsure (1)..(289): unsure at all n locations
tcttcaccatgtgatcacgggtatctngagaagggtgagcaatacacttccctctaatgtgtgtcaagctcatcttaagcctttcattttcttctctgagctcttgatatgtatcatcatttctttctgcaaattctagctcaaaagaagatatgcttgtcgacggacaacaagcattagcacatggtaatatagtttctatttgaatacatgtgcatgagtgagggtgttgggattntaagttttctattacaacctcatgagcaatgtttaatatgatatgatcatc

SEQ ID NO: 27774 - DNA, 487 bp, Zea mays
  unsure (1)..(487): unsure at all n locations
agctntctcgggcttgcggngttctatcgtcgatntgtgaaagatttcagcaccatcgcatggccattgcacgagcttactaagaagggtgctccattttcttggggcaaggcgcaagaggttgcatttgaaacattgaaggatatgttaattcatacaccccttctccaattacctgatttcagtaagacttttgaattggaatgtgatgctagtggtattggtttgggtggtgtcttgttgcaagaacggaagcctgttgcttattctagtgagagactgaatggacccagtctgaactattccacttatgataaagaaatatatgccttagttcgaacttggaaacatgcaacactacttatggcctaaagaatttgtatacattctgatcatgaatctttanagcatctaangagccaaacaaatctgaaccgtatgcatgccaagtgggtcgaattattngaatctttcctatgcatcaaca

SEQ ID NO: 27775 - DNA, 270 bp, Zea mays
  unsure (1)..(270): unsure at all n locations
tactcagcttgatgccnccgacacccgtttcgatgggtgactgcggaacgaaatttgcgcaaaccatcccatacatgagttttggacctaaagtagtggaatgggtatgttcgttgtgaaaaacgaanaaatggttccggtggcaaaactcatgcttgtatgcaccccgacactccttttctgaatgggttacgtgcggcaacaaaattgcgcgaaaccaccccaaacatgagatttggaccttaagtagtggattgggcatgttcattg

SEQ ID NO: 27776 - DNA, 420 bp, Zea mays
  unsure (1)..(420): unsure at all n locations
cactcgacccggatccttaagcacctgngctgcagcttagcggtaccggcttcgtcttaaacccttggaaactggtgatcaacatgtccttcagcttctgccatgatgtgnatgttcctggccgaagagaggaataccacgtttacgcaacattcttgactgccatgacgaaggatntcgccatgactgcggtgttgcctccatatgaagatatggntgcttcgtagctcatcagaaactgcttcggatctgagtgcccgtcatacatggngagctggggtgacttgtatgatgggggccaacgtgtagcctgcagttctgctgacagaggagaagcatcatcaaaagcaaagattccatgatggaaattctcataccattcatcctcgctgaagaagccttcttgatgaagctccctat

SEQ ID NO: 27777 - DNA, 323 bp, Zea mays
  unsure (1)..(323): unsure at all n locations
agcttacaacanaagaatatattcattatctcgaccatatgtcataatagaaggagagttgtacaagtgtggggtctgttccccattgctcaagtgtntatccagatccgaacgtatagaattaatgaaggagatacacgcacgcctgtgtggatctcacattggatctaggcctttgcttgngaaagtttttcgtcaaggattntattggccaaaggcagcttcngatgcagcggatttagtccaaaagtgcgaaggttgtcagaaatgtgcaagagatcanaaacaaccttcgtctttaactcaattaatacaaacccact

SEQ ID NO: 27778 - DNA, 121 bp, Zea mays
  unsure (1)..(121): unsure at all n locations
tctatcanaatctactaaatatagctgatctgtaacacttccttaaatgttattgaatcatcacttctaaagacagtaacacctatatccgtaaaaagacaggtgtagccccatttacata

SEQ ID NO: 27779 - DNA, 219 bp, Zea mays
agcgatgccagagccagccatgatatcctacaactaacaagtgggagatcagctctatcaacatctactaagaatagctgaccctctaacactcctatatatgctatcgaatcatcactctatctgaagacagtgacacctgtatctcgtaaaagacagttgtaacccattgtacataatcgccaaactaaaagcaagttgtaatctacagagtctaca

SEQ ID NO: 27780 - DNA, 148 bp, Zea mays
acaaaactaagctggcacggaaaagcgcctggtgtcaacagcggccctgagtcatggcccaaccggcccgggggtataaaaaaaataaggtttaaataaattataggaaagaaatgtaaggagtcctggtaggttgcaaatatttctc

SEQ ID NO: 27781 - DNA, 493 bp, Zea mays
  unsure (1)..(493): unsure at all n locations
agctntgacatccagccgatgggaagtagtggcaagatatcaatgacaaccagcatctacaaccttctttccatggttgatgtagacacgaaagtacattttgctaaccaccctgatttctggacctacaaaacctatagttgacatggatgtatttttggagcccttaatgaaggatatgaaaatattatgggaaacatgtgttcaaatgttggacgagtatcgtaaagattctttcacgccgagagcaattatntttgttacgatcaacgattaccctgctctcttcacattatcttgctagtntaagggaaatgttggttgacagtatgcatcgatggaactgcttatgtgtccctttctgcatctaaggagatagtgaacatgaaggcacaaacacttttatttgaaggacacangtaccacatgcgaaatatggataagtacttcgacaataatgatgaagtatattctatttactcatcnaagtaca

SEQ ID NO: 27782 - DNA, 281 bp, Zea mays
ctaagctagtctatttgcacacattattaagtatatctatgtgtacacttgcacgcttgctaatgactgtttgcatatcagtcgctgccttataacaataagtagtcgcgtttgtagcttacatcataaaggtccctctatgactgcaaaagcaataatgttgacattccactacgacgaatataatagttgcctgaggtgagtacaacaggacactgaattttatatgccatgaatctcggagttaaaatctatccacaaccttttcttcaatcaacaac

SEQ ID NO: 27783 - DNA, 398 bp, Zea mays
  unsure (1)..(398): unsure at all n locations
agctntaatacacacattctcttcctntgacatcaaacaccananaccatactcaagcaagaacatatgatgatgtcaagggacagcaaggtgttaaagaggaaaacgactatcaaaactcccgcttacttattgagcatatgcccgatcaacatttaggtaagatacatatatgcaaaagaataatacttccttttgtacctttaccatgatgtagtgtacttcccatcttgaaagtagttaatctcttgagagcttctccacacttgtgcctgagtctttctcctatctttttcttgctgctaagacatcaaacttagaacaagttatactattgcgcacaagaagagactttctatttcatgactatcaacagatatcaattgaagcgaactatt

SEQ ID NO: 27784 - DNA, 218 bp, Zea mays
  unsure (1)..(218): unsure at all n locations
tcgcatctctgaactaactcggctgcatcgttcttcgccgtcggccaatataattctgacctgaanaccttcccgactagtgttctggatgctgcatgtatcccacattggcctgcatggacttcctacanaaggtgtttcccagaggacggtagaacgcacttcatgaggatgcctgacgcgccccttctgtacaataccttcccaatgagtgtata

SEQ ID NO: 27785 - DNA, 234 bp, Zea mays
  unsure (1)..(234): unsure at all n locations
agcttatgatgaacatgtgttgtacttatcgctgagcgcgagngtgacacatatcatatcataggattagctgtcgtacgagtggttagtgcagctatatctatcacatactggtatagctgatcctatgacactcgctggaatgctactgattgatagacttctgttgacaccatgactcctacataaggaatatactttctgctgatctgtgacataatctatatacagatg

SEQ ID NO: 27786 - DNA, 384 bp, Zea mays
  unsure (1)..(384): unsure at all n locations
agctnggtcatcttattgctttctgtcctgacaatgatagtgatcaggatcaacggaacaagatggagaagaagaagaactataataaggcatagggcgaggcgcatctatgcgatgagtgcgattccgatatgtcctcttccgactccgacaatgaaagacgtcgccgcaccgccttcaacaagtcattcctcttcctcaacgagcgtcacacatgccttatggctagggagaagaaggtatgtactctaaactctacttatgcttcttcaagtgatgacgaatctagtgatgaggatgacataaattattcatgtctatctatgggctagatagaaccaaggtagataatattaatgaatggttaatgccttgatgataaga

SEQ ID NO: 27787 - DNA, 213 bp, Zea mays
cttcacttgactccactggatgcagagaaataaaaaagcacggtggtgtggaatccacatccgtacggcgagcggcactgcagcggatgggagcccacggcaaacggcatcccgcatccctatctttctccctccctctctcgctcgcgtcgcgtgagtgtctgcctggctggttgccctcttctacagagacctctcctgtctacacccctt

SEQ ID NO: 27788 - DNA, 241 bp, Zea mays
  unsure (1)..(241): unsure at all n locations
aactcagctngccagacttaatttcngacctgcttctgctccacatagtaatcatatcccattctatggtcctctctgttaatcgactgacttgtcttaattgtgagtattcaacgtactctggtctcattgtgctgctacttcaatcgaatatatggcagtatgcaaaatgtgaatatttatattcctgtgcacgtgtgtacgtcttgcatggcaaaggacctatcaacttgccctgctt

SEQ ID NO: 27789 - DNA, 437 bp, Zea mays
  unsure (1)..(437): unsure at all n locations
agcttcgtaggctcttcacctataacaacatgggacaaagccctgagtacgaagtgtactttcgcaagtcttacccgactaangaaaaagactctcaaggatatgctggatttangaatcaaggagaggctnttagcaagaatcaacttagatacctttgcagaaaaagcttactaaagtgagtccttactttcaatattntaatgccagattaaatattaatagactctgtttgcacctagtctaatttcaccatctcatcaatacaacatcattnttactcataatgtntacatcctgacttangttgcangtcggagatcaagtctccactctccngngatataacggcgatcccgaatcgattactcagctgangatctctaaccacacgacatatgtagcacttaaccccttcatatgtcaacccgttccac

SEQ ID NO: 27790 - DNA, 357 bp, Zea mays
  unsure (1)..(357): unsure at all n locations
ctcataataatctacaactctggcatttttgttcatgcatatgtcacagaatctgggatatactaatattatgggcacatccncccaccaggtatctttccaaaagagggtaccttcctcgttcctaactttattaatagcaccccatttgaataagtgtttaaccttgtgcaaccctttccacaattgagacgcatctctattcgatgacaagagaaaatatcctttgggcatgtattctctttgataagttgaaccaagatcatagacccctggacaatttcatatcattttacagcaacatcattctcatctgttcaggatgccagacccttggctttggctagtccattccat

SEQ ID NO: 27791 - DNA, 372 bp, Zea mays
  unsure (1)..(372): unsure at all n locations
agcttgtagttntaaattgtgtataacggctacccgaacctgaacccgaagaattatgtactcgnaaatttgggtacccaatatataaagcctgtgttcgggtaccgtttcaagatacccganatttaaaaagaccgaanagcccgacccgaaattttaggctaacccgattcccaggtctacctctagggcatgctgtcctgctggctcttccctgccatcccactcctgcaggagccctcctccctccgtcaacgagatcccgtcttccagtacgaatctggcanatatttggcccaggaacttggtcgctttcgatgcatcggccacgacatcctncaaggtcgatagaacatgttggaaccttgcaat

SEQ ID NO: 27792 - DNA, 275 bp, Zea mays
  unsure (1)..(275): unsure at all n locations
tctccgctgacgagaccgtcagcgctacccgcngaccaacctccggctctttgacttttatgtctggctcttgtcccttgagtggggatgcgaacgagagccttctggcngcagcgtccgtcccgggaccatcactgctgctgcagaggtcgctggcgagtcgcccggagtttgtcgtcccgcacgctctccgatgtggagggtgttcatactcgcgggagtggaaccggagttccgtttgtaatggcaccttgagtgccggtgtcctgtcattg

SEQ ID NO: 27793 - DNA, 382 bp, Zea mays
  unsure (1)..(382): unsure at all n locations
agcttcgtcatctgataagaagttgccctgaaggtaagaaattatntcagttctccaatcttcactgtacacaggagaaatagtaagaactgctctttcaagtaactccaccgaaggtgcctttattgtttcaaagaatacatccgaaggtagcggcagcccctgtgctgcagacttggctaacaaatcagcatgttcattntgccctcgagggatattcttaacagagaatccttcgaaggaagcttcgatccttcngactgtgtctaggtatttntcaagcttcgggtctntaagccttgcaactttgtcaatatgacccgaaacaatctgagaatcagttntaaggatcgccctcctgatccccatcgcctttagtttc

SEQ ID NO: 27794 - DNA, 341 bp, Zea mays
  unsure (1)..(341): unsure at all n locations
actggaccacataccaccagtggctatgaaataatattatttaggtggttttgattgggatgtccttgacaggttcttggtttttctctgaagtagcatgtntgttattcgaaaagtaaaccttatcatgtcaagtggaaacttctattactgctctcgaatgttgattnttcttaaggattgttttaattgtaaaccatctcagcatttgttccagattcttttactttgttgatgtcagttcttgaagttcctttgctgaactagacttatttgccacttttctcttgactgtactgctccgaggcctgaagtaccttcattcagccnggatactccac

SEQ ID NO: 27795 - DNA, 229 bp, Zea mays
agctcgtgacattaataatatttatatcttatgttcatctctgttctaaattctatgtcaccatacattaatcgacctatgattcatgtcttgtaaataacagcttatgtgaaatataatctagtttcaaataatgtcaatgcatgacatagcttatgttatactttgaattcattatccctcatgtaacattgagagcatgtaagatgtgctccaatgtgtgtacatg

SEQ ID NO: 27796 - DNA, 335 bp, Zea mays
  unsure (1)..(335): unsure at all n locations
agcttagcanaagagatntctataatcatgaatattgagctcatgcctaagtctggtaaaagattgttcatcaagtggtttggtaaagatatcggctaattgattcttagtattaatgtaagaaatctcgatatcccccttttgttggtgatccctaagagaatgataccgaatggctatatgcttagtgcggctatgctcgacgggattgtcggccattttgattgcactctcattatcacatagcaaaggaacttctgattaattgtaaccgtagttccgcaaggtttgcctcatcatagcaattgcgcgcaacatggctgcggcatatactc

SEQ ID NO: 27797 - DNA, 340 bp, Zea mays
  unsure (1)..(340): unsure at all n locations
ctcacttatatgacccacacgacagtgccacatgtangtangacttanatcattatgccgaggccttttagcactaatattacatataggtgcatcatcaagaattaaaatgaataacccattcataatggatgcaaaagccacaaacatgccattcttagagatcacacaaccattgntctcactcgcaaatgaataaccattcttcatcaaacatgaaagagacataatgtntcgactcatactatgaactatataacaattatttaacttcacaatagatcctgattggangtggagttgcatcgtcccaacggtcaacgcaacaactcttgcatta

SEQ ID NO: 27798 - DNA, 331 bp, Zea mays
  unsure (1)..(331): unsure at all n locations
agcttgccttcgcncagtctatctttgtaatccaacggggtcgtggagcgcgccaatgggaaaatcttcacagctgtcaagaagatgctcctcgatgaacaaaaaggcatatggaccgaactgttaccggaggcagtctgggcgctaaacacaactgggtgcaaggcgactgngttcactcctttccgccttctatacggatcggaggccatgaccccgcaagatatatagcatgggtctctgcgtacagttccgtcagtcgtcctcgacgtggactagcctacttcaaaagatctcattgacggagacctggtctttgtcctcacgctct

SEQ ID NO: 27799 - DNA, 268 bp, Zea mays
gctggacaaacgacagactcttagacttaatgactttcttatcccagagaaagaatgatttgctactctcactttctaattacatctcaggctatgggatataagtgtatagtctgctggaacacatctcgtttatatcaactttataacactgagacctgcttgaaagacatttgtagcgaccgcaacactctaacacatgccatatgaaagtagagtaaaacacagacaaaaaaatctagcctatggctaatcaatctgacttaac

SEQ ID NO: 27800 - DNA, 470 bp, Zea mays
  unsure (1)..(470): unsure at all n locations
agcttcaagccttcgaactgtatccatatatttctcaagcttcggatctcttgctatgcaactnttgtcaacatggccaganataactngngaatcagttntgagaaccgcccttcttatccncattgccttcaacttccgaagccncaaaagcaaagcttcgtattcagcaatattatatgtgcaactganatcaagtttcactgcgtagcatgttctgactntggaaggtgcaattaaaacggcagctacacctgccccgaagattcaccaggaaccatcgcagaacactatccaagcttcagcatctttacttgcttcttcctcctgagcccntggcgtccagtcggcgatgaagtctgctagcgcctgggactgaatcgaagatctatgcacataatcaatactaaactcgttgagttccgcaccactttccaatccttnncagtagctctcttgttctcatgata

SEQ ID NO: 27801 - DNA, 89 bp, Zea mays
  unsure (1)..(89): unsure at all n locations
cactcgtcccgggatccttnagtcacctgcggcatcannactatattaaatttgtttctgtaagccgtgtgcatgctccgctctgtatc

SEQ ID NO: 27802 - DNA, 438 bp, Zea mays
  unsure (1)..(438): unsure at all n locations
agcttctaaagggagaacacgttatatgtntgactaacgttcatttcgaagaagatagaccttgtgcagcctgtcaagcacgtaaacaagtgggaggagcgcatcacagcaagaatgtgatgaccacttcaagacccctggagttgctgcatatggatctcttcggacccgtcgcctatctgagcataggaggaagtaagtatggtctagttattggtgatgacttttcccgcttcacttgngtgttctttntgcaggataagtctganacccaagggaccctcaagcgcttcctcangagagctcanaatgagtntgagctcaaagtaaagaagataaggagcgacaatgggtccgagttcaagaaaccttcagtggaggagttccttgaagaggaagggatcaagcacgagttctccgctccctacacaccacagc

SEQ ID NO: 27803 - DNA, 497 bp, Zea mays
  unsure (1)..(497): unsure at all n locations
cacaagtgtcaagggatagatgtgtctattcctcacttctaattactatgcctaaacctagagcaagcgctaacggaagcgacctaactaacctaagcattnttcaaagcacctacactaatcactgagtgatatntgagcacttgggaatctagagctactagagatgagcctcaactctattcatatgtcccttatgctcctcacatctcaatttgattggttggggtcctatntatagccccacgaagagatataagtcgtgcatcctcaacgtccaactctccacactggtgaattattgcacacagtctgatgcctcacatgctactatgtcagtattgtgtagcactagccattgtcngtcgnntgggtatgctcgtatagttcgatcttaccatcngacctatccaacaccctggtttactctctagaagctntcgacatgatcgttggactctgattcaatagtctgacgcccctgtacatattatagt

SEQ ID NO: 27804 - DNA, 168 bp, Zea mays
  unsure (1)..(168): unsure at all n locations
agctnggagccnactgttaagtctatatcgctgaagacttggctgtcgaactgantgtctgtgccaactgtgagttcagacgggagtgtctatctgtagacagatgtttgctcagaaaatttctgagcggtcttcgatgttaaggaggatactgtcctgagctcaatc

SEQ ID NO: 27805 - DNA, 239 bp, Zea mays
ctcagcttgtgcactgctgtccaaaggagagataactgcgctgctctgtctgtctctatcttctatggcacaccatgtagacgcacgatctggtacatgtatatctgccgacgtattgcgctgatgtaggttgtcttgacacgtatgaagtgcgctgactaggacaagctgtccaccctactcaaatggaatcatatctggctctagtgcaatgctatccgactatgaagtacatactg

SEQ ID NO: 27806 - DNA, 100 bp, Zea mays
tctctgcttcttgcactaatgatactgttggaacatggcactgatacactgatagctcgactatgagtgagctagataatatgaagactgataatgatgc

SEQ ID NO: 27807 - DNA, 224 bp, Zea mays
  unsure (1)..(224): unsure at all n locations
agcttcagcacaatgaccgccagagttcttcactcccaagtaggcacatatgtgctaacttatgttgatgacattatagtataaatcacacaacaagagaatcatgttgctgacttgcaagagacatttgccaatntcatgcaagctggtgtcaagttgaatccagaaaagtgtgtcttcggagtgaagaagggtaagtttctcggctgcctagtatcaacaaa

SEQ ID NO: 27808 - DNA, 421 bp, Zea mays
  unsure (1)..(421): unsure at all n locations
agctntatatcattgcagctacagtactatctggtagcaggaacttcgaagggtgaattcatgcaatggttcaggccaattatcttgcctctcctcgtctagcatttgggactaaaggtaatggagggaatngatgtaaccaaaatcccttattattcanaattgaatagtaagagaatttgaccccctcaattccttccattacacnttgctcccaaagaaccctaagcggtgggtttactcatcattgattgttttactggtgcaccaccaccattgtatattctccttttactggcctagtgcttgcctaatattagcttaaagatcaaaattattgccatcataaatatttacctatcaaagcatatggttgcaccaataaaaacaataatgaaagtgtgcctgtggaatgtaaaat

SEQ ID NO: 27809 - DNA, 495 bp, Zea mays
  unsure (1)..(495): unsure at all n locations
ctcagcttattgcattacaatttgttagttctgtattacaaaaacataatacctgcgcatgtgaaatatatacagagggcatgatatgttattacctatgcctcactaaaattccagccccacattagatagtctcatatggtgctaaaatgacacacattaagtataagaagaattagagacaaattggaagtatactaaagcgtgcatgtttcttgaaatgtttaaatgtcttgatataaattgaaacttgataactaagtcataatgagttacacttgagaacttgtggcactatacctctatgatattgtttggtgcttgagtaaagagctattgtgaccgcgagctgaatttcctgcgcgtataattgtaggtgtgcgttgtatctagttagagtaaatatgttctctatagaacagccatatataacaggtgtgcataactttattatcttgctcgtgttaaaatttgcagncatagacctgatcgtta

SEQ ID NO: 27810 - DNA, 190 bp, Zea mays
cacctatacactcctggtgaggatgaatattaatctgtgcacctctagcaagctgatgaggtgtttcaagaacacaaatttcctactagttgtcatgtagatcctgccccagcattagattcactagttgcagacatctacgacttatctgttcctaagagatggtgaagataactgtctgcgtctcgag

SEQ ID NO: 27811 - DNA, 274 bp, Zea mays
agcttcgattattgttgttctatggagattattccagaagtgtctgagcctctgccaactcctgactcaatatcttattatgagcatgcgctctggcaagcgatccttctgctgagcacaacaactcatgtttttctgttagagaatcctctagttgtttattctatcttctcaacccgtagacaataacattgatcttcctggcctcatcatcttgatgcataattaaagctttgcttagtaacaaactctgttaaacataactctaggctag

SEQ ID NO: 27812 - DNA, 276 bp, Zea mays
gagaggagtaccatgtctgggccacacttctgactgccatgacgaacgactttgccataacagtggcgttgcctccatatgaggatattgttgcctcatagctcatcaagaattgctctagattcgagtgtccattgtacatgggcaactggggtggcttgtatgattgtggccatgggatagcctacagttctgctgctaggggagaagcatcatcaaaagtaaagttaccatgatgaaagtcatcgtaccattcatctttggtgaatgagctct

SEQ ID NO: 27813 - DNA, 53 bp, Zea mays
ttcgcactcagctcgacccggagctgtgagcacctgcagctccgcttggattt

SEQ ID NO: 27814 - DNA, 358 bp, Zea mays
  unsure (1)..(358): unsure at all n locations
cccccccannncaacaattaatcttacccacccccccaggaggggcaaaaacaaaaccccacacccaatcaagcaaacatcaaacataacccacccccccccacacaaaactacacccacaccccaacacaccaacaaaaacaacataacaaagccacccccaccccccccagcaaacacacccaccccccaaaccaccaaaaaaacccaacccaatcaacaccacccacccaaccaaacaccacccacaacccaaaccacccaaaccacacccacaccccacatcccacaaacacccaaccacaccccaccccacccctcaaaacacaccaacccacaaaaacccaaacctaccccc

SEQ ID NO: 27815 - DNA, 239 bp, Zea mays
  unsure (1)..(239): unsure at all n locations
agctntcctttctcggtgtgtgttgtgtagtattgaagagtgaagttagttgtaaagaatggaagcaccacgacgtcgttagtaaaaccatntgaacagtctcatttggtgttagaagcaatggcagtggaagcaaagcacggtgaagtgagatgggaaaagatgatgaacacactacacattgatggaaaaggtggaagatatatagaaagttcatcatcaggtgttgggacagtatg

SEQ ID NO: 27816 - DNA, 509 bp, Zea mays
  unsure (1)..(509): unsure at all n locations
agcttgngtgtatgcatgtgtactgaatacaattgtggtatatataagaaacattgattgnacaatgcgagtgggtttgccttgcaactagggcagtggggtttgggcaggcgccacttttttgtggctgataggagtcataaagcacctctncaattaattgttttacgccatgggcacacaagtaaatcggttagttatatttgtcaccaataacaagaaaatgactggatgccgtgcgcgtacaanacacgcaatgtacagaaaaatccagcatttcaccctcaaattatctcctaaacagagatgaaataatgttggtcctcactgaatagcttatggtgaattctagtatgacgacctagtttatagaataataaacgtagattgacccttttctacaaacangttgatgcaccataatccacgactctacatataacagacacgaaactagctagagtattcccttttcatctaccacagagatgggaatatcacactgtatc

SEQ ID NO: 27817 - DNA, 201 bp, Zea mays
  unsure (1)..(201): unsure at all n locations
gaagatgatcaacgcattgtatgggttaataaccgcatagtggtgccaaagaatgatgagatccgccaacaaattcttgatgaagcacatcttagccgctactctattcactcccgaagcactaagatgtaccaagacttggagcaacattactggtggagacagatgaagatcganattggccgatatgtggcgagatgt

SEQ ID NO: 27818 - DNA, 182 bp, Zea mays
  unsure (1)..(182): unsure at all n locations
gcatgtcacgcgcgttaacaggtgggaggagcacatcacaacaagaatgtgatgaccacatcaaggccgctggagctgctgcatatggacctcttccgacctgtcgcctatctaagcatatgnggaagtaagtatggggtaagtattgtggatgactgttcccgcttcacttgggtattctt

SEQ ID NO: 27819 - DNA, 319 bp, Zea mays
  unsure (1)..(319): unsure at all n locations
agcttgcaaatcatctatctctactgtcatgtgcgagtctgcgccgccgcccgacgtctntntatcgtcgccgtcgccgtcaccggtgctctnttggtgctgcccctctcctctcttntagtggccgtggccggtgtctcaagtcgtactggtctggtagaattgctgttgccaggtgtgtggttntatgcaaaaactctgttaatatgattcagatgtcttgagatggacatgatctgtttcaattccaaacagaaattagattatctttatctttattacagacaaatgacagtcatagatgatggcagtagctcct

SEQ ID NO: 27820 - DNA, 420 bp, Zea mays
  unsure (1)..(420): unsure at all n locations
agcttgagcctgtgccatgcaacctatatgcggaggagaagaccctacatgaacatgcatggaagtatgagagggagaaccaactcggacaccctcggnggctgggtcatagctcgcgctacccatccgagccggatcatctccgacaacaccctcggnggctgggtaagcgctagcgccatccttgagggccgagccctctgtaacagccacctctaacgttgaaggaccttcaaccatttccatgggagcagagcaatccagacaagcttcctgacctttaagactgcgctncaaggtngatgaggcacgagacgccgctcgggataactncaacccggcatcaggcacatcagcacaaatatccatcatcccaccatctgccggctccgataacagatcctctgggaccatatcttc

SEQ ID NO: 27821 - DNA, 481 bp, Zea mays
  unsure (1)..(481): unsure at all n locations
tctgatgtatcctgactctctntctactcgcccttatatgtgcacttcaatacttatactggggataagctttatntgaagtgcaggacattttgagacaggatcttctatttcgctgcaacctacttgaggagtcttctcactccactgcgtactaagtcttcgagtagagtaagaatntcaagtttatagtaataaggtntattcgcctattcacccncctctaggcgacatccagatcctgttctcgggtcacagggaactttctatttgaactcgtgacctctcaagcaaaggccatgagtaaccactgctacaccacatgtgtggttatgtctgcatctatgacaagaaacacatctactacatctctcaccaagctcacttgctacccttggcaatgcgtagagtagatactatcactagatcttgaatatattctggatgacgtctatattaagaatagcttgctgcatttctt

SEQ ID NO: 27822 - DNA, 295 bp, Zea mays
  unsure (1)..(295): unsure at all n locations
agcttgtcaaggttcttatactctatttgcagaaatgcttactaacattggatccttaanaacccaggtntattatcaagttaagtcattacctgcatctagagttctttctatcctagttcaatcaattggcctatgctagccgtcttttataaccacttcactntactggattgctacgtgtagggcagtgaccaagtcttcatatccgagaagtaaccgcgatcccaatcgattgatacccagctggggatcttcaaccacacgacatatgtagcacttaacccatgcatat

SEQ ID NO: 27823 - DNA, 249 bp, Zea mays
  unsure (1)..(249): unsure at all n locations
agcttctgcgcgttgatccgttctccgtacgagcaggcgctgcgcccttggccnggatcatacctgngaagcgtgtccagcctctctggcgactcgagcctccagtctgcttccgaacaccctccaacttccgaagggagaccctgacgttcgaagtggtcgggttccgagggacctaccacgccgtgctagggaggccatgctacgctatattcatggccgtccctactacacctacctgacgctcaa

SEQ ID NO: 27824 - DNA, 400 bp, Zea mays
  unsure (1)..(400): unsure at all n locations
aggtcattcttaaaactgattctcaagttatctctggtcatattgacaagagttacaaagcaagagacccgaagcttgaaaaatatctagatacagttcgaaggattgaggcttccttcgaaggtttctctgtcaaaaatattcctcgtggagaaaacgaatacgctgatctattggctaagtcagcagcccaggggctggccataccttcggaagtattntttgaaacaataaaagcaccttcggtcgagcttcttgaaagagcaatccttaatatatcccctgttcacagcgaagattggagaactgagatcgtctctttccttcagggtaattntctttcagatgacgaagcttataataggagaatagaagcaagagctcgaccatatgtcataat

SEQ ID NO: 27825 - DNA, 437 bp, Zea mays
  unsure (1)..(437): unsure at all n locations
tataagggagagcacattntaggattaacaaatgttcattttgagaaagacaggatttgtagcgcatgccaagcagtgaagcaagttggtgcccatcatccgcacaagaacatcatgacgactgacaggccactggagctcctacacatggacctattcggcccgattgcttacataagcatcggcgggagtaagtactgtctagtaattgtggatgattattctcgcttcacttgggtgttctttttgcaggaaaaatctcacacccaagagaccttaaagggattcttgagacgggctcaaaatgagttcggcttgaggatcaagaaaattagaagcgacaacgggacggagttcaagaactcacaaattgaatgtttccttgaggagganggcatcaagcatgagttctcttcttcctacatgccacaacaaaa

SEQ ID NO: 27826 - DNA, 484 bp, Zea mays
  unsure (1)..(484): unsure at all n locations
acgctatanaatacataagctataccaaatggacgtgaagagtgccttcctcaatggaccaatctttgaggaggtctatgttgagcaacctcccgactttgaagatagtgagtatcctaatcacgtatataaactctctaaggcgctntatgggctcaaacaagccccaagagcatggtatgaatgcctaagagattttcttatcactaatggcttcaaagtcagaagaaccgatcctaatttatttactaaaactcttgcaaatgatttgtttgtatgccaaatttatgttgatgatattatatttgggtctactaacgaatctacatgtgaggaatttagtaggatcatgacacacaaattctagatgtctatgatgggggagttgaagtacttcttgggatttcaagtgaagcaactcaacgagggcaccttcattatccgaacgaagtacattcaagatatactcaacaactctgggatg

SEQ ID NO: 27827 - DNA, 435 bp, Zea mays
  unsure (1)..(435): unsure at all n locations
agctngtcaaaatctttccacccaaatctaccacccttngtgtgggagatggagtgcttgtggagcgtggagaccaccttataaacaagtgtggtgtcctaaacaaaattatcgcaagaacacacttgacacctagcttgacatctctggggattcccttcctagagcaccttagccacctaagaagacccactcccacaaaatagattccactgaagagaggtgaggtactgttgtgagtattgtgagagggatggtcacttagctcgcgtttgctttaggagaaatagagatgagaggcagggttctaaggtgagcagaagggacaagcaacccccctctcatggtgtgtgtgatcctcctgctcagagacgcgctgttatgcctataggtgttttacctcatgtttctaggccttaggcagtgatacaacat

SEQ ID NO: 27828 - DNA, 471 bp, Zea mays
  unsure (1)..(471): unsure at all n locations
ntcaccctttttgtgtcaaatccgcctgtgattgatggcaatatgggccttagagtgcgaccctctgctgaagaagtcagtactttggttgcttcgcttggggagattcctgatgatgaacggcaggtttattttgaagtgcccctgaaccctagtgatgcggacataaatgacatgcttgatctgttagctgaggattcatccgacgctgctcctgttggtacgttggtagtggtgccccttccagaggttgatacaactttggatgtcccgaaacctgtcagtactcgcccgaggcgccctagccgaaccagtcagcctgagccttctgctgatgagcaaaagaagaaaagaagatgcctccggcgagtatccagttttgatgaggacgccggtaccttagctcttgctgctgaagaagtgcctgcaactggccttaccgacgctgaccccaatgggtgtgcccaaact

SEQ ID NO: 27829 - DNA, 430 bp, Zea mays
  unsure (1)..(430): unsure at all n locations
agctnntaaccccccgcgagaccttttcccgtttctttctaaccataataaatgtgatatcggatgtcatacttgatgcatattcactttatttgttcccttgtatgatgtactgtttgtttcccaatttgaatggatgaatgtatgtatgcttgcaatcgcatagagaacgatccggtcgaagagcccgaggaactcgcaggagaaacctctgagcagcagtctgttggtggaagcaagtgtcccttgacctatctatgtcctattcattatttaattcacctcccgcttacacatttatgcctaacgattgactagcttttgttatccatgtccttgttcacctatatgggttggattattattagttagctttatgctattgcttaactctaatcaataaacatgatgagaatatctatgatacgct

SEQ ID NO: 27830 - DNA, 317 bp, Zea mays
aagcggtcttagcatttccgaagatgtctgatgataataaagttgttgctgaaacaaagctgagccttcttgaggagaagaatcttaactttcttgaatcaatatcaaagacaaatacagaaaagattacaagggaaattttggaaggtttatctgaagatactggtgatagtgacagttatgatgccaaaagtggtggggaagactctgaagatcgaccctggcggccaagccatgcaatttttggaatatcaaccataaaaaaagccatcttgccaatatgagaggtagatattttctggatttgtctattgtga

SEQ ID NO: 27831 - DNA, 401 bp, Zea mays
  unsure (1)..(401): unsure at all n locations
gcctccgtaatctatgagatgcccttgtttcttagtccctggcgtccattcagcaatgaagtctgctaatgcttgagattgaaccgaagatctatgaacaaagtcaatggtgaactcgttgaactctgtagcccacttgccaacccttcatgtagcttctctgtttcttatgatgtcctttagaggttgggacgaaggtactattataaggtaagactgaaaataatgtcgaagctttctggagcccaattgtggttacttgttctcaagtgctgtgaatcaagaataaggcaacacacttgttaaggattaaggacctttctcctttgaancattatcttcttctcggtataatgatcctcttactaaggtcccgaacggtgaacccttcccacttattg

SEQ ID NO: 27832 - DNA, 397 bp, Zea mays
tctccaccatgtcgctgctagccaagttgttgcatctatctccatcaatgatcaaacgacatgaacgctccttaatgacacactttgtttgaaacaacgtatgtcgctgattctgctctgccttctccatttgtgcactaagcacacgctgtacaatgaggctctcataatgctctgcatcatctgcaccaatctgttcttcgggtggttccttagtgcctgcatcatcagccgcaagcaaagcaagtgtagcttgatccaaatcactagcagaggaatacccaccatcgtcttttaccaccaaaacacgctgattaggacaatcacgctgcacgtgtccatagcccttgcatcgataacacagaacatctcttgttctacctgtggaagctactga

SEQ ID NO: 27833 - DNA, 445 bp, Zea mays
  unsure (1)..(445): unsure at all n locations
agctgacaacaccatntgacatcttacataatatttctgagatcaagaatatttagttcattcctcaacatgcaaaagcgggtcttatcaagaggcttagtgaaaatgtctgctaattgatcttccgatctcactccttctaaaatgatatctcctttagcaacatgatatctaaggaagtgatgacggatatcaatgtgcttggtgcgagagtgttgtacatgattattagcaattttaacagcactctcattatcacacaacanaggtaccttttctagaactactccatagtctagaagagtttgtttcatatataaaatttgtgtgcaacaagcacccgcgtcaatgtattccgcttcggcagttgacaaggcaacactattttgctttntggatgtccatganactagtgatctaccaagcagatgacatcccccagaag

SEQ ID NO: 27834 - DNA, 297 bp, Zea mays
aatctaagctgctcttacttcatgctggacactaatacgccttttttgctgttatagactagtttctagtaaacccgtgacatatgcaaaaaaaaaaactgcagttgcaaggatttaacaggttaatctatgtaattctgtgctatttattatctggaaggatcttttttttctaacttcaagaggattgcgtgtatattaataagagaagaaaaggtacagaaacaaggggggttacttcctcaacccccctatgaactgaacaacatctttatgagccctaacatacatacccta

SEQ ID NO: 27835 - DNA, 448 bp, Zea mays
  unsure (1)..(448): unsure at all n locations
agctntatcaaatggacgtgaaaagtgccttcctttatggaccaatcaaggaagaggtctatgttgagcaacctcccggctttgaagatagtgagtaccccaaccatgtctataagctctctaaggcgctttatgggctcaagcaagccccaagagcatggtgtgaatgccttagagatttccttattgctaatggcttcaaagtcagaaaggccgatcctacgctctttaccaaaacacttgagaataatttgtttgtatgccaaatttatgttgatgatattatatttgggtctactaacgaatctacatgtgaagagtttagtatgatcatgacacaaaagttcgagatgtctatgatgggggagtcgaagtatttgttaggatttcaagtgaagcaactccaagaaggcacattcctaagccaaacgaagtacactcaatatat

SEQ ID NO: 27836 - DNA, 385 bp, Zea mays
  unsure (1)..(385): unsure at all n locations
cgctcactnttgtctctgtagtcctcagctacctcgttctgtctgggactctggggacaacgatgccgttcccgggctcggcagccgcaatgcttgcgcaggtgctcctcgtgcacctactcctcctcctccccgccacgtactcagccgaccaccaccgccattaccggggcagaaggtcgctgcacgagccgctgttccctctggagagcacgcccgcgctgccgccgtcaccgcccgcgccgttttttccgttcttgccaggcgccgcggcgccaccgacgccggaggatggctaggactccgccccggcggacacacggtgcggctgacgcgtcatcgtcctcctcgtcgccgcaccccacagcgccggccaacatttagt

SEQ ID NO: 27837 - DNA, 444 bp, Zea mays
  unsure (1)..(444): unsure at all n locations
agctngatgacaacatataaaaccatggcaccatataggtgttcgattgactgctgtaaaaaaaccatggttgtgtcatgcactcatgccaattattagactgtggtattggaaaactgtgggtttaaaaatgagctctcaaacagggtctaattgtgggctgtggctttcttcaactttccccaaccatgccttctactttcacccttactcacctataaaaggttttgatagtcattnttaacaggtcaatccaaaatggttgatatggaatagaagaacatcattatcaaatgtgccctgcagtcctgcacatatgggataggacaccaccagttttacacaaacataagatcacacagcatgttaaggtgtacctaagctgtcgttgagatcagaatcagttgtgttaagcattttatccaaataatgtctctgatgagc

SEQ ID NO: 27838 - DNA, 469 bp, Zea mays
  unsure (1)..(469): unsure at all n locations
tcttattagcctctcattntcttatttgagctcttgatatgtatcatcttttgttcctgcaaattttagctcaaaggaagatttgcttgtcgacggacaacaagcattagcacatggtaatgtagtttcaatttgaatacatgtgcatgagtgaggttgttgagattttaagttttctatcacaacctcatgagctacatttaatatgatatgatcatccataagattttcatgagagcttagaagcatatcatatttatcttgaaaagctagattttcaacttttagcttttctacttggtccttaagcaaggtattcctatttaccaattgagcggtacaatgtaaagcgttatcttgctcaattgaaacagtttcatacctttggaccaaatcaacatgagagcactntagctcctcatgttctttagtcaactcgtcaaagtgtagcatcttcatggagagaaca

SEQ ID NO: 27839 - DNA, 443 bp, Zea mays
  unsure (1)..(443): unsure at all n locations
agctntattagaacataaattgaactatgatatttatgggtattgagagctatgaaatcttctaatatttgtcttactggtttcatatcttaaacatgcagaagggcctctagctgagttagttaggtggcctgagtagcacccctcaggtactaagtttgactccccgtaggagcgaattttatgttggggtaaaaaaatcgcatcgtctatctcacaccaaaccacgggtctaaggttcggtccccggtcgcggtcattctcatatgggttacagtgccgctatatatggtgaggcacgggttgaagggttttctcgatttgcgtgagaagatcttcttcttaatataatggccaggaactgtcttaacccccagtcgaagttttccatatcttaaacattttttgttctacatagaacacaagtgttcataaacccaaaa

SEQ ID NO: 27840 - DNA, 271 bp, Zea mays
ggccacagttgtgagatgtaacactccaaaatcgtatcttggtttattaagaaaatatcctaaagatttaaaatttcaagcgtgatataacaaagttatgaattaagactaccttccctagaatttaataaatagtaaatataaaatgttggctatatacttaaactataataaataggatagtgagttattctatataaattactcctattgggttatataactatgtgaattctatgtttattacatttcatgcatactgttaggcaat

SEQ ID NO: 27841 - DNA, 444 bp, Zea mays
  unsure (1)..(444): unsure at all n locations
agctntaaacacaactacaagccggggttagcattataaataaagtcgagtacgaatgagagggcaaaaacaaatcacaagcaaataaagtagatgacacggtgatttgttttaccgaggttcggntcttgcaaacctactccccgttgaggtggtcacaaagaccgggtctctttcaaccctttccctctctcaaacagtcacttaaaccgagtgagcttctcttctcaatcaattgggacacttagtccccataaggaccaccacacaattggtgtctcttgctttgattacaaagatcttatgaacaagaatagaggaagaagaaaagcgatccaagcgcaagagctcaaaagaacacgacaaaactctctcttctagtcactaatggctttgagtgggattgggacttcgagagattttgattcactctaattgtgtctt

SEQ ID NO: 27842 - DNA, 417 bp, Zea mays
  unsure (1)..(417): unsure at all n locations
ttagcgacactaagaaactcagctgatggagaaaaaaggccaagcgtggaccgttctgtcctctgcggcggaccgctcgcgacaccaggataaccttcggacacgaaccaatgcgaanatacaagtctccactacggactgtccggaggaaaagcaaggaccgttcgagccctcgagcggacctgacggcctaaggcgcggaccgtccggtaggtgagaaacctagaaacccgaaagtgataggctcgaaaaaatgaatatagcggccgcgcggaccgtccggggtgcacgacccgaccgtccgcgaatggctttatctgacatctgacgacgcattaaatgccataatgtccatgatatagccggtactgctgacacgtgcgtattcagccgtagatatacatggggggaccgtcc

SEQ ID NO: 27843 - DNA, 443 bp, Zea mays
  unsure (1)..(443): unsure at all n locations
agcttcccanaaataggtatacacctactaagaattgggtgtttgatctttctgacctccccccacatccatttgaaatgataggctttatctggaattgtcaggggctgggtcgaagtgctaagtttgatttcttgagagaaatcattacggatgaaaaatttgattttattggtttacaggaaactaaaaaaaatcaattcaatgattctctcttgtcctcacttgctggtaataaaatttttgtctggttctcctctccacctaatgggagatcgggtggccttttagtgggctttaactctgaggtgtttgatgtcagagaatttgaagctggccaagttttgattcgcactcttgttcttcacagagaaaaaactcttatttggaatttgtcaatgtgtatggggctgctcacaaggaacataaagccgattcctcag

SEQ ID NO: 27844 - DNA, 476 bp, Zea mays
  unsure (1)..(476): unsure at all n locations
ctttgtatgcagcanatccttggttagatgaattcacaaaagatatggtagttctaaaatcttcaagataaggttttagttccacaaatgtggcatgttgatgaataccgaggaacggcgtacctaaagtaagcccatgatccttaaacgacccatctaagccgaccaagtcccaaccgaggaaccctacgaggcggagcaaatgaccaagtcccagtagagcaaccctgcgaggcggagcgtatgaccaagtcccagccaaacaacctgcgaggcggagcgaatgaccaagtccttaccgaaaaacttagcgaggcgaggcaaacgaccaagccctagccgaacaaaccttcgaggcagagcaggagaccaagtccctgtcgagcaacttagcgtggcgaaggtcctgaccaggttatgattcggtatgcgctcgtgagcctcggcccacgggcctgcctgtcactcacccgatg

SEQ ID NO: 27845 - DNA, 453 bp, Zea mays
gagctcgaaaggtagatatattgtaagcaaagttgcagtatatgctagaccacaaggaccactgtcaactgcaactaattttgcaaactactgccttatcaatgagcacatgaccaccagtattcataggatgaaatcgattagtttcgatgatcaggatgtagaccccaaagcatagacataaatgttgtaggcagaagggcaggaaaagttcacaataaatgacgaatctgatgagagacttaggcatggaccataataaagtggtcgacttattctagaaccatcagaaaggaccgaaagacatcaaacgttgttgaagttccaaggtacaaagaccactacgacgagtttttgaagtatacaagtgaacaaattgccgacacaaatgcacagattacataactggtgcatggagatagccaatgatatgacttgttctggtgtgcttat

SEQ ID NO: 27846 - DNA, 463 bp, Zea mays
  unsure (1)..(463): unsure at all n locations
cctataaaactaagcttaccagcaatttcttttcttttccccgaagctgcggtcactgtctcttctgcggcggtggcagcttcttctgcagccatgtctagcagcatttggtcaatatgttcaattgtgctctccaaattcagatcttcagctgaggcagcttctgcagctgcggcctccgaaggtgcaatttcgatatctgccccctctgcagccacttgtgttctctgggccgaagctcttggcggcgtcttgtcaattacctctgtcacagtgataattctttgtttctttgccttgatcgttttcttcgatttctcgggctccttgtccttctgaaaaaactttgtcagttgaggacccagtggacttagcttcgcaggtaaggattcggtcattaccttcagaatttcctcaacaacagcagcagaaggtgatgcggnggtttcttctgcttcggata

SEQ ID NO: 27847 - DNA, 448 bp, Zea mays
  unsure (1)..(448): unsure at all n locations
agctntccatgttgtgcttgaacattccaatccgagcccgcatctgaccgtggtgaccgtcacaagttggtgttcttctgcagtccgaatccagcatgttcaaatccttttccctttcggtcttctccctgattcctaagcaaaacaagagtgcacgggtctccatggtctaaatatgatggacatgaactcaagagtgtaatcacctgatggttgagttgacgagcacgagcgcgagtaatgggaccagaaattggtacttgtattggtatagatgcatcagtagtgtggatgtcttcatcagaagggaagaagcttataggttttctgagatgactagaggcttcggaggaagaatccaccctagacatgtcagatcaatccacagctccagttagagtgatgacaaaggaagccagtttcataagccatagcacagctcatagtc

SEQ ID NO: 27848 - DNA, 469 bp, Zea mays
  unsure (1)..(469): unsure at all n locations
tgagtttgatcaagtgaaactgatgttgtgctattgctnnnncntnngtgaagaaatctgccaatngnnnttctgagggcacatattgaaggtcaatagtcttctgctaacaatgtaatcgagtaaaggatgcatcaacacctatgtgtttagcaagctcatgcttcactggatcatgagcaatctgtatagcgctcaagttatcacataacagaggtgtagaagtgtcacaagagacaccaagatcagccaagagccagcaaccaaataatttcagcagtggtagtagcaagtgcccgaagttcggcttcagcactagaacgagatatggccgcttgcttcttggatttccatgcaatgggagatgacccaaggagaatacagtaacctgtataacagcggtcaacaggatcacttgcccaagtggtgtctgaatacgcatgaagctgaagtgggctatctgaagcat

SEQ ID NO: 27849 - DNA, 444 bp, Zea mays
  unsure (1)..(444): unsure at all n locations
agcttctatagggagagcacattttaggattaacaaatgttcattttgagaaagacatgatttgtagcgcatgccaagcagggaagcaagttggcactcatcatccacacaagaacatcatgacgactgacaggccactggagctcctacacatggacctattcggcctgatagcttatataagcatcggcgggaagaaatactgtctagttatagtggatgattattctcgcttcacttgggtattctttttgcaggaaaaatctcatacccaagataccttaaagggattcttgagacgggctcaaaacgagttcgacttaaggatcaagaaaattagaagcgacaacgggacagagttcaagaactctcaaattgaaggcttccttgaggaggagggcatcangcatgagttctcttctccctacaccccacaacaaaatg

SEQ ID NO: 27850 - DNA, 270 bp, Zea mays
tgccatagaccactgtgagctccgtccggactgctaaccggcgaacaatgatccgccataagaataactgggcaggctactatgatgatgaggatactggcctacccttgatccattttgtcaaatactctactacgacggaggtgaacttgaggtttccctgggccgttggttgaggcctgactatgttcatgccccatcgctgtaggggccacttgtgggccatgttctctgttaatcgccaatgcgcttcctcgcgtggagaaaact

SEQ ID NO: 27851 - DNA, 349 bp, Zea mays
  unsure (1)..(349): unsure at all n locations
gccctcngacccggccggatttcgtcggaggcctaagatcgacctcaccggacttcggtcttccgccgccgcgcgtggaccgagctatccagtgagtctccgccaaattcctttcgctcatatcttctctagcatcccgtggacctccctgacctatttgattgaactatctcgccgtgacaaggccggtctcctcgccgccgatgagcatccccgcctgcgcgcgtggaccgaccgactccggncatctncgacagtgttccgcacaccgttgtgatccccgcgacctccccttcgtcctcgaccacttcaccggagcaatctcgccgccggtaagccccttcgccct

SEQ ID NO: 27852 - DNA, 373 bp, Zea mays
cggaccaggtcgtcccagttggagatctgccccggatgcatgtgctccaaccaggcgcgagcggtgtctgagaggaacatggggaggttgcggatgatgaggttgtcatcgtccgttccacccagttggcaggccagacggtagtccgcgagccacagttccggtctcgtctccctcgagtactttgtgatagtagtcggtggtcggaaccgggtcgggaacggtgcccgtcggatggcccggctgaaggcatgcggaccgggtggttcgggcgagggactccgatcctccccgctgtcgtagcgtcccccacgcctggggtggtagcctcggcgcaccctctcgttgaggtgggcccgacggtcgcgacgat

SEQ ID NO: 27853 - DNA, 424 bp, Zea mays
  unsure (1)..(424): unsure at all n locations
accgccctcttaatgcggtaactatcaagaacaagtatcctttgcctcgtattgatgttctctttgaccagttgttcggggccaaggtgttttccaagatagaccttcgctctggctaccatcagatcaaaatacgagcaagcgatattccgaagacggcattctcaaccagatatgggctatatgaattcttggtgatgtcattcgggctgacaaatgcaccagcatatttcatgtatctgatgaattctgttttcatgccggagttggacaagttcgtggtggttttcatcgatgatatnttggtgtactcaaagaacgaagaagaacatgccgggcatttgcatgtagtgcttcaacgtctgcgagagcaccacctttatgccaagttatccaagtgtgattnttggctaaaggaaatcaa

SEQ ID NO: 27854 - DNA, 469 bp, Zea mays
  unsure (1)..(469): unsure at all n locations
taaaataggagatccagtaaatatgctactttaataatgaaagctacaatccttgataaaagttatattattttaccaactttgattgatttgaggtagcatatttcatgagaaacttattctcatacttgagactctatgggatcactaagagaaaatgttagtctcaaaatgatcaagatatagaaatggggctccccctaaggatatgcatcaagaatttgaatgacttggctagatgcacttttcttttaaagaaaatatggaatacattgaacatcttgatcaaggcatgtaatatttgaataatcactttatgcctggtactcacaaaaatgaaggaggtttagaatacttacaaccacaccattgattaatttgaagatcttactgtctaagtaggcgttgntgttcttaatgtcttatnnttttatctgagtgtcctccctttgtagttgtctctttttct

SEQ ID NO: 27855 - DNA, 443 bp, Zea mays
  unsure (1)..(443): unsure at all n locations
agcttgagcttgcgacctctctccttagaatagcatatgagaagggtgtctcccttatgttgccattcgatctggtcgtcgctgataagtttgctcctgatgctagcagtcagggtggttacatttttatttctagtattgttatcacggcatgcatgacacttaagagaaaaaaactagctgctcttgtatgcttgtagtgatggtctgaacgtgagattgctctccaggttgttcctgcatctgcaattcctgatgcatggatgggtctggacatangtccagattcgatttcggcgttcagttctgccctggaaactactcagacagtcatctggaatggacccatgggagtttttgaatttgacaagtttgcagttggaaccaaggtaatgctatgtgatgtctcctctgcttaatataatggcgcgcagttctcttgc

SEQ ID NO: 27856 - DNA, 381 bp, Zea mays
ctgcagttgatctaatgaaactgatgatgagcgatggattgttcttcggtgaacaaatctgccaatagagattctgagggcacaaattgaaggtccataatcttatgctaacacagtaatcaagtaaaggatgcatcaacacctatgtgtatagcaagctcatgcatcactggatcatgagcaatctgtatagcgctcaagttatcacataacaaaggtgaataagtgttacaagagacaccaagatcatgcaagagccatgcaaccaataattacaccagtggttagagcaagtgcccgacagtctgcatcagcactagaacgagatatggccacatgcatcatggaaatccatgcaatgcgagatgacccaacgagaat

SEQ ID NO: 27857 - DNA, 415 bp, Zea mays
  unsure (1)..(415): unsure at all n locations
agctntatgtgtgtacaagggagaatatgagctatatatcatgaaggaggatgagagcatttcagacatgttcaaccgactaaatgagattgtaaatgagctaaaaggacttggcctatatacgccggatatagatttttcttacaagttccttaagtcacttttggagaagtatgatacaattgtcaccatgttagtaagaagtgacttgaacaacacttcactaaccaaagtatcggggaaaatactcactcaagaaatattccagaaatctcaagctaaggaaataaggttggcaaagaaagtgaaaggtgaatcaatagctctcaaagctaaagcctccaaggtgattgaaaaggaagaaagtgatgatgaatagagtggaagtgagagtgatgaacaaatgcctctcttt

SEQ ID NO: 27858 - DNA, 445 bp, Zea mays
  unsure (1)..(445): unsure at all n locations
ctgcctttgccgaattctccatttgccttttagtctatgactaatcatagatatactcatggaatcacattagtcttagccttggcacaagaagaataatgaatatgcattngtaccaaatgaaagagacatgatcaaaggtatataaattaactatgtatgcaagattttaatcaaaattctgagaatctaagacatttagttcattcctaagcttgctaaaagtcttttcatatacgggcttggtaaagatatgggctaattggttgtgggtgctaacataagcaatttcgatatcccccttttgttgttgatctctcaaaaagtgatatcggatgtctatgtgcttaatgtggctgtgatcaacgggattatctgccatgtggattgcactctcattatcacatatgagagagactttgctcaactttgtaccatagaccct

SEQ ID NO: 27859 - DNA, 415 bp, Zea mays
  unsure (1)..(415): unsure at all n locations
agcttggataaggaaagagcaacacaccatctcttctttattgcacccctccaaaggactctacctataatctctagacgatattccttttaaggggagggctgtaacaccccaagtgttacttatggtgttcacccaaaactacactaataaacccatcatcacatgtggtttaatttgagcaaaatacaccaaacttgggaatcaagaccctaaaaagtgcaacccatcttagaagtcatgtcctggctttatcatgcacatatagngaggaattgcccaaaccctgattcagacccctttggacaattggagccctagaagtgagcatgaccaataggctatgaacaccacatgatcatgacttgggccaattataaaagttgtagtacacttaataccctacacaaaatag

SEQ ID NO: 27860 - DNA, 470 bp, Zea mays
  unsure (1)..(470): unsure at all n locations
tgatgttgctttggctcccttgtggaagccaatgccattcttaatgcctgngcgtctcccattataaagcatgctacgagcaaatatgaatttctcattttctaactcatgtttggcaattttagcatttaatttagctatgtgagcattttgttctttaatcttggcaaggtgatcattcatagcatcaatattaacatctctatatctagtgcaaattgtgacatgctcaatggtagatgttgaaacattgcaagcattcaattcttctatcttagcatataaattatcattctcaattctaagacaagaaattgaatcattgcaaatactaagctctttagacatgttttcacatttttctatttcaagagcataagcattnnttcatcttaacaaattttattttccttaacgagtaagtcctcttggcattcgaagagatcatcctactcattaaatggttctat

SEQ ID NO: 27861 - DNA, 396 bp, Zea mays
  unsure (1)..(396): unsure at all n locations
agctntactacgatcggcaccaccgtcaagtctcttaccagccaggggattgggcccttcttcgtcttctgcagcgggcagcttcttcaatgcccaggaccaccaccggcaagctaaagcctcgctttgtggggccctaccgcatcgtcgagctcatcaacgacgtcgccgttcgcctggccttgccgccaggggcgcgcctccatgatgtgttccacgtgggtgtcctcaagaagtttgtcggcgtttcaccagcgttcccgcctgccttaccaatcatccacaacggcgccgtggtccctgagccgctgcaggttactcatgcacgcttggcgcgaggcgtgcgataagttctcgtccactggaggggcgaaccggccgagtctgcttcctggg

SEQ ID NO: 27862 - DNA, 451 bp, Zea mays
tgacaatgacgagatggcgctcgtcatcaagagctttcgttcaatcctcaaacaaaggagggggaaagactacaagccccgctccaagaaggtttgctacaaatgtggtaagcccggccattttattgctaaatgtcctatatctagtgacagagaccgaggcgacgacaagaaggggagaagaaaggagaataagaggtactacaagaagaagggcggcgatgcccatgtttgtcgggaatgggatttcgacgagagctcaagcgactcctccgacgacgaggacgccgtcaacatcgccgtcaccaagggactcctcttccccaacgtcggccacaagtgcctcatggcaaaggacggccaacagaaggttaaatctaaatcctccactacatatgaatcctctagtgatgacaatgctagtgatgaggaagataatatgcgttccctt

SEQ ID NO: 27863 - DNA, 418 bp, Zea mays
agcttgtgaaggttcttcatccccacatgtgctaagcggcgatgccacagccagcccatgctagtcttagctattaagcatgcatctagaccggcctcttcttttgcaaaatcaactaaataaagtttgccgtctaatacacccttaaaagctagtgaaccatcacttcttctaaagacagacacatctatatttgtaaatagacagttatatcccatgttgcataattgactaacagatagcaaattataaccaagagactctactaaaaacacattagagatagagtgctcattagaaatttcaattttacctaacccttttaccttgccttgattcccatcaccgaatacaattgaatcttgggaatccttatttttgacgtaggaggtgaacatcttcttcttccccgtcatat

SEQ ID NO: 27864 - DNA, 440 bp, Zea mays
  unsure (1)..(440): unsure at all n locations
tctaaagggagaacacgtgataggtttgactaacgtgcaattcgaaaaagatagaccttgtgcagcttgtcaagcaggtaaacaagtgggaggagcacatcacagcaagaatgtgatgaccacttcaagacccctggagctgctgcatatggacctcttcggacctgtcgcctatctgagcataggagggagtaagtatggtctagttattgttgatgacttttcccgcttcacttgggtgttctttttgcaggataagtctgaaacccaagggaccctcaagcgcttcctcaggagagctcaaaatgagtttgagctcaaggtgaagaagataaggagcgacaacgggtccgagttcaagaaccttcaagtggaggagttccttgaggaggaagggatcaagcatgagttctccgctccctacacaccacagcanaatg

SEQ ID NO: 27865 - DNA, 446 bp, Zea mays
  unsure (1)..(446): unsure at all n locations
agctgctttcatccttcctgaaataaccaagtttcctcatcataaccatgtcatcctctgttacagtagatttcccaaactcgatgtggctgggctttgttgggctcagaatactgttatattcttcactctcatagtcactttcgcctccagctacaacatgttcagcttcggtattggaggcaccttcggcagcagcttcctctgacacaactagacctgatcgcttcatcacttctgaaattggtgctgtctcggcggtttcggtctcctctccttcatgagctaccctagcagtggatatcaccctggccatttgtgtttttaagttcttcgagccgaagctgatcttatgtgacgaagcgcttgtttgaaaatgcaacgcacgaagcttcggctatggttaanaaaaattcaacagcacaacagcgcgatagcaatgaatg

SEQ ID NO: 27866 - DNA, 449 bp, Zea mays
tcctccgagtactccgagtcaccaaaatcctctgagggacgacttgtgggggcgcttgcacttgccatcggcgcggcgaggccagcctttgcccctcttgcccctacccttggtcgggtggaaactaaggaagtgaagaagaagaagagagcatgtgatcaaagaacgagtgaagaaaacagccagggcaagcgggctatttaaaggggtcgtggggtgaccgtccacttcctaccccgctcaccgaacagtcgcaagaattcaataagcaattcaagccgcctgaaaatgagttaggcaactagcgccgtttcgtgtatcatggcaccggttcgacccaagtcaactgctcatgcaaatgattacacctctccgtcacatcaagttactacttcaagacaatgtgataaacactctgcgcacaaagacaccccttgtgcacacccatt

SEQ ID NO: 27867 - DNA, 452 bp, Zea mays
  unsure (1)..(452): unsure at all n locations
agcttcggcatactccattcctttaacgttgggaatattctattggctaagtattcctgaaccaaatctctagtaccaatatgctcggacacaactctaaattcgcccacagcatctgggcatgatgatcccgacgtcatgcagcactggggcctagttaacccgaaggttaggtccagtgggctctaaactagcttctccttcttctcttcaaccttaacataaaaccatntagttntccaaccggttggccatttggtgcggtagctaaccactggtgtcttcatgtctttgcggtaggcaaaattatagcagccaaaattctcgtgcagtccatcttctctagccttcgtctgatagtgaagttcgtgcacccggtagaaggcttcgacaagcggctccactccttggcttcgaagagcctagacaaagacgctgagcctaacgatagc

SEQ ID NO: 27868 - DNA, 426 bp, Zea mays
ggatacctggagtctagatgtcacctggcattttcttatcacatcatgaggcaacatgaaaatttcacaagtatggattctacaactagtgatcatgtacggaaaatatcaattgaaagccaccaattgatacaatttgatagataagcatatcactaattgcaaattacactaagttctcctcaagttttagtgcacacatatatatatggattcaattgatacctgttgaaagtcgcctagaggggcggtgaatagggtgaaactgaaatttacaaagttaatcacaactacaagccgggttagtgttagaaatataatcgagtccgcgagagagggtgcaaaacatatcgcaagcgaataaagagtgtgacacgtggatttgttttaccgaggttcggttctcgcaaacctactccccattga

SEQ ID NO: 27869 - DNA, 396 bp, Zea mays
agcttaaacaaaaatcccccttgatcgataggcgataacagcggcgcggtggcgcttcgtggccagccttgtggggacggatgaccccacctgtccgtctggctctagccatgatgaatctacaaatcaagacgaagcgtgttttgagtacggtatctctactaactattaagagcagaatgtagactgcccccgccacgattcctctcccgcccgcggatcacgcgcacgaccgaaccccccgccgcgatccccctctcgcccgcggcgaatccctcgccaaccggcctccctcctcgtgcgcatcgccgccagcagccgcatgcgcgcgaatctctcgccaccaccacccgctacgcccgctctcaacaacctccgccttcatcgcccaagaac

SEQ ID NO: 27870 - DNA, 466 bp, Zea mays
  unsure (1)..(466): unsure at all n locations
tactagttaattcatgcttacgaacatctgtccaggagttgcttcttgctggtggaagccaaacacctagatcagtgcatgaagtaattgcacatttggtcagccgtctttcacgttgggatgacaggtgagtttaaaatctctggttccttttcatcttttgccaagagttttcattggtcttgtaacagtcatgtagcagaactctattccttattatatcttattatagctaaatacttgtgttttgcaacaaaattactaaaaattctgttacattgttattccagattattccggaaatatgtatttggggaagcagatganattgaattgaaatttgtgaataggtcagagcactctccgggcacatctcaactgacataacattctgttnntagttgattgctaaactgctaatgttctaaatgagctgattntcgtcacatttttcaattgacaagct

SEQ ID NO: 27871 - DNA, 448 bp, Zea mays
  unsure (1)..(448): unsure at all n locations
agcttgacaacaccattttacatcttagataaaagttctgagatcaagtatatttaattcattcctcaacatgcaaagcgagtcttatcaagtggcttagtgaaaatatccgctaattgatcttccaaactcactccttctaaaatgatatctcctttagcaacatgatctctaaggaagtgatgacggatatcaatgtgcttggtgcgagagtgttgtacaggattattagcaattttaacatcactctcattatcactcaacaaaggtaccttttctagaactacgccatagtctagaagagtttgtttcatatatnagaattgtgtgcaacaagcacccgcggcaatgtattccgcttcggcagttgacaaggcaacactattttgctttttggatgtccatgatactagtgatctaccaagcagatggcatcccccagaagtac

SEQ ID NO: 27872 - DNA, 464 bp, Zea mays
  unsure (1)..(464): unsure at all n locations
tctcacaattctctntcagaatggtgtgagagggcctgagctccttataagacacttggagggttttatacaattccttcaagggcttaaacttttctttttcttcgtgcatgtagtcatcgacctcacctaacattctaacaagatcatcatatgaatagccatcatcatcaacatcatcatcatcatcatcatctacatcatttaaatcggttatgagttttaccttagcatctccctttggcatgagacaatgaggggatgagaaaagtgaaagggcttccttgatggcaattccgacattaagcttggatgagtgtcatcatcatcatcatccgagctagcatccgaatccccattcaactatgtaggctntgtcatctatcttcttgttgtagaatatcttcttcttatcatctccatctttgctcttcttcttcgtgtangggcaatcatggcgatgt

SEQ ID NO: 27873 - DNA, 129 bp, Zea mays
ctgcccttgatcatgagagagatgatgcaccttctgtgttggtgatgccagacctacagaaaggatttgatatctatagtgatgcatgtggccaacgattgggatgtgtgctcatgcaagaaggtcagg

SEQ ID NO: 27874 - DNA, 436 bp, Zea mays
  unsure (1)..(436): unsure at all n locations
ctatgttatggattgctnttgaatctgtccaatttccttctgcctttctggcagcttcctgactttcatgaatagcaataggcccttgatttgaaggtatcttcatgcaaagatatgctgggtgaagaattgcttctaacgcattgagagtaccacatccaatgattgcgttgtaagggtactccatgtcaacaatatcaaacacaatttgctcagtccttgtattgttgataaatccgaaggttactggcatcatgatcttgccaagtgctacaatctgccttccttcgaagccacaaaggggatgtgtagcatcatggatcttatcttcgggctcttggatctgtctgaaggccttaacaaatataatattcgctgcactggctgtgtcaaccagaacattatggaccagaaatcctttgtatacacaagaaat

SEQ ID NO: 27875 - DNA, 431 bp, Zea mays
  unsure (1)..(431): unsure at all n locations
agcttggacagtattctgcgatggttcttgtggaaccttcngggcaggtgcagctgccatcttaattgcaccttccaaagtcagaacatgttacgcagtgaaacttgattttagttgtacaaataatattgttgaatacgaagctttacttttgggtcttcgaaagttgaaagcaatggggataagaagggcggtcctcaaaactgattctcaagttatttctggccatattgacaaaagctgcaaagcaagagatccgaagcttgaaaaatatttggatacagttcgaaggcttgaagcctccttcgaagggttttctgttaaaaatattccacgaggagaaaatgaacacgctgacctactatccaagtcagcagcacaggggctgccattaccttcggaagttttctttgaaacaataaaagcacctt

SEQ ID NO: 27876 - DNA, 404 bp, Zea mays
cgcaccatggttttatgcacgtgaaactgtatttactagtgatcatgcactaaaacttgagtcagtccctgaatggattgctattgttggaagtggttacattggacttgaattcagtgatgtatacacagctctaggaagtgaggtatatgaacaatcattcaagccatcattgcttaaatacatgcttagggagtctaatcgtgttagttattttagcgaatattcctctgtcatatatcatggtaatatgatctcatgcagtgtagttaagaaaagaagagctaagcacatgtacaatgtgattggagagcatttgatgtctctgcatcatacctgttattatggtttaaccatcaaaacacttacacccatttctgtatgctgttatgcattatacagat

SEQ ID NO: 27877 - DNA, 447 bp, Zea mays
agcttggtattctgctccatgtgcctaggggtctcttttatagccccaaggcagctaggagtcgatggaggccaacttggaaggccaatcttgccttctgtcgagtaggggtgaaaacgggacgggattacccggcgggtaccacatacgggtacttaaaatacctggtttttcgggtaccggatacgggtaattttgtatacgggtcggatacggatactacccggatatacatcagtcggatacgggtatgatacaggatgaccactacccggcatatacccgatacatactggtaggatacgggtacccggttagcgggtacccgcttccagtcctgcgtgcgtcagtgcgtggaatggaacgactccagagccaagccggctgctagcgcgtttcaattttcaagggcaaatgtcaaatcgaccaacccatgctgccatgcac

SEQ ID NO: 27878 - DNA, 416 bp, Zea mays
tctaagggagaacacgtgataggtctaaccaatgttactttctataaagatagaccttgtgcagcttgtcaagcatgtaaacaagtgggaggagcacatcacagcaagaatgtgatgaccacgtcaagacctctggagctgctacatatggacctcttcggacccgtcgcctatctaagcatatgaggaagtcagtatggtctagttattgttgatgacttttcccgcttcactcgtgtattctttttccaggataaaactgaaacccaagggaccctcaagcgcttcttaaggagagctcaaaatgagttatagctcaaggtgaagaagataatgagcgacaatgggtccgagttcaagaaccttcaagtggaggagtaccttgaggaggaagggatcaagcacgagttctctgc

SEQ ID NO: 27879 - DNA, 405 bp, Zea mays
atgtgttgtctatacgacacacttgacgtcatcatatagatgcaccagagaaccactataagccttcaatgtccatacaatctctgtgatggaccacactcgtttctttgaaacacatcacagaacttaaccaattcatatcagattttaagataagagggacttaaaacctcaatcccaatgatactcatcaagtatccatcttatgggaaaaacacgaccaatagaattgtccataactcttcatttcatccaacaaaggaatgagcaattcaatcttacccgcatggtaagccacatcacatgaaaagcttaacatatgccacacattgtacgagaggatgtatatagaatacaacccataagaaatgtttcctaaaaacacatgcaatatccatcactatc

SEQ ID NO: 27880 - DNA, 476 bp, Zea mays
ttacggaactatgaaactcagcttgctcatgccttcttctttttctccatagcaggaactttactggaacactatcccacttaataagaatgagggtagaactcttgaatcttggggatttgaactccttgaagtacctcataacaatggtcttacggggccttcttctgctgttgctgcttgagcaagctgcggagagatgactgacacacggttgattctgggagaaccttcttcttatcttctcttcacttatcttcttttctcttctcacttttcacttttcactgcctctttctttctctttgctcttcccactggaggattctatcgatgagtattaccatcatacagaggaggaaaccgaagactatgaaccatgtgcaacaatcttcaacccaagaatcaccaagcattgtgatcttatgggcgagggagtggaaaatggagttgcttgtgatttgcagaggggatta

SEQ ID NO: 27881 - DNA, 434 bp, Zea mays
  unsure (1)..(434): unsure at all n locations
agcttagaanaatcaaagagcatcattcctccttagagtctcgagccaactactctncaaaagtggcttgagcctcagaggcttgtgggggatagatatcccccaggtcctcatgaacactgaaacgtatcatggccgcctgatgggcctcccaatggcttgccttgtgggatgggctagcaggttataatcaggtcagacaaacctgatccaagaagacaaagaccggtgtccgagttatgcgctgtcgaagcactgatatctcgggtgatgtagttgcgcacacatgaagagctaggcattcggtgatgactcggctgagaaggtgatcgaactccagatatgtaggactacaaaccatgataaaggaggagataagtagaatagataatgatcacaacatgtaaagaggtaactctctggtcgtgtatata

SEQ ID NO: 27882 - DNA, 452 bp, Zea mays
  unsure (1)..(452): unsure at all n locations
tctaaagggagagcacattntatgactaaccaatgttcattttgagaaagacagggtttgtagcgcatgccaagcacgaaagcaagttggcgctcatcatccacaaaagaacataatgacaacggacaggccgctcgagctactccacatggatctattcgacccgatagcttacataagcatcagcgggagtaagtactgtctagttattgtggatgattattctcgcttcacgtgggtgttctttatgcaggaaaaatcacaaacccaagatacattaaaaggattcttaaaacgggctcaaaatgagttcggattaaggatcaaaaagataagaagagacaatgggacggagttcaataattctcaaattgaaggatttcttgaggaggagggcatcaagcatgagttctcttctncctacacacctcaacaaaatggtgtcgtggaga

SEQ ID NO: 27883 - DNA, 415 bp, Zea mays
agcttcttgcggacccaaaagaaagaaaaaatactatactctgctcctaattagaggacatgccagccaaatgctcgtgtggtctgttaaacgtgctgatggtgatggattccctcttcgggttgctgaattgccaaggaattcgctttgcgtccttgctcccctctactccggggggctgagactaatagaatgtggcgcactgacattccaaaaaagaaagacggaccgaccgaatagaaagaccaacacgcgcagctgctggagtgtgcaagaagtgtttttttttctttcctttggcttgctcgcaatccatgcatacaacgcaagaggtcatcgggaagacctgcaaaagtggcagagctctgttgagtattactataccacccatgttgggaaccccactcgatctagc

SEQ ID NO: 27884 - DNA, 428 bp, Zea mays
  unsure (1)..(428): unsure at all n locations
taacaatgaggaaatggcgctcatcatcaagagctttctccaaatcctcaagcaacagcccggctgaaggggtacgggctgatcacggacgttcgatcaaccgccaatggactagattagatctcccattcaatgattggtaagcatccagatccatcgatttgaaaatctacgataaagggttcactgtcgccagcgtcgctcgatagccaatcaacgggttgaaagtccagggggaaggactacaagccccgctctaaaagggtgtgctaccggtgtcgtaagtccgtcactttatcgctaaatgaccatattctagtgaaagtgacaaggacgaagacaagaaaggggagaaggagaagaagagatactacaagaagaagggtggtgaggcacacatggngcgcgaatgggactccgatgagagc

SEQ ID NO: 27885 - DNA, 402 bp, Zea mays
  unsure (1)..(402): unsure at all n locations
tgcgcngaaaanaaatcaaacgattgagcggtggtggatataagcgcagagaagattatcctcccgtgcgtggatgagaacgaagactagaaaaatctgcgtagtgtacgtgaggagataaggagagagaacactgtgagaaagatttttcttggattttgaaacaggaaacataattggccagcaatggttccgatttcgatttatttgaaaagcctaccccaaatagcgcatgtaccgaatttatagagatgacttanatcgagcgaaatacttagacgaaaatcttagctcgtcttgaccgattaattnttaaactggcactagactcgatactttagaaagggaataaatttaaaccgttagagccgaatgcggcatcacaatctgagttcccggaga

SEQ ID NO: 27886 - DNA, 438 bp, Zea mays
  unsure (1)..(438): unsure at all n locations
agcttctaaagggagaacacnatttgggactaacaaatgttcattttgagaaagacaggatttgtagcgcatgtcaggcagggaagcaagttggtgttcatcatccacataagaacatcatgacgaccgacagaccactcgagctcctacacatggacctattcggacagattgcttacataagcatcggcgggagtaagtactgtctagttattgtggatgattattctcgcttcacttgggtgttctttttgcaggaaaaatctcatacccaagagaccttaaagggattcttgagacgggctcaaaacgagttcggcttaaggatcaagaaaataagaagcgacaacggaacagagttcaagaactctcaaatcgaaggcttccttgaggaggagggcatcaagcatgagttctctcccccctacacgccacaac

SEQ ID NO: 27887 - DNA, 445 bp, Zea mays
  unsure (1)..(445): unsure at all n locations
ntcttcttatgctgtgtcatagcctatgggaaaggccagttgcccactagcatttaagaacaaggcaacatagaaaatgttaatcgttaaagtccttcgtccttcgaaacattatttcccttaagatataatggtttacggacgaaggttatgaaggacgtaccttcataaattcattaaacaatgacgaaggatgaaatgtaaagaatataaaagacaacatgaacaattatatattattatcaggcataaacagaaatatcgttgaattacaagtgtaccttcaatcggaaggagatgacaatacaagcgtgacgcaaaaagcgaatgccaggtcagcgtgtccagtacggnggtactgttcacctatttataggcgcgggacacaacccacacaaaattacattcatgccctttacacttgataataattctatagtaatct

SEQ ID NO: 27888 - DNA, 456 bp, Zea mays
  unsure (1)..(456): unsure at all n locations
agctntaatgcacaatntctccccctttgtcataaatctccaaaaaggatacaaaggatataaagggaagaaattttgattaagcaagatttaaacatgttatcatgaaaagggtccttagatggcacaaatgtaatggataagtgtcaaaagtgatgtacctttgcgatttaccttttcaaggggtttccagacttgtgttggatttagaattcatttgcaagctcttgttggtatagttgtgacatagatccaagatatcaaatgaatattgtcatactaattcgaaagataaatcttgatacctagagtctagatgtcacctagcattttcttatcacaacaagaggcaacatgaaaatttcacaagtatcgattgtacaactagtgatcatgtacgaaaaatatcaattgaaaaccaccaattgatacaatntgttagataagcagaccact

SEQ ID NO: 27889 - DNA, 206 bp, Zea mays
  unsure (1)..(206): unsure at all n locations
ngagaataagaagtgagaaagaaaagatagccaagccaagtctacatgagcaacaaggaacacaaagaatcctctctcaagtcctaatgcgctagagttgaatttgggactttgagcggatcgatcacttgaattgtgtctttggagtgaagtgtattgctattgtattgaatgcactgttgtgaatgcttggatggttggagtgg

SEQ ID NO: 27890 - DNA, 411 bp, Zea mays
atctcgtataggaactatatgagaataacttttatttatgtgatagcccgtaaactatatgcaactaggagaaaaggtagtccaaagatggattgatagatttctgagtttttagattgtaaacagtatctgaaactaaatttcagtattttgagtgctgtgttgaaacctgtttgtggctattctataaggtttacggccgatgtgtttgtagaggaagtgaacaccatatattggtgaacaattgttctgaatggtaagggacatgatcccacaccaaaagtggagtaaatgctacaccaaaatggactgtcaggttggcccaaactaaatctggttcaactactgaaaactgaaaatcgtaaatgatgcacagtttagagtcctttgtgatcatccttgtattttgga

SEQ ID NO: 27891 - DNA, 468 bp, Zea mays
  unsure (1)..(468): unsure at all n locations
ggtgaaggttcttcatccncacatgtgctaagcggcgatgccacatccagcccatgctagtcttagctattaggcatgcatctagaccggcctcttcttttgcaaaatcaactaaataaagtttgccgtctaaaacacccttaaaagctagtgaaccatcacttcttctaaagacagacacatctacatttgtaaatagacagttataccccatgttgcacaattgactaacagatagcaaattatatccaagagactctactagaaacacattagaaattgagtgctcatttgaaattgcaattttacctaacccttttaccttgccttgattcccatcaccgaatacaattgaatcttgggaatccttatttttgacgtaggaggtgaacatcttcttctcccccgtcatatggtttgtgcatacgctgtcgataatccagcttgaacccccggatgcataaacct

SEQ ID NO: 27892 - DNA, 369 bp, Zea mays
ttgaataattgaagacattattaaccactgctccggtattggctcaaccggacatcaccaagccttttgatgtatattgtgatgcatatggcagtggactcggctgtgtattaatgcaagagggccgagtaattgcatatgcttcaaggcagttgcgccgacatgaggagcattacccaactcatgatctggagctagctattgtggttcatgccctgaaaatttggcgtcactatctgctgggaaatgtctgtcatatctatatagatcataaaagcttgaagtacatcttcacccagtcagaattgaatatgagacagaggcgatggcttgagcttattaaggactatgaactggaaattcattatc

SEQ ID NO: 27893 - DNA, 462 bp, Zea mays
  unsure (1)..(462): unsure at all n locations
tnctcgtgctcgtgcgcttgatcattgattcggaacttcgttgtattggcgaacgtgaatgaccttcgtgcccatccagttcttgggcttacatggaggcgagccgccgaccagcgatgggcaagtgggcgccggaggccggacagcttaacaaggcgaaggtgccatctgggaagacgagcatacggcgaagaacagactgcggaggcctggactgctgaacaaacgggcagacgggcatacggcatagggcatacaccgcacaccagcgcggcggcgctacagcctgctctgctacacggatagtggcggctgacggctctagggtttaagttttgggaagagagagggagagaccgagaacgcataagccaagcgcatggcgcacctgctggctgctgacctgcgcaatcgcccaacgcggaacataccangccaccgagaggctgacttcgtgagtgt

SEQ ID NO: 27894 - DNA, 419 bp, Zea mays
  unsure (1)..(419): unsure at all n locations
gagacaccaatcgtgtggtggttcttgcagggtctaagtgacccgtgagaataagaaacctcactcggtctatgtgacccgttgagagagggaaagggttgaaaagtccccgtctttgtgactacctcaacggggactaagttctttagaaccgaacctcggtaaaacaaatcaccgtgtcatccgctttattttcttgggtgaattttttcctctctctcccggactcatattttattctaacgctaaccccggcttgtagtgtgnntttaagtgtaaattttagttttcgcctatccacccccctctaggcgactttcaattggtatcagagcccggtacttcattagagtctaaccactctaagtgatgtcaggaggatccggcaagagggagatggaaacgaccacaagccacgg

SEQ ID NO: 27895 - DNA, 463 bp, Zea mays
  unsure (1)..(463): unsure at all n locations
tgtcatgtcttcttgcatcacccatccggatctaggcaagcatcactaattcactagttggtaggaccctcgggtcaaaacaccgacaaattagttggctaaaaaattacaagtgtaattcgctagctaattattaactagtttactaaaaatagctaattgttaaacttttagctagggtgtttggatgtctccagctaattttagccctaactgttagctatagtgcattcaaacactctcatgtgaaaaaatgaggagtaacattgtctttgatattcactttaaaaacctctgataagaaaaataaaaaatgtgttatattatgaacttggtattatcccattaaaaaccttattagggagaaaattataaaaaacctatagtaaagagcgaacataatgctcagtacatggtattatatntagagtatctctctttgagcttgganaatcttaaagcc

SEQ ID NO: 27896 - DNA, 299 bp, Zea mays
ctcgggaggacagcggcgcatttatgatatttctcgggctggtcagcctctggaatctctgaaaggctacatctagatgcccttctggaccacactggctgtggtcaatggggagtaggtctcttcatgcagaaaggggatcacggcttgtgggtgaagagcacaacctctgcagagtgtttgaaaaactgatatatcattcgtgcacactggtatgagccgcctatggagctccactgattcgtgatacttgatcatagatgtctggatacaggtcgagaagaagatgatggatcttg

SEQ ID NO: 27897 - DNA, 406 bp, Zea mays
ctgcaacttcgaagacacgacttcttctcttctgtgtaggacaagtcttgactccgttgtcagctctcacaatagacatatcccgaaaatatctccccctcatattggcaagatggctttcgttaatagttgattttccaaacactgcatggcttggtcgctagggtcgatcttcggagtcttccccaccgctttctacatcataattgtcactatcaccagtatcttcagataaaccttctaaaatctcccttgtaatcttctccggattcatccttgctattgactcaaaatgccaagattcttctctttcaaaaggctcagcttcgtttcagcaacagcttctttatcttcacacatctctcaaaatgctataaaactgctctttaagccgaagcttaaaaag

SEQ ID NO: 27898 - DNA, 458 bp, Zea mays
atattgaagcagccaacaagcacgcgaatttgcgatatagtattgagatattatgtccgtgcatcgattgtgataataagatagctcggagagatacatgagtaatccaatcacatctgctaaaaagagggtttaaaaacaattacacgatatggtcagaacatggtgagatggatccgtgtgaagtgcctggtaatgacgagagagttgtctgaattttatatcttaaagttgatggtaaagtggattatgtggatgctaatcaagattttgaagaattttattgcgaagagatgttgcgccatatggaaccataaatgttgagttctgtgggatcgcagaaagggctatctaaaatggagggactggaaagtgcctcaaaagaacctttatatgatgaatcaaagggttgtgataaagagtttactacactgcgtacagttctagaacttcttaag

SEQ ID NO: 27899 - DNA, 464 bp, Zea mays
  unsure (1)..(464): unsure at all n locations
tatgaagattcttcattccaacatgggctagtcggcggtgtcagagccaacccaagttagtcttagcaaccaagcaagtgtcgagttcagctctatcaaaatctaccaagtatagctgaccctctaacactcccttgaatgctattgaatcatcacttcttctaaagacagtaacacctgcatcagtaaatagacagttgtagcccatttgacataattgggatacggaaagcaaattgtaatccaaagaatctacaagaaaaacattggaaattgtatggtcaggtgatatagcaattttacccaatcctttgaccaaaccttgatttccatccccgaatgtgatagctcgttggggatcttggtttttctcataagaggagaacatcttcttctcccctgtcatgtggtttgtgcacncgctgtcgagtatccaacttgagcccccggatgcataaacctac

SEQ ID NO: 27900 - DNA, 441 bp, Zea mays
agcttgggcgctcatgcactggatttgggcttcgtctactaagttccgccgtgaaccgagggcggcgccgccgcggtccggtatttatgaaggggattggggaagctcgctctcgaccgttgatcaaccgttgtagggctaggattagatctgtgggaaaggttggtcctggccgttgatcggaagggcaacggccatgatcaagtcagccataccgcttcggtcgaaacaaacatcagccgttgatctcggatccggtggtctgcgctgcataccgcttcatagatttaatgatctaatctggtgcgtccgtagcaaatctggcggccgcgattgactcataccccttcgccgtttgattttgtaaaagagcccctgcagaaaatagaaatcaacccgccatcctctggcactatgcgctgggtctctggattcttaccc

SEQ ID NO: 27901 - DNA, 398 bp, Zea mays
  unsure (1)..(398): unsure at all n locations
cgccaatacttgtcanagcaacagcacatgccagcactgtatctacagaccataccagtgacctggcctttcgcgtgctggggactggatatgattggacctttcaagaaagctcaagggggatatacccatgtattggtggcgattgacaaattcactaaatggatagagtgcaagcccattgcttctctaacttctgctaaagccgtggaattcatacaaggcataatattcagattcgggataccaaacagtatcatcactgacttgggatccaacttcaccagttcagaattctttgacttctgcgagcaaaagagcattcagatcaagtatgcatctgtagcacatccaaaagccaccggccaggttgagcgagccaacggaatgatattgga

SEQ ID NO: 27902 - DNA, 431 bp, Zea mays
  unsure (1)..(431): unsure at all n locations
agcttgaatgatcaanatcaagaacttcaagtgcttcttttatattgcaagaacatcaatgcatcatctttagtgcttgaatctaagtctagcttaaatgataattcttgcaaacattgtgccaaatatcatgcttcttgttgtctaactaaccatgcaaggaaaaagagcccacaggtgaaggtcaaagaaatattgaaaaaatgctctagcaatgatgggttaaagaaagttgaacccaagtacaagtccctaaagcccaacaatggaagaagggggctcgggttcaactcatccaaggaaaaccctagcatagagcataaggggtggagatcccccaagttcatagagggaaccactctatatgatgccttggggaggattcactcctcaaatgataagtcacctcaggtaaaggtttacttgagttc

SEQ ID NO: 27903 - DNA, 459 bp, Zea mays
cgtggaggttcttcatccccacatgtgctaagcggcgatgctccagtcagcccatgcaagtcttagcaattaagcatgcatctagaccggcctcttcttttgcaaaatcaaccaaataaagtttgtcgtctagtacacccttaaaagctagtgaactatcacatcttctaaagacagacacatgtacatttgcgaaaagacaattatatcccattttgcataattgactaacagataataaattatatccaagcgactcaactaataacacattataaatagagtgctcacatgaaatagcaattttacctaacccttttaccttgacttggttcccatcaccgaatattattgaatcttggggatccttgttcttaacgtaggaagagaacatcctcttttcccccgtcatgtggttagtgcatccgctgtcgataatacagcttgaacccccggatg

SEQ ID NO: 27904 - DNA, 301 bp, Zea mays
  unsure (1)..(301): unsure at all n locations
gaaccttggacctgatgtacacggggtggtgggtttcactctaaaatattcctgactttggtgggaacaacccggatccccttggcagaacacacctgtcccaaaaaatggacttccttcagcccaaatgcgcctttgctgaaattaacctaataattgatggttccttaagtgccctaataacaactgcagatgccgagcatgctcctctttactcttggaatatatcaagatatcatcnatgaacactaccacgaatttgtccaactcgggcatgaatactgagttcataagatatgtg

SEQ ID NO: 27905 - DNA, 423 bp, Zea mays
agcttgcccctaaggcccttacccagacatttaaaacaatattggtacctgctctgctagctccgataatggcagcgcaaaaggcctccacgaggacacccgccatcgcggcactcctgctgttgtcggcgatgacgatgttgtcctctacgacagcggaggcacgctggttgggtggaagcatcttccaacaaccccaacccttttgtgaccctcctccgcggcattggggtccatggtcagttattgtctcgcacagaacatggtgcaagcgtcgtggtctcctctgccgccctagagtcccctaccaccaccatgcgccaccgccggagacatactggccatcgacgccgagtaattattgattggttcattggaatgttaagacaagatggctgatttatggaacaaaatatgtgacac

SEQ ID NO: 27906 - DNA, 434 bp, Zea mays
  unsure (1)..(434): unsure at all n locations
tattagcacatcataatatatgtctcatgcattgcattcattatattgcaacctcgtggacagagagtacctgctaatcctagagcaaggagttgatcaagaagaaagccaggagcctgctcccgaacctgctaccgaggacatcccagcagcaccaacacttttaggcaagcctcggtttcatgcttaaccattatatatgttattttactacaattatgcttgtaggcttgtatagtgcattaagtgtaggagttgtttgaaaccctagatgcatgaactcaagttcctttatgagatgaatactatttatgcaaggtcgagtagccgcttcgctaattagggatctttgtagaagtcgagtgaattttctagcactcgcgcgaggttaggaattgaatgtattcattntgataacgggaatatgattgtct

SEQ ID NO: 27907 - DNA, 371 bp, Zea mays
  unsure (1)..(371): unsure at all n locations
agcttctgtagacaacgacctcattttgtttatgtgcaggggcggcgctgacccctccgacccttacaatatacatgtcacgaaagtatcttgccttcttggcgtcaatctgactctgtttgatggacgatattccacagatggtatggctcggtcgcttaggttgatcttcggaatcttcatccccactctctacatcgaagtcattactatcaccagaatattcatacaaatcaaccattatttcgtttgtgatcgtctatgtgtttgctctttacatagcttcatgaaacaacagactaattccgcgatgggctactattgngggccttcatcttccaaacgtcctcaggaacacgactaacatgaat

SEQ ID NO: 27908 - DNA, 383 bp, Zea mays
tcaccgagttctcacggagctgctgatcaccttgtgtggatgagaggaccactacgtgaccggaatttcgccgtcgcgcaaccggattcgtgctgcgccgtggctaggcatcgttgcctttctatagcctgtaagaaccccctctggttgttctcattggtatacacataggaggtgcatgttcgatttaagaatatggggctaagggcgtgtgttggggaagctcgtctgtgttccccgccgcggtggccgctttcttcgtcggccgtgtgtaggaggtaagagatgctgcggccaccgtccttagttggatggacggtgcatatcaacctgtgtagtcacctttctctgttgctatgggcgtgtgtcggggaagctcgtcg

SEQ ID NO: 27909 - DNA, 453 bp, Zea mays
  unsure (1)..(453): unsure at all n locations
gcttcatactcggctgcattggtggaggcaggaaatagcaactggagggcgtactttaggtgttcgcctccaagtgcggtgaagagaatccctgctcctgctccctgcaggttcagcgaaccatcaaaatacattcgccatacttctgcagtctctggattatccggtacttgctggtctgtccactctgatacganatcaaccagtgcttgagttttgattgcagtgcgaggtcggaactcgatgtcgtgggatcccagctcgcaagcccacttggctatttggccaatggcttccttgttgtgaagaatatcccctattggaaaaccagtgactactatgactntgtggtcatcaaagtagtggcgcagcttgcgggcagttagaagtactgcgtataatagcttctgaacctgaggatancttttctttgaggggcccagaacttcactg

SEQ ID NO: 27910 - DNA, 435 bp, Zea mays
  unsure (1)..(435): unsure at all n locations
tgccgccaccattaaaccgtgaattcatagctggtggaacctagatgtttggacagggagcttcaccaaccttcacaggtcatgatcgttgctttgcctangggaattacgctctgggccattgggaattgttcgccggagcatatctccagtggcggataggcccctgccacggatcgcctgcttcgcgtcgtcatatctggtgaggcctcgtcatctaattcgtgtagtcgccctcttcgtgtagctccattcaatttgtctgttgtgctctggggtgaccaattggtgcctcctcctgttctccaccgcgtgagcatggcggctgcgtctctgcttggtcagtggggaagacaatgtctaggcctgtggatgataggctcactgcctacattagatgagaatgtgatgaatggatcaccctagatcataaat

SEQ ID NO: 27911 - DNA, 385 bp, Zea mays
tgagggtatgaagcacatccatgagaaaataaaggccggaagagccaaatgtttcagaaaaaacgatcaaggtattgtatggtttaatacccgcatagttgtgcctaagaatgaagagatccgccagcaaattctaaaccaagcacatcttagtcgctattctattcatcccgaaagaactaagatgtatcacgatctaaaatagcattattggtggacaaagatgaaaatcgagattgcacgctatgtggcaaagtgtgacacttgtacgcatgtcaaagccatacatatgaagactgctggtccattacaatctctaccaataccaacatgaaaatgggaagatattagcatggactttgttgtgggattacccagaacagca

SEQ ID NO: 27912 - DNA, 461 bp, Zea mays
  unsure (1)..(461): unsure at all n locations
ntatcagatggacgtgaaaagtgccttactcaatggacccatcaatgaagaggtctatgttgagcaacctcccggctttgaagatagtgagtaccctaaccatgtttataaactctcaaaggcgctttatgggctcaagcaagccccaagagcatggtatgaatgcctaagagattttcttatcactaatggcttcaaagtcggaaaagccgatcctactctctttactaaaaccattgcaaaagatttgtttgtatgccaaatttatgttgatgatattatatttgggtctactaacaaatctacttgtgaagagtttagtaggatcatgatacacagattcgagatgtctatgatgggggagttgaagtattttctaggatttcaagtcaagcaactccaagagggcaccttcatcagccaaacgaagtacattcaagacatattcaacaagtttggaa

SEQ ID NO: 27913 - DNA, 439 bp, Zea mays
  unsure (1)..(439): unsure at all n locations
gcttctcacaatactctnttagatcgctgtgagaggtcttgagctcctcaaaagacacttggaggctnttatacaattccttcaaggtcttaaacttttctttttctttgtgaatgtagtcatcgggctcacctaacattctaacaagatcatcatatgaatagtcatcatcctcaacatcatcatcatcatctatatcatttaaatcggggatgattnttaccttagcatctccctttgccatgagacaatgaggggatgagaaaagtgaaggggcttccttgatggcaattccggcattaagcttggatgaggtgtcatcatcatcatcatccgagctatcatctgaatcccattcaactaggtaggctntgtcatctttcttcttgttgtagaatttcttcttcttatcatctccatctttgccatttttcttctt

SEQ ID NO: 27914 - DNA, 470 bp, Zea mays
  unsure (1)..(470): unsure at all n locations
taaccttagtaatctgttttatatgttacttatactaacatgttttcattgtttntgtgtagaaaacgcaaaccaaggaagaattccacaaaacaatggtttcccaaagaattagtccaaccaaacatcctgtcagatatggtgattgggactgagtcaattcaacaaacagtcagttcagactacatccccagtgcagacttggaggtcggcccttcatcgcctccaagaattattagaagagttatacgcaagattacaccgaagaagaaaactgcagacttggaggtcggcccttcatcgcctccatgaactatgtggttcagtggagtcgcttcagtgtatgcccaagtgtatgaactatgttctttagtgtatgcccaagtgtatgaactatgttctttagtgtatgcccaagtgtatgaactatgttcttcagtgtatgaactatgtccttcagtgtatgaacc

SEQ ID NO: 27915 - DNA, 437 bp, Zea mays
  unsure (1)..(437): unsure at all n locations
agcntgngaaggatcttcatccccacatgtgctaagcggttatgccacagncagcccatgctagtcttagctattaagcatgcctctagaccggcctatcctattgctaaataaagtaaatacatattgtcgattaatacatcctgaagatgctaagtgaaccatcacttgttctaaagacagacacatctacatttgtaaataggcagttatatcccatattgcataatcgactaaccgatagcaaattatatccaagcgactctactagaaacacattagagatagagtgctcatttgaaattgcaatgttacctaacccttttaccttgccttgattcccatcaccgaatataattgaatcttgggaatccttattcttgacgtatgaggtgaacatcttcttcttccccgtcatatgggttgtgcattcgcta

SEQ ID NO: 27916 - DNA, 444 bp, Zea mays
  unsure (1)..(444): unsure at all n locations
ntatcaaatggacgtgaaaagtgccttcctcaatggaccaatcaatgaagaggtctatgttgagcaacctcctggctttgaagatagtgagtaccctaatcatgtttataaactctcaaagacgctttatgggctcaagctagccccaaaagcatggtatgaatgcctaagagatttccttatcactaatggcttcaaagtcggcaaagccgatcctacactctntactaaaaccattgcacacatagctcatttatatacctttgatcatatctctttcatgactacgactcatgtgtttttaagtgtatttatactaagtcatagattgaaagggaaatggagtcttcagcgaagacaaggcttccactccactctaacggtatcatttaccctttgccgtcactccacaccactcttagatnggtataatcttcactcata

SEQ ID NO: 27917 - DNA, 294 bp, Zea mays
tggtcgatgggttacctactttattcatgtggatggagcttgcgtttgccgggatttttctacatggctgctattcctggacgctatactatacgccctgcatagctcggagatcacgcttgtaaaaaatttcaactaaaacaaacacctggtaacacgacttgattgtatatattttaggggttacgtcaactgctcaagcctgatactgggagctacccgtgtttcactcaccgtggcatggcatgcgcagctgctccggcaatgaccctggcctgcgcgtgcacatttgct

SEQ ID NO: 27918 - DNA, 442 bp, Zea mays
agcttcttcccacaagtcgcatcggagtggcgacaagataaagaagatgaggaaggtggtctactacgagaccgacacttcatcaccttccaccttctgctccgacgcgccctccgtaacttctaagcgccatgagcgcaagaagtttagtaaaattcccctacgctaccctcgcatttctaaacatacacctttacttttcgtcccattaggcaaaccaccaacttttgatggtgaagattatgctaggtggagtgatttaatgcgatttcatctaacctcactccacaaaagtatatgggatgttgttgagtttggtgtacaggtaccatccgtaggggatgaagactttgatgtggatgaagtggcccaaatcgagcacttcaactcccaagccacaaccatactcctcgcctctctaagtagggaggagtacaacaag

SEQ ID NO: 27919 - DNA, 416 bp, Zea mays
tcgtgttcagttctggttattttgcttcagcttccgccaatgaacattcggctgcctggagctcaaagttctttttctcaataacatccgattgctcctttattctgctttctaaattttcaattataacttcgtgcttcttatcttcaaaatcttgctgcatttgcaaggctttgctcaaatagcatactctgcacgaaaacaaccttcgtcagacatgttttattgttagaaacaataaagttaagggacaagtagttcaccttggagttggaataaaataaactaccaacgacatgttgtcgtcggtagcggctgatgtctgtttctagtttcgggaagccgatactcttggacagagtgctgataactatggctcctgtctgatctcgaatacaatctaatttctcatcatc

SEQ ID NO: 27920 - DNA, 427 bp, Zea mays
  unsure (1)..(427): unsure at all n locations
gattatatnttatatgctgagaaaactggtcctatgctatgatgccatttcattacctcttcttatgtcttatcaattgtatgtagactatggacgttgagcaagttgctgctggtagtacctcaaggattgccatgcgctggacccctgtgatgtcagcctatatactgaggaagtttgcagacttggttgggcaatgagtaaaaacggataaagggttcaaggaggtccatgtcaactctgttgccaaggcactgactgaattcagtggccaagaagtcacaggcacccaagtctacaatcatttgaggaagtggtgtcaaaaatggatcatggtttgtatgctcaaggacctaagcggtgctcattgngatgagaatacattcacaatcatccttgatgatgaccacctgctgggccatacaaa

SEQ ID NO: 27921 - DNA, 409 bp, Zea mays
gcttaattaccggagctttccgtttgggttcttctcttcagcagggtacaaaaacacaccgccgtatagcaaggtacggtgcacgtcagcaaccatactgttaataaaagcaaaccatcagcatcgatcagcgagtagtgtgttttagtcgttgcagtataaagctatcaacagtaccatcatccttcgtcatatgtaaacggccgcatgcatacgttcattcatttctctactggtggagatctatagtgaaagatcgatcgatcgactcaccttccaatgtatctcaaagatcttggtggcgagccatctttggggtacttgcacttctccacacacctgtggtttattatggtgtaagctacagctggagcttctttaatcgtttaaaacaaaagaaaggcgggag

SEQ ID NO: 27922 - DNA, 463 bp, Zea mays
  unsure (1)..(463): unsure at all n locations
ntaagctctttgacaatagaattatttcatctagttttagcaaagatgtaataatgcatgagtgaaattttaagaggttaaactaggtatgaagcagggataaacgcaaaggtcatgctttctcttccttttatacaagatatgcaaagagtgtatataggaggaagatttaggtataggtttgaatgaaaggaagtggttttacccttttgtaccttctcataaagacgttctctccattgtgtttatgtccttggtctcgtttgcttaagacctatgcttaataaaagtgtgtgaaaatattttgcacaagagagagttctataactagtggatttttttttcaagttattgttagcataaatcaaatggatcacaagttgtataaatgaatcatgaattctcctttntccttagtgcataccatntgaaatcaaattcaaattntatgaggcactaagaa

SEQ ID NO: 27923 - DNA, 385 bp, Zea mays
tagcttgtgctgacttacatttgctcaggatcataacttatcaattgccctcgtgcctagcaccaatataattgtggtctttttttggtactcacacaagcagtagatctgtcgcaatgtgttatgctggaggaattatcatttaaacattacaagcttgttcggcctctattggatttcatgctatctaatggtgaattgtggagttttttataccgcgatggctttcaattggagccatttcctcatgattcattatctgtttcccacaggtcaatgcccaagcttcgaatttggcgctttgttggatatcctatagagttccttccagaaattttgccattgcataacctcatgcatggtacacttgccaatattaaaattg

SEQ ID NO: 27924 - DNA, 466 bp, Zea mays
ttaagaaggagatcaaggtcactagaaggagaacatgtgtcttaaccagaactggaagcagcccacaagagctaagttcaccttgatctttagtttggggtgttcctatgtttggagatgttctatgtgacctttacaggatgttggagccaagtaatgtcaatctagatcaagacaagctgacttgatgatttatgagtccaacatcaaagctcaagcatgtggaatgctatagatttaatgattaagagaaggtatgtttctatacttagtacattgattttgtggactaatatacttgtctaagtgttagaaacagaaagaagaagaaaagaagagaggtgcaaagggcttggctatgtacagccaaagcagctcagtctggcacaccggactgtccggtggtgcaccggacagtgtccggtgcgccaggctgaactctggcgaactggccgttctcgggaat

SEQ ID NO: 27925 - DNA, 270 bp, Zea mays
  unsure (1)..(270): unsure at all n locations
tatctaagtatatgagggagtaagtatggtcttgttatagctgatgattttcccgcttcantgggtattctttttgcaggataaaaccgaaagcccagggaccctcaagcgcttccttatgagagctcaaaatgagtttgagcttcaggtgaanaagataaggagcgacaacgggtccgagttcaagaaccttcaagtggaggagttccttgaggaggaagggatcaagcacgagttcttcgctccctacacaccacaacanaatggtgt

SEQ ID NO: 27926 - DNA, 441 bp, Zea mays
  unsure (1)..(441): unsure at all n locations
agcttcggagtcaaactgtgttccattattcacagtgatagcctctggtaccccgaaacgacaaacaatattctgccagaaaaacttttggacggtggccgaagttattgtagctaaaggctttgcctcaatccacttagaaaaatattccaccgccactacaacgtatcttaggttcccttgggccggtggtaacggacctaacaagtcaaggccccacctttgcaatggccaaatgggttgtatgagttgtgttaaggacgaaggttgtttntgatctcgtgcacatttctgacaaccttcacacttttgaactaactccgctgcatccgaagccgccttcggccaataaaatccttggcgagaaaattttccaagcaatggcctggatccaatgtgagatccgcagaggcctgcatgtatttctttcatcaactcaat

SEQ ID NO: 27927 - DNA, 384 bp, Zea mays
tcctcggatcgtctgcacacccacgattagagcatatttaccccgtgcaggcgcacccaccaaaaccaagcatctcattcaaccaagtcatccatcagctctgctcacgactcacaagcaagagctcagctcaattggagctcggtctctcgattcccaggaggaacggaaccaaattaagctccgttggttgcctgccagtaacgagtagtccggacacgggatgggcaacctcgtctcgcagtgcgtcgcgaacggtgccggcgcgcggcctctagtcgtcgagccggacggcagccggacgtttgtggacaagaacacctgggtcgcagagctgatgatcgacgcgccggtgcacgtggtggctcgcgccactgacatggc

SEQ ID NO: 27928 - DNA, 443 bp, Zea mays
cttcgtgcaactgctgccagaaatgagaggtgaactacgttcctctgtctgacactatcttcttcggcacaccatgaagacaaacgatccgagacatatacaattctgccaatactgcactgctataattggtcttgacaggtatgaagtgggctgacttggtcaagcggtccactactacccaaatggaatcgtagccggctcgagtgcgaggcaatccgactatgaaatccataccgattcatcccatttccactgagggatctgcaacggctgcaacaatccagcaggtctctggtgctctgccttaattcttcgacaactatcgcacatagccacgtgctctgcgatttccctcttcattccgtaccaccagaatttcttcttcagatcctgatacatcttctcactgccagggtgaatcgaataagctgtcttatgag

SEQ ID NO: 27929 - DNA, 446 bp, Zea mays
  unsure (1)..(446): unsure at all n locations
tgaaggactgcttcggcaggagagcttccgaacgtgaagacttgttcggtccacggagtcgctttatccgaacgcgagttacttatcgcagaaggtgatgagtgaggtatccgtatcccggaggcgtatgagtccctcggctcggtcagccttggctgcttacgtgtactccgtcgtttccaggatccgctttccgaagtagtcaagaagcacgaaagaaatcctgctaaaaagagatcctttttcgaggaaaaaattcgacgcagagggggtctccccccttttagcccccgagggagggtcgggctttgccgaggcgaggccgacccttccttgatgactaaactntgcgttggtgcgaggtatgtgaataacttgaaaacatcttaagggtagaagcgacgtagctgtttgatgttccaagcgttgtcgtagatctcgccttg

SEQ ID NO: 27930 - DNA, 448 bp, Zea mays
  unsure (1)..(448): unsure at all n locations
agcttagaaacctttcatcttaaaaagacggtgtttttttcattatttctaatagaccctctagggactaggcttcatattattattggtaatgactctaaacatttttgtcacaacttcaacatcttcgcttgtaggtgttcagtaaacccacctgaccatgtcaacctgcttgccagttgccaacagctcaatatacatcacgtggtttttgtcacctgggtgctgtttggttcacatatttgtaacgtaataagtaacggataacgctaaatcatgtttgtttagtccaaccgtaatcagatatcacanctaaaattgataccagcctattcaaatttgttaccgccagtaatcgagctgaaaccattaccatttgcgttacatttnttgaaccaaacaataccctggttcttacagaaactcggctatatattataaatcatgg

SEQ ID NO: 27931 - DNA, 473 bp, Zea mays
  unsure (1)..(473): unsure at all n locations
tcatgatcggaatgaataacaaactctcttgaccataagtagtgctgtcaagtttcaagcgctcggaccaaagcatacaattctttgtcatacacataataatttaattgagcacctcccatttttcactaaaatatggtataaggtttccctggtgcattaaaaattcttctaatccaaatccactagcatcacattctacnttcaaaagtttagtgaaatcaggaaaaataagtacatgtgcttcagtcaaacgtttcttcaattcttgaaaagcatcttcttgtgagtttccccatttaaattcaacacctttctttgtcaattcatttaaaggggaagcgatagtactaaactctcgcacaaatcttctataaaacccagcaagaccatgaaaacttcttacttgacttacattcgttggagctggccaatccttgatggctttcaccttggattcatccacctctatt

SEQ ID NO: 27932 - DNA, 456 bp, Zea mays
ttaagcactgagctgcagctgtgaaagattgggccttgcttgtgactccctctatcatcagtttgagcagagttatgaattgacctaacgtgcctcgggtgaaatcttcctccgaagcccctggtcatttcagagaacctgaatgcttcctcccttctttggcggaagtcattgtcagctcgaatgtattcgtccatcttctggagcagcttctccaacgtttgtggtggcttcctggcaaagtactgcgttgaaggtcccggccgaagccccttaatcatggcctcaatgacaatttcattgggcactgttggcgcttgtaccctcagacgcagaaaccttcggacgtacgcctggagatattcttcgtggtcctgggtacactgaaataaagcttgagcagtgactggcttcgtctgaaacccttggaagctagttatcagcatatccttcaac

SEQ ID NO: 27933 - DNA, 419 bp, Zea mays
tcacgggctactggcggagctagccgaagcactggctgggcttgatggtggctggagtgggctggccacggtgaccgaagctctggcggcaatggcgggcggaattaagctcgccggagctaaggaaaggtggctggccggagagggtgagtgcggtgtgaagagaggtgcgcccggcgaggctttatatgcgcgggcgggcacggtcgatggcgtgggcgcgcggcggacttgaccggacgcctgtgtgagcgcgcgcgggttgggcgagctctggcgtgccgaccagggtcgaacacgtgtgcctgtgcgttctgcccaagttctggcgcgtgtggtcgctcatccgagcctgctctcgccttggtcagtgcacaaaacctcttcttctccctacaagctaccattcttgtgtgggg

SEQ ID NO: 27934 - DNA, 392 bp, Zea mays
  unsure (1)..(392): unsure at all n locations
ctcttcggctcgattcgtctttgccttaacacgaatttctcttttccaatatatgctccgaagaacaacattgtattcccttcttgttccagaagcactatgctgtatgatgcttatgttatgcaaaaatgatgtgatgatgttatgttatgcaaaatggtatttgtgccgcagatacatatnccttgtataaagcacacactnttatatcagcgctgacttttcgctgtaaagcctccttaggagcttcttcgccttttactttcagcggaatcagcgtttatttttcgctgcaagcctcccttangagcttcttcgccttttactttcagcggaatcagcgtttatttttcgctgcaagcctcccttaggagcttcttcgccttttactt

SEQ ID NO: 27935 - DNA, 467 bp, Zea mays
  unsure (1)..(467): unsure at all n locations
tctattntagaagaaatcctctaaagtagatcagctatcattggtctttttattntataacacaatatccatatataccttactataactaatttaaaactactttcgaatcctctacaagtccatcctcgcatgatactaaacaaatcttagaaaatatcgcaagaatccgatatgcatccattaaaccaatagcatcgaattattagagaagaataatagacattatatccctttcatttttcaaacattatcgacctcttatgttatgaaaataacctagagtaataccttatatttatagttaaattatctagcctctcgttataaaaaacctaaagtaactcattctactaataaggtagcacatgctctccactcctacattactaagctggttggtttgaggaataagttagtccatcatcttctcactcctcactatttttggttggtttgtagaatgg

SEQ ID NO: 27936 - DNA, 440 bp, Zea mays
  unsure (1)..(440): unsure at all n locations
agcttgtggaggttcttcatccncacatgtgctaagcggcgatgccacaaccagcccacgcaagtcttagccattaagcatgcatctagactggcctcttcttttgcaaaatcaaccaaataaagtttgtcgtctagtacacccttaaaagctagtgaaccatcacatcttctaaagacagacacatctacatttgtaaatagacaattatatcccatattacataattgactgacagatagtaaattatatccaagagactcaactaaaaacacattagagatagagtgctcattggatattgcaatcttgcctaagcctttcaccttgccttggttcccatcaccgaatatgattgaatcttgggaatccttattcttgacgtaggaggtgaacatcttcttctcccccgtcatatggtttatgcatccgctgtcgat

SEQ ID NO: 27937 - DNA, 460 bp, Zea mays
  unsure (1)..(460): unsure at all n locations
tgtatnttatttatgatcaagtttatggagataaacacattcaagtgtgggagttgactgttggtggatataacagtgggttttatacttcattctattgatctattctataaacatgaataatatatgaaggcaaatagttgccctttttatttattttaccttgtgtatgccatgtgtccacacaagtgagcctatagttgtctgaggtaaaatatggctgatatatattcacaatgagtagatattttcatatgcttttgatgccaattctgcaatccatcaaagtactagctacagcgtgctcaatttctcaaattatgttttcattgttgaatcatggtcaccttatccccaccttgcataaagaataaaggtatggattcttgaagtgtgcttcaatagttaatcatccaacctcaatgtccaccttaacagtggtaaacactgaatgatagca

SEQ ID NO: 27938 - DNA, 452 bp, Zea mays
  unsure (1)..(452): unsure at all n locations
aagcttgtagacgagtttaatggtgtctggtaccaatcgctggtgttgtgtggtcgatattcgataccaacccaaacgatggttatggcgggcgataaatccgacccgtccgttgggttgtcgaccgatcgtggcggacgacaatggctaatgtggggcaagatgtcattacgagagatgtcgttatcgactggacatagtcgatagggtctgcggttgctgatacgacgtcctctgattgatcaacactgtttcatttgtttgaatttgaaaattttcgaaaaataataattaatacacactattaatagagagggtccttagattcattcacacacatttatctccaattcacaagccctctcttgcaattgtagctcttcactctttgtttngaattaatagctttccaacctctgtttcgagatatagatcccacgtggagtcttgtc

SEQ ID NO: 27939 - DNA, 447 bp, Zea mays
  unsure (1)..(447): unsure at all n locations
agcttgaaaatatctggattgggtcgaatagttttatcttccttcgaagggttttctgtcaagaatatccctcgaggacaaaatgagcatgctgatctgctagctaagtcagcagcacaggggctgcctttaccttcggatgtattctttgaaacaataaaagcaccttcggtggaactccttgaaagagcagttcttaatatatctcctgtttttagtgaagattggagaactgagatcatctcttaccttcagggtaaatttctttcagatgacgaagcttataacaagagaatagaggcaagagctcgtccatatgtcatgatagagggggagttgtacaaacatggagtntgtgctccgttgctcaaatgcttatccagaaccgaaggtatagagttaatgaaagaaatacatgcaggcctgtgtggatctcacatcggatct

SEQ ID NO: 27940 - DNA, 432 bp, Zea mays
tctaaagggagaacacattctatgattaacatatgtttattttgagaaagacagggtttgtagcgcatgccaagcagggaagcaagttggcactcatcatccgcataagaacatcatgacgaccgacaggccactggagctcctacacatggatctatatggcccgattgcttacataagcatctgcgggagtaagtactgtctacttattgtggatgattattctcgctttacttgggtgttctttttgcacgaaaaatctcatacccaagagaccttaaagggattcttgagacgggctcaaaatgagttcggcttgaggatcaagacaattagaagcgacaacaggacggagttcaagaactctcatattgaaggcttccttgacgaggagggcatcaagcatgagttctcttcttcctacacgccaca

SEQ ID NO: 27941 - DNA, 439 bp, Zea mays
  unsure (1)..(439): unsure at all n locations
agcttcttcaccacgcgcccgtggatatcttgagagagtngagcaatgcgtcttctccttagttgtctttgcttcttgttcccacacaatttcttttgtgaccctgcatcttgatgcttattcaaacattggctttcttttgaacaacaggggttagcacatggtgatatacaattcaaatgcgcacacgtgcgagaatgaggttcacatgaatttaagttcgcaattataacctcatgagcaacattaagcatgatatggtcatcaattattttattatgagaatatgacaacacatcgtactcttcacctagagcaagcttttctaaatttagaatttctacttctctctcaagcatggcattttccattntaagttgagcaacacaagatatagcatcatcattactattttgctcaattaaaattgaatcatacc

SEQ ID NO: 27942 - DNA, 460 bp, Zea mays
  unsure (1)..(460): unsure at all n locations
ngagcagtccttgcttcaggtttctttatcgaagcacatattatgcgacatttgaaagtcaccttggcatgcttctgcttccttttcttcttcacctcctggattacacggcgtagtcaggacaaaagaactcaattgcatcaaatacgtgatttaatcgatgcttttttggggctacgaaggatagtttcagcgcttcaacctcctttttgctataattaccgagaatttcgttgcatttatccttaatagcatctagccattcatcgtaaggtttttcgaactgagcttcaagcttatacttgtaacgaagccaatccaaaccaggctctgcttatgaagcatccttttaagtcatctcaagcatatcccacttagcccttagtggccatgtgttgaaagccagatattcttgaacaaggtcccttgtcctgatgtgggtgcacatagcattaaagac

SEQ ID NO: 27943 - DNA, 378 bp, Zea mays
agcttaaagccatggtaagtagcatacgcaagttatatacgaattgactcaagcctaactacgggtgcataggtttcaccgaaatccaaaccttcgacttgtgaatatcccttggctacaagtcgggctttgtttcttgtcaccacaccatgctcatcttgcttgttgcggaagacccacttggttcctacaacattttggttaggacgtggaactaaatgccatacctcattcctcgtgaagatgttgagctcctcttgcattgccagcacccaatccgaatcccttaatgcatcttctaccctatatggctcaatagaatacacaaaggagtaatgttcacaaaaatgagcaacacgagatcgagtagttaccccc

SEQ ID NO: 27944 - DNA, 463 bp, Zea mays
  unsure (1)..(463): unsure at all n locations
taagcacttctcctgaagttctgtagaggattatatgcatatttgagtatttatccacttcagtcttcaggctcgcttcaaaatatttcttatcttgctcaaatttttctgattgacggagcaattcattctttaatttatcattttcagtttggacttcagccaaagagccctccatggtctgaataatgaaatccttcttttctagtgcaccttcgtgctctttgaccataatttcaagatcttgaattgcgaagtctttctttttcagattggcttcatgattttcaactttttcagccaaatcttgaatgacggttttgtttttctcttcctctagatcttgttgcatcttcagaactttgcttaataatatgctctgtcgaaatgatcttcgtcagaacacgacccanaaagttaaataataatagtaataaaataataaaaatattcgctaccttga

SEQ ID NO: 27945 - DNA, 446 bp, Zea mays
  unsure (1)..(446): unsure at all n locations
agcttgcattgcatgtttaaatttcttgtattgcatctatggcttgnctaacctagataagataaccgccaacaaagcgagtgaaaaagcttaactcggatcaacttgacaagtcttagttttaagcttttagcacttaaattcttacttcttatgcaattgttggttcttgaagtatgcatgaggtactgcacttagggggagtattcaaaactcaaatcactcatgaaaacccctagtgcaaggccaaaatgcaaatttcaccatttgcctattttctctaaaaattatctagcctatggcaaaatattttgaaaattatgagaaaagtatatgagggtgccaatacctgtcccaacaagtgttattttgtgtgtttataagttgggatttggtttggttggaaattagatagaaaaattcaaaaattcaaaaactttcctctg

SEQ ID NO: 27946 - DNA, 464 bp, Zea mays
  unsure (1)..(464): unsure at all n locations
cttgtgccaaaaatcacagtaagctaagggatggttattttgttgtgattntccaaagtttaatgccaaaaaggcactttccactaccttgctatttgaaaaatgtcaaacaacagatttcantattttcctatgttgtttataacaaaagatttactatcccaaaggttggggtgttttcaccttgggggtatttttgtagggcttttctaagttttccttgttttcttaaaataaaaggtatcctatttattttatactaaaccagggtataatcaatttttctagtagcctacactgaataagtatactaacaaaaatatgggggctccctggttctttatttaaatcactcttcctatnttctttaaccttaagcctaatgtaaaataaatggcaaactctaccttaatggngtgtacagaggggtttagaaattttaaataggtcagtaggtggtcata

SEQ ID NO: 27947 - DNA, 378 bp, Zea mays
  unsure (1)..(378): unsure at all n locations
ggtctcttgctctgcgactcttgtcaacatgactagaaataacctgggaatcggctntaaggaccgcccttcttatccccattgcttttaacttccgaaagccccaaagcaaaagcttcgtattcagcaatattatttgtgcacctgaaattaagctttattgcataacatgttctgacttttgaaggtgcgactaaaaaaagagcttgcccttgcctaaagagttcccacgaacccgacgtagaacattggccaagcttcggcatctntatttgcttcttctttctaagcccctggcgtccagtcagcgatgaagtctgctaatgcttgggactgaatcgaggatctatgcacataatcaatgctgaattcggtgag

SEQ ID NO: 27948 - DNA, 457 bp, Zea mays
  unsure (1)..(457): unsure at all n locations
tgcatcgtttccatacgcctgtgggtctccctgttgtctttctcaatcttggcgaggagctgcgccattgagtcctcaatcttcgacggcgccatcgcccctgtcttcgatctggtgaaataatcgtggggaagatccagctctgaataccaactgtcagacaactgatatggggaggagttgggcgccgctatctgcacccgtcgcctctctcgaagctctcagaattgaaggtagctataggttctttacacggtgcgccgtcagacgccagcctccggacacagacgggtacgagttcgtatatactctgtctctccccgcacaactgccaggattatttacaggttacgtctcgcactgacccatgggcctaccctcaccgtcgccattcctcaccagtgaagcgcttgttgggccgcggtactcgctggcttctcctgagttgttctnctct

SEQ ID NO: 27949 - DNA, 433 bp, Zea mays
  unsure (1)..(433): unsure at all n locations
agcttatcaagtcagctttccaacgtatctatccccacgacatttgaagattcctagaagaagttattgtcaaaatactgaaggctgcgtagaagtcaaacaaccacatgaaattcagctttgcagatctcccgaagaggccccttcacagcatgttaaaatactttcttttcgtgtttatatctctctaaggctggttgttgctagtataaataccccctatgtctatgatgtaagacaacttttgatgatataaaaacagaacccttttgtttagttgtgtgctaacaaatattgagagtgatatctaccactttgctcttatgaattccttctgggattgcagaagcagcagcttcatccgctcccaagtggtgctcctactcccttcgaggtctcgtcgattgattgtangatgtgttggttggttctt

SEQ ID NO: 27950 - DNA, 323 bp, Zea mays
taccgcatttgaagcacgaacgcttccacttggctttggtcttgcttggcatgcccttgcgacctttaagcgccgtcatgaatcttatgatgatgagggccatctcttcatcattaaatccggccgcctcaatttgtgccaccctgctaggtaatgcctccttgcttcttgttgacttgagagcaaagggttgaggctcgttgatcggtccattcaacgcgtcgttcacgtatcttgccttcttgatcatcatccgcccgcttacgaatttttcgagtacctcctcgggcgtcatattcgtgtacctgggatatttaccaata

SEQ ID NO: 27951 - DNA, 437 bp, Zea mays
  unsure (1)..(437): unsure at all n locations
agcttctaagggagagcacattntaggactaacccatgttcactttgagaaagacaggatttgtagcgcatgccaagcacgaaagcaagttggtgcccatcatccacacaagaacatcatgacgaccgacaggccgcttgagctactccacatggatctattcgacccgattgcttacataagcatcggcgggagtaagtattgtcttgtaatagtggatgattattctcgcttcacttgggtgttctttttgcaggaaaaatctcaaacccaagaaatcttaaagggattcttgagacgagctcaaaacgagttcggcttaagggtcaagaaaattagaagcgacaacagaacggagttcaagaactctcaaattgaaggctttcttgaggaggagggcatcaaacatgagttctcttctcctacacgccacaaca

SEQ ID NO: 27952 - DNA, 460 bp, Zea mays
  unsure (1)..(460): unsure at all n locations
nggtgccaatggagaagcagaaatctttgaagtcttggctgtcaaattgcttgtcgttgtcaactgtgagttctgacgggactccgaagcggcaaacgatgttttgccagaagaatttctgggcagtcttggatgttattttggacacagccctcgcctcgatcccattggtaaaatactcgacagcgacgaaggtgaacttgaggttcccctgtgccgtgggtaggggcccgacaatgtccaggccccagcgtttaagaggccatgtgtgggcgattagcttcgtgaattgcgaagggcttcccgagcgtggggaaaatttctggcaggcttcgcaggaccatgtgacccgattngcggcgcacatcatggcgggccagtataaaccttgatggattacctttgcggctagttccctaggccctgcgtgagagccgcaagtctccatgtggacttcatg

SEQ ID NO: 27953 - DNA, 453 bp, Zea mays
  unsure (1)..(453): unsure at all n locations
agctnggcatacaactggcagtctcataacctctgaagtaccttcctcaaatgttcctcatgctcttgctcattctgggagtatacaaaaatatcatcaatgaacactactacgaaattgtcgaggtagtccatgaacacactgttcatcagatacatgaagtaagctggtgtgttcgtcaatccgaatgacataaccatgaactcatataatccatacttggtgatgaatgttgtcttcaatatatctgcgggtcagattctgagctgatggtaacctgacctcagatctatctttgagaacacactggctcctctcaactgatcaaataggtcttcaattcgaggcatggggtacttgttcttgacagtgacttcattcaaagctctgtaatcaatgcacatcctcttcgtgacatacttcttctccacaaataatactngggctacccaa

SEQ ID NO: 27954 - DNA, 468 bp, Zea mays
  unsure (1)..(468): unsure at all n locations
tcgaatntaattctggttatttggcttcagcatctgctaataagccttcggttgtttgaagctcgaagtctttcttttcgatggcaactgattgatcttttatcttgttctctaagttctcaattataacttcgtgctttttatcctctaagtcctgctgcatttttaaagccttgctcaaaagcatactctgtggacaaataaccttcgttagaaaacatttatgatattacaaataataaaggttagacaaaagttgtttaccttaaaattggaataaaacaaactaccgacaatgtgttgtcgtcggtagcggctgatatctgcttcgagcttcgggaaaccgatactctatgatagagtaccgataaccttcgcgccggtctgatctcgtatgcagcctaacctttcgtcatcaatgccaccgaagagaagcgctcccggccgatacccgcangatatagcata

SEQ ID NO: 27955 - DNA, 474 bp, Zea mays
  unsure (1)..(474): unsure at all n locations
tcaccaaaacagtcaagaatgagtttgacacagtttagatctttctccctgngcttgacaaacagcactacatcatctgcataaagagataatctagacttcacaatggcactgtccacactggccaataattctttttcttctgccactttgaaaaggctgctgaggacatccatcaccatgacaaagagcattggggagagggggtccccttgcctcaagcctctacgatgcctgatctgttcccctggaaacccatttaataaaatctgagttgaagaagtggccacaaggttggagacaagattcctccacttaataccgaagccaaggtgggtcaacacctcatgaaggaaagcccaggaaacagaatcaaatgcctttgttaaatctaatatcagaaaaaggctggccactttntttctgtgcacggatttaattgagtgctgaaccaacatataatngtcatgaatg

SEQ ID NO: 27956 - DNA, 393 bp, Zea mays
  unsure (1)..(393): unsure at all n locations
taatggaaaaatcccaccaggggtggctattgcattcccggctatcccatgtccgtatgaagaatttggcccaactttcaaaggattatcaccttattggacttaccaatggtgtattttagaaaaaatagggttgtggcgcatgcccagcaccaaagccacattgagtcccacaataatccaaaaatgtggtcacaacaaagaggccattggagcttcttcacatggacctcttccgacctgtggtctacattagcattggtgggagtaagtatgggttaatcattggtgatgatttttctcgattcacctggggtttctttttaagtgataaggtgaaactcaagatatattgagaaattcatgaggagagnctcaaatgagtttgagctc

SEQ ID NO: 27957 - DNA, 443 bp, Zea mays
  unsure (1)..(443): unsure at all n locations
tgaggccgaggtccagaaaagttcagatttgcaaaaatcattgacatgccttcaaaacaaatgtctggagttcagtaatcgatgtatacaacgactgaagcaggtcttctattcggttggagccaacagcgagaaatgtaatccttcgactgaagacctgccagggccttcgaacatatcgaaggtgaaattgatgaccttgatgaagttatagctggacatggtgactnttgtgccctggtagcttctcggggcacagctgtcgccttccagaaatctggctgcgaacatggaaaggttgtcaatagacccaatttcagtttatcaccagcagatctagataatattcccaaccttgcccaaagcatagcaaatagaattataaaactggtatggacaaagggtggacaaagcatagctggtgatgaagctcggagacatct

SEQ ID NO: 27958 - DNA, 421 bp, Zea mays
ttcgcctcagtttatcatccgcagtccaacggggtcgtggaacgcgccaatgggaaaatcttcacaactgtcaagaagatgctccttgatgaaaaaaagagcagatggaccgatttgttacctgaggcagtctgggcactaaacacgactgaatgcagggcgactaagtttactcccttccgccttctatacggatcggaggccatgaccccgcaagaaataaagcatgggtccccgcgaacaattccgtcagccgtccccgacgacgagccaacttcaaaggatctcattgacggagaccgagtcttcgccctacaggccctaaacaaataccaagcccagaccaaagcatggcgcgaccacacggtcatcccgagggagttcagcgaaggggacctcgtactcgtccgaacagctcgga

SEQ ID NO: 27959 - DNA, 296 bp, Zea mays
cggcagccacgacgtggtcattccaacgtctcacatgcggaggcggaggaggaggccctgctcctggcacatgcaagcatcgagccatcttcagcggcaacggccgcagcggcactcctccaccttgatgagtcgaaagcacgcgctttcctcggcgacggctctaacaaggacatgatcgaaggatggtgcctcgacaccggcgccactcatcacatgaccggccgacgggagttcttcaccgagcttgactctaacgtccgaggctccgtcaagtttggggacgccttcggcgt

SEQ ID NO: 27960 - DNA, 347 bp, Zea mays
ctcactgtggaaatggcgctcatgaggaagagctttttctcttttctcaagcgacagaccgggtcggggggtacgggctgttaaaggaccctctatcacccccttatgggctcgattagatctcccattcaatgattggtgagcatccacatccatcgatttgaaaatctacgataaaggggtcactgtcgccaccggctctcgatatccaatcaacaggttgaaaattcatagggaaggactataatcctcgcttctaaaaggtgtgctacacggttcgtaaaatcgtcgcttttaatctaatgaccatattctagtgaaagtgacaatgacgaagacacaaaagg

SEQ ID NO: 27961 - DNA, 446 bp, Zea mays
  unsure (1)..(446): unsure at all n locations
agctntgtcgccgaaggtggcgcaacttgatgactttgttaagccattgttgtaatcatgaaaatgagttcaccggaggtgggcgccaatgttggtcacttgttctcaattactgtgaatcaaaaacaaggcaacacaaagattaaatgttaaggacattcgcgaagcattatcttttctcaaagataatgattcttggacgaagatgatgaagagcttatcttcatttctcttgaagataatattacgatgtgatattattttacaaattcattttattttctatattaaggtaataacatagtttggattacattataatgaatcattaaaaacattacattacattacattagtacctttggcttgctcgaaggagagagtgcgagagtgacttttcaatgaaaaaagcatgaatagtacgagggtattggtcatctatttat

SEQ ID NO: 27962 - DNA, 428 bp, Zea mays
  unsure (1)..(428): unsure at all n locations
tcacgagttcaccagtgactatgtacacgattgaatttatgttcaacgagggtatggaagcgggtcgacagagagggtgtatacaacagtgttctacggaacaacgatgtgttccactggtgggactctggtaaacttcaattggttggcaccgagagcaataggaagctaacgacacactagaacaagagacaatctggcgagtactaacccgagaagggctgcccacgatgaggttctttacggcggcgctaagaacagggaggaggagatttgaggtctgtctgagttctccggaggaattgagtcgattgctcaagcgctcgtgtgcgttatgtggtgaataagcaatgctcatgctcaatttatangcagatggccataggtggatgatgtcactgagctgtaaactctctggcgagctcacc

SEQ ID NO: 27963 - DNA, 450 bp, Zea mays
  unsure (1)..(450): unsure at all n locations
agctngcacccaggtacattggtccattcctggtgattgagcaatgtggaccagtggcgtaccgacttcaactatccgaaacattgtctgctgtgcataatgtgttccacgtgtcacaattgaagaagtgtcttcnggttcctgatcgaaccgtggaagtaacggatgttgccctggaaccagatttaacatattcggaacatcctattcgagttctggatcaaaaggacagggttacccgaagaaaaactatcaagttttataagatactgtggaaccagcattctgaagatgaagctacttgggaaactcaagacttcttgaataagaatttcccaggctttctggcctcatgtaatttgtaaagtataccacattgttgtaataaaggaatgaacccccacatcacccctgccttgtaccagaaataagggaataaaaatgtgatgt

SEQ ID NO: 27964 - DNA, 470 bp, Zea mays
tgaagccatggtaagtagcataggctaataatatatgaattgactcaagcctagctacgggtgcataggtttcaccaaaatccaaaccttcgacttgggattatcctttggccacaagtcgggatttgttccttgtcaccacaccatgctcgtcttgcttgttgcggaagacccacttggttcctacaacattttggttaggacgtggaactaaatgtcatacctcattcctagtgaaattgttgagctcctcttgcatcgccaccacccaatccgaatcttgtagtgcttcctctaccctgtgcggctcaatagaggaaacaaaagagtaatgctcacaaaaatgtgcaacacgagatctagtggttacccccttatgaatgtcgccgaggatagtatcgacggggtgatctcgttggattgcttggtggactcttgggtgtggcggacttggttcttcatactccttg

SEQ ID NO: 27965 - DNA, 443 bp, Zea mays
agcttcatgcatagttaagatagatgatgatggtggctacaaagaaagacatctatggaccctactagctactggtttgagtacccgagtgaattccacttttttttagagttaccacaatctgattcgaggatagaatgcaagatcaccgatattcatcttatctggttaacagtggcggatccaggattggatcaaagccggggctataagttaaatcatgtttggcgaagccatcagcggccattttaggggtaagtgccacgacgacgttctcgcgggcctgatgtactagtgtgctacagcaggtctgccatggtgctgcttgcagcaggggcgaaaccaggatccaaaattagggggacaaaattagattaaggaggctcgtagaagcattttttgcactatttacatgagaattagctaaaaaactaacatgtcct

SEQ ID NO: 27966 - DNA, 465 bp, Zea mays
  unsure (1)..(465): unsure at all n locations
ntagcttcacttccccctgtatctgcaaggctatatctgatgtcttcatcttccatcatcacctgcagatattgttcttgtggtgacgacttgacaattgaccatgttattccgatctcgcgtggcggtaaatgggaatgggagaatttggtaggcggttctagtgctcctattctaatctactcgttttttcccccaagtttgttaggcatgtccatcttttagttntaactgaatctgtgcaggtgactgcctgtgcaagatgcaactccaggaaggggcagaagacactggagcaggcaaacatgaagctgcgcaagatccccagggtatgtcatgtggcatctctgccttcctcactggatcctgattgnatgtttgctcttgctggaacaaggttgcctgtgattgcggttgatgctgactgaatcgcactgcangcgcccaatgagtacgatatcatgg

SEQ ID NO: 27967 - DNA, 442 bp, Zea mays
agcttgtgaagattcttcatcccaacatgggctattctgcggtgccatagccaacccatgttagtcttagcaattaagcaagtgtcgagttcagctctatcaaaatctaccaagtatagctgaccctctaacactcccttaaatgctattgaatcatcacttcttctaaagacagtgacacctacatcagtgaatagacagttgtagcccatttgacataattgagatacggaaagcaaattgtagtctaatgaatctacaagaaaaacattggaaatagaatggtcaggagatatagcaattttacccaatcctttgaccaaaccttgatttccatccccgaatgtgatagctcgttggggatcttggtttttctcataggaggagaacattttcttctcccctgtcatgtggtttgtgcacccgctgtcaatgatccaac

SEQ ID NO: 27968 - DNA, 406 bp, Zea mays
  unsure (1)..(406): unsure at all n locations
aaattgttcttctgcttaacatagntggccctatggataccaattgatctatagacagccggaaacttggctaatttattatgactatggatgagacttttgtgatgtaattgatgagactattgatttaaatattgttatatgattgtgtgataaatgtttatatgaaaatatgttgcgttgttgatatatatgatatgttgtggaatgtggtgtaaaataaaaataaacaacatttgtaatgctggtcaaattaacttcctagaggccaattgggccgtaggaagttaacttcctaggggctacagtcagccataggaagttagctaacttcctaggtgctacagtcagccgtatgaagttagtcagctgactgcgctgacggcgtgaagctactatcttccga

SEQ ID NO: 27969 - DNA, 419 bp, Zea mays
  unsure (1)..(419): unsure at all n locations
agctntgaaggtagagcaagctttaatagcagtttgtacaaagcaggaaatgtcatacttaaactaccggatgtcgcctccttttatacctgtagattnttaaaatctaaccgttgtacttgcctaaatctggaccccatctatcaaggtgataataagaaaatgattcataatgagctttggtgaggtgtttttcgtaccttcagcacaaggcctcccaatttcttttttttgtgatctaagctcgttatgaagaaatgaactcatttcacaaggggctactattaggggcctattatgccgaagatcctcatttaaccttcacttcgacacaaacgtgtgttttaggtacacttcaactaatagacaaagctgaccttcgatcgaaacaacatataaagaagcttcgcatatgtatg

SEQ ID NO: 27970 - DNA, 453 bp, Zea mays
taaaggatactattcaactaaagtaagaagaagttgatcataggccaaggtatgaaaacttcctctccttcgggtgttttagtattctatccttagtgggatgtaccatagtataggttaaattccttgcaatataaaatgttcaatagtgcatataactttgacatcaactatatgtgtgcactaatttaaaggaatttagtctatccttttgggtttcaataatgatgattcatttgccatccacatataaggatcatcatttgtgaaaccctctcttgtgtttctaatgctctattttctaagtgtttcaacaaggtcttcccaagttctttgaagatgaattcaaaatgtacaaatataagagtcttggttctttcaatcattgagtttcaataggtctcatatcaagtatgatcgaatcaagaaaagatgaaagaagttcaagatcac

SEQ ID NO: 27971 - DNA, 338 bp, Zea mays
  unsure (1)..(338): unsure at all n locations
agcttcancgtcaagtgagagtgtattgctgtggtatttaaaagtctatcacagggatcagctccactaatgtcattctagacatgcgatcattacaaaacctgggaacatagcaagagagagccattgcattatgatgctggaggcatgactctgttacccggtgaacttgcccgacatcacatactcagactttctgaaccccacggataagcaatgtaggaactctaagcctgtcaaccattgcatcaatatgtgtgattcttgtagggagaaactgacaggagaacgcggattcttctagtacactcctatcttcagagtgggacgtatacaaa

SEQ ID NO: 27972 - DNA, 171 bp, Zea mays
tgctagctttgatgagccaacaagatactgtgcccttattcatcaccctgccacataattggtgcgtggtgacaccctttgaatgatcttgctagataccgagaacctactgcaaagattgccacatcggctgcagagctcaacggattatggactggaatggccacacag

SEQ ID NO: 27973 - DNA, 446 bp, Zea mays
  unsure (1)..(446): unsure at all n locations
ctgcagcttctaagggagaacacattntgggactaacatatgttcattntgagaaagacaggggttgtagcgcatgtcaagcaaggaagcaagttggtgttcattattcacacaagaacattatgacaactgacaggccactcgagcttctacacatggacctattcgggccgatagcttacataagcatcggcgggaggtaatactggctaattattgtggacgattattctcgcttcacttgggtgttctttttgcaggaanaatctcatacccaagagaccttaaagggattcttgagacgggctcaaaatgagttcggcttaaggataanaaagattagaagcgacaacgggacggagttcaagaactctcatattgaaggcttccttgaggaggagggcatcaagcatgagttttcttctccctacacgccacaacaaaat

SEQ ID NO: 27974 - DNA, 432 bp, Zea mays
agcttgacaatgaggagatgacgctcgtcatcaagagctttcaccatatcctcaaacaaaggagggggaaagactacaagtcccgctccaagaaggtttgctacaaatgtggtaagcccgatcattttattgctaaatgtcctatatcaagtgacagtgaccgaggcgacgacaagaaggggaggcgaaaggagaagaagaggtactacaaaaagaagggcggtgatgcccatgtttgtcgggagtgggactccgacgaaagctcaagcgactcctccgacgacgaggacgccgccaacatcgccgtcaccaagggactcctcttccccaacgtcggccacaagtgcctcatggcaaaggacggcaaaaagaagaagggtaaatccaactcctccactaaatatgagtcgtccagtgatgataatgctagtg

SEQ ID NO: 27975 - DNA, 480 bp, Zea mays
  unsure (1)..(480): unsure at all n locations
actaagctttgcgttctctcaatatgggtcaagttttacccctctaatccctatttatggttaagntccctatccagggttctatttgcaaaatgctataacaatacaacttgtttgaaatttttacctagtgaatgcactctatgtgtgtcaaacatatgcaatgccaatgcttatgatgccatgcgcagagtttagttacagtaacaccaggggtgttacatgcttccccccataaaagaatctcgtcacgagattaaaagtcctagggtaagtaatggaaaaggaaacatgacatacttttatctccttatttctggtacaaggcacgggtggtttgcgaatcactcctttattacaacagctatacatgctttacagattacaagaggctaataagcctgcgaaattcttatctaaatagtcttgagtgtcacatgtcacctcatcttcagaatgttggttccacatgtatctata

SEQ ID NO: 27976 - DNA, 450 bp, Zea mays
  unsure (1)..(450): unsure at all n locations
agctngatgaagtgactcacagtgatgtcctgtatgatgaagtgttgactattacgatgcctaggaaacttaacaactaccctcgcaaagacactctntacttgtggtaagttattgaaaccttgaatatcgtcaaatagcacgaaactacataaaacacgaactttatcttagattcttcattaatatatagatagatagatgtgacaagtgaaccatgtacttacggaggaaagggacgcaagtctgcaactgtcctaatttggttaagtgtaactgatgtcattgatcctataggatcgatcatgacatcattgcaaagatacaaaatatcatgaaaaggattagatgagataacaganaaacaatagtagtgtaacacatgtaagaattttattggaaaaattgcacatgtcttatgttgatttaacttgaccgttatttatgttt

SEQ ID NO: 27977 - DNA, 471 bp, Zea mays
  unsure (1)..(471): unsure at all n locations
ngacaagaacggaaggtgatnttttgtcaaagactcanaagcggttcttgtaaagtttcatgcatcgtaaagaattaagcaagaaaaaacaggtatattacattcagggttacaaaatgttacaatatattacatctcaaaagtttttacaataatacttaatcctctctcaaaacgacttctgcagcttcgtttaggagccgattgacgacttcgtccataatagcttcagccatcttttttatttcgtcgtctcctttcggctgaaggtccgaaggggctttagcagaatctgaagtagaacaggatacagctacattgctatgataaattgcaaacgaatcttaaaacctaatattacagcacaataaaaactattagataatacctaattgaccttcgggctctgcactcttctcagcagcctcagctacttctctagcatcgtgaatgcccttgtcgcttctttga

SEQ ID NO: 27978 - DNA, 393 bp, Zea mays
  unsure (1)..(393): unsure at all n locations
ctgcagcttcttaattatttttcttctatatttctttctcgatacgccgcaataaaaaaaaggtggctctatctgtcattgtcggtcctccttattgtgatcacctctaattgatgactgctataagcaaggattggcctggtgtggcatgatgtattcttggtagccaaagacagtatggcatgatgtattcttggagcctataatatctttgctaaagngcttctatggtaaatgaatgtagtgcagttttatttttgctcaattgtttctatgctacttcttatgtagttaccatgcataatcatctgagaaagtggcttttcctatctacttcacatttcatggtgatgaataatgaatatacatgacgactcggccgtatgttgcccc

SEQ ID NO: 27979 - DNA, 470 bp, Zea mays
  unsure (1)..(470): unsure at all n locations
tcggcttcaggatggaaggttntccccatgacaaaggcaaactaagtgaagatataatctgaagatgataagaatgaacgccgaagctacaagcaaagagtaatagcttcggcttgtaatgatgatgaagactgaacatgatgttggtcaaaagggaaaaaactaactaatccctaataatttaggttatggtcataagtaaatgtcagtgacacaactgtaattttacccggactgcgtcccgtgtctataaatagataaacagtagtgtcggtgaccataattaggggtaccctcaagactcctaaatctcagctggtaacccccatcagcacaaagctgcaaaggcctgatgggtgcgattaagtcaaggatcggtccattcgagggacgcgatcacgccttgcccgagcccagcctcgggcaagggcagccgaccccggaggaattacgtctcgcatgaggacccc

SEQ ID NO: 27980 - DNA, 445 bp, Zea mays
agcttgtgaagccaatcacaagtgtgttgaagaatgacatctagttcaattggtcttctaagtgcaatgaagcctttgagcaactgaagacactattgaccactgctccggtattggctcaaccggacatcactaaaccttttgacatctattgtgatgcatctggcagtgggctcggctgtgtactgatgcaagagggccgagtgattgcgtatgcttcaaggcagttgcgccggcatgaggagcactatccaactcatgatctggagctagctgctgtggttcatgccctaaagatttggcgtcactatctgctgggtaatatctgtcacatatatacagatcataaaagtttgaagtacatcttcacccaatcagagttaaatatgaggcaaagacgatggcttgagctcatcaaggactatgaactggagatccattatca

SEQ ID NO: 27981 - DNA, 459 bp, Zea mays
  unsure (1)..(459): unsure at all n locations
ggactcaggtatccaaacattaatccttaattcattnttcccgtctcatggacaaggcatcctccctagatccaagtccatagaccaacataaatcccattatcaagatgaatacaatcaattcctgacctcgcgcgagtgctagaaaaatcactcgacttctaccgagatcctgattagcaagcagctactcgacctagcatactagtattcatctcaaaaaggaatcctaagttcatgcaactagaggtttcaagcaactcctacacttaagtgcacattgcaatcctacaagcattaagtgtagtaaagtagcatataataacatggttatgcataagaccggtgcatgccttcaattgctggggctgcggggagatcctcaatagcagcctctgaagcctgctcctggtcctcctcttggacaggtccttgctcggngatgaagcacgtactctc

SEQ ID NO: 27982 - DNA, 216 bp, Zea mays
agcttccttcgccaccaccattgcaacctacttatacccgaagccagcagccagaagggcgccagcactcccaacaacgtgacttcagggaggagtctgaagctcgtacagtcaacaacactgtaccagaatcaaagcacatatactgagcaatatccttgtcggcgtttcgaccctggggggtccctggaccgacgagtaaactgtcactgcgtg

SEQ ID NO: 27983 - DNA, 333 bp, Zea mays
gacataatttaaatccccctgctgatcccattcatcaatatagtcacggtggtgggtctcaaagtccatgaccttcttttggctctgtctgtcgaacctgcaaaagttatacacatatattagtaactaattgcatatttgaaataatagttagaataactagtggacaaagtcactcacttgtgaagttgtattgaagtctagaacggctcaaccagaaacttctgtcgcaatccgaactgtctagcaactctgtggggcaagtggtactcaacaacataaaaacaaatgaggggacacctcattaggtagatgttctcgtctattgagcac

SEQ ID NO: 27984 - DNA, 431 bp, Zea mays
tctaattctttactcatctatttgtacgcacgcgtttattttatgactatgaagcgtgagtttagccacaactagagatgacaatggtgacccgattccccgcgggaatttccctattagaatatgagtatgagggtaatttagtccacacgaggatcaaaattggaaaattactccacgggttttctgcgtacccaccacaagaacatcccttgatctaaactagtccatgatggaataagtcttgagcatctagaggacaacagtcgcttttgactgtcctctgtagtcctttagcatctagaggacagcttgactgtcctctgtagtctctttagcatctagaggacagcagtcgctttttgactgtcctctgtagtcgctttagcatctagaggacaacagtcgtttttgactgtcctctgtagtct

SEQ ID NO: 27985 - DNA, 458 bp, Zea mays
  unsure (1)..(458): unsure at all n locations
tgtctaanattagcgaaggtctcttgcagatcagcaatgttattatcttgcttcgtgctttttacaatgatatcatcaacataggttagcacattcctgcctatctgagaatggaggaccttcgctgtcattctgctgaaacttcctccggcattcttaagcccctcaggcatccgaaggtaacaatatgttccattgggggttatgaagctggttttcggttcatcctccttcttcatccagatttggtgataacctgaatagcaatccagcagactcataagctctgatgaagctgctgcatcgactaaggaatctattcttggcaatggaaactcgtccttcggacaggccttgttgagatcggtaaaatcgatacacattctccatttaccattggccttctttaccataacagtgttagccaaccattctggatattntacttctctgataac

SEQ ID NO: 27986 - DNA, 415 bp, Zea mays
  unsure (1)..(415): unsure at all n locations
agcttgtaacccctaccgcaagcaccccggtgcaagataatataagcctcatccctcctcttgtgtttcatcttgcatcaatccatctgggcagggacacgcggcacaaaaagtattggctcggtgcagccaaaactctgcccagtctagcacaccggactgtccggtggtgcaccggacagtgtccggtgcgccaggctgaactccggtgaacaggccactctcgagaaaagttgatggcgtacgactataattcaccggactgcccagtggtacaccggactgtccggtgagccaacggtcgactgcgccaacggtcggtcgcgcaatcttcacgtgacgcgtggcagctccaatggtcggcgggggggcaccggacagtgtccngtgcgccatcnggccttgagttgcaacg

SEQ ID NO: 27987 - DNA, 397 bp, Zea mays
  unsure (1)..(397): unsure at all n locations
ngcccctcgttacattggaccttatgagatcatcgaagcatgtggacccgtggcatataagttgaagttaccttcaaggatgtccaccattcacagtgtgttccatgtatctcagctgaaaaagtgtgttcgattgccgaccaagatcttagcagagccagaattggagatagaaccagatctatctatcggcgtttcgagacggggaggtccctgagccgacgagtgaagtgttgccgcgtgccccagcccagatgggtcgacgcgaggccgagcgcgaaggggggaagtgaggtggccggagatgggcgtgagagaggtggaaatcccgcggccttcgtgttcgtcccatgcccaggtcgggtgcgcttgcagtatggggttacaagcgtccaca

SEQ ID NO: 27988 - DNA, 440 bp, Zea mays
  unsure (1)..(440): unsure at all n locations
agcttgtgcaaagtccgcttgagctaatcttcggttaatcccgacctcgttgcaacatgacaccagaaggtccaacccaacaagcgttggatgaattcagaattattgcagagcatatcagtacaagagacctcggtcaggagtttttggctttcagggtttttcctagtttaaaagaatgggaaatgccgaagctagagggggagaaaaaagaaggggaacttgtgcggttaccttactattacaangttaagaaatactttaaaacaccttgccaagagtggttggatacaattgaaataatgtgcaatgaaatactcggcaattactccaaaaaagaagatcagttgatgactgcggccttcggcacccgttcgaagcgaagactgaatcgagtgctggacgccttgggctttgaataccctgactacgaaaatctg

SEQ ID NO: 27989 - DNA, 467 bp, Zea mays
  unsure (1)..(467): unsure at all n locations
tcgataccagctgtggcggaactgcccgaattattccgacttaagtgcctaagtcccgccttagaggctagaccacacttaaatgggaataacccgtcaatccctcggatctagtccgacgaggccactgacaggatcaagtaccacaatctcactcgatggtgagtcacagagcaaacacaataaagcataaaaccatacattaaggagtattaaatttatttacatcatcatcggagtttttgcaaaagtagtcatcattattcgaagtgcagcggaataaaactaacgataattaaacagagagatggggaagcttgtcccatcactcctcatgctcctcctcagccgaggcaggatcccacccgactgtccaacccggtggcaagatggacggtcaagtcactccagcaaccatgtcctccagagaacctgtanaaattatgccacaagcaatgctgagtata

SEQ ID NO: 27990 - DNA, 444 bp, Zea mays
  unsure (1)..(444): unsure at all n locations
agcttctgtatgcagtgatcctgacacggcggaagttgcgacactacttcgagtctcatccggtaactgtggtgtcatccttccccctgngggagatcatccagtgccgagaggcctcgggtaggattgcaaagtgggcggtggaaatcatgggcgagacaatctcgttcgcccctcagaaggccatcaagtcccaggttttggcggacttcgtggccgaatgggtcgacacccagctgtcgacggctccgatccaaccggagctctggaccatgttnttcgacgggtcgttgatgaagacgggagtcggcgcatgcctactcttcatctcgcccctcgggaaacacatacgctatgtgctacgcctccatttcccggcgtccaacaatgtggctgagtatgaggctctggtcaacgggttgcggatcgccatcgagctagggg

SEQ ID NO: 27991 - DNA, 424 bp, Zea mays
tcttctcgtcatcgatgagcgacgacaacgcgaatgcctcctgctcatggagtttgttcggggtttgaagtatgaaacatggattcatgcttggcgttggtttatgaaaatgactcacaagtctgatccatggaaaaaatattacgaataaaaaataatattacctccatccaaaaaagggaatttaagtattatgcattattcaaacaaaagaaatagcatacaaagctcttctttaaataatattacctccatccaaaaatataattcaagaatatcggtgatgtagtagatgtgtttcctgtcatagatgtagacataaacacatataggtgggtgctcgtgcgttgcaacgaaaacatttaatatcatgataacttatgaacaaatgtgtgttatactgttatgtgaaaatgtttcgtaa

SEQ ID NO: 27992 - DNA, 156 bp, Zea mays
agccctgcttgccttctgtctgcgggtgccacggactatttggtgcacaccagacaatgaacagtgatcaattcccttcctttcttggcgaaatcgaacgttgccagctgttggccctatggcacaccgggcagccacgggggcacacccgacaag

SEQ ID NO: 27993 - DNA, 451 bp, Zea mays
tcgtctatctgcctctgcagctcagctagcctggccatcttctccttcttcctctgcacctgttgatgtagcatctccatgtccctgatctcttggtctagttcatcctcctgaatcgtcgggctgacagccttcctcttctggtttcgggcctcccggagagagatggtctcctggttggggtccagcggttgcagtgctgcagccccagtcgctgaagctttcttcggtgccatagcgagggtctatagcttccgaaggtgttcaaaaaactcgaagtggaagtgagttcaccggaggtgggcgccaatgttggggacttgttctcaaatgctaagaattaagaacaaggcaacataaaaagtgttaagtgttaaagtccttcgtccttcgaagcattatgtcccttcgggagataatgagtttcggacgaaggtcataagagacatac

SEQ ID NO: 27994 - DNA, 444 bp, Zea mays
  unsure (1)..(444): unsure at all n locations
agctntccanaaagtccaagatcatcaaaatcggagtttggagctaaacgttatgcccacaatacgaagtcagaattgctgaaaaaactgcagcagcatatgggatgtccggtgcacaccggactgtccattgtgccaaatttgctcaaactggtacggcttcaactctgggatgtagagaatttcataagctttccaaaaagtacaagatcatcgaaatcgcggttcggagctaaaagttatggccaaaatacgacaagcgagcatgggctgtctggtgcacaccggaccatccggtgcaccatcttcgaaagctccaatggctacctttaacaactagtacacgtggcatgtccggtgcacctgtccagtgtgccacagaaaggtgtagaactactttccaacggctatatctgagttggggcctatatatacttcacccca

SEQ ID NO: 27995 - DNA, 435 bp, Zea mays
  unsure (1)..(435): unsure at all n locations
gctcctactcttctatccccctattgtgaagcgccctagatcctctgggactcaaatgtgatacaattactagtcccaggaggctagtaaacacatttatacatcagatgattccagatctgcttaaacttgacaaacctataaaggtggcgatcaactttaagagttggtccacaactcgggacatatcatcagagtggggctgaagcagcccgatatacgcagcgaagcaaatcagcgatccaacagccatagacaaggttgggaacagtcgtaactcttacccgatctcctttttctgaanaacaaaaatgagcaagggtgagtacaaacgtactcagcagcccaccttcacccgcggaatggggaaatcagatataatgcatggaatatgtggagctcacgatattntgcagaaacaacaatantttatgc

SEQ ID NO: 27996 - DNA, 414 bp, Zea mays
agcttacaccttaagctgaaaacctgccaagcacctttgaatacattgagggcgaagttgatgcacttgacgaagttatcgctgggcatgccgatttctgcgccctgttagcttctcgaggcacggctactgctttcctgaaggctggctgcacgcacgggaaaattgttaataagccaaacttcaatttgtcgccagcagatttgattgacatccccagcctagctcgaagcataggaaacaggtttatgacccagatttggataaacagcgggcgaaaaatggctggtgacgaagctcggagccaccttaagccagtaagaaacttatacttgttacttttaccttctccttgaactctgcgcctttctcattctgttttaatatgtacatgatgatgaagctaaagaatga

SEQ ID NO: 27997 - DNA, 478 bp, Zea mays
taagcttatggccactagcgaggctagccgaagcactggctcgatttgttgatggctggagtgggctggccacggtggccgaagctctatcggcgatggcgggcggaaaagagctcgccggagctaaggaggggtggctggccggtgatggtgagcgcggtgtgaagtgaggcgcgcccggagaggctatataggcgcgggcgggcaccgtcgagggcaagagcgcgcggcggacttgaccgaacgccgggacgaacgtgtgcgcgggttgggcgagcgccggcgagccgaccagggtcgaacacgtgtgcccgtgcgttctgcccaagttctggcgcgtgtggtcgcccatccaagcctgctctcgccttggtcagtgcacaaaacctcttctcttcctacaagctaccgatcttgtgtgggggtcataggattatgcctactggttgtagagatatggagcccggaaatccggtct

SEQ ID NO: 27998 - DNA, 178 bp, Zea mays
  unsure (1)..(178): unsure at all n locations
ttaactctaatgnagcatgcgagcttcacaccactcgaagaagaagatgagtctttgttctcatggtcaatgttgctgagggaggcgacgaacgtatgatccttggtctaggccttttggacgtacatcttcatgagcgcctccttgtgagacctacgcttaaacttgtgctaggctt

SEQ ID NO: 27999 - DNA, 418 bp, Zea mays
  unsure (1)..(418): unsure at all n locations
tgagcccctggcgtccaatcgactatgaagactgctagcgcttgagaatagatcgaggatctatgaacaaaatcaatggtgaattcttagagctctacagcccatttgccaacccttcctatagcttctctatttcttatgatgcccttcaacggttgagagcatttacgaaggtactactatatgatgggactgaaaataatgccgaagcttcctagaagccatcaatacagcatacaggaccttctccaattctgtgtcactcctttntgatggacttaatacttcaaagacaaactaaactggggcctgcttctttgattggtcatcttggttttcttgaactagcgctgcactgactacagagtgggaagaagctacatacaatagcaacagagctcctgatgaaggtggagtc

SEQ ID NO: 28000 - DNA, 335 bp, Zea mays
  unsure (1)..(335): unsure at all n locations
agctngcataggacaattgggatattctctttcatttggtgcaaaacatctaatttaaaggtcctatcgcataattgctggaaaaagttacctagttcaacaattgctacatatatttcatggggcggtggtgctcgaagagcagcttgtaaaatcccttgaagtatgatatggcaatcatgaagtttcaagccttggaggttgcattcctcaacagtgatgcatgatgctaggttagaaacctaaccatctggaaaccttacacttctcaaanaatcataaaangctaccttttgaattttatcccatgtattaggggcattaggaaccacata

SEQ ID NO: 28001 - DNA, 488 bp, Zea mays
  unsure (1)..(488): unsure at all n locations
cttagcgtatcgctagacaaacgcacatgggcggcagctagcacacacgcatgcgctatgcgtgtatcaatctgcatgcgcaaccacaacgccatataaagaattgctattgctcagcaaaaccgccagtaccaacacacatgcacacaggctcaagcacaagccgacaagcacaagccgagcgtacgggtaaggaacacctgacacgttaaataaatcataataggaccaaaatatgtgttagcattcttacatcattagtgcaactaaaataaaggagggacaaaaaataaaatttatatggtttagtcccttttaatcaccccttaaaggactagagaataaaatagtntagtctatattttagtccaaaccgttagcaatttagagattaactaagactaaaatggagacattaatcgttagcccctcgaacacgctgacaggcatgcatacatgcaccaagtgcaagcttccaaccgatacag

SEQ ID NO: 28002 - DNA, 323 bp, Zea mays
agcttgcacctcggtatattggtccattccctatactttagcaatgcggaccagtggcgtatcgactgcagctccccgaaacattgtctgccgtgcataatgtatttcacgtgtcacaattgaagagagtggcggggggttcccgatccaaccattgaagtgacaaatgttgtccttgaaccatacttgacctattctgaacatcccattcgagtcttggaccaaaaggacagggttaccagaagaaaaactattaaattctataagatacagtggaaccaacattccgaagatgaggctacatgggaaactcaagaactttt

SEQ ID NO: 28003 - DNA, 332 bp, Zea mays
tcacagcttaggctttgtttcaatgcactcatgaacatgaggagtatcttcaggcatacctccgaaggttcttgcgtctgagagcacaagtgcctacagtgcccaatgaaattgtcattgaggccatgatcaatgggcttcttccaagacctaccttccaatattttgctataaagcctccacagactttggagaaactgcttcaaaagatatatgaatatattcgtgctgataatgactttcgtcaaagaagggatgaagcttacaggttctcttagatgaccaagggcttctgagggagaattcacccaaggcacgtcagatcaatccac

SEQ ID NO: 28004 - DNA, 409 bp, Zea mays
catgcaagcttcttagtaaatgacacgcagtccatatgacagagaacactatataactaatattagaaattgattgttagtataaaaataaatcttgaaacttatttaatgtatagaaaattcattttagctccttttaaatccattcaagttacattaattatgttttaatattatttatcacctagtaactctgtttagacaggaaacatagatttaaaattggttacttaatttatcccgtgccaagtacttaataacttcggaaattcataacttaataaccgtagctccgaatttattggttctcgaacccacggtatcgtcacgatgagtatattatcattatgcagattgttcttatgtctggtgtgatgttaattttgcatatatcatgtatcgttggatt

SEQ ID NO: 28005 - DNA, 328 bp, Zea mays
actcagctaaacttcgaacaaaatactgggcttgtttttgacctggccatcatgcttctcctgtacaagcgccacactgactgcagtgtgagaggctgctacatataagagcaatggagcccctggcgaaggtggagttagtgttgtcaagtcgatcaagtattgctttaaatcttcaaagccctttgttgagaccgaccccattggaaaacttccgctgacttcaatatttcaaagaatggtaaattcctttctgctgatctggatatgaatttatttaacgatgacaaccttccttgcaatcgttgggcccctttcttcgtatttg

SEQ ID NO: 28006 - DNA, 442 bp, Zea mays
  unsure (1)..(442): unsure at all n locations
ttaagtcactgcagcatgcaagcctcgtgaaaacattatccgaatctacttttccgaagatcaatattgtatcttcttgcgacttagcatgttttccctttntcaaagcattcttccaaagatcgatattgtgtccccttcttgtgccatatgcagcatgatgtatgatgcttatgctatgcgaaatgatgtgatgatgttatgctatgtaaaatggtattcattccgaagatacacacacatccccgcgataaaacacataatcttcttaaatcagcgttgacttttcgttgtaagcctcccttaggagcttcttcgccttttacttcagcggaatcagcgtttatttttcgctgtaagcctcccttaggagcttcttcgccttttactttcggcggtattcgcgttgacttttcgcgcttcgccttttacttacgcggga

SEQ ID NO: 28007 - DNA, 418 bp, Zea mays
  unsure (1)..(418): unsure at all n locations
agctttctcatcgcattctcaagcaaagcatcgttntgatctagcttcgtcataagagggagcttcgtcgaaagcataaaaatcatcaacatttgtaagaactgcaaggaattcaacacatgatggctagagtacgttcaactgctagggtgacccgcgacggagaagaggccgaaaccacagagactgctccgatctctgaagtgatgaaacaatcgggactggttatgacagagggggctactgacgaaggtgcacctactgctgaagctgaacaggctgacatcgaagatgatgctgatgaagaagaagaagattacatcactctcatgccatccaaacccagtcacttggactttggaaaatctaccgtttctgaggctgacatgcccatgatgataaagctgggctacttcga

SEQ ID NO: 28008 - DNA, 434 bp, Zea mays
  unsure (1)..(434): unsure at all n locations
tctaaagggagaacatgtgataggtctaaccaatgttcatttcttaanagatagaccttgtgcagcttgtcaagcaaggaaacaggtgggaggagtgcatcacagcaagaatgtgatgaccacttcaagacccctggagctgctgcatatggacctcttctgacccgtcgcctatctgagcatagggggaagtaagtatggtctagttattggtgatgactattcccgcttcacttgggtgttcnttttgcaggataagtctgaaacccaagggaccctcaagcgcttcctcaggagagctcaaaatgagtttgagctcaaggtgaagaagataaggagcgacaacgggtccgagttcaagaacctttcagtggaggagttccttgaggangaanggatcaagcacgagttcttcgctccctacacaccacaac

SEQ ID NO: 28009 - DNA, 457 bp, Zea mays
  unsure (1)..(457): unsure at all n locations
tacataagaataagatttaaagcacatattntgaattctatgtttatagaatgctccccctaaatatgtgcttacattaaaatcttaactttggccttttatgccaaattgcacatacttaggctaattcgaagcataactataccttagcacctgtgggatacattatgtcaataattaaactgtgatgcgtataacacacaaatgcacagaatcagagttaaacaccaattaaatggatataccacaaaaatatcaacctaccactattcaccattaagatactaatttaaagcaccaaaaccacatgaatatcaattacaggacaaacacaatagataccaattgattcatatcacccgaagcactaattatgcattatcaccatataatacaataagaagcatatgataagtattatcaacaaaactaacaccctttgagttctttagcacac

SEQ ID NO: 28010 - DNA, 324 bp, Zea mays
agctttaaaagaagctaacgatctgtatcttataagcacacccatgtctggcttaaatgggataactagcacatgttaatcattataaacacatataagacattctttgctcagcaaaaaaggatgaagttgggaacaacttatctcaaattgattacatattaatgctgtcgtgcattcacattctgttatgcattttcctgtgtcaaacaatggtaacttcgtaatatactgcacaattacactctaaaactgttgaaagtgattatttgtgatggtgaaatcctggaaaattagttgctattggcaacaaatgtctaaata

SEQ ID NO: 28011 - DNA, 447 bp, Zea mays
  unsure (1)..(447): unsure at all n locations
tctcctgtccggaataatctaccgtatttcggacactctactttttaatagttgtagatgaacttatgcacctgtggaatgatcaactaaaccaattggttagtccacaacgtttgtgatggtcgtcaaacaacaaaatccattatatgaaatattaaaactatttccctttctactcgatccttggtaagtggctctatcggacgagatccgaaggactgatgggttattctgatttaagtgtgttgctgccttcaaggcgtgacttgagcacctaagctggaataatctgggtggttctgacacagtgtcgaagctcgatagcaattgtaagccacctagaggggtgtggatatacacaacttganattataaactttgaacacaaactttgccctgggttagagttagaatgagtataattaaatagtgtgtgaaaaaagtctc

SEQ ID NO: 28012 - DNA, 419 bp, Zea mays
  unsure (1)..(419): unsure at all n locations
agcttcggctatggtcaaatntttggcagcataacagtgcaatagcaatgaatgctgtggtaacttcacacctacccgtctatttatatagtgccgcaggtgggaaggtaaatcgtcaagtcttccgcactggacaaacagtcgccctgcacccactgaacggtgggccacagagcccgagaaggtgaatcgccaggacgcgcgtaactgctgcatggcggggccacctcgcgctcggattattttaatcgtttctcggcaacaagctcagggaaggtgttttttggatcttcgccatcttgaagcctaagagacttttcacggatcaagcttgttatgaaaaacgatctagcaccgcgaaggggctaatgttgggggtatgcttcgtagccgaagatcctgaagaaagaaacaccttc

SEQ ID NO: 28013 - DNA, 365 bp, Zea mays
agcttatgaagattcttcatcccaacatgggctaatcggcggtgccagagccaacccatgttaatcttagcaattaagcaagtgtcgagttcagctttatcaaaatctactaagtatagctgaccctctaacactcccttaaatgctactgaatcatcacttcttctaaagacagtgacacctacatcagtaaataaacagttgtagcccatttgacataattgagagacggaaagcaaattgtaatctaaggaatctacaagaaaaacattggaaattgagtggtcaggagatatagcaattttacccaatcctttgaccaaaccttgatttccatccccgaatgtgataactcgttggggatc

SEQ ID NO: 28014 - DNA, 454 bp, Zea mays
  unsure (1)..(454): unsure at all n locations
tggtgccaatggagaagcaaaaatatatgaagtcttggttgtcaaactgtttgccgctgtcgactgttagttcggacggtactccgaagcggcaaacaatgttatgccaaaagaatttctgtgcggtcttcgatgttattgtggaaacagccctcgcctcgatccatttggtaaagtattccacagcaacgaaggtgaacttgaggttcccctgagctatggacagggggccgacaatgtccaggccccagcgttggagaggccatgtgtgggcgatcagttttgtgaattgcgaagggctgcctgatcgaggagaaaacttctggcaggcttcgcaggaccttgtgnacccgattgcggcgcagaccattacgggccagtagaaaccttagcggaccacctttgcggcgagggcccttggccctgcgtgggagccgcangtaccactgtggac

SEQ ID NO: 28015 - DNA, 96 bp, Zea mays
tctaactcaaccgataataccgctcactttcaccttttttcttttacacccaaaatcttttaacccccctaaaataattctaccttttggcggtag

SEQ ID NO: 28016 - DNA, 373 bp, Zea mays
  unsure (1)..(373): unsure at all n locations
tcgcgcgccctgctacctacactagccgtcgccgtcctctgattaccccctctctctaactcgcgtgtgggccccacccccgccctcctctcatattctctctcccttcctataaaatacgggactcccttactctcttccaccctgagcttctctctccctactgagagcacctagaggaggggtgaataagtgatcctgtnaaacttaaaacttaaaaccacaaacttgattaagagttagaacaatgaaatcaaatgagtagagatgagagctcttgtgaagcacaatagacacaataaggacaagcacaagagacacgatgatttatcccgcgggtcggccaagtacaaaacttgcctactccacgttg

SEQ ID NO: 28017 - DNA, 372 bp, Zea mays
agcttgagccaggctcactggcttaccaagaagctatctggcggcttgaatcgaaccgaggaggacgggagaggggtccgtcactgcggttgctctcgggcggtactggcgggctgccgggaggtcgcccgaagcaatggttggctctggcaagacacgctgcgtacggaagaagccatggggaaagcaaccgacgcttgcgcgggttttatatgcgcggacgcggccggagccgtcggtcgaccgtttggccgacaccgtcacgcagagcgcgcgcaggcgtgcccttgcgagctcagagcgccgtgaacacgtggcgccgtgcttctgcccgtgttcttctctctgctgaacggccagcggacaaatgtt

SEQ ID NO: 28018 - DNA, 439 bp, Zea mays
  unsure (1)..(439): unsure at all n locations
tcgtactcagcaatgttatttgtgcaactgaaatcaagtcttgctgcgtagcacggtttaactttggagggtgcgaccaacacagcggctgctcctgccccgaaggttccccaagaaccatcacagaatattgtccaaacttcggcgtcttcactcgcttcttcttcctgagcccctggcgtccagtcagcaatgaagtctgctaacgcttgggactgaatcgaagatctatgcacttaatcaatgcagaactcattgagttccgcagcccattttccaacccttccagtagcttctctatttctcataatatccttcaatggttgtgaagaggggacaattatatngtatgctntgaaataatgtcgaagcttcctggaggccaatcaaacagcatacaacacctttctccaatcttgataatntttcttaataaact

SEQ ID NO: 28019 - DNA, 414 bp, Zea mays
agctcgattacccgctctttgagcaaacttgataatagattgccttgacctttagggtcggcttgtggaggattacggttggaaaagactcggccctttgtgggctcctcaacgaggagtaggacacctttgtggtggttgccgaacctcggttaaatcgtgtgttcttgtgcgttcttgttaagtgccttaaattgttggctggttcatattcatctgtttgagcgaattttctgtagggcaagtcattagcaaaatctttcactacttcgtcatatttgtttaactgaatatttaatctaagttgagcaagttcaacctttgtcagttgtaaacaaaatcaactgaaccggtttgcaccagtgcaactttaatttgacctatctcgaaatgttttagttgaaaatttcatgt

SEQ ID NO: 28020 - DNA, 362 bp, Zea mays
  unsure (1)..(362): unsure at all n locations
acccagtcgagctgagctctgcatggaaacaccccattattcatggtgtatgggtcggaggcagaactaccaaccgatctgatctttggggcacccagattaacctttgaaagcatatccgaagcagaagcaaccaagcttgaggacatcgatgtactggaggaagaatggctaaatgtggtaatccaatcggccaaataccagcagaccctgaggcgctaccacgacaaagcggtgcggcatcgatccttcgcagtgggagacttggtcctccgtcgagtactaacggtggagggacgacacanactgtcgccaccatgggaaggaccgttcatcattgcagaagtcacacgaccgggatc

SEQ ID NO: 28021 - DNA, 351 bp, Zea mays
agctttctcgactaagtcggggacagggccttattgacgggtgatagtacgcgtaaacggcaaggcctaccgatccgagggattcccacgcctctgggatacagataccttactcgtcccttccgcgagagagcgggtggtgctcacacaaacattcctgttacccacaaaattcatattctctaaacaggaagataaaaggcgcaccttctcaagtgcaccgagggtgttttcttcttgcctctgcggccgcaagaaacacacgctacaagatgatccgatcctgcaggctctggtcttcacgcccaaaggagcttttacacccttcttatctacgacatctttatcaaa

SEQ ID NO: 28022 - DNA, 354 bp, Zea mays
atgtatgccgttagataatccaagtcttctaattctttatcttttgtgaaaccgcatttgaaaagaaacacatgcgtgtgatgacaactttgacaagctctgtttccagggctcttaaccgaaatgggaggaacaccatcatcattacatggcagtcatgaaagttgtaaccaaatatagacaaatccttcatactgactagtctgctgatattggatgagaaacctgtgggcactttgaccccacgcaaacatttgcaaatctttgttctcttctcaactgacaagtatgtactagctggggggaggtaaggctttcctttgccactatacactggatgaagactccggctga

SEQ ID NO: 28023 - DNA, 408 bp, Zea mays
  unsure (1)..(408): unsure at all n locations
agctntaacccncccgcgagaccttntcccgtttttttctaaccataataaatgtgatatcggatgtcatacttgatgcatattcactttatttgttcccttgtatgatgtactgtttgtttcccaatttgaagggaggaaggtatgtatgcttgcaatctcataaagaacgatcccgtccaatagcccgatgaactcgcaagagaaacccctgagcagcaatcgtttggtggaggcaagtgtcccttgacctatctatgtcctattcattatttaattcacctcccgcttacacatttatgcctaaggattgactagcttttgttattcatgtccttgttcacctatatgggttggattattattagatagctttatgctattgcttaactcttatcaataaacatg

SEQ ID NO: 28024 - DNA, 357 bp, Zea mays
  unsure (1)..(357): unsure at all n locations
tncttacgcacagctntggctctggtccatccttcgatctctttgtgtttcttcatacaacaattatgacttgtccgaagggttcgtgttccgaagtacctgctcatgtattatacaccggaaacattgtcaaatcacgtttttgaggaccttcggaagccgaaggcccccaacagtgctgccatgtatgcaaagtgcgcactaaagcgtaaagctccttatcataagtagaatatttcagactagcaccgcttaatatttcactaaaataagcaactggttttcttctttgtacaaaacagcacctaacccaataccgctagcatcgcattcaagctcaaacactttattaaaatc

SEQ ID NO: 28025 - DNA, 399 bp, Zea mays
  unsure (1)..(399): unsure at all n locations
agcttcttctcgtcatcgatgagcgacgccaacgcgagtgccttctactcatggtatttgttcggggtttcaagtaagaaatatggatacatgcttggtgttggtttatgaaaatgactcacaagtctgatccatggaaaaaatattatgaagaataaatgtcatgcatgcataaaagggaatttaagtataaaacattattcaaacaaaataaattgcatgcaaagctcttctttaaataatattacctccatccaaaaatataattcaaaaatctcggtgatacttatctactactacgcattgtgcaagggtagcaagtgagcttggtgagagatgtantagatgtgtttcctatcatagatacatacataaacacacatgtggtgtagcggtagc

SEQ ID NO: 28026 - DNA, 369 bp, Zea mays
  unsure (1)..(369): unsure at all n locations
tgagtgggactccggtggtgtggctacctcgtangtcatcaagaagcaatctcctaaggaaggcctgcaccctctggctccaaccacctggtgctgcctgaccggtcactggacgacccatactgctgagaccaagaatcttctgacaatcttgcagcgttacagtcatctcaccgcatggaatgtggaaagtgtgagtctctggtcgccacctattggaagacaaaccaataccaaatcattagtatgccaaagagatgtgattactgttaaagttaaaaaatatataagtctttacctgtcgaccagagccgtcaacgccgctggggtgaaagtggcagtccacgacgaacctggaacgatatgaca

SEQ ID NO: 28027 - DNA, 397 bp, Zea mays
  unsure (1)..(397): unsure at all n locations
cattccattatgttctatncggcgatgccagagccagcccatgttagtcttatcaattaagcaagtgttgagttcagctctatcaaaatctaccaagtatagctgaccctctaacactcccttaaatgctattgaatcatcacttcttctaaagacatgtacacctatatccgtaaaaagacaggtgtagcccattttacataattgcgaaactgaaagcaagttataatctaaagaatctacaagaaaaacattggaaatggagtggtcaggagaaatagcaattttacccaatcctttgaccaaaccttgatttccatccccaaatgtgatagctcgttggggatctatggttttcttataggaggagaatatcttcttctctcctgtcatatgg

SEQ ID NO: 28028 - DNA, 412 bp, Zea mays
agcttgcttcgaccgaggggtcttttgtatcttcaacagataaagcagcttcggttggcgccaaagattttacatgatcgcaacctatcttctccaagacagctgcaattcccctcgcgccacagaaggcgcagacgtccccatggccactcaaaacttcctcaaaagcttcggcttcaccgctgatccattcaattgggcccttagaatcgcctcttatgaagttgtcctcgctggagtatgcgccaaccttggcgaagctagtttttatttttctcatgcattctatggatttttcataatatctctctttcgaagagcgtagttctacaactgtcttctcccaataattcttccagtaatcactagcgtctcggtcagcttcagcaatagcacatttcatatttgcttc

SEQ ID NO: 28029 - DNA, 396 bp, Zea mays
  unsure (1)..(396): unsure at all n locations
tgccaatacttgtcanagcaacaacatctttcttacagttactgcagaccataccagtaacttggcctttcgcatgctggggactggatatgattggacctttcaagaaagctcaagggggatacactcatgtattggtagcaattgacaaattcactaaatggatagagttcaagcccattgcttctttaacctctgctaaggctatggaattcatacaagacataatattcagattcgagataccaaacaacatcataactgacttangatccaacttcacaagtttagagttcttcgacttctacgagcaaaagagcattcagatcaagtatgcatctgtagcacatccaagaagccaacggcaggttgagcgagccaacgggatgatactgg

SEQ ID NO: 28030 - DNA, 315 bp, Zea mays
  unsure (1)..(315): unsure at all n locations
cctaaactcctataccttctacttataaaagatatcctcttgtctcacaagngagggcgggtgaggcgttgacaccacaccatccttcttacttattatgtttccataacanaccattaagtcttctactaacatttctgattttcacctcgaactaaatcccatacctcaatgcctactaaagctgtttaactccctattcatttccaccacccaattcaatactttaacgcctcctctaccctgtgtggctcaactcatgaaacaatataatattctcacaatatttccacaccatactatcgctacccctta

SEQ ID NO: 28031 - DNA, 380 bp, Zea mays
gcctatcacgggtgcataggttcaccgaaatccaaccttcgattgggagttcctttggccacagtcgggctttgttccttgcaccacaccatgctcgtcttgcttgttgcggaaaacccacttggttcctacaacattttggttaggacgtggaactaaatgccatacctcattcctagtgaagttgttgagctcctcttgcatcgccaccacccaatccgaatcttgtagtgctacctccaccctgtgtggctcaatagaggaaacataagagtagtgctcacaaaaatgtgcaacacgagatctagtggttacccccttatgaatgtcgccgaggatggtgtcgacggggtgatctcgatggattgcttggtggactc

SEQ ID NO: 28032 - DNA, 295 bp, Zea mays
  unsure (1)..(295): unsure at all n locations
cttttctgngcggaattctgccttgaattttccatggagtaataattatctcgctgctctgggagccacagcagccgtacacggggtgccagtaccctcgggagtatttcttgtgaccataagaacaacatatgtggaactgtttctataagcactgctcactctatattctgatcataatgctgataggctaacagatattatatctttctttgcaggctactggcttttacatgaacgggcctgtaatgataaaggcaaacctataaagatcggacgtagaacagatcatatg

SEQ ID NO: 28033 - DNA, 327 bp, Zea mays
agcttctaaagggagaacacgtgatatgtctaactaaggttactttcgaaaaagatagaccttgtgcagcttgtcaagcagggaaacaggtgggaagctctcatcatgccaaaaatgtgatgacaacatcaagaccactggagttacttcatatggacctcttcggacccgtcgcctatctgagcataggaagaaagtagtaagggccttgtaatagttgataattttccccgtttaacttgggtattcttcttgcaggataaatttgaaacccaagggaccctcaagcgcttcctaaggagagctcaaaacaagtttgacctcaag

SEQ ID NO: 28034 - DNA, 478 bp, Zea mays
  unsure (1)..(478): unsure at all n locations
cttcatcccattgaactcnttgcctttctccagtagagaggtaagtggttttactaacttggaaaaaccttcaataaatcttctatagtatcccgccaatccaagaaaacttctgatcttggacgcatcctttggttgcttccaatccagtatctcacttatctttcctgggtccactttaattccaccatcggtaacaatatgccctaagaaagcaacttccttcaaccaaaaatcacacttcgagaattntgcgtacagttggttgtcacgaagcttttgtaggactagccttagatgatcttcgtgtgtttcttcattcggagaatatatcagtatgtcgtcaatgaatacgaccacaaactgatccagatattccatgaatactttattcatcaagttcataaagtatgctggtgcattagtcagtccaaacgacatgaccaanaactcatataatccatatctcgtcgtgaag

SEQ ID NO: 28035 - DNA, 407 bp, Zea mays
agctggtgaagattcttcatcccaacgtgtgctagtcggcgatgccagagccagcccatgttagtcttagcaattaagcaagtgtcgagttcagctctatcaaaatctaccaagtatagctgaccctctaacactcccttaaatgctattgaatcatcacttcttctaaagacagtgacacctatatcagtgaaaagacagatgtagcccattttgcataattgagatacagaaagcaaattgtaatctaatgaatctacaagaaaaacattggaaatagaatggtcaggagatatagctattttaccaagacctttgaccaaaccttgatttccatccccgaatgtgattgctcgtggggatcttgattttctcgaggaagagacatcttttctccctgcatgggg

SEQ ID NO: 28036 - DNA, 354 bp, Zea mays
tcaaccgtagctccctgcgtgctctcgacctcaccggagctagagatcaccggcgtttgccctgaaaaccgcgtgcccgcggtcacccgatcccccgccaccgtagaccggccagcagagcctttcccagccacgcccgaccctcggagtagaccgtgcatgcctcggtgaagctccccgagcaaggaatcggactttgcctcgccggagaagccagtccacggtcgccggacttcacccgatcgccggtgaacgtagaccgggtaagtctctgcaccattttccgattccctgcgcacatagcttctacgtcatcccgtggagctcatcgtgtcgtttaattgaactagatcg

SEQ ID NO: 28037 - DNA, 395 bp, Zea mays
  unsure (1)..(395): unsure at all n locations
tacctgattctttcttttccactggcacaatattggatacccaccctgtgtatctgncaggtctaataaaactagcttctaaaagcaagtgtatttcgttctttatccgtgggagtaagcctggacgaaatgatcttggtttctgcttgaaaggcctgaaaccggatttaatggcagccgatgttctactatctctcgacttaatcctggcatcttagtgtaatttcaagcaaatcaattagaatattcttttaatagactaatcatttcatctctaggatcggcctctagggtcttgtttacaaaagtcggtctcggggtttacccatctctatgtcaatctccttccaaggatcggtcaatgtaaaccccttgcctaacttgtcgagaaccct

SEQ ID NO: 28038 - DNA, 382 bp, Zea mays
  unsure (1)..(382): unsure at all n locations
agctntatcaaatggacgtgaagagtgccttcctcaatggaccaatcaaggaggaggtctatgttgagcaacctcccggctttgaagacagtgagtaccctaaccatgtctataagctctctaaggcgctttataggctcaagcaagccccaagagcatggtatgaatgccttagagatttccttatcactaatggcttcaaagtcggaaaagccaatcctactctattcactaaaactcttgacaatgatttgtttgtatgccaaatttatgttgatgatatcatatttgggtctactaacgaatctacttgtgaggaatttagtaggatcatgacacagaaattcgagatgtcgatgatgggggagttaaagtattttct

SEQ ID NO: 28039 - DNA, 479 bp, Zea mays
  unsure (1)..(479): unsure at all n locations
tatgaagattcttcatcccaacatggggtagtcggcggtgccagagccaacccatgttagtcttagcaattaagcaagtgtcgagttcagctctatcaaaatctaccaagtatagctgacccttcaacactcccttaaatgctattgaatcatcacttcttctaaagacagtgacacctacatcagtgaaaagacagttgttacccattttgcataattgagatacagaaaagcaaatgtaatctaatgaatctacaagaaaaacattggaaatagaatggtcaggagatatagcaattntaccaaatcctttgaccaaaccttggtttccatccctgaatgtgatcgctcgttggggatcttgatttttctcgtaggaggagaacattttcttctccccagtcatgtggtttgtgcacccgctatcgatgatccaacttgagcccncggatgcataaacnnctacaaacaagttagtt

SEQ ID NO: 28040 - DNA, 380 bp, Zea mays
  unsure (1)..(380): unsure at all n locations
agcttgctcgctctagatgatctattttatgcttttatctggctttnggacatatgaatgagctctcctttctctttctactgatttttagagtccatatgatggtggtgttgacaatgcactcatcaacggagagattgcgaacacaaggttgacttgtcccttgtggttcaagttgatgatgagtgattgtccacatggatagtactatggtgccgtcagtgaactaaaccaagtatgagattatgtgtttgacaaccatgtctgtcagcttgtagtgtgcaggtgttgaacacatggaccatggtccaccacgaatgtgaaggtcatgcacgatcttcccatggatccatagcgtaaatgatgagcatatgacttga

SEQ ID NO: 28041 - DNA, 373 bp, Zea mays
  unsure (1)..(373): unsure at all n locations
tctttcatagttgggaaaactctgaatgccaggaatttctgcactaaatctctagtgccaatatgttctgcaataattttgaattcgcctagtgcagcccaagttggaccttctactgccattttgcatcggggtcttgtttctccgaagattagttcaagagggctcttgtcggcattttcagaccgcggggtccctaagccgacgagtgaatgtgccgcgtgccccagtccatatgggtacagcgcgtgggcgagcgcgaaggggggaagcgaggtggccggagacgggcgtgagagaggtggaaatcccgcggccttcgtgttcgtcccgcgcccangtcgggtgcgcttgcagtatggggttacaagcg

SEQ ID NO: 28042 - DNA, 394 bp, Zea mays
  unsure (1)..(394): unsure at all n locations
ttaaccactgagctcgctgaccactagctactatacgactttattccaacactagacagaaatacaaggacccggctataactaacatacaggtcttattaatgttactaacattgtagcgaagggtcaactcaactatcaattaagcacttgcaaaattntaggacagcagcacatcagtcaattgctttaaccataacttttcaaagattaatccaaaaatagcaaactaagacattccggaaagcttaaaaagtgagctacaactttggtatttntacctccacaagattcagcacttagcaaggtcaaacagtgctaacacaacagttctgtccagatctggacagattcagacttgcaacttcaaaaattcacaactacagattcagac

SEQ ID NO: 28043 - DNA, 435 bp, Zea mays
  unsure (1)..(435): unsure at all n locations
ttggctcagcttacanatctgagtatgctcgaggccttcactttgttaagattacaatgatagctgggccctatatatgaaatanaattctttgctaaacagtcctacaaaatattgttgggatctttacatggctgatccaaactttgcttggtcatttaatcctgttgccatggcaagggcaagttcttgtttttgacttcttttgaaagatagaatgaacatgctcaagttgcttatcactaaaaacgtctacctggacaaatttgtaacacctgcagtcctgcactctatctcaagaaggttcctgtgttcatctctcctttccatgctctttcagcanggaattgttggtgcttcatgacctgtgacctatatctatactctctctttgacatgttggctgagggccagngccttggactgtgcacatca

SEQ ID NO: 28044 - DNA, 123 bp, Zea mays
  unsure (1)..(123): unsure at all n locations
agcttctaaagggagagcacattntaggattaacaaacgttcattntgagaaagacagggattgtagcgcatggccagcggngaagcaagtggagtccatcattcacacaagaacatcttgac

SEQ ID NO: 28045 - DNA, 414 bp, Zea mays
  unsure (1)..(414): unsure at all n locations
cgtccaagaagggggagcaatcaatggtgaagtatgtgagacattatcctcgaacagggactgaaaagaggaggttttaaagggtatgttcaagataagcgtgaacgtaatggcatagatattacaagggttaaaggtgataacagaaaaaatgtaagaggagaggtaatgggcataagaacaaaggatataagtaccaccaagtatggagttaagacaggacctgcaaatggaaaaagagggggtacgtccaagggctagataggtaagttgccactctcaaattgaggtggaagagaggggatttttaaagagtaggaataaagatgagtatcaaggcaagatcgatggacgacaacgtgagggtgatagcatataataacacagcanaggatggaattaacacaaaaccta

SEQ ID NO: 28046 - DNA, 420 bp, Zea mays
agcttgcatttgggtccgtaaggaaattgtgactatccttgtaggacccaacaagagttgggtacctaagacccaagcctaaatttgccttgcaggtttatgcatccgggggctcaagttggattatcgacagcggatgcacaaaccatatgacgggggagaagaagatgttcacctcctacgtcaagaataaggattcccaagattcaatcatattcggtgatgggaaccaaggcaaggtgaaaggtttaggcaagattgcaatatccaatgagcactctatctctaatgtgtttttagttgagtctcttggatataatttactatctgtcagtcaattatgtaatatgggatataattgtctatttacaaatgtagatgtgtctgtctttagaagaagtgatggttcactagcattta

SEQ ID NO: 28047 - DNA, 400 bp, Zea mays
gcttgaagccatggtaagtagcatagaccaataatatacgaattgactcaagcctagctacaggtgcataggtttcaccgaaatccacaccttcgacttgggagtatcccttggccacaagtcgagctttgttccttgtcaccacaccatgctcgtcttgcttggtgtggaagacccatttggttcctacaacattttgattaggacgtggaaccaaatgccatacctcattcctagtgaaagtgttgagctcctcttgcatcggcaccacccaatccgaatcttgaagtgcttcctctaccctatgtggctcaatagaggaaacaaaagagtaatgttcacaaaatgtgcaacacgagatctagtggttaccccccttatgaatgtcgccgacgatggt

SEQ ID NO: 28048 - DNA, 418 bp, Zea mays
agcttgagaagctgctccttgaaagtttctctgcttttcgtacaacaaagtgctgcttttatcagcttgaagaagctgctgccctgtttgggggagcctctagctttatgagctttctgtagaagcgaaagctgccagaagctccccaaatagggccttagatcattacgattttgtagaatctagatgcgcaaaaggatgttatcatgataacaagatttttgagaatcgtgaaaatgtttgcgtatatgtgagagcacctacggggggtgaataggtgatcctgtaaatcttaaaaacttaagccacaaaacttgattaagtgttatcacagttaatgccaagtggctagagcgaagatcttgcacaatatgataatcacaagaagttcaacacatagaggacacggtgatttatt

SEQ ID NO: 28049 - DNA, 366 bp, Zea mays
agggctggacacggtggccgaagctctggtggcaatggcgggcggaaatgcgctcccggagctaacggagggggctggccggtgaagtgaacgcggggtgaagtgatgcgcgctctgggaggctatataggcgcgggcgagcaccgccgatggcaatggcgcgcggcggacttgaccgaacaccggtgcgagcgcgcgcgcgggttgggcgagcgccggcgtgccgaccagggtcgaacacgtgtgcccgtgcgttctgcccaatttctggcgcgtgtggccgtccatgcgagcctgctctcaccttggtcagtgcacaaaacctcttctcctacctacaagctaccaatcttgtgtggtggtcat

SEQ ID NO: 28050 - DNA, 419 bp, Zea mays
agcttgctcgcattgcaaaagaaagggcggataatgctgataaaccatctactccccatcccggtgagtcttcagaaagtgccggggaggacaactatctaccccctgcaggtgtgatgactgctctatccaaaggtggtagcctgttgagcccggacagcactgagcaaacgtcgcaggcagagctatccccgaacacgacgatgatggtacgtccattcacgagatccttctcgctggagcccggccgcctcgtatcattagtcgacaacgatgggaaggaggttggcaggggcaagatcttccaagcgccagggaagagcacaacgaagagctgcgtttgcgtggttgatgtcactgagctcaggaccgagaagtggagggagctcccccacccttcggagggcattgggtggacg

SEQ ID NO: 28051 - DNA, 227 bp, Zea mays
  unsure (1)..(227): unsure at all n locations
tttgctaacacactggcgaacacaagcagtcagtcgatttttattctgangggcgactaccgtggcgtacctggttggctccaactccggcgacgagcccattgactgtgcaccacactgcggcatcctccaccatctgccacagcactgcctgatgacccggtgtcacggccccctactccggctgtgccacgccgatgggcgccttggtgatatctccgcgtgcg

SEQ ID NO: 28052 - DNA, 410 bp, Zea mays
  unsure (1)..(410): unsure at all n locations
gcttataagtttctggatgagatgtgttctcccagttccgttgatgaagcaccagaagaccaatcaaggtaggaatccatgtgggagttcgcaagataaatgtttgcgtgttggcatcnatgcttcttcaataagctagtggcggagcgaaagctataaccctnaaaattatcttgantatccaaaatcagcgtttgcaatcaacagccggatgctccgcaaaggccagaatttgttgaagtttcatctcctccaaaagtctggcaagtgaatatatttagcttgaataaagcttatcccattaacgcttcttagccaaatctctaagacaagattcctttttagtggggtagatttgtagcatcccaaaaattctaatcctgaaatttttctaaacttccttttaattc

SEQ ID NO: 28053 - DNA, 457 bp, Zea mays
  unsure (1)..(457): unsure at all n locations
ntcctctcaggttgagataagctntaatacacaaattctccctctttgacatcaaacaccaaaaaccatactcaagcaagaacatatgatgatgtcaagggacagcagggtgttaaagagaaaaacgactatcaaaactccccttacttattgaacatatgccctatcaacatatatgcaaagagattaatacttccttttgtacctttaccatgttgtagtgtacttcccatcttgaaagtatttaatctctcgagagcttctccacacttgtgcctgattctttatcctaactttntttgttgctaagacaccaaacttagaacaagttatagtattgggcataagaagaaacttctattctaatgattatcaaaagatgtcaaatgaagcaaactatcacagctaccaatngaaagataccaattgcangttcatttattatcatggctccatg

SEQ ID NO: 28054 - DNA, 342 bp, Zea mays
  unsure (1)..(342): unsure at all n locations
agcttgcatctcaatctcatattatgcgcacgatcgttatctacggctcctgcggttacagctcgtgaattgccttgagggtgtcgggtttagcaactggttacatgtgtctgccatctgatttgttgcaaccctcttgctcactggtaatcacatgtccactanaatgatctgacagtttaattcacaggtttaagccatgatctttcatcatcagctcaattatcctttctgtgttaagaaaaactaagattattgcattcaagccttaactaacgtaacgtacaacttaaagatcagaggcagattgcacgtctaacgttggacaacatggatgtaatg

SEQ ID NO: 28055 - DNA, 471 bp, Zea mays
  unsure (1)..(471): unsure at all n locations
tagcaattgggtgattatcttggataatataggaattcttagccttgtctgttccattccaaagcttctctttttgctgaataatgaagagatcgacataatgctttgtcggacaaattggtgtataatatgaggagaaaagattgccctattggtagcttacatcacaaatatttgactatagttattgttgggactatgcttcgtcgcgccgaaggtcttgaatgaagaagcagcttcagctgaagctgtccgtgtgcgatgaccgaagcttgctcttcataaagcttcggaattatgaaccgacttaaaagtagaaagaccttntagtccataagcgtttgagtcgttattgtaaactttcatgaacggcatggttgtaaattctcacaggctgtgtcatgtgcctataaatagtgaacagtactcctctactgttcacgcttcttttcnggtatctcaccacctcat

SEQ ID NO: 28056 - DNA, 418 bp, Zea mays
agcttgtggaggttcttcatccccacatgtgctaagcggcgatgccacagccagcccatgcaagtcttagccattaagcatgcatctagaccggcctcttcttttgcaaaatcaactaggtaaagcttgccgtctagtacacccttaaaagctagtgaaccatcacatcttctaaagacagacacatctacatttgtaaacaaacagttatatcccatattgcataattgactaacagatagtaaattatatccaagagactctactaaaaacacattagagatagagtgctcatttgagattgcaattttacctaacccttttaccttgccttgattcccatcaccgaatattattgaatcttgggaatctttgtttttgacgtaggaggtgaacatcttcttctcccccgtcatat

SEQ ID NO: 28057 - DNA, 415 bp, Zea mays
  unsure (1)..(415): unsure at all n locations
tcagctccatctatattatggattgcttttgagtcagtccagtttccctcggcccttctggcagcttcctgacttccatgaatagcaatgggtccttgatccgaaggtatcttcatgcaaaggtaagcaggatgaagaattgcttcgaaagcattgagggtgccacgaccaataattgcattgtaagggtattccatgtcaataatgtcaaacacaacttgctcagttatggtgttgttgatgaatccgaaggtcactggcatggtgattatgcccagtgctacaatatgtcttcctccgaagccacagagagggtgtgtagcatcatgaatcttatcttctggctcttgcattngtctgaaggccttagcaaatataatatcagctgcactgcctatatcaaccaaaacattgt

SEQ ID NO: 28058 - DNA, 399 bp, Zea mays
  unsure (1)..(399): unsure at all n locations
agcttgagaaggggacaaccgtatcatgcacaaaaccccttcaaaagaataccaagctttccaagaagggcatgagcaaaattcatggtaagaaaattaatgttcatactatttgctctaacaatgtacctatgtgcttcaacaaagaaagatcaaagagaagcgatagaaggtgctatggatgcaaggagaagggtcatgaaattgattcatgcccccacatgaagaaccaagatcttgcacgatcaagaaagatgaccatcaaaaaggatgaaaacaaaaggcanatgcattgcaaggataagcaccgcatttgctacaattgccgtgaaaaaagtcatctattcagggttgtccaanggtaaaactcttaagcctaacttgtcatacattcaatat

SEQ ID NO: 28059 - DNA, 463 bp, Zea mays
  unsure (1)..(463): unsure at all n locations
actcagcttgaagggcaaccanaaagcaagccccaatatacttcgtctctgaggtccttagtttatcaaagaanaactatacacaattggagaaggtgatgtatgatgttttgatggcttccaggaaacttcgacattattttcaagcataccatataattgttccttcttcacagcctttgaaggatattatgagaaatagagaagctactggaaggatagggaagtgggctgcagaactcaatgagttctgcatcgattatgtgcatagatcttcgattcagtcccaggtgttagcagacttcattgctgactggatgctangggctcangaagaagaagcaagtaaagatgccgaagcttgggcagtattctgcgatggttcttggggaaccttcggggcangtgtagctgccgtcttaattgcaccttccanagttagaacatgctacgcagtgaaact

SEQ ID NO: 28060 - DNA, 415 bp, Zea mays
  unsure (1)..(415): unsure at all n locations
agctntagagagaggagtagtgctgctaagatctagagcaaggtcttgagcgtatcgttactctgccggggtgctgccaagaagtttgtaaacagccgcggttctgttgtaactccactcaatagtgaaaggctctatctgtcatactgacagatctgagcaaacggaggaaggagttaaaatagactccaagcccaggtgtggctaactccaacgaggactatgcaagcatttcaagcttggccgaacctcgggataaatccttgcgtctgggtgctctgttctgtattgtactctgactctctgtcttactcgttnttatatctgcacttcactacttacttgtggtactagctttccttgaagtgcaggatattcttaagacaggaacttcaattccactgcaacctactcc

SEQ ID NO: 28061 - DNA, 373 bp, Zea mays
  unsure (1)..(373): unsure at all n locations
tataggattctgaaattacactgttctgatgggatttcctagttcttcttggtaaatatttcaatatgattcatggatgagaatgaacagaaacataatcgatgaaaagtgaggaagaaaacttgaatgtatttcagcatgtgttttgatttacactgaagtccatttttgttacattaagcttctgcttgattaaggcataaatngattggttaccttatgtgtgctgactgctgactgaactgcttaagcttcctttcttttcttcttcttttggctgcatactatgcacaagcatatgttngatataaagtttgggttggcttgtgccttacacaatcacactgatgctgtatgtgacgaaatgagcgat

SEQ ID NO: 28062 - DNA, 347 bp, Zea mays
tgcatctctcacttgacggacctagcatgcataccggatcccaaggcgcgtgccaacgcataactcatttataacctgacaagtcttagttttaagctcttagcccttagattcttactttttatgcaattatcggatatcgagatatgcatgaagtactgcactctagcggactattcttcatctcaaacacgaatgctaacctcatgcgcctgccagaatgcagcaactaccatactcctatgctcattgcaaaccttctagcctatggcgaaatatagtgcaaattattaaaggggcctacacctgacccaacatggttatattgggtgatgatacggtgagat

SEQ ID NO: 28063 - DNA, 334 bp, Zea mays
  unsure (1)..(334): unsure at all n locations
cattggaccctataagatcactaaagcatgttgtcctgtggcatactaattggagctaactccaaaaaggtctgccatccacaatgtatttcatgtatcccaactcgaaaaacgtgttcaattgccgactaagatcatggtagaaccagaattggagatagagcctcatctatctgtccaagagtaccctttcaaggttctggattgtcaagaaagatcaactcgggctaaatcgatcaagatgtataaaatccaatggagtaatcactcataggaagaggctacttgngagactgaggaatatcttacattcaaccttcccgattgtctacct

SEQ ID NO: 28064 - DNA, 347 bp, Zea mays
agcttcctacaggattcttgagcccctcacgcatccttaggtaacaataggtgccactaggagttatgaagcctggctttaggtcatgctccttcatccagatttgatgataacccgaggagcaacctaataaactcaagagctttgaagaagctgctgcatccacaagggaatctattcttgggacggggagatcatacttcagacatgccttgttgagatctgtgaagtcaatacacattctacattttccattagctttctttaccatgacagtgttggccagccactctaagtaatggacttgtcttatgacaccgacacttagaaatctcttcacttcattt

SEQ ID NO: 28065 - DNA, 446 bp, Zea mays
cacatgtgctaagcggcgatgccacagccagcccatgcaagtcttaaccattaagcatgcatctagaccggtctcttcttttgcaaaattaactaaataaagtgtgccgtctaatacacccttaaaagctagtgaaccatcacttcttctaataacagacacatctacatttgtaaacagacagttatatcccatattgcacaattgactaacagatagtaaattatatcctagtgactctactaaaaacacattagagatagagtgctcattagaaattgcaattttacctaacccttttaccttgccttgattcccatcaccgaatatgattgaatcttgggaatccttattcttgacgtaggaggtgaacatcttcttctcccccgtcatatggtttgtgcatccgctatcaataatccagcttgaacccccggatgcataaa

SEQ ID NO: 28066 - DNA, 282 bp, Zea mays
  unsure (1)..(282): unsure at all n locations
agcttagtcgccggctggagagggaggggctcccgatggagccatcgccggaaacgcccgacgacgacgacaatgatgaagatgatgacgaggaagacgacatgggtgtcccccttggactcaaccctggcttggggttaagccaagagccgtcaaaccagcccccgagcgggctgatgccgtcagtccctgaagtcgggacgccggggtcccgacccgaggggcggnggcaatccgagagggtactggaccccttcgttggaggagttgaggcgaccccgg

SEQ ID NO: 28067 - DNA, 457 bp, Zea mays
  unsure (1)..(457): unsure at all n locations
nggtcattntattgctaactgtcccgacaatgatagtgattatgatcaagggaacaagagggagaaaaagaagaactataagaaggcaaagggcgaggctcatcttggcaaggagtgggattcggactgcacttcatccgactccgacaatgaaggactcgccgccaccgccttcaacaagtcatccctcttccccaacgagcgtcacacttgcctcatggcaagggagaagaaagtaagcactcataatactagtacttatgcttcttcaagtgaggatgagtctagtgatgatgatgagatagattactcatgcttattcaagggattagatagaaccaaggcagacaaaattaatgaattaattgatgccttgaatgataggaatatactcttagaaaagcaagaggatttgttgtatgaagaacatgatanatttgtagaagctcagaaatct

SEQ ID NO: 28068 - DNA, 423 bp, Zea mays
  unsure (1)..(423): unsure at all n locations
agctnntgatcggtttggagaattagaaaggatggggcatcatcgaccaaatcgtgacctttcgatcacaaggaataactgcacacgcctagggctcccttttttccctaaagattganggtggagacataccgatgtgctaacattaaatgtatgctgtcaagctgcttgaaccgtcccatctactatttagcctgactttggaaagtgaatgcgcaatattaatcacctcctcttgttcttccagatcaagcgggagatttcgactatgaagctgatcaaacatcccaatgtggtccaattgcatgaggtatactattttttgtcagacgtgatgatgcaagttttgttattaccttttgatgatcccactgttatgtgtgcatttgataagttatggcgagcagaacaaagatatacatg

SEQ ID NO: 28069 - DNA, 464 bp, Zea mays
tcgtcgtctgaaaaaaattaccctgaaggaaagagatgatttcagttctccaatcttcactataaacaggggatatgttgaggattgctctttcaagaagctcaaccgaaggtgcttttattgtttcaaaaaatacttccgaaggtataagcagcccctgggcttctgacttagccaatagatcagcgtattcattttctccacgaggaatatttttgacagagaaaccttcgaaggaagcctcaatccttcggactgtatctagatacctttcaagcttcgggtctcttgctttgtaacttttgtcaatatgaccagaaataacttgagaatcagttttaagaatggcccttctgattcccattgcctttaatttccgaagacccaaaagcagagcttcatactcggcgatgttatttgtgcaactaaaatcaagtcttgccgcataacaaagtttaactttg

SEQ ID NO: 28070 - DNA, 429 bp, Zea mays
agctggtgaaggttcttcatccccacatgtgctaagcggcgatgccacagccagcccatgctagtcttaacaattaagcatgcatctagaccggcctcttcttttgcaaaatcaactaaatagagttttgtcgtctaatacacccttaaaagctaatgaaccatcacttcttctaaagacagacacatctacatttgtgaatagacaattatatcccatattacaaagttgactcacagacaacaagttatatccgagcgactcaactaagaacacattagaaatagagtgctcggatgaaatagcaatttttcctaaccctttcaccttgccttggttcccatcaccgaatatgattgaatcttggggatccttgttcttgacgtaggaagagaacatcctcttctcccccgtcatgtggtttgtgca

SEQ ID NO: 28071 - DNA, 454 bp, Zea mays
  unsure (1)..(454): unsure at all n locations
ttaccaaatggacgtgaagagtgccttcctcaatggaccaatcaaggaagaggtctatgttgagcaacctcccggctttgaagatagtgagtaccctaaccatgtgtataaactctctaaggcgctttatgggcttaagcaagccccacgagcatggtatgaatgccttanggatttccttatcactaatggattcaaagtcggaaaagccgatcctacactcttcactaaaactcttgaaagtgacttgtttgtatgacaaatttatgttgatggtattatatttgggtctactaacgagtctacatgtgaagaatttagtatgatcatgacacaaaaattcgagatgtcaatgatggcggagttgaagtatttcttatgatttcaagtaaagcaactccaagagggcaccttcctaagccaaacgaagtatactcaagatattctaagcaag

SEQ ID NO: 28072 - DNA, 419 bp, Zea mays
agcttgcattgcatgtttaaattccttgtattgcatctaggacttgtctaacctagttgggataaccgccaacaaagcgagtgaaaaagcttaactcggttcaaacctgacaagtcttagttttaagcttttagcacttaaattcttactttttatgcaaatattggttcttgaaatatgcatgaggtactgcacttagggggagtattcaaaactcaaatcactcatgaaaacccctagtgcaagccaaaatgcaaatttcaccatttgcctattttctctaaaaattatctagcctatggcaaaatattttgaaaagtatatgagggtgccaatacctgtcccaacaagtgttattttgtgtgattataagttgggatttggtttggttgcgagttagatagaaaaattcaaaattt

SEQ ID NO: 28073 - DNA, 439 bp, Zea mays
  unsure (1)..(439): unsure at all n locations
tctaaagggagaacacgtgatanggttgactaacgtacaattcgaaaaagatagaccttgtgcagcttgtcaagcaggtaaacaagtgggaggagcacatcacagcaagaatgtgatgaccacttcaagacccctggagctgctgcatatggacctcttcggacccgtcgcctatctgagcataggagggagtaagtatggtttagttattgttgatgactnttcccgcttcacttgggtgttctttntgcaggataagtctgaaacccaagggaccctcaagcgcttcctcaggagagctcanaatgagtntgagctcaaggtgaagaagataagaagcgacaacgggtccgagttcaagaaccttcaagtggaggagttccttgaggaggaagggatcaagcatgagttctccgctccctacacaccacagcaaaat

SEQ ID NO: 28074 - DNA, 407 bp, Zea mays
agcttcggatgtgcatcgactacaccagcctgaacaaggcttgtcccaaggacccgtatccactttcacgcatagatcaaatcgtggactctacctctgggtccgacctcttatcctttctagatgcctactctggtttccatcaaatccggatggctagggaggataggaagcataccactttttgtaacagtggatgggctctactgctttgttgtaatgctctacggtctgaagaacgccttgccaacatttgtacgggcgatgagtaagaccttcggggacctaattagggacaaagtagagatatacgtcgatgacatcatggtcaagactaggagagggtcgactctggtggaagacctgacccttgtctttgacaaactgtgggcgacacgcacgaagct

SEQ ID NO: 28075 - DNA, 373 bp, Zea mays
  unsure (1)..(373): unsure at all n locations
tgccctagacagctattctttctaagagctgtcctgtctgggaccctaattaggggtaccctcaagacgcctaattctcagctggtaacccccatcagcataaagcggcaaaggcctgatgggtacgattaagtcagggatcagtccacacgagtgactcgatcacgcttcacccgagcctagcctcggccaagggcagccgacctcgagagacttccgtctcgcccgaggccccctttttatggcggacacatcaccggctcgcccgaggccttggcttcgctcagaagcaaccttgactaaatcgccacaccgactgaccaaattgcaggggcatttaacgcanaggtggcctgacacctttatcctgaca

SEQ ID NO: 28076 - DNA, 419 bp, Zea mays
  unsure (1)..(419): unsure at all n locations
gggacctcaaatcgactgcagcatgcaagcttgtacataaaacttagaggtcatgttntgtctcaaagacacacttcaagtcattatatagatgcaccatataaccctataaagccttcaattttccactatcaggtaatggggagggagcgcagctcgttcctttgaaacaattcaaaaacttaacccattcagaacagattttaagataacaaggacttaaaatctctttcccaatgatactccatcaagtattcatcttatggaaaaaacatgaccaaaagaatagcccataacttttcatttactccaacaaaggtaagaccaatttagtcttcctcgcatggtaaagaacatcacataaaaagttatccaatgcaacacattgtaccacaggatgtatattaaatacaatccat

SEQ ID NO: 28077 - DNA, 469 bp, Zea mays
  unsure (1)..(469): unsure at all n locations
ntaccttgattcccaataaaccagcatattcttgagagtctnttctttagtccggtaagtcttgctgagtaattgcgtactcacggttttattccctgttggttttcaagttataattatgttctgttgtggatgctgctaagtgccggtgggctcggccttcttatataggtgtatcccatctttagcttctttattgaggattgtcacttaagctagcatgtattttaaaacctataaatattntatacattttaaattgtaattcttttgaatcactttcttttgtaatcactccgataattgtataatgtaaacttattgtaacatgtaatcattntgtaataaagaatttatttccgctgcaaatgttggtgtgtgaattgtgtttacttaatcctgcgatcttggcggtaagtcgattatccggggtcctcggggcactcngacagatccctgtaaagtgttg

SEQ ID NO: 28078 - DNA, 351 bp, Zea mays
  unsure (1)..(351): unsure at all n locations
agcttcacggggtgctaaggacgctaccagtgcaaggaattgatggaagactcaccgtggagctcggtctacgtgcgcgggcggtcggttgaagttcttctacgtcgatccggtgttctcggtgaggtaaagttcaatccccggctctgggagctntaccgaggtccgtagaggctatcccgagggtcggacggggcgaggaatggctggtttggccggtctacggtggccgtggctcgcgcggccgctggcaccttgctcgtggggcaaactccgacgaactcgagcttgggttgggtcagtggcacgagggggtgtacggtccaggctgggatggcttttataggcgtg

SEQ ID NO: 28079 - DNA, 374 bp, Zea mays
  unsure (1)..(374): unsure at all n locations
tgcttcggccgaggggtcttttgtatcttcaatagataatgtagctttggtttgagccaaagctttcacgtgatcacagcctgatttctccaaaatagccgcaattcccctggcacctgagaaggcgcggacatccccatgaccactcaaaacttcttcaaaggcttcagcttcgttgcggatccaatcaattgggccttcaggatcgccccttacgaagttgtcctcgctagagaatgcgccaacattggcgaagttagattttattttttgcgcacattctatggattnttcgtagcatttctcttttgaagaccgaagttctacaactggtcttctccaataatttttccaatagttactggcgtctcggt

SEQ ID NO: 28080 - DNA, 417 bp, Zea mays
  unsure (1)..(417): unsure at all n locations
agcttaaggctcaaacaacaatgactacattactggntgagatgactcaattcgtaaggctcaaataacaatgcagcagcggcaatggctaaatctagatgcggggagattacatcaaacaacctatgaatcgcctagtgaattttaactgcaaacgtcatcaagttccaacaatccagcctacagattaccacgagcactccatcaaagctgcagattcccaccacaacacccccaaccaaaaaaacatgtatccaaccatcacaggatcgcgaaacgatagaacagaccaacccccgcccgcccccaacaaagctttgcttatataacctagaaaattcaaggaatcgattgattgataggtccgcacggggtaccatctaccagtaccagccagacaaccgaaaccctatcacg

SEQ ID NO: 28081 - DNA, 175 bp, Zea mays
tgtgttatatacaggggacatatactcacatatatttgcttatgaatgaacagctcacgaagtgggattgaacattcatttttctactataacacatctatttaaaagaatgacatgaatctactttaaaagttacattttattagactacatttcattacattttattttacac

SEQ ID NO: 28082 - DNA, 351 bp, Zea mays
  unsure (1)..(351): unsure at all n locations
agcttcggctatgatgggaaatttcngcagcgaaacagtgcaaatagcaatgaatgctgtggtaacttcacaactacttgtcagtttatatattgctgcangttagaaagcgaagcggcggaattgttacaccacgcgcgcagtaacttgtacccgctgcgcagtggaccgcaaggatcaaacagtaactctgcaaggtgggaccgacacgcgctcggaagtccgatcgtttctccgcaacgagctcagggaaggtgttttttggaccttcggcttcccgaagctgaagaggcttttttcacgggtcaagctcgttacgaagaacgatctagcaccgcgaaagggctactg

SEQ ID NO: 28083 - DNA, 462 bp, Zea mays
  unsure (1)..(462): unsure at all n locations
tggacccctgggtgggagccacaagggtcgagctctctggtgacgatcttgctgttgtgctcggaggacctggaactttctcttgatgtgccctttttcttcctcctttgctctctccacttgaatagctttgttggaaaggtgagagaagctgtggaagtcctggctggcgaggatggtcttaagctcgggtcttaaccctctcagaaaacgagccatctatctggcctcggtgctgacatcctcgggcgcgtagcgggccaactctgtgaacttgtgcacatattcactgactgttcttccgccttgggttagctcccggaactcatcttccttgagttgcactatcccctggggtacatggtgctcacggaaggctgcttcaaattctgcccaagtagcgtctctgatggcttcactgaaagtgnccaccatgctacagccattcctgaaagctgatga

SEQ ID NO: 28084 - DNA, 180 bp, Zea mays
  unsure (1)..(180): unsure at all n locations
agcttccccatctctatttttatttatcgntagtttcattccgctgcacttcgaacaatgatgactacctttgcaaaacctccattattatttaataatttaataccccctaatgcatgggtttatggtttaatggatttgctctgtgactcaccatcgagtgagaatgtggtacttgat

SEQ ID NO: 28085 - DNA, 468 bp, Zea mays
  unsure (1)..(468): unsure at all n locations
tctaaagggagaacacattttgggactaacaaatgttcattntgagaaagataggatttgtagcgcatgtcatgcaagaaagcaagttggtgttcatcattcacacaagaacatcatgacgactgacaggccactcgagctcctacacatggacctattcggcctgatagcttacataagcatcggcgggagtaagtattgtctagttattgtggatgactattatcgcttcacttgggtgttctttttgcaggaaaaatctcatacccgagaaactttgaaaggattcttgagatgagctcaaaatgagttcagcttgaggatcaaganaataagaagcgacaacgggacagagttcaagaactctcannatgaaggctttcttgaggaggaaggcatcaagcatgagttctcctctccctacacgccacaacanaatggtgtagtagaaaggaagaataaaactct

SEQ ID NO: 28086 - DNA, 419 bp, Zea mays
  unsure (1)..(419): unsure at all n locations
agcttaacaacagggttaatagcctcatgtgttntgcatgataaaaggtcattttcaacaagaagattgtcatgatcaaatttaatttgagtatagtcttccttgatctttactagtctattttgcaactccctattagcttcatttaatttgtcatatttttccttagcatcttttagggagtttgtgagctcatttacagttgatgacatangtgtattttcttcttttatttcatcactagcctttataactatgtcatacttggcatttaaagattcattttcatttttcaacctatcacatttagcttttgactttctaatgatttgagtatattctttaagtaagtcagctaactcatcatatgaaggtgaagcaaattcttcatcactatcactatcactatcatcatcaat

SEQ ID NO: 28087 - DNA, 453 bp, Zea mays
tggtgccgatggagaaacaaaaatccttgaaatcctggttgtcgaactgcttgccgttgtcaactgtcagctcggacggtactccgaagcggcaaacaatgttctgccagaagaatttttgggcagtctttgatgtgattgtggaaacagcccttgcttcaatccatttggtgaagtattcgacggctacgaaggcgaacttaaggttcccctgagcggtgggcaggggcccgacgatgtccaggccccagcgctggagaggccatgtatgggcaatcaactttgtatattgcgaggggttgcctgaccgaggagagaacttctggcaggcttcgcaggaccttgtgactcgatttgcggcgcagatcattgcaggccagtaaaacccttgacagatcacctttgcagccagggcccttggccccgcgtgcgagccgcacgtgccactatgga

SEQ ID NO: 28088 - DNA, 402 bp, Zea mays
  unsure (1)..(402): unsure at all n locations
agctttgatttgatggctggtgagaagaatactgctgacccagctctgtccgaattttatgaagctatggagaggactaatgtataaaaagattgcaccgtgaatacattatgctgtggatactctgaaaggtttctgtgtgacaaatgtaagacttttgatgccacaaagtggagaattgacggtgccacaagatcggtcctggaagccaagccatggtgtcttctggaaatcgacaatcaaacaatgacagattgatgtcatgaggggaaggtactttcgtgacatttctattgtgcgggctgaaggggagagtaatgtccctctggccaaagctaacgaggtggttgtctatagaagtgtcatgaaagcanggctgcgatttcctttggatattatgct

SEQ ID NO: 28089 - DNA, 479 bp, Zea mays
ggagaacacgtgataggtttgactaacgtgcatttcgaaaaatatataccatgtgcagctggtcaagcaggtaaacaagtgggaggagcgcatcacggcaagaatgtgatgaccacttcaagacccctggagctgctgcatatggacctcttcggacctgtcgcctatctgagcataggagggagtaagtatggtttagttattgttgatgacttttcccgcttcacttgggtgttctttatgcaggataagtctgaaacccaagggaccctcaagcgcttcctcaggagagctcaaaatgagtttgagctcaaggtgaagaagataaggagcgacaacgggtccgagttcaagaaccttcaagtggaggagttccttgaggaagggatcaagcacgagttctccgctccctacacaccacagcaaaatggtgtggtagagaggaagaacaggacgctaattgatatggcgaggacaat

SEQ ID NO: 28090 - DNA, 390 bp, Zea mays
  unsure (1)..(390): unsure at all n locations
gtctgtggatgtaggtgaactacaggaccggtggtcggtgggagccattgggttattgatagtggatgcacacaacatatgacaggcaacccacggatgttcacctcacttgatgaaaatggtgatggacaaaacaaaatcacatttggagacaattcaaaagggaaagtgcaaggacttggcaatgtggcaatttcaaatgatttatcaatttcaaatgttctctttggtgcacctctgagctttaatntattatcagtgggtcaactctgtgatcttggacttcaatgcttattcactccaacagagggtattgtatcaaaaatggatgatgaatcaatggtgtttaaagggattagatacaacattctctacttagtgggattcact

SEQ ID NO: 28091 - DNA, 424 bp, Zea mays
agcttatcaatgacaaatgctatatcaatgcctgaatcgtgatgacaagtaacatagctaagtgtctctactgattggaaagcaatcttgcaaggaaccccgatgcgcattgaaaggcctagaatgatgagctgaatagctgatcaaatgcagcagtactgagacatatattgcttgcaaaaggaaatgaagtgaggggcctgatactaggacgtcctaattgccgagaaagtatgttcatgaccaagcaatgtgcatgatcagacacccatatccaagctacagtgctacacccaggagttcctcagcaaaaagcacaaacaacccccaaactccagaaaactcacacttcgcatggacagaggaccagcaaacgtatgaatctaagcattgatgttggagatccaaaggtccaaacaatgca

SEQ ID NO: 28092 - DNA, 275 bp, Zea mays
acatgggctagtcggcgatgccagagccaatccatgttagtcctagccattaagcaagtggctagttcagcttgaataaaatcaactaaatatagctgaccctctagcactcccttaaaagctattgaatcatcacttcttctaaagacagtaacacctaatatcagtaaaagacagttgtagcccattttacacaattgagaaacagaaagcaaattgttatctaaagaatctacaagaaaaacattggaaatagtatgggcacgtgatatagc

SEQ ID NO: 28093 - DNA, 419 bp, Zea mays
  unsure (1)..(419): unsure at all n locations
agcttctaaaaggagaacacattttaggattaacaaatgttcattctgagaaagacaggatttgtagcgcatgtcaagcagggaagcatgttggagcccatcatccacacaaaaacatcatgacgaccgacaggccacttgagctcctacacatggatctattcggcccgattgcttacataagcatcggcgggagtaagtactgtctagttattgtggatgattattctcgcttcacttggatattctttntacaggaaaaatctcaaacccaagagaccttaaagggattcttgagacgggctcaaaatgagttcggcttaaggatcaagaaaataagaagcgacaacgggacggagttcaagaactctcaaatcgaaggtttccttgaggaggagggcatcaagcatgagttctct

SEQ ID NO: 28094 - DNA, 417 bp, Zea mays
  unsure (1)..(417): unsure at all n locations
agcttaatgcctctcctaaaagattgtctatctntgttaagggcanagcttccatgcctcaggataacgagggttacattttatactctgccggttatattctagcataaaattaggagaattcactctagtaagtctcactctggccctaatcatgcttttatgtataagagtgagacatctagttctaggcaatctactcatgctaaattgcctaagaagaaaactcctattgcatcaaatgatcataacatttcattcaaaacttttgatgcatcttatgtgcttactaacaaatcaggcaaaatagttgccaaatatgttgggggcaaacacaaggggtcaaagacttgtgtttgggtacccaaggtgcttgtttctaatgtcaaaggacccaagaccgtttgggtacctaag

SEQ ID NO: 28095 - DNA, 438 bp, Zea mays
  unsure (1)..(438): unsure at all n locations
cgctggcgccatacggaatctctcaataatctacttgcctgtctcactcatatggtataatatcgttttgtgcttacccactaggtacaaaaaatacttggtgatagggtccgtccagttgtttaaggcagttaagtgcaagcaggctgtgaacctttgtttgaccactacacacatacctgaacctttgaataatgctgtggctgggcctgtatatgcaccgtacggccattgtttaagccctgggcacttttttttatgtgccaagattatcctcatcattaaacaattgcccaacttggtttttttaatactatggtacgtgccacggcgattactntacagaggtacgtgttagtggctatcatgcatgtagacgtattatggtagtcgcagtggggttgacagtgacccaaattggccaaatggagcctggag

SEQ ID NO: 28096 - DNA, 414 bp, Zea mays
agcttttcgcgatgttggtgatgaacccgccatgtgggacccgttcgtcggccacacacgtgaagggggcgtgaggaagcatgcagcgcccaggatgatgtgttaagcgcgcgcgggccacttgggccgagccagggaggtttcagcccgagtgcttttatcctctttttcctttttcttaatttatttcctgctttgtttctcctttatattctaaacctagaatttgaattcaaatcttgtggcgaatttgtactaaaatttgtatgttttgaacatgacattatggggtaggtttattttcttgtaaatttattgtccttcataacatcgctctgtttcttcttttctatattatttccaattcgctaaattgtaattttgggttaaatctaaattctcaaattagtatcg

SEQ ID NO: 28097 - DNA, 394 bp, Zea mays
taaaaggtgacatcttcaaactggactggtagctattattataatagaactcagcataaggtagactcttatcccaacttcctccatgctgaagggcacaagctctcaacatatcttccaaaacttgattagtcctttcagtctgtccatcagtctgagggtgataagttatactaaaattcaacttggtattcatgttctcatgaaagcttctccaaaaccttgaggtaaactgtgaacgtcgattggacacgatcttctttggtactccatgtaaacacacaatccgagccatatataactctgccaattgagagcctttataagtagtcttgaccagaatgaaatgagccactttagtcaatctatccacaatcacccatatagcatcata

SEQ ID NO: 28098 - DNA, 421 bp, Zea mays
agctgatgcatgtacttgaattattgaattcataataatggtttaaacttcaaagttatcacaacctcatagtcgctcataatcatagctcacagagacagtcacagcggagagagagccgaatacaaaagaaacaaaagcaagtctgcttgtcccaaacggtcatccagccaacccaaataaccaaattcaaaataaacaaaaggaagtctgcttgttctagacttctagccggccagccaccaggtgtccaggtgtcccagacggtctgcttgttctagccggccagccaccaggtgtacagccatctcttttttccccttattgacaccgaccaaaagagagtagtcctttacgtccaaagactataggatggatcatgttagtagatgcaattaagatacaagttgatagacatgtt

SEQ ID NO: 28099 - DNA, 434 bp, Zea mays
tccgcattgaagacagtgtttagcatattcgaagatgtcttaatacaaaacggccggtcccgagatgaagctgaatctctctgaagagaagaacctggggttccttatagcgatggcggagaccaataccgaaaaaattaccaatgagatcctggaaggcttgtctgaagatactggtgacagcgatagttatgatgtataaagtggtggggaagagtcctaagatcggccatggcggccaattcactcggttttcggaaaaaccaccattaagcagagtcatattgataatatgagggggcggtattatcgagatatatctatcgtgagagctgatgctggagaaaaaacttctcccacccccatagaagatgaagtcgtaatcttccgaagctttctcaaggctgggcttcgattcctcctaagcaactttg

SEQ ID NO: 28100 - DNA, 377 bp, Zea mays
agcttgacatatcaaaagcgtttgactccatcaactggccatatttgatagaggtttaagagctttaagattttctcagaagtggaggaattggatcgccacaatgttgggctcttcctcctccaaaatcttaatcaatggcccacaaacaaatgcaatcaagcacatgcgtggtgttcgtcaaggagaacccctatccccgttccttgttattttagctatggacccgctttataggatgattgagatggcgggagatgttgggcttatggggcgggttttgccgagagcggctaaacttcctgttcttttatgctgatgatccagaatgtttgttaaagcaaaaaagaggatttgaagttctgaaaggattctga

SEQ ID NO: 28101 - DNA, 465 bp, Zea mays
tcttcgcttataagtgcttggtggtagtttgatgggttttggtattaattgagacagaaaattcaaaagatctgtgaagctagtatcaaaccatccggcgctagccttcaacttcagaagttctaaaactgtacgcaatgtaataaactctttgtcacaaccctctgaatcatcatataaaggttcttttgaggcactttccagtccctccattatagatagccctttctgcgatcccacagaacttaacatttctggttccatatggcgcaacatctcttcacaatcaaattcttcaaattcttgagtagcatccacattatccacttcaccatcaactttaagatctaaaattccgacaactctctcgtcattaccaggcacttcacacggatcccaactcaccatgtctgaccatatcgtgtaattgttttaaaccctcttttagcagatgtgattggatac

SEQ ID NO: 28102 - DNA, 422 bp, Zea mays
  unsure (1)..(422): unsure at all n locations
agcttctaaagggagaacacattntaggactaaccaatgttcattttgagaaagacaggatttgtagcgcatgccaagccgggaagcaagttggcactcatcatccacacaagaacatcatgactagtgacaggccactggagctcctacacatggacctattcggcccgatcgcttacataagcatcggcgggagtaagtactgtctagttattgtggatgattattctcgcttcacttgggtattctttttacaggaaaaatctcatacccaagagaccttaaagggattcttaatacgggctcaaaatgagttcggcttgaggatcaagaaaattagaagcgacaacgggacggagttcaagaactctcaaattgaaggcttccttgaggaggagggcatcaagcatgagttctcttct

SEQ ID NO: 28103 - DNA, 448 bp, Zea mays
  unsure (1)..(448): unsure at all n locations
actcagcttataagatacaacgctgaagccataagtttttagaagacatttatagaaccgttttgtttttctatttagataaaataataagttttaaaaccgtttatatttatattatagtacaccattgcttcacgttgaagctggaacccataacagtaccgtcttctagatgcgtatcattgaacacgagtaatttctttaacatttccaaagtgttttgtatacacacatgtgcacctaacattaaatgggattgtttcgcctggatggctaatactaaatgcttacatataatactggcagttcattagcttgaaccactcaacgtgctacctaacatttctganaccaaagcggcatgaacagaaaggtanggtgcatttaaagttgcgatatactccctactcatannagttgcgatatacttacatttgatacatgaagt

SEQ ID NO: 28104 - DNA, 367 bp, Zea mays
  unsure (1)..(367): unsure at all n locations
agctggtgaaggttcttcatcctcacatgtgctaaacggcgatgccacagccagcccatgcaagtcttaacaattaagcatgcatctagaccggcctcctcttttgcaaaatcaactaaataaagtttgccgtctagtacacccttaaaagctagtgaaccatcacaccttctaaagacagacacatctacatttgtgaataaacaattatatcccatattgcataattgactaacggataacaaattatatccaagtgactcaactaaaaacacattagaaatagagtgctcggatngaaataacaatcttcctagccctttcaccttgccttggttcccatcaccgaatatgattgaatcttggg

SEQ ID NO: 28105 - DNA, 439 bp, Zea mays
  unsure (1)..(439): unsure at all n locations
nggaaatgggccgaattcagtagattgagcccacacgaccccncttctttattctttttatttttcctttctcctttntgaatttcaaattcaaatttgaatcaaactttaaatgtgaactcatattcattttgaatgtacaaacttaacccaataatatggatggtttaactatattatatatatttatttttatttttttatatgtatatatatatattgtataacctttttcttttctatctttccaaattcaatttgaattcaaattcaaattcaaaccttgtgcaatttttttatgctcaaattatattgtaaacttaaaagtactaattntggaaatttataaatttcctttataatttatatactttctctttttcagaatctcanataggtattaatccctaaaattgacactaatttatttctattaatg

SEQ ID NO: 28106 - DNA, 358 bp, Zea mays
agcttgtgaaggttcttcatccccacatgtgctaagcggcgatgccacagccagcccatgctagtcttagctattaagcatgcatctaaaccggcctcttcttttgcaaagtcaactaaataaagtttgtcgtctaatacacccttaaaagctagtgaaccatcacttcttctaaagacagacacatctacatttgtaaatagacagttatatcccatattgcataattgactaactgatagtaaattatatcctagagactctactaaaaacacattagagatagagtgctcattagaaattgcaattttacctaaccctttaccttgccttgattcccatcaccgaatataattga

SEQ ID NO: 28107 - DNA, 461 bp, Zea mays
  unsure (1)..(461): unsure at all n locations
tatgccgagatttaaaatatgggcaatttgatttcaatcatgcttatctaggcgtgtggttaagctcgtaatcacggtggattgcttattatggtttaaatgcgcatggttattgtgaatgcaattgttaaacgtgtgtggtaattctagtgcacgaaatgacatggataagaattagtaagtctacttgttagtcctcatttgattaatttaactctaacaaatggtaaagtgttagattaattccggtctctagaatgcggcatttcttgaattatatgtgaactgaaatttattgattggtgttttggactgcacgcagcgattatcccgggcggtatgtttgatggactanatcatgttttctgtagagaagccatatagaanaagtgtgagataccctattatcttactttgtgtaaatttgacagcccatagtctgatcggtaggagtatacttt

SEQ ID NO: 28108 - DNA, 424 bp, Zea mays
  unsure (1)..(424): unsure at all n locations
agcttcgtcatctgagaggaaattgccctgtagaatttacatgatctcagntctccaatcttcgctataaacaggaaatatattgaccactgctctttcaagaatgtcgaccgaaggtgcttttattgtttcaaaaaatacttcctaangtaaaagcaccccatgtgccgctgacttggctaacagatcaacgtgctcattttctcctcgtggaatattcttgacagaaaacccttcgaaggaagcttcaagccttcgaactgtatccaaatatttctcaagcttcggatctcttgctttgcaactcttgtcaacatgactagaaataactcgggaatcagttttgagaacagcccttcttatcctcattgtcttcaacttccgaagccccaaaagtaaagcttcgtattcagcaatattattt

SEQ ID NO: 28109 - DNA, 363 bp, Zea mays
  unsure (1)..(363): unsure at all n locations
tgtggaaatagagaanaaatagaataggaaaaaggaaattataaaagaaaaaggacaaaatacctgttgggcttgagtcacccaaaccggcccagttacccttcatccgcgcggcctagctagttgccaccgagcccaactcaattctgccgatcctgccacatcggtgtgccgacgggtggggcccacccatcaatcatgcggcgcgcgctcttctccacccgggtcgttgacacctgggaccacttcgtcagaccttcttctccctgtaacagatcgacggctgaatcgaagggttagctctgcgtngatcgggttgcttggcctagccgactcggtcattggccctcacctccatataat

SEQ ID NO: 28110 - DNA, 400 bp, Zea mays
  unsure (1)..(400): unsure at all n locations
agctcggtcgtacctaatacgagatgaaagggatctttttaataggctctgttcttaaaagagtgttaacatataatcatgttgataatgtatcctaccgccatcgacacgaacactgcacgtacttgctgaatatttcttgagagacttaataacacgtgttgtgcagtactcatctgctgcagcaaagccaaggtaggtgtaggagcctangttgaggcatctggtgttattcgaggtacgcctgcaacaatgaatcaataatgtgtgttagcaacagctgaaacttgcttcattccattacttgccatattttttatgtctgaaggatcattcatgtacaaattacaccttggaaagtgaacgaaagacatatacatatttagtctattgtcatatt

SEQ ID NO: 28111 - DNA, 324 bp, Zea mays
ggcttgcctgccataaatacttatgcataagtttggttgagagtattatttgggggtctgcctgacgaggacatcactcctatatatacaatgcatggatcgataacacaagcacatgaacgatagttaattctcatagtttgttctaacctagtcaactatgttttagagcttacacttggtgctatgcatggtttgatgattaggaaccatgtagaggaccatcaaatacatgggaagggacaaggtgtcaaagaggagaagctaatacgttgacaacaagaggaaccaaagtccgactcaacttcgtcttcaccggagtct

SEQ ID NO: 28112 - DNA, 359 bp, Zea mays
  unsure (1)..(359): unsure at all n locations
agcttaatgcccctcctaaaagaatgtcttattttgttaagggcaagactcccatgcctcaggataacgagggctatattttatatcctgctggttatcctgangataagattaggagaattcatgccaagaaaactcattctcatcatgcttttatttacaagaatgaagcttctagctctatgcgttctacaaatgttaaaatgcctaagaagaaaaagcctatngccatcaataaacctaatgtttcatttaagacttttgatgcctcatatggtttaactaaccaatcaagccaaggagttgccaaatatgttgggggccaacacaaggggtcaaagacttgtgtttgggtaccc

SEQ ID NO: 28113 - DNA, 467 bp, Zea mays
  unsure (1)..(467): unsure at all n locations
tagaaacatacctttactctngatntgcactntgtccattcatgggcatagattcacatttaatcacttgtgttggcactcaatcactaaaatacttagaaatggcccaagggcacatttccctttcaaattcggttgctctttctaccaccgaagccgagtatattgccgcaggccattgttgcgcgcaattgctttggatgaggcataccctgcgggactatggttacaaactaaccaaagttccccttctatgtgataatgagagtgcaatccgcatggcggataatcccgctgagcatagccgcactaaacacatagccattcggtatcatttccttatggatcacaaacaaaaggnggatatcgagattgcatatattaacactaaagatcaattagccgatatttntaccaagccactagatgaacaaactnttaccaaacttangcatgagctcaatatt

SEQ ID NO: 28114 - DNA, 321 bp, Zea mays
  unsure (1)..(321): unsure at all n locations
agcttatatctacctactagaccaagtaaaaatgtttaacccctctgtccactccatttaagttagttttaccctttattctataatatgcttaaggataaggaaaatagaaaatgcaacttaattaatgaaccagagagtacttctatttttggtagggtacttattcaatatagntcacttgaaaaatatatcataccctggtttagtacaaattaagtaggatatcttttattttaataaaacaaggataacttagaaaaaccctacaaaaatgaccccaaggtaaaaacacccccacccttgggataactaatattt

SEQ ID NO: 28115 - DNA, 422 bp, Zea mays
tgaacctggaagtcatcggcgtgcgccgtgaagatttaatcgcttggatgatggtgagttacgtcactgctcctgcttgttgatgaataagtcgaacgattaaatatatttgctgtgctaattctcatatttttagcaagagtgatatgtgtgaaattaatcgtgtcgtctagtattcgttagtctgtaatgttaaggataggtcggaagtataaatgatgtgaagaatatgttaatagaattgtacgcatggcgtgattcgattaaaaatattctatcagctaggtcatggaataatgtgatgtttatgtatttggcatgatatgcaaattaatccggataagtggtttaaaaagttagttaatatgctcccttactctaaattgtccgtattcaaaaatatttgactaaaatgtgacgag

SEQ ID NO: 28116 - DNA, 189 bp, Zea mays
agcttgggcgcgtgcttgagaagctcccttctggctcgttgggtcttgggcaccctgattgatgccaccatcttcttcctccgctccgatccaagccgccgtcgccgtcgccgcggagaacaagctgaagaggggggggggggggggggtctttatttggactctattcctaccctatcgtttacatta

SEQ ID NO: 28117 - DNA, 430 bp, Zea mays
  unsure (1)..(430): unsure at all n locations
attctcaagcaacggaaggggaaggactacaaaccccgttccaagtaagtttgctacaagtgtggtaagcccggtcacttcattgcaaaatgtcctatgtctagtgacagtgacaggggcgacgacaagaagggaagaagaaaggagaagaagaggtattacaagaagaatggcggcgatgcccatgtttgtcgggagtgggacttcgacgaaagctcaagtgactccttcgacgactaggacgccgtcaacatcgtcgtcaccaaaggccttctctttcccaacgtcggccacaagtgtctcatggccaaggacggcaaaaagaaggtaaaatcaacgtccttcactaaatatgaaacatctagtgatgaggatgatgaanatgaggaggataacttaaggattctttttgctaacctcaacatgcaac

SEQ ID NO: 28118 - DNA, 419 bp, Zea mays
  unsure (1)..(419): unsure at all n locations
agctttaaggttctgatttaactatagttttatccaaaagctcaataatagaaagaaaaatagttgtattatttgactanncttaaaaaaatgtggagaagtggatatctacatactgacctgtttaaaaatgttaaacctctctgtccactccattaaattagtttttaccccttattttataatatgcttaaggttaagaaaaatagaaaaggtgaattaaatactgaactagagggcacccctatttttgttaggatacttattcaatatagttcactggaaaaatctatcgtaccctggtttagtataaaataagtaggataccttttaattgaataaaacaaggataacttagaaaaaccctacaaaaataaccccaaggtgaaaacacccccacccttgggatagttaatgtc

SEQ ID NO: 28119 - DNA, 363 bp, Zea mays
  unsure (1)..(363): unsure at all n locations
aatgccanagagccttctgcgctgtgtgctcttctattggagacagagatctaatacaagagcatattgccttcaaggtatggccgctcgcggagaaatgggaaatgccgcatgaaaccataatagaggccgacgaaggtggacttatcatgctgaagtacacttttaagttcggagataaattctttgagccagatgatgactggttaaaaagcattgaaaatttaagtgatgaactgcttggggcttattcgaaggccgaagatactgcactgtcagcagccttcggaggccgataaaagaagaggctgaatcaggtgtttgatgcaatcgggttccgctaccctgactattcgtatccca

SEQ ID NO: 28120 - DNA, 414 bp, Zea mays
agcttccttaatctttattgttgcttattatttatacttcaatgtttgtatttcgcctaagctgtgattctatatttttcatactcttttgcctcttttcttcaattttacttatagagctcaattagggttgttattagggtttcaacattttgctttttagaaaaactcatttgttttgatcatgatgcttttaagtataaacttagtggatcctttattcttaagtcaatttgatgcttcatgcttagtttggctcacaagaaatgatggctcttgggttagcacttgagagaaaccctgtgtgacactggggtgtcacacttcttcgccttctatttcggcggtatttttcgcgttgactcttcgcgcttcgccttatatttcggcgatatttggctctgcattcccttt

SEQ ID NO: 28121 - DNA, 472 bp, Zea mays
  unsure (1)..(472): unsure at all n locations
tgcttctgccatggttcaacggcggattatagcaccatatcgtgcgtatcttggcaaagtcactttgtacggtcgcttctctgctccatattctacctttntgctgtgagttccaagtcaagatatggtcggggtaaggagatagaggggggagaagttggctgtgtcagctatgtccaagctgagacaaaaatggtgtcaagtcgtgtctagcgccctagggtaggtgtcatctctttccagggtgttctagggttaatttggcgccactatgtcaattgtgtcgaagggttttgaaatatggattaaggtgaacatgtggaatctttgttcaagggttagttattatacttaggcaaaatctgaagtctcccttgtgctaaaccttatgtgaactatntaggacttttctgaaaacttattggcggtacttccttactanntaatgtangttatgaagtatattacaact

SEQ ID NO: 28122 - DNA, 391 bp, Zea mays
taagctggaggcgtctattggttgtctgcttggtgtaaactcctccttcttttcttccgtcgccttgaatgcaacgggttgagcttcggatggctcgccaagctcggtgagtgtcctcgagccttctatcatgcactcaaaacttacaaaatgcccgataacttcctcgggggtcattttagtatatctaggattaccacgaatcaattgaacttgagtgggatttagaaaaatgagagatcttaaaataacatttaccacttcgtgggcgtcccacttcttgctcccgaggttgcgcacttggttcaccaaagtcttgagccggttgtacatgtgttgtggctcctccccttgggaagccgaaaccgaccgagctccccctcgatcggtt

SEQ ID NO: 28123 - DNA, 472 bp, Zea mays
  unsure (1)..(472): unsure at all n locations
taaccttgtaacgaggataagctgcctttgttccaaaggtggatggtccttaagcctctntgaaacccttaagggaaaatgcttaagatatttataacatgctttcataagtgcataaattgtcctgagcatcacacttatactatgacacaatgcacttcacattctggatgctttagatatgttctcattaacctaattatgtgcaaatggcatttaaggccaaaatatgtattcctcaccatgcacatatttagggggagcaatctatatcatatagaactatgattatgcttaattgatatatctttttgatcatatctctntatgtctacgactaatgtgctttcaagtgatatctatgctaagtcgtagatggaaagggaaatggagtcttcggcgaagacaanggcttcactcaactctatcggtattatctacccttcgccatcactccacactatctcttcac

SEQ ID NO: 28124 - DNA, 418 bp, Zea mays
agcttgcccactgtatctgggttggccactatacgaagcaccaaatgtcctggcttgatgttcttcagtttcaccttacggtcgcgccatttgattgtttcagcttggtacttattgatgtggtctactgcttggagcctggtcccttctatgatgtcttttgttattttgtaaccctcttcatcttctaccaaagccaaggtccttattgagcccattcttgcttcttccaatgttattgcttttgcaccaaacagaagcttgaatggtgtaaaacctattgaccttgaaacagtagtgttgtggttccacaccacctttattagtcggctggccattttcctttgcgttgggtgaaaattgacttcattaattctgttattatgattctgtttgctctttctaccaatccatttga

SEQ ID NO: 28125 - DNA, 467 bp, Zea mays
ggcacttacgaccaaaccgcacccgcattcatatcacattcaatggcttaacaatagtggtaaggtcaaggtaaccaagctggtacgaattaattttgctattggttcatatcgtgatgttgttgactgtgatgttgtgcctatggatgcttgtaatattctgctatgtagaccatggcaatttgattcagattgtatgcatcatggtagatcaaatcaatattctctcatacaccatgataagaaaattattttgcttcccatgtcccctgaggctattgtgcgtgatgatgttgctaaagctaccaaagctaaaactgagaacaacaagaatattaaagcttgtggtaataacaaagatggggtaaaatagaaaggacatttgtttgctgcgacaaaatctgatgttaatgaattattttgcttcactactggtgcctatgccttggtatgcaaggatgctttga

SEQ ID NO: 28126 - DNA, 414 bp, Zea mays
agcttcggctcaacaagctgaagctgaagctgggccttcagagccctacaaggagcaaccttttgaagccgaagcaataaaaattccagaaccagtattagttgaagaaactgacaccgccatccccgaagcacctgccagcatgcgtgattacatgatacgacatgcttcggggaagaagctatctgaagaagaaactcatgaagccatccattatgcaaaggaactaaaatatccgaagggggcagtaatatttaatggaacgaatgaagatgacttcttatactgcctgcctgacaacaaagagctatctgtctgccgagaaatggccagaagtattggtttcccgaagcttgaatctggattaagcgccatgacaaaagaagatctcgcagacagtcttgcgtacaacag

SEQ ID NO: 28127 - DNA, 347 bp, Zea mays
  unsure (1)..(347): unsure at all n locations
tgtaatagaatatgttatttaaaagctaaatatatgtctactacaaagctaaatacatggaattccttcgcttatatatatatatataatattacagctctgagcttctaataactagaggaagcctagatcagatggtgcaatcaagtcgagccaaaccaaatccggggcgtctataaaagaagacttgtcggcgtttcgacccacgggtccctggaccgacgagtaaattatcgctgcgtgccccagcccagatgggtcggcgcgagacggaacacaaagaggggaaaatcgcggcttcgtgttgtcctgcgcctaaggtggatgcgcttgcagtanggggttac

SEQ ID NO: 28128 - DNA, 375 bp, Zea mays
  unsure (1)..(375): unsure at all n locations
agctntgaaaatgcagcaagatctggaagacaagaaacacgaagttataattgaaaatttagaaggcaaaataaaagagcaatcaactactattgaaaagaagaacttcgagcttcaggcgactgaaggcctattggcggaagccgaagctaaaataacagaactgaacacgaagcttctctgccaatctgaacaatttgaacaagaaaagcaagaacttaatgcaaaacttgaagccgaagtccaacaaaattcagatttgaaaaaactattggcgggccttcaagacaaatgcttggaatttagcaacanatgtattcaacgactgagaaaaattttccactcagtccgagctagcagtgagaaattcacccc

SEQ ID NO: 28129 - DNA, 405 bp, Zea mays
  unsure (1)..(405): unsure at all n locations
tagccagaagcatcggaaatagattcatgacccagatctgggtaagtggcgggcgaaaaatggtaggcgacgaagctcgaagccatcttaagccggtaagaaacttatgtttgttacttttaccttctcctttgaaatttgcacctttcttactctgctgcttggtatgtacaggatgacgaagctgaagaatgacaacgctgaagtttaacgaagctgaagacgaagccttagctgaagcttaaagttgtttacaatatgctttcctgcaaaaattctagagaaactcttgtaatatagctatgaaacaactcatggtaaattgtacataccttgtaatatattatgtctcccttaaccacatacagtctggcttgctgtgaacganacttctcttttgagccg

SEQ ID NO: 28130 - DNA, 406 bp, Zea mays
agcttgtgagattaataatatgtattacatagtttcatctctggtctaaattttaggtcaccataaaataaattgacctatgattatgtacttgtaaataacacttagggaaataataatctattttcaaataaagttaatgtatgccatatttatgttatactctgaattcattatcccttatgtagtattgtgtcttttaagatgtgttccaacgtttgtacatgtttggtgtgatgttcatttgtactttccaaatgtattgaatgcatgctggctttatttaaaccatgagcaatccaaggttcctgattggtgtgttggaaacctccttgaacaaccatttggagaaggaaggtgccttagacccattatgccccacattctttaagacccactcccccca

SEQ ID NO: 28131 - DNA, 394 bp, Zea mays
  unsure (1)..(394): unsure at all n locations
ntgagttccttcactttccaatctagcatatagtgggagtaggacacaagtgtgctcccttggtcaaggtttgggtaacacctgcgatgttacaattctttagattataacttgctttctatttctcaattatgtaaaatgggctacaactgtctatttactgatgttggtgttaccatctttagaagaagtgatgattcaatagcttttatgggagtgttagatggtcagctatacttagttgatttcaatgataacaatgctaaactagacacttgcttaattgctaagactaatatgggctggctctggcatcatcgacttgctcatgttgggatgaagaatcttcacaagcttctaaatgggagctcattntatgactaacaaatgttca

SEQ ID NO: 28132 - DNA, 402 bp, Zea mays
agcttggagaagcttacatggtctaggagaatctattcaacggcttggctgacgctgaacgtatctggaagtggctggccacagtggccagcgctcgggtggctcgggcggctggcgcaaagctcaccgcagctaatggggtgtgtcttgccaccgaaggtgaacgcggagtgaggtgatgcgcgtccgggggtggtcttaaaggcacgagcgagcacgaccgagggatggctctgacatgccctcggggtgggcgagggcgaacgccaatgcacgctctggcgtgtcggcacggcgttaagcaccaggcagcggagagagaggtcatgttcaagcgtggattggctccaaatctttgagattatggccatgatcccattgagatatctcttcccctgacat

SEQ ID NO: 28133 - DNA, 483 bp, Zea mays
  unsure (1)..(483): unsure at all n locations
tttgccacgacgtgatagtccctggccgaagagaagaataccatgtttgggccacattccgtatggccatgacgaaggacttcgccataactgcantattgcctccgtacaaagatatagttgcttcgtagctcatcacaaactgctttggatctgagtggccatcatacataggaagctaaggtggcttgtatgacggnggccatggggtagcctgcagttctgctgccaagggagaagcatcatcaaaagtaaaggtatcatgattaaaatcatcataccatccatcttcgttgaacaagcctttctgacgaagctccctgtgttggggccttcgatcttgctcgtcttgagcaagatgacacacttcttcagtagcttcgtcgatcttcctttgaagatcagccagccgtgccatcttctccttcttcctttgtacttgcttaatggatatatccatgtccctgatctcttggtccaact

SEQ ID NO: 28134 - DNA, 422 bp, Zea mays
agcttataagtttctggatgagaagtggtctctcaagttttgttgatgaagcaccagaagaccaatcaaggaaggaatccatgtgggagttcgcaagagaaaggtttgcgcattggcatcgatgcttcctcaataagctagctgacaagcgaaagccagaagcctgaagatgatctttgagtagccagaatcagtggttgcaatcagcaactagatgcccctcaaaggccagattttattgaagttccatctcctcgaagagttgcaaagtgaagatatgtagctgaagtaaagctatacccataacccttctaagccgaatctcgaggacgagattccttttaagtggggtagatttgagcatcccaaaaattcaaatcctgaaattttctcaaactcaccctaaattcaaaatgaatttc

SEQ ID NO: 28135 - DNA, 377 bp, Zea mays
ctatatggagtccggttacgcacggttcaacgattatggcagcgaggtaaaagctcccttgatcaaggcattccagttgatatttgtaatagaaagcgtggtacagctggccataagcaagttccattagatttaggaccattacgcaatatcccacttatggatagaacaacacaagaagatgcacatgcagctttgggtattagtaaacaaaaattcatgagattcatccgagaaggacatattaagtgtcattcaaacagtataaagccacatttaacagaggcaaacaagaaggctagactacaatggtgtgtggatatgcttgatcatgaaggcatgcttgacgagcctatgtttaaaggatgttcgatgtc

SEQ ID NO: 28136 - DNA, 377 bp, Zea mays
agcttgagattggattccaccatggaccacatatttgttgactaatggtgctattaccagaatggaacttggtcactaggcctccaccttgataccgagagatgggccagtcacttcatgaatttgggaaccaatctccctgcgaattgctctgtcacgctgactgaataaaaatctgatggtacacgaaaaaagatcttctgttcagctcccctcaccgccgctgacctttgcgctctgattcgtgcccaccgtcgcgatacttgtctctggcgagaggattacactcgacggctaaaagatctcatcgcggatgaacaacacgcactgtagccgctttgtctcttgcccatctgcgccggcgacgtggccgcacg

SEQ ID NO: 28137 - DNA, 444 bp, Zea mays
  unsure (1)..(444): unsure at all n locations
tgtaggttctcatcttgctcttgagtgtactaaaacagggcatgggctattaagggattagtctaaaaaccctagaagctggtgaggcgcatgtctttgagcttctgccaagaggatatagttgccagccgaagcgaaaaataccatgtctaagccacatttctaatgaccatgataaatgactttgccatcactgttaagttagcttcgtaactcatgaggaactgcctcgggtccgacaatccaccgtacattggtagctaaggtggtatgtacagttgtggccatggcgtagcttgcaaattcgatcgtcagaggggaagttccatcatagggataatcattgtagtcgagttcctaatgatgaanggtttgctgatgatgtggttcttctanggtctcaactcgttgcgttatgttacgcaattgctctgatgcttcatc

SEQ ID NO: 28138 - DNA, 361 bp, Zea mays
  unsure (1)..(361): unsure at all n locations
agctntggccccacctgcaggctcgtatcctcccttgaggtgggcctgggggccactgtcggtaccctgaaacaggggtaccccttactacagtatgaagatgcggtacccgcgcagctatctctagtcgcgtggtaaacagcacccaccccaccacgtggatggctctggggccgccatgtggccaagagaagacgatatactccaaggcatcaacagtgggtccggactcccatgggaaagtgtcggacccctgtatatacatnaccgacctccgggtgaggtccaggacctncacgggtgcaaaccggacccctatgatgggttacggaccccaatgtgtggggtccgggccactcac

SEQ ID NO: 28139 - DNA, 247 bp, Zea mays
gatgtgtcgccgaactatttaaactgaaggaggtagcacacttcacaagttgttactttgcagaagaacataatgtatttgtgagagcacctaaaggggggtgaatatgtgatcctgttaaattcaacactgatatccactaaactttggttatgaacgttataacggctgaggatcttgaaaccagctcttgtgaacacaaacaatctaagagaaagcacaccagagacacgtgatttttatccta

SEQ ID NO: 28140 - DNA, 430 bp, Zea mays
agcttctagcggagaaattgaagatgcaagatatgtggtcactacaagcgcttcttttgttcatgctaaagtgggaccttcagaaactgcgccagtaaagctaatgggagaaagtgctcgagaaaagcccacaacacctgctcccgaagcaccttcccagggtgatttgaattattgttcgacatgcttcgggaaaacaactattagtagagcaacttgtcgaaacacaacattatgctaaggagctgaaatacccccaggggtccttagtatacggaggagacaacgaagataacttcctctactgtctaccagacagtaaggaggtcaatgtttgccgtgaaatgatggacaacatggaatatccaaagcttgaacttggcttgtctgcaatgacgaaggatcagcttgcagataaccttgcctacaa

SEQ ID NO: 28141 - DNA, 358 bp, Zea mays
ctttgtttcatgccaatctgatgatagcctaagtaacagtccaacaggctcctgagctctgaagtggctgtctcatctatgagagaatctattcttgacgaaggaaattcattcttcgggcatgccttgttgagatctgtgaaatcgatacacattctccactttccgttggcctttttcaacatcatagtattggctagccagtttggatatgtcacttctctgattactccggcactcacgagtcttttgacttcgtttcttgcaccttcgactttgtcatctgacatcttctgaagcttttgcttccttggtctgatgggtgggtccacattgagagagtgctcgatggcatctc

SEQ ID NO: 28142 - DNA, 419 bp, Zea mays
  unsure (1)..(419): unsure at all n locations
agcttgccttcctccggaaatccttctggtttccccacgggtccaggctgctgacaggtacacgcgggagtagtcatagccaaagacgagggctcccgtgtcaaatgcagatgagaacccagggtcgggacctatccctacggcaagtaccaaaccaagaagggctctgcaactctcccccagctgggaaggacccttcgaggtaacgggaatacacagacccaagggcaaccatctagctacgactggaggagtaccttaccccgatgccgaaacatctctgtaagttctatccatagagcaagtctgaggggtcgaaactgttttgctttnttgtaactaggcaacacatacgtgtacgacaacccggtggggtctgtccccataaacccggcctattggtctgcacacatgcatga

SEQ ID NO: 28143 - DNA, 305 bp, Zea mays
tcggaaccgcatacttgtagccatcttccggcagacggtttattctttgttgtatgggaggcagtataggaaatcatcttcatttgtcccattgaacactagtgcccccttcggatatttcaattctttggcatagtgattaacttcaaaaacttcttcttcggataactttttccccgaagcgtgtcgcacaatataatcgtatattttggaagatgcttcgggggcagcagtatcaatttcttcaaccaaaattggctctgacattttcattatttcggttgcctttgcaattttcgtttctt

SEQ ID NO: 28144 - DNA, 419 bp, Zea mays
agcttcaaatgtgggagagactcccgacgatctactacaccaagaaagacggaattctcgccgtcgtgattgtcgacaagctcacgatcgagagtgggagaaagcctagcaaggtgcaaggctgcgccaaaagaaccctctctttgctcagaacctatttgtaacgccttaaatttgggggtagaattttttttcttctttaatactcaccaaattcaggtgttactctcttttctcttcctgattcgctccttcttaccagtttcaaagcagtatagcaactggtgtccgtattgctcataaacaaaaacctaagttgtcatgggtgttgcatcatgccaaagcatatttcttttgtctgatgtcatgtttaatcgcgtgttcgcctcgtctcgtttctgtaatatcccaaaaaaatg

SEQ ID NO: 28145 - DNA, 437 bp, Zea mays
tgtcgcgctggagctagaggtcgctcgactagctgttaattcttttgaggacaactgcaccgtcttgaaggctcagcgcgacaaggctatggacaaagtcgttcgcactagacgaatcctgatgaggaggcccgacgtcgtggtgcctgacaatattgtcgctgatgtcaaggctgcgcccgatggttcaagtcgtccttcttctgtcgctcctgtgaaaaacattgcttgcaaggacgtttcgatgcagtgatgtcctgcaaaacactcgatgtaatatgaattctatgtgcatgtgatggttgtgttagaactcgaatattatgtggacagggcgccagaacatgcccctggtgccaacaagtaaaacatttttttcctgaagggctaattgtttcgttgtagggcatagtagtcattctgaacaatcatgaaag

SEQ ID NO: 28146 - DNA, 395 bp, Zea mays
  unsure (1)..(395): unsure at all n locations
agcttgttgctggcaaagcgtagttctgtttcttctctatcgttgacctaccactctaggtctatcccttgatctacgnttctatggtctgaagatttgtgattttctccgcactgttgttgctatccccgtgtcctaataatacgaaatagtttaagcgggtgaacattactgtggtgtaatcagagtaatctgttgctgttaacgcgcattgctgtatgaattgtttctacccgagtagaagaatcagaccattcgggattctatgatcatagtacattttttgcttgaaaagatgagcatcgccgagtactttttatacagaccgatcatatgatagggttggacaaaacatttgtggatcttgagctcgctcggcaatttcgtcacacgct

SEQ ID NO: 28147 - DNA, 464 bp, Zea mays
  unsure (1)..(464): unsure at all n locations
tatgaagattcttcatcccaacatgtgctagtcggcgatgccatagccagcccatgttagtcttagcaattaagcaagtgtcgagttcagctctatcaaaatctaccaagtatagctgaccctctaacactcccttaaatgctattgaatcatcacttcttctaaagacagtgacacatatgtcagtgaaaagacagttgtagcccattttgcataattgagatacagaaagcaaattgtaatctaatgaatctacaagaaaaacattggaaatagaatggtcaggagatatagcatttntacccaatcctttgaccaaaccttgatttccatccccgaatgtgatagctcgctggggatcttggtttttctcataggaggagaacattntcttctcccctgtcatgtggtttgtgcacccgctgtcgatgatccaacttgagcctccggatgcataaacctac

SEQ ID NO: 28148 - DNA, 421 bp, Zea mays
  unsure (1)..(421): unsure at all n locations
agcttcctccagcattcttgagcccctcaggcatccgaaggtaacaatatgttccactaggggttatgaagctggttttcggctcatcctccttcttcatccaaatttgatgatagcctgaataacaatccatcagactcataagctctaatgaagctgctgcatcaactagggaatctatccttggcaatggaaactcgtccttcggacaggccttgttgagatcagtaaaatcaatacacatcctccatttaccattggccttctttaccataacagtgttagccagccattttggtattntacctctctgataactccggcactgaggagtctnttcacttcattccgagcaccttcggccttgtcatcagacatcttctgaagcctctgctttctgggtctgaaggatggatcaaca

SEQ ID NO: 28149 - DNA, 448 bp, Zea mays
  unsure (1)..(448): unsure at all n locations
ntgcctcggtcggaccaataccagaaaggccaccacacaatgggagtggagagatggcgagagtatcgtgtaccctccttggcaagaggctaaacggtggagtatctgtgctctcggttggcgtgaacccattctgggctttagaaacccggcggtgagttgacatatgcaagggttaagtgctacatatgtcgtgtggttggagatccccagctcggtattaatcgattcggatcgccgttacttctcggatgtgaagacttggtcactaacctgcaatctaagtcatggatggaatcataatgagcaaaaatcatgttgtattgattagtgtgatgattaaagtagactagatgcanacaggtatattaatacttaatctagcattaaaatggtgaaagtaatgactcattntagtaagcattctgcanactattaatgttgatcc

SEQ ID NO: 28150 - DNA, 356 bp, Zea mays
agctttctcaccatgtatagcatgcttaatgaaacttcgtagaatgatgcagtttaatacaaaaacttggtcatcaaacagactattgaacttctgaccagtcaacactaaagtaggtcggctgcctttctgttagatttgattaagtcagccttagaagcattagaaactagacttcaagagctttccaaaaagtacttatgggtgttgggggccttcggcttccgaaggtcctcaaaaacatgatttaacaatgtctctggagtataatgtgtggacagggatcttcgaacaagaacccgcggtatgaagaagcatggaaacaatacgaaggatggaacagagccgaagctgtg

SEQ ID NO: 28151 - DNA, 434 bp, Zea mays
  unsure (1)..(434): unsure at all n locations
taccctgtcccatatacagggcatgtggccagttaagattcttgatcatacaggcctacatacgcatccaatccttaattaacctgngtggtgcatcacctgttcctagcccaagtctcaatttaagtacttccatccttaggagtgtttgtgtagatgaaaagagcattatagggaactttgcaataagatcccaccatgctcccaatgaaaatattcttatagatagaagtcatccttcctcaggataaacctgagctatgcataagtgcaaaggacaaactctatttgcttataagcagggctaagcttttttttttgtaaatcatattttgatacttcacgagaagtatctataaaaggaatggatttcaaggtagccaatgcatcaaagggtttccaagaaactcctataaacctaatgcacattcact

SEQ ID NO: 28152 - DNA, 414 bp, Zea mays
  unsure (1)..(414): unsure at all n locations
agcttggaggcgtcaattgggagtctatttggtatagactcttctttcttctctttcgttgctttgaatgcaacgggttgcacctcgggtgtagaggtggcgccatgctctaagttgacaatgtgtttgtattctttgatcataagttcaaagctcacaaacttgccaataacctcctcggggggcatctatttgtatctaagatctccatggattaattgaacttgagtatgattacaaaaaatgagagatcttagaataaccttgaccattttatggtcatcccattntgtgctcccaaggttgcgcacttggttgaccatcgttttgggccagttgtacattgcttgtggctccgaactcaacaatatcccatatgctttcgtggagtgaggttagatggtgcctcatttt

SEQ ID NO: 28153 - DNA, 425 bp, Zea mays
  unsure (1)..(425): unsure at all n locations
tctaaagggagaacacattntgggactaacaaatgttcattntaagaaagacagggtttgtagcgcatgtcaggtaaggaagcaagttggtgttcatcatccacacaagaacatcatgacgactgacagaccactcgagctcctacacatggacctattctgcccgatagcttacataagcatcggtgggagtaagtactgtctagttattgtggatgattattctcgcttcacttgggtgttctttntgcaggaaaaatctcatacccaagagaccttanagggattcttgagacgggctcaaaacgagttcggcttaagaatcaagaaaataagaagcgacaacgggacggagttaaagaactcacaaattgaaggcttccttgatgaggagggcatcaagcatgagttctcttctccctaca

SEQ ID NO: 28154 - DNA, 348 bp, Zea mays
  unsure (1)..(348): unsure at all n locations
agcttgtcaagcatattntggtacccatcgcttgatgggtccatcatggttagtcaacaaagatctaggaacccaaaagtcctttgtgttagcactaggtaaactcattacctttctagcacaagttgcaattttgggttgcctagttacatgagaattaattgacaagctatgagtggaattgttaccaatgggacaatccttgcattgatgtcccttctttcggcatgtgtagcataggcgtttttcaagttttgaagttttcttctttccttgtttgttgcttgctacatggttagtaaaaactttcttttctaactctatgcctttttgttttaaatggggaca

SEQ ID NO: 28155 - DNA, 403 bp, Zea mays
cggacaccatagacctgtccagaatctccattttatttattgggaattacgttctgtacaaatcttcttttagtacttcaacctaaataaagcgtgtgacccagccaaatgcgcaagcaaaatactcctatgtgcaacaaacgctgtcgtctgtacatccccggaggctgcaaaccaaaatcaccggtcttcccgtcgaaccgtgtttgggtccgacatcatgtccatcatcatcttctctggagagtcttcccagctagcaaaagttttgagatcaacctgaaagagtaaacgggaatattgtgggcatgcatgcacgtttcaataacgatgaacatggcaacaaatgggtcaagtttgctcttagtcttggtagtacctttcttcgctgctctgagaagat

SEQ ID NO: 28156 - DNA, 404 bp, Zea mays
agcttttacatagcaaaatgctatttgcccatctatatgaggtctacatcatatggtcatgatgattacctatgtgttcttccaagtagatatggtggagatgtgatgttggttattcaccttgatggtgagttgctttttattttttgaaattttggtcaagcatatggtactggagtcctaaacattggctgcggtatgttccttgaatatatcaccctatagaccatgctttcaagcagcaaatgttttgcccaccactggaagatctactccattgtttcattacatggagattatctacgttgcgtacaccaattttcagaaatcttttggtacactctatgtgatacctggaattcccaacatatgaagatatgatatattttggggaaatggtgcaa

SEQ ID NO: 28157 - DNA, 445 bp, Zea mays
  unsure (1)..(445): unsure at all n locations
tatcaaatggacgtgaagagtgccttccttaatggaccaatcaaggaggaggtctatgttgagcaacctcccagctntgaagatagtgagtaccctaatcatgtctacaaactctctaaggcgctttatgggctcaagcaagccccaagagcatggtatgaatgcctaaaagattttcttatcgctaatggcttcaaagtcggtaaagccaatcatactctctttactaaaaccattgcaaatgatttgtttgtatgccaaatttatgttgatgatatcatatttgggtctactaacaaatctacttgtgaagagtttagtatgatcatggttcaaaaattcgagatgtcaatgatggcggagttgaaatacttcctatgatttcaagtgaagcaacttcaagagggcaccttcatcagccaaacgaagtacactcaagacatac

SEQ ID NO: 28158 - DNA, 414 bp, Zea mays
  unsure (1)..(414): unsure at all n locations
agcttaacaacagggttaatagcctcatgtgttttgctagataaagttcattttcaacacagaagattgtcatgatcaaaattaatttgagtatagtcttccctgatcctaatantcgaggggcaacggctaataactcattaattggcatattttcttacatctttaaggagaatgtgaactcatttacagtggatgactaannttattttcttcttttattttcatcactagcctttataactatgtcataccttgcatttaaaagattattttccatttttcaacctatcacatttaacttttgactttctaatgatttgagtatattctttaaagtagtcagctaactcatcatatgaaggtgaaacaaattcttcatcactatcactatcactatcatcatcaatatca

SEQ ID NO: 28159 - DNA, 350 bp, Zea mays
gcttcccctacacgccgaagatacacagatctcggacgataggacacaagggattacccagcagcaaatatttatagtcccaagtgttatattctctatgtccctgggcccacatgtcgaggctcagtacctttgtgcatgccccccttcatctataaaaggggaggcatgcgacgttacaagacagatccaaactcagactcacaatacattacacagtggagtagggtgttacgccccggcggcccgaaccactctaaaccctcgtgtgctctcgtgtgttcatccaccagtctcgtagcaagcaaaacgcctaggcccctcctctctttaggaattaaggcgggtgc

SEQ ID NO: 28160 - DNA, 416 bp, Zea mays
agctttaccaaatggacgtaaaaagtgcctttctctatggaccaatcaaggaagaggtctatgttgagcaacctcccggctttgaagatagtgagtaccctaaccacgtttacaaactctctaaggcgctttatgggctcaagcaagccccaagagcatggtatgaatgcctaagagatttccttatcactaatggcttcaaagtcggaaaggccgatcctactctattcacgaaaactcttgacaatgatttgtttgtatgccaaatttatgttgatgatattatatttgggtctactaacgaatctacatgtgaagaatttagttggatcatgacacaaaaattcgagatgtctatgatgggggagttgaagtacttcttgggatttcaagtgaagcaacttcaaaggggcacc

SEQ ID NO: 28161 - DNA, 422 bp, Zea mays
agcttctaaagggagaacacgtgataggtttgactaacgtataattcgaaaaagatagaccttgtgcagcttgtcaagcaggtaaacaagtgggaggagcacatcacagcaagaatgtgatgaccacttcaaaacccctggagctgctgcatatggacctcttcggacccgtcgtctatctgagcataagagggagtaagtacggtctagttgttgttgatgacttttcccgcttcacttgggtgttctttttgcaggataagtctgaaacccaagggaccctcaagcgcttcctcaggagagctcaaaatgagtttgagctcaaggtgaagaagataaggagcgacaacgggtccgagttcaagaaccttcaagtggaggagttccttgaggaggaagggatcaagcacgagttctccgct

SEQ ID NO: 28162 - DNA, 422 bp, Zea mays
  unsure (1)..(422): unsure at all n locations
actcaagcttgtgaaggttcttcatccccacatgtgctaagcggcgatgccacagccagttcatgctagtcttagctattaagcatgcatctagaccggcctcttcttttgcaaaatctactaaataaagtttgtcgtctaatacacccttaaaagctagtgaaccatcacttcttctaaagacagacacatctacatttgtaaatagacagttatatcccatattgcataattgactcacagatagcagattatatccaagagactcaactaanaacacattagatatggagtgctcatntagaaatgcaattntacctaaaccttttaccttgccttgattcccatcaccgaatataattgaatcttgggaatctttattcttgacgtatgaggtgaacatcttcttctccccgtcatat

SEQ ID NO: 28163 - DNA, 384 bp, Zea mays
  unsure (1)..(384): unsure at all n locations
agctttagtgattagagagagtgattgttgtgttcatttgagctcttgcgcttggattgcttcttctttctcattctttcttgcgatcatctcaattgtaatcaaggcaagagacaccaattgtgtggtggtccttgcggngaagtttggttcccgtgtgattgagaagagaagcttactcggtccgaaggaccgtttgacagacggaaagggttgaagagacccgggctttgtgaccacctcaatggggagtacgtttgagagaaccgaacctcggtaaaacaaatacttgtgtctcacttctttattcgcttgcgagttgcttttacaccctctctcggactgcgattatatttctaacgcttacaccgcttgtaattgtga

SEQ ID NO: 28164 - DNA, 415 bp, Zea mays
  unsure (1)..(415): unsure at all n locations
ntgaccacatttactactattagatatctactaatttatttaattgttataaaatagtaaatatgtcaaggaatttaaatatagcattccaaaataaatgaaatatataaatgtgtgcatccaaatttatgtaaatgaatttatataaatgaatgaagtatataaattggctgtcaaacattctttagccctcacggtggtaaaaaaactgatgtcaaaatccattgaccctggagtcagtcggtcaggatcacaatgatgcgtagcaggcacgtactaaatgctgccactccaacctttattcacgcgcagcactgcacagcatgcatgcacccaacccagctaccacataccatccgtccgttacggacgccggctgcggcgcaccacacacggcagcaagagaggagatgca

SEQ ID NO: 28165 - DNA, 418 bp, Zea mays
  unsure (1)..(418): unsure at all n locations
agcttgctataggccttcttctttttctctatagcaggaaccttactggaacactaccccacttaaaaagaatgagggtagaactcttgaatcttggggatttgaactccttgaagggcgctcataacaagggtgttacngggcctttttctgctgttgctgcttgaccaggctacaaagagatgactgccacagggttgattctgggagaaccttcttctcatcttctcttcactatcttcttttcactgaccctttctttctctttgctcttcccactggaggattctatcaaagagtattaccatcatacagaggaggaaactgaagatgttgaaccatgtacaacagtcttcaatccaagaatcaccaagcattgtgatcttaggggcgagggagtgagaaatggtgttgcttg

SEQ ID NO: 28166 - DNA, 474 bp, Zea mays
  unsure (1)..(474): unsure at all n locations
tatgaagatatttcatcccaacatgggctattcggcggtttcatatccaacccatgttagtcttagcaattaagcatgtgtcgagttcagctctatcaaaatctactaaatacaactgaccctctaacacacccttaaatgctattgaatcatcatttcttctaaagacagtgacacctacatcagtaaagagacagttgtagcctattttgcataattgagatacagaaagcaaattgtaatctaatgaatctacaagaaaaacattggaaatagaatggtcaggagatctagcaattttacccaatcctttgaccaaaccttggtttccatccccgaatgtgatagctcgttggggatcttgatttttctcatangaggagaagcatctcttatcccctgtcatatggtttgtgcacccgctgtcgagtatacaacttgagcccncggatgcataaacctacaaaacaaatt

SEQ ID NO: 28167 - DNA, 398 bp, Zea mays
  unsure (1)..(398): unsure at all n locations
agcttgtgtttacaagaaggaaagtgggagcgctgntgtatttctgatcttgtatgtggatgacatattattgattgggaatgacattcctatgctggagtccctcaaagcttgggcggggaagaggtgttctatgaaggacttatgggaagcagcatatattttgggcataaggatctatanagataggtcgaaaaggcttataggattaagtcaagatacgtacattgacaaggttttgaaacggttcaacatggaacacgccaagaaaggtttcatacctatgtcacatggtaaacaccttatccagatacaatgtcctgcgacagctaatgagcgggagcgcatgagtaaggtaccatacgcctcagcgattggatcaatcatgtatgccatga

SEQ ID NO: 28168 - DNA, 460 bp, Zea mays
  unsure (1)..(460): unsure at all n locations
ngaagccatggtaagtagcataggccaataatatacgaattgactcaagcctagctacgggtgcataggtttcaccgaaatccaaaccttcgacttgggagtatcccttggccacaagtcgggctttgttccttgtcaccacaccatgctcatcttgcttgttgcggaagacccatttggttcctacaacattttgattaggacatggaaccaaattccatacctcgttcctagtgaagttgttgagctcctcttgcatcgccaccacccaatccgaatcttgtagtgcttcctctatcctgtgtggctcaatagaggaaacaaaagagtaatgctcacaaaaatgtgcaacacgagatctagtggttaccccttatgtatgtcgccgaggatggtgtcgacggggtgatctcgatggattgcttggtggactcttgngtgtggcggacttggttcttca

SEQ ID NO: 28169 - DNA, 367 bp, Zea mays
agcttatttataatatatattatttatttttatattgctatcagatttattataattgttggaatattttaaatatagctatttatgaataatctatttttaagaaaaaagaatgataaagcacactagatgcttgggcgaaggctcatgcccaggactctcacgttctcttctttgtgtggcttacgtgtgggcccttttcttttctgtgttccttctcaaaaacaattgggacccacgtgtaagtgctacctttttttccatatcagctagcgaacacatcagaaacactgccgtcttgctgatttgaacgagctacccctattaacaccgagcaccaatgtccagactcgcgcgcgcccaaaac

SEQ ID NO: 28170 - DNA, 366 bp, Zea mays
tggagttgtgaatgttgtcgacgatgatggcgtggaaactcctgaggaggagatgcagcaccgcatggctgccaacgtaccttgctctggtcgtgaccagcatggccctcccccctagtgcacccgcattcgcattgggcaccgtctctgcctcctcaaccagagcgcgacaaggttattaaaacgataaaacgttgaaacgctcatgggtgaagttttgtcttttaaacgtttaaacaaagtttaaacgtagttttaaacaacataggaaaaataccaatacatcataatttcagacaataatatgaagttaaataccaaaacagataggttagtggcttaccaaaacttcacccatgagctgga

SEQ ID NO: 28171 - DNA, 415 bp, Zea mays
agcttgccaatacttgtcaaagcatcagcacatgccatcacagcaactacagaccataccagtaacctggcctttcgcatgctggggactggatatgattggacctttcaagaaagctcaagggggatatactcatgtattggtggcgattgacaaattcactaaatggatagagttcaagcccattgcttctttaacctctgctaaggccgtggaattcatacaagacataatattcagattcgggataccaaacagcatcatcaccgacttatgatccaacttcaccagttcagaattcttcgacttctgcgagcaaaagagcattcagatcaagtacgcatctgtagcacatccaagagccaacgggcaggttgagcgagccaacggaatgatattggaagcactcacgaaa

SEQ ID NO: 28172 - DNA, 421 bp, Zea mays
  unsure (1)..(421): unsure at all n locations
tgcccccaggcaactattttcctcagagcagttcttaactcttatgcaacctcgacggggctcaaagtgaattataataaatcaagtatgtaccccatcaatgtttgccagcaaagatggagattcttgctagaacactcaactgtcagacaggatcaatgcctttcacctaccttggggtccctctaggcctgtcaaaacctagaatctgtcactttntaccgcttatccaaaggattgaaaggagactgtcctgtatttctgctctcctctcacaggccggaagattggagctagttaactctgttttctcagctctcccgactttcctgatgtgcacgctgaanattcttgccgccacagtcaagaagatagatgcttaccggaaacattgtctctggagaggaaatgatgtgaactc

SEQ ID NO: 28173 - DNA, 173 bp, Zea mays
agcttgacatattattcacggatgactccctctactgagcacaattgatcaacgtgatgggagctctaggattggtatgcaagatgacgaattatatcgccacaatatagggcttttgctcatcctataaaatgaactgcggccaacataccctatcaatcttgcgcacgtgt

SEQ ID NO: 28174 - DNA, 266 bp, Zea mays
tggacacaaggtgatgactgttgggggtctcatgaccatgatgccggccaacatacgctagtccactattctgaccgatttaaaccgcactctttacatacctattgataaaccagatggtgagtgcacaagcgtacacacgtttaatccccattgctgctaatattgctaccggagcacatgcttgctctaattactatacttcaattagagtatgtccttgagcaacatgtgttgccgcgatccttagtaccacaccatattaa

SEQ ID NO: 28175 - DNA, 290 bp, Zea mays
tatcatccgagtcccattcaactaagtaggctttggcatctttctcatgtataatattcattttggggggagagggggggggtgggccttctacttattgcttggaccattaatggcaatgtaaccggttcccacactcaaaaaatttcttataatgaaagcattactttagatgttgcacccctctaagtgacctcttttcatcttcatgaaataatggaattccctacaaaaaaagccatgtcaccatcactctcaccttcattttcttcaacatggctacctacttt

SEQ ID NO: 28176 - DNA, 455 bp, Zea mays
  unsure (1)..(455): unsure at all n locations
tggcttctagnttgtctagctcttccacatctctctctatgttgataggagatgatctccacaaccaatcttgtgtgcaaataagagcttggatcatgaatgaaattagagaggttctaaattcatctaaaattatccacctgtacaaaaaattgatttaaatgcaatcgctaatatgggaattgccaacacatcacgagctaaacgtgcaaatataggaaatctagattcattcactctccaccatgcaggaatatcaaatttgttattgtcgtcttcattgttctcactaaggtatttgttaatatcagatttggtagtgcccattgaaccactgccaaccttcatcctttatcagttaatgatctcatcattcttcctcctctntntgagtatgatcttcattgacttctgaagttaaatcatcatttggagcatacatgcttctatattct

SEQ ID NO: 28177 - DNA, 410 bp, Zea mays
agcttactcctgcctggaaagggcccttcatcatcaccaagattttgaagcccggaacatacaagctggccaacgatcaaggcgaggtctacaacaacgcttggaacatccaacagctacgtcgcttttacccttaaaatgtttcaagtcgtttatgtacctcgctttctttacataaataaagtctaaccatcaaggaaggatcagccttgccttggcaaagcccgaccctccctcgagggctagaaggggggaaccccctctgcgtcaaaattttcctcagaaaggtcttttgccagaacgtctttcgcgcttttcgactgcttcgataacagaatcctaaaaatgagcgagagagaccttgaacagcaaggccaatctagccaagggactcctacgcctccgggata

SEQ ID NO: 28178 - DNA, 356 bp, Zea mays
  unsure (1)..(356): unsure at all n locations
tcatcatctgaaaggagattacccttaaggtgatagatgttttcagttctccagtcttcactataaacaggagatatgttgaggaccgctctttcaagaagttcaaccgaaggtgcttttattggttcaaaaaatacttccgaaggtaaaggcagcccctgtgctgctgacttggctagcaaatcagcatactcattttctcctcgaggaatattatttacagaanaaccttcaaaggaagcttcaatccttctgacaatatccaaatttttctcaagcttcgggtctcttgccctacaacttttgtcaatatgaccagagataaccttggagtcagttttaagaacccgccttat

SEQ ID NO: 28179 - DNA, 275 bp, Zea mays
cccatattagtcttagcaattaagcgagtatcaaattcagctctattataatcaactaagtatagctgaccctcttatactcccttaaatgctactgaatcatcaacttttctaaagacagtaacacctatatatgtaaaaagacaattgtagcccattttgcataatcgagaaactgaaagcaattgtaatataagaatctacaaaaaaacattggaatagaatggcacgtgatatagcaatttactaagtactttgaccaaacctgatttcat

SEQ ID NO: 28180 - DNA, 328 bp, Zea mays
  unsure (1)..(328): unsure at all n locations
taagctcttatgggcttaagcaagctccacgcgcttggtattaaatgcttatggatttcttgctttccggagacttcaaaaatgggaagggtgacactactctattcacttaaagaaatggccaagacttatttgtttgtcaaatctattgtgatgatattatntttggatctactaatgaattattttgtgaggaattcggaaaaatgatgtccaaataatttgaaatgtctatgataggagaattgagcttctttcttggcctttcaatcaaacaattgaaagatggaatttntataagtcaatcaaaatatttgaaggacatgct

SEQ ID NO: 28181 - DNA, 117 bp, Zea mays
actaaaatcagtctctaccttgtactatcttatgggcacatttccaaatgctgctgttatgggcagttgatggggccaagtgggttaaccctattggagcaaatctataatgataga

SEQ ID NO: 28182 - DNA, 389 bp, Zea mays
  unsure (1)..(389): unsure at all n locations
gccctcagacccggcagaacttcaccggaagcccgagatcgacttcaccggacttccgtcgcccgcctgcgcgcgtggaccaagctctncggtgagtcattcttcaattcctcgtgcacaccccttccttgttccctggtgaagctctctgacccgttcaattgaactatcgcgccgtgagtaggccggacgcctcggccgcgacgagcattttcgactgcgcatgtagaccgggcgactctgaccatccccgacggtgacctgcacatcgctgtgatccacgagaccttccctacgttctcgaccacctcaccgaagcaatctcgccggcggtaagcctcttcgcctttctttcgcgcggttactgttaagtcggaaagaccttggtt

SEQ ID NO: 28183 - DNA, 289 bp, Zea mays
  unsure (1)..(289): unsure at all n locations
acaaaacctttttgagcatggttttctcttcatattgaatgacaactccactcaaactctacatcaaagctgtgaagcaacataccatctaccatattgccatatgatgcctgcacaaaaccctttgatcatgcttgatctangcttaagttgatgtcgttcattgtatctaaaattagaccttacaccgacacctgatttggcttattattctggatttctaacactgactccaccttagcaagtgtctcttattgcctcaatttatgggacctagcaaatccatctt

SEQ ID NO: 28184 - DNA, 268 bp, Zea mays
  unsure (1)..(268): unsure at all n locations
tactcagcttgacatgaggagatggcactcctcattaagagctttcgcctaatcctcaaacanaggagggggaaagactacgagtgccgctccaagacagtttgctacaaatgtggttagcccggtcattttattgctaaatgtcctatgtctagtgacagtgaccgaggcgaccgacagaaggggagaagaaaggagaataagaggttctacaggaagaagggcggcgatgcccatgtttgtcccgagtgggactccgaccagagct

SEQ ID NO: 28185 - DNA, 352 bp, Zea mays
agtcagacaagacctctctccttactatatccttccaacagacaagtgatgaggatgtctgcccctcatattgacaagatgatgttctttaatactggacttaccaaaaaccgcatggcttggtcggcaatgacgatcttcaggatattcaccaccactatccacatgataactgggactgtcaccaacatcatcatagaaacccttgcaaatcttcctcacaatcatctctgtattagtctttgatattgattcaagaaagcccagatgcatctgctcatagacgcttagctgtgaatcaccaacagccttcttatcttcagacatcttccataacgctgagatagagatc

SEQ ID NO: 28186 - DNA, 407 bp, Zea mays
  unsure (1)..(407): unsure at all n locations
gagaaagtgccngactcctctatttgcgatcacattggagaaagacagttctctcgccctggcgtgtgtcaaaaacaaaaggaccagtccatattattccagagaatttgagagtggctcaaaccacgccaaagagctatgctgattatataagaagaccactggaatttgaggaaggagaatatgtgtatctcaaagtgtcaccacttcttggaatgaggagatgctaagtccagggcacattgtcccctcgctatatcggaccattcttgagttttaagcgagttggagagatggcctatcaactccagctacctgataatctatctgatgtgcataactgatttcatgtggctcaacgtaagaagtgtcttcatgtccctgacgaacacgtaccgatggaagag

SEQ ID NO: 28187 - DNA, 300 bp, Zea mays
gcttatgaagattcttcatcccaacatgggctagtcggcggtgccagagccaacccatgttagtcttagcaatcaagcaagtgtcgagttcagctctatcaaaatctactaagtatagctgaccctctaacactcccttaaatgctattgaatcatcacttcttctaaagacagtgacacctacatcagtgaatagacagttgtagcccatttgacataattgtgaaacggaaagcaaattgtaatctaaagaaatctacagaaaaacattggaaatagaatggtcaggagatatagcta

SEQ ID NO: 28188 - DNA, 377 bp, Zea mays
  unsure (1)..(377): unsure at all n locations
ctcagcttcgaaatctatgttttttgccatctctccgcanactgatattttcttattgcccaagagacagtatataaagtcatcttcattggtgccattatacaccaaggcccctttcaggtacttcagttcccgggcatagtgcttggcttccgcaatttcctcttctgataactttttacccgaagcgtgtcgaataataaagtcaaactcttcaatagatgcctcgggagtatgagttgatgcccttgtcgactctaagatagcgtcttcaacctttctcggtgcgtcttctttctccagaaccagactgacgtctgaaagtccttgtcaatactctgccagtaccacaggctctgttcattggacatgaggct

SEQ ID NO: 28189 - DNA, 193 bp, Zea mays
tataccaagagaatagaggcaagagcccgaccatatgtaataatataaggggagttatacaaacatggagtctggtctccattgcgcagatgtttatccacagctgaacgtatacaattgatgatggaaatacacgcatgcccttgtggatctcacattggatctaggcccttgctgggagaagtgtattttc

SEQ ID NO: 28190 - DNA, 134 bp, Zea mays
  unsure (1)..(134): unsure at all n locations
tatcatcagctgangatcaaagaagcgaatattcagaagactgcattttcactgaaagggaaatgtgcccttgggccatttctaagtattttggtgattaagtgtccaacacaagtgcctaagtgttaaattat

SEQ ID NO: 28191 - DNA, 459 bp, Zea mays
  unsure (1)..(459): unsure at all n locations
tgcagctgatgttgtgaaggagaacacccatgaagatgaagagaacatggtaaacataactagcagctttcatcatttgaacacttttatgacagcaacaatgatattatttcgatcatactatactgaccaattgttcgatttgcttcgcctgcagggcgatattgaaatggcagtggatgttgccgtagcccaagatatctagaacagccggaccaacttcagattcgatcccctnttttttctatcgctgaagatgaagtgttagcgtgtggttgcttaatttggttntcaattgttaatatgttattagtagagctggtctgtgtgattgctgtctggctggaccttgaacggtcttcaagagcgtgtcataagtngatgattgtntcattcctctgtcaagttgcggctttgatgtgctaatccgtcaactgaatatagtgaattatctatctc

SEQ ID NO: 28192 - DNA, 500 bp, Zea mays
  unsure (1)..(500): unsure at all n locations
actcagctttgcggagaagaagatgatatgaagctctggggtgcttgagaaagtcaattcaatttttttaactcaagttatcaatcttcaatgatctatatacccaagattgacacaaagttattttgaattgttatgtctaaaactcatatcatctcgaggaagatatttatgttgtaggaaataaagaattatcatgtgccaagacctacaacatggaggaaagccaagggatggtgacaattatgcttttaagtgcaagtatcttaaattatcatttcttatgtgtcttgtgtagtcacatagaaaaagagagcacttcatgtttttatattatgtcaccattctttgaaaaattcctctcatatggtagatggcatattcatcatttctattctatggcaatctacatgctntaaattatcgtaagcacctcatggcatgctttacactaatatcctattattgccatgttctagatatagaaagatattcccaag

SEQ ID NO: 28193 - DNA, 504 bp, Zea mays
  unsure (1)..(504): unsure at all n locations
tgtcttgtcaagcgccgcactcactgcagagtgcgaagctgccacatacaatagcaatggagcccctatcacgggtggagttaatgttgttaaatcgatcacgtattgcttcagctctttgaaagctttctgttgagttgggccccattgaaatatttcagctgactttagtacttcaaagaatggtaaatntctttctgctgatctagatataaatcgattcaatgatgccagtcttcatgtcagccgttgggccctcttctttgtgcttggcggctccattcaaaggatagcttcgatcttgcttgcgttggcttcgatcccctttggtgaaactagacagtcaaagaactagccctntttcactctgaagacacatttttcttgatntaatttcaggccaacttgcctaanattagcaaatggttcctgcaaatcagtaatggtggtntcttgcttcgtgctcttcactatgatatcatcaacatatcgtagacatttctg

SEQ ID NO: 28194 - DNA, 316 bp, Zea mays
  unsure (1)..(316): unsure at all n locations
tcttctagagagattcacttgaaggccgctaaaagaattctaagatatttgaagtatactcccaatattggtctatggtatcccaaaggtgcgtcaattgaattaattggatattcggattcggactatgcggngtgcaaaggtgatataaaaagcaccttcggttggtgttacattcttggttgatctcttgttcatggccttctaaaaacaaaattcggttggtttatctaccgccgacgctgaatatttttcggccggaaatgttgtgcccaactttatgtatgaaacaacctcttggacattggaattatat

SEQ ID NO: 28195 - DNA, 352 bp, Zea mays
actcagcttctaagggagaacacgtgataggtttgactaacgtgcaattcgaataagatagaccttgtgcagctggtcaagcaggtaaacaagtgggaggagcacatcacagcaagaatgtgatgaccacttcaagacctctggagctactgcatatggacctcttcggacccgtcgcctatctgagcatatgaggaagtaagtatggtctagttattgttgatgacttttcccgcttcacttgggtgctcttttgcatgataagtctgaaacccaagggaccgtcaagcgccttctcaggagagctcaaaatgagtttgcagctcacgtgaataagatacgaagcgacaac

SEQ ID NO: 28196 - DNA, 422 bp, Zea mays
  unsure (1)..(422): unsure at all n locations
caaattntggatcaccctttntggtgatctatatattaagttacagctgtttgagttagaatctctgaatctgtcccaatttggacagcagagcctttctcatgttttctgaccttgatatatattaaattaacctgngatgttcataaatgaattgtagataattctattagatttctaanaagtctaggatcacctgatttggatgtgtgaaactccagttatgaatttttgaagtaagtagtcgaattctgtccaaatctggaccagaattacatttagcattgtttgaccattctaaatgtcaagtctcactgtgatgataatacaaaagttgtagaggacttcttaagctttctagaaagtcttagttcacgaattttggatgaaatattttgtagttatgagcaaaaccgctgact

SEQ ID NO: 28197 - DNA, 513 bp, Zea mays
  unsure (1)..(513): unsure at all n locations
tcgtcttaaccatgctcttgtatactcgcaatctgacttcgaaggtacctgttcacatatttctcttggaaaacatagtcaaattacgtttttgaggaccttcggaagccgaaggccccccaacagcgcctattgtcaaacatctacggagggcacacacacacattagaactgatcatgcaatcttcaaccttaagaaaaggtacatagaagtcttcgtaacacttgagcaaacgagcatcttcactgaatctcaacacaaccaaatacaacctctcagatcaagagggaagtagaaataaaaggttacccaacgaaatgactaactttattattaaatacaccaaattgcaggggacacccacattttggtgacaatcattacanagagccaaatccatcataagttcaccacgacaaacatagaaatatatgacangcaaactactctgactaactaaattgactaagactaagacacttgacttanacattattacaaactctgacact

SEQ ID NO: 28198 - DNA, 406 bp, Zea mays
  unsure (1)..(406): unsure at all n locations
ctatcggtaccctgaaactanggtaccccttactactatataaagacgcagtacccgcacgactatctttagtcgcgtggtaaaagtgatgtatgtggtacgaggccataactcgccccagcctcgggcgactactctgggccagctacagcgcctgaccccaccacatgggcgggtcccgggccgccacatgtccagagagagtgatatagtctgaggcctcaacagtgagtccggacccccatgggaaagtgcccgacccctggatatacagtccggaccaccaagattggtccaggacccccacgagtacggaccggacccctagaatgggatccggacccctccatatggggtccgggccgcccatagtatggtcccaaggttccaggacagaacacacccg

SEQ ID NO: 28199 - DNA, 368 bp, Zea mays
  unsure (1)..(368): unsure at all n locations
tcaccactgtattgaacttcttattgtagtcaaccccatgatgttgagtgaagccctagagaacccagtgggccttgtacatgtccagagaaccatccgactttcgcttatatgttcagacccacttgtcagtcaccacattgccttggggatggggcaccaaattccaggtgtgatcgacaaggagggtttgatactcttcctcgttcctccatagtgtaatgccagtgggaatcgacaggagcgctatgaatggaagatggcacgggagaggcccacaaagaggttgcagagagtanggatgaaaacggtcggtaaacacaaaccattaccgttttcatatnttttatcggaaacaaaatcgaaaa

SEQ ID NO: 28200 - DNA, 425 bp, Zea mays
  unsure (1)..(425): unsure at all n locations
gtagcatatgctaataatatacgaattgactcaagcctagctaccggtgcataggtttcaccaaaatccaaaccttcgacttgtgaataccccttggccacgagtcgagctttgttccttgtcaccacaccatgctcgtcttgcttgttgcggaagacccacttggttcctacaacattntgattaggacgtggaactaaatgtcatacctcgttcctagtgaagttgttgagctcctcttgcatcaccatcacccaatccgaatcttgaagtgcttcctctaccctgtgtggctcaatagaggaaacaaaagagtaatgttcacaaaaatgtgcaacacgagatcgagtggttacccccttatgaatgtcgncgaggatggtgtcgacggggtgatctccgtggattcctcggtggactcttgg

SEQ ID NO: 28201 - DNA, 351 bp, Zea mays
catgtgctagtcggtgatgccagagccagcccatgttagtcttagcaattaaacaagtgtcgagttcagctctatcaaaatctactaagtatagctgaccctctaacactcccttaaatgctattgaatcatcacttcttctaaagacagtgacacctatatccgtaaaaagacagttgtagcccattttgcataattgagaaacggaaagcaaatggtaatctaaagaatctacaagaaaaacattggaaatggaatggtcaggtggatatagcaatttacccaatcctttgaccaaaccttgatttccatccccgaatgtgatagcttggtggggatcttgtttttctc

SEQ ID NO: 28202 - DNA, 139 bp, Zea mays
atccgagcctgcaccgtcgatggcaaaacaatagagaaactagcttggaagagctcaaatgacgtccctaaagggatgcagagcgcgacgatacttactaagagatgtattctgagccgcactatgcatgatttttgct

SEQ ID NO: 28203 - DNA, 252 bp, Zea mays
  unsure (1)..(252): unsure at all n locations
cctgcgcgccgagacgacgcatatctctggtgtcngggcgtatgaagattacacgggcatggcaagcaaaagttccacccttctatttggtcctgagcccacgtgtccgggctcataacccttgtacatgccccccttgaactataaaaggggaggcatgtgacgtgaacacggacatacgcaagacaattacgcttacacttaactcaagctctcaaagcaatacaacatagtggagtaaggtattactct

SEQ ID NO: 28204 - DNA, 372 bp, Zea mays
  unsure (1)..(372): unsure at all n locations
tgaccttagatactcagcttcgcnaggtgaacgaanatagagatttggagaatggagttagggttcaagtgagtcaggttgatgtgataaaaatcaaggataccacggaaaaaaggagatatgggaaggccgaggccgcgaagaaggaaaggagtgtaaaccactgactcgtgggtatcttcngttgggacagtggtcccgtggcaagaacgccaagaacagagttcccgtggagggagaacctcgatggaaacaaggcggagaagctcacttcagaaatcacagacatatgtgtacctgcgaanggtaactgactgttggggtcnatggctgggatcactgcagcagacgagttcgcggttttcctcttgg

SEQ ID NO: 28205 - DNA, 366 bp, Zea mays
atgtgccaagcggtgatgccacagccagcccatgcaagtcttatctattaagcatgcatctagaccgggctcttcttttgcagaatccactaagtaaagtttgtcgtctaatacacgcttaaaagctagtgaaccatcacttcttctaaagacagacacatctatgtttgtgaataaacaggtttaccccatattgcataatggtctaccgatagtatattttaccaaagacttactaaaacacatggaatggatgctatggaaatggaatttactaacctttactggctggttcataccgaatattgatctggaaccttacttgacgtgaggacattttcctcccgctatgttgtgatcgtggta

SEQ ID NO: 28206 - DNA, 271 bp, Zea mays
  unsure (1)..(271): unsure at all n locations
cgtaaggctattttggccttccgtgacacaagtgtttgtcgtcgaacagcgatttcgtgcctcccgaccgccacccatgatttgaccatagagactggtaaggctgttttggcctcccgtgagctatagcacacgttttcatggccgagcgaccatttntatgcccgcgttcctccagcacgtgttttgtcctcggagcaccttatagcggttcttggncttccgcgagctagatcaaacattttcgtggccaaacagccaatnttatgta

SEQ ID NO: 28207 - DNA, 419 bp, Zea mays
  unsure (1)..(419): unsure at all n locations
ttatagagcatgcttctagccaaattaaaattttcattttctaagtcatgcctcttaatcttagcactaaagtgagctatgtgatcattttggtggttaattaaagctaggtgatcatgaataacatcaacatttatatctctacatctagtgcanatagtaacatgctcaatggtagatgtagagggttgcanacatttagttcatcaatcctagcatgtaaaaaggcattctcattcttaagattggaaatagaaatattgcanacatttaagtctntagccttagcannataaatgtcattctcaantttaatgctagagagtgatgcattcaacttgtcaatctttagtattaaactagcattatcatttctaagactaacaattgaatcatcacaagcatctaacttatcaacc

SEQ ID NO: 28208 - DNA, 427 bp, Zea mays
  unsure (1)..(427): unsure at all n locations
tgtcagaagggttatgcagacaaacggcgaaggcccttgtattttcttgaatgggactacgtctacttgaaggtttcaccaatgaaaggagtatcgcgtttcgggataaaagggaagcttgcacccacgtacattggtccattttctatacttgaaagatatgggccagtggcataccgactccaactacccgaaacattgtttgctgtgcataatgtgttccacgtgtcacaattgaagaagtgtcttcnggttcccgatcgaaccattgaagtaacagatgttgtccttgaaccggacttgacatactctgagcaccctattcgagtcttggatcanaaggacagggttacccggagaaaaactctcaagtgttataagatacagcggaaccagcattctgaagatgaggctacatgggaaactc

SEQ ID NO: 28209 - DNA, 436 bp, Zea mays
  unsure (1)..(436): unsure at all n locations
taacaacanggttaatagcctcatgtgntttgcaagataaaagttcattttcaacaagaagattgtcatgatcaaatttaatttgagtatagtcttccttgatctttactagactattttgcaactccctattagcttcatttaatttgtcatatttttccttagcatcttttatggagtttgtgagctcatttacaggtgatgacataggtttattttcttcttttatttcatcactagcctttataactatgtcatacttggcatttaaagattcattttcatttttcaacctatcacatttagctttngactttctaatgatttgagtatattctttaagtaagtcagctaactcatcatatgaaggtgaagcacattcttcatcactatcactatcactatcatcatcaatattaatatcattgtgtacctt

SEQ ID NO: 28210 - DNA, 400 bp, Zea mays
  unsure (1)..(400): unsure at all n locations
tattgaaacaaagagacataaagtgtctgatatggttatttgcttctcaaattagtattgcttttactagtggcaacaacaaatgttgaaggggcattttctgaaatgagtttagtcaaaaactaaaatgagaaataatatatgtgatagtcttttggatgattatcttgtcacatcattgagagggatatttctttgaagtggatgaagaagacataattgtgactnttatggttatgaagaagcgcggccagataagtagtattgcaatatttaatctattttataacatgttcgaactatttatattgtaatatatatgcaactntcatgnataattataagtntatatctaggtattgaattgttatcgaatttatataaaactangatgtactcg

SEQ ID NO: 28211 - DNA, 284 bp, Zea mays
  unsure (1)..(284): unsure at all n locations
tctnaagggagagcacattctgggactaacaaatgctcatttcgatatagacagagtttgtagagcatgtcaagcaggaaagcaagttggctcccaccatccacacaagaacatcatgacgaccgacagaccactggagttactccacatggatttattcgggctgatatcttatataagcatcggcgggagtaagtactgtctaataattgcggatgactattcttgtctcacttcgagattctttggtttgatagatctcaactgcagagactttaagggtt

SEQ ID NO: 28212 - DNA, 383 bp, Zea mays
  unsure (1)..(383): unsure at all n locations
tcttgaaagctggactacgatnntccctaagcagctttgntgtagatgtgctgaatatatttgaaatctaccttcaccagcttacccccgaagcaatcattatgatgaatatcttcgtgtgggccgtgagaagccaaggtttggaacctgatgcgaaaagcttctgcaacatacatgagttgctgtacgaaacaaaaccctgcggtaaggaacagtatcacaacaatnttggctgctacagcttcggctccctgtctgggtcaagctgccccgcgccgacctttccaaagaggtggnctggcgactggatgactggaatggtttacgtgaagaatgacttgaaatcactagaagatataacgaagatcattatgcgttccatc

SEQ ID NO: 28213 - DNA, 486 bp, Zea mays
  unsure (1)..(486): unsure at all n locations
ctggatattctgcatcagagaagtatgcaaatnnttgtgatatataaaagaatttcttcacgaaacatgaaaagaagggaaggtgttntttctccgaaagctcaaaaacaggtatgtatgcaaaatttcatgcatcgtaaagaatngaactataaatagattatatattacattcaaacgtacaatgtattacacatgtngcgttccaaatgtntctacaatagcatntaatcctccttaagaactatatctgcagcttcgttcagtagctggtcgacaaccttgtccatgatggcttcnngccattttctaatttcatcgtcccccttcgggtgggggcccggagatgcctcagcatggtctgaaggaggagaagatacngctatattactatnacaaaccgcgaacaaagtctggaattcaaaattacaacagaataataaccactaattaatacctatttgcccttcgggctctgtacttttc

SEQ ID NO: 28214 - DNA, 480 bp, Zea mays
  unsure (1)..(480): unsure at all n locations
tcgtaacgacttcatctacaatagcttcggccatatttattatttctattggcttctntggctctgggtcagccagtgggtcgaatggctctgggggaggagatagttcatctgcagtagaagacatgacttagttcgaagttacaaaaataaacaacaaagtcaaaagtcattaagtaatacctacccgtctttcatgttccgcagctattcagccgcttttgttgcctctcgagcatcatgaatagtcttttcgctctttttcattatttcatgagccatccctcggccgccattgtcccagacatcagttaaagaaatgtccgcctatagagcttgctctgtgcgatgggtccttcgtatcatctatacagaagctagtttcggcttgggccatagtttaacatgtcgcactctccttctcagaatactgcacttccctgctccaaaaacgccagacgtcccgtggtactcaaattc

SEQ ID NO: 28215 - DNA, 386 bp, Zea mays
  unsure (1)..(386): unsure at all n locations
atcccgaccaccactagcttctttgagccaatctattggtccaactccagttttaagggtacgactgccagacgtacatatagcgtgcaaaaaatgttttcaccataaaatgcagtgtttatagggtagagatcgaaatacaagagatggatgagtaagctgttgaatatagcctaagtaaattggcagaatatttntcttgtgcagttttggcagtatgacgtagcataagaaaaaaagctcgaggctcgcgagccagctcgagctcggagcggcttggctcacgagcctcgcctcgcctggttttcgagctcgtcgaaagagcgagccgagccggctcgcgagctgtgcannaataattaatctataacataataatgaatatt

SEQ ID NO: 28216 - DNA, 352 bp, Zea mays
  unsure (1)..(352): unsure at all n locations
tgtgcagagtccgcttgaactaatcttctgagaaacccgacctctttgctacatgacaccagaaggtccaacccaacaagcgttggatgaattcagaattattgcagagcatatcagttcaagagacctggttcangagtttttggctttcaaggtttttcctagtttaaaagaatgggaaatgccaaagctagagggggagaagaaagaangggaacttgtgcggttaccttactattacaagtttaagagatactttataacaccttgccaagagtggctggatacaattgatataatgtgcaatgaaatactcggcaattactccaaaaaagaagatcagttgatgact

SEQ ID NO: 28217 - DNA, 408 bp, Zea mays
  unsure (1)..(408): unsure at all n locations
tgacacttgaaactcaagcttcaacataattgttccttcatcacaacctctgaaggatattatgatgaaccgagaagctactggaaggattggaaaatgggctgcagagctcaatgaattttgtattgaatatgttcatagatcttcgattcagtcacaggcgctggcagactttattgctgattggacgccacgggctcacgaggaggaaacgaataaagacaacgaagcctgtacagtggtttgtgatggatcctgtggaaccttctgagtangagcggctgctgtgttggtttcaccttccaaagtcaaaacttgttatgcggcaaagcttgattttaattgcacaaataacattgctgagtacgaagcattgattctatgtcttctgaagtaanagcaatggga

SEQ ID NO: 28218 - DNA, 434 bp, Zea mays
tctaaagggagaacacgtgataggtttaactaatgtgcaattcgaaaaagatagaccttgtgcagcttgtcaagcaggctaacaggtgggaagctctcatcacatcaaaaatgtgatgaccacatcaagacctttggagatgcttcacatggacctcttcggacccgtcgcctatctaagtataggaggaagtaagtatggtcttggtatagtcgatgacttttcccgcttcacttgggtattctgtttgcacgataaatctgaaacccaagggaccctcaagcgcttcctaaggagagctcaaaatgagtttgaactcaaggtgaaaaagataatgagcgacaatgggtctgagttcaagaaccttcaagtggaggagtaccttgaggaggaatggatcaagcacgaagtttccgctccctacacaccacagc

SEQ ID NO: 28219 - DNA, 371 bp, Zea mays
  unsure (1)..(371): unsure at all n locations
aaccttctgcttgctggagctcaaagntctttttctctaagcatctgatagctcctttattntgntntccaaatttccaaatataacttcatgctctttatcttcaagatcttgctgcatttgcaaggctttgctcaataacataccctacacaaacacaaccttcgtcagacatgtgtttattagaaagcataacgttaagagacaagtcattcaccttgaagttggagtaaaataaactaccaacgacatgttgtcgtcggtagcggctgatgtctgtttctagcttcnggaatccaataatcttggacagagtactgataactttggcccctgtttggtcccgaatacactctaatntctcgtcatca

SEQ ID NO: 28220 - DNA, 263 bp, Zea mays
  unsure (1)..(263): unsure at all n locations
gaatctacgaagctcaatcacgacnaatatacctattagcctttcatgtgctatggcttcttcagctgtccttacttcttctaaagcagtatgaaattcttcctcattntgtctaatagtcgcgtctgccacttctcgaccaccatttaacgatgcttcagagtagaaatttctgcttagggccataacctttggctggaagatccttgatgtctntcgccgagactgagaactctagctgaattacagccttgcatgctcgc

SEQ ID NO: 28221 - DNA, 392 bp, Zea mays
  unsure (1)..(392): unsure at all n locations
catgagctaatcggcgatgccacagtcagaccatgctagtcttagctatggagcatgcatctagaccggnctcttctttagcagaagcgacgtaaataaagttgccgtctaatacacccttaaaagctagtgaaccatcacttcttctaaagacagacacatctacatttggtaatagacagttatatcccatattgcataattgactcacagatagcagattatatccaagagactcaactaaaaacacattagatatggagtgctcattagaaaatggcaatttacctaaaccttttaccttgccttgattcccatcaccgaatataattgaatcttgggaatcttattcttgacgtaggagtgaacatcttcttcttccccgtcatatg

SEQ ID NO: 28222 - DNA, 396 bp, Zea mays
  unsure (1)..(396): unsure at all n locations
tgtagtactctaagaccaatgtatcagttntatgtttcattagcacctacaaagaacacaccagaacacaacaaaactaggccatctgactggtgcatggaaaccgatgataaagaatttcaagaatatttgtgtgacacatattcttcagaattagactgctcaaatgacttagacaagtacatggcttgcacaacttttaagcatagcggacagttcgacattttagcatggtggaagaactagggaaaggaatatccgattctttcacaaatggctcgtgatgtgcttgcaatacaagtgtccacagtggcatcagaatctgcctttagtgctagtgggcgagtggttgatccatatcgtagtcgtcttgatccagagatggtacaagcattg

SEQ ID NO: 28223 - DNA, 422 bp, Zea mays
  unsure (1)..(422): unsure at all n locations
taacgtcccacccaaaagaatggtctaatttggtaagggcaatgctcccatggttcaggataacgagggttacattntataccctgccggttatcccgaacacaaaattaggagaattcactctaggaagtctcactctggtcctaatcatgcttttatgtataagagtgagtcatctagttctaggcaatcaacccatgctaaattgcttaagaagaaaactcctaaagtatcaaatgatcataatgtttcatttagaacttttgatgcttcctatgtgctaactaacaaatcaggcaaggttgttgccaagtatgttgggggcaaacacaagggatcaaagacttgtgtttgggtacccanaattcttgtatctaatgtcaaaggacccanaactcgttgngtacctaaaatcaagaact

SEQ ID NO: 28224 - DNA, 403 bp, Zea mays
  unsure (1)..(403): unsure at all n locations
ccatgttagtcttagcaattaagcatgtgtcgagttcaactctatcaaaatctactaagtatagctgaccctctaacacacccttaaatgctattgaatcatcacttcttctaaagacagtgacacctatattagtgaatagaccgttgtagcccattttgcataattgagatacagaaagcaaattgtagtctaatgaatctacaagaaaaacattggaaatagaatggtcaggagatatagctattntaccaagacctttgancaaaccttgatttccatccccgaatgtgatagctcgttggggatcttggttttctcgtaggagggaacatcttttctccctgcatatggttgtgcaccgtatcgagtatcacttgagccccgatgataaacacaaaca

SEQ ID NO: 28225 - DNA, 473 bp, Zea mays
  unsure (1)..(473): unsure at all n locations
tggcttctcagntctcagaaagtcaagccgaaaaaaaacagtacatgaagaaaatagtagataaaanaatcctcttcaccgtttcctcttccttctccccgtgcgagctgtgactctgaagccgccgccgcctcccgcctgcctctccatctccgtccacgccgcgtcataaaaatcccccttcaaggcccgacctagcacctaccctcgccacccgcccattccagttcccaatccgatcggtgcacgagctccgaatccactatccctgttgttggcggcctccagctcccgctgggaccatttccgtttcagggaggcggtctactctgtatttagatccgccccctccttgcggtagtcgggggagcggatttaggtgaacaagcatcttgatttttttgaccccccaatctttgctctacccaccgcgtggtcttcgcctttaaatcctctggaggtggatagacgga

SEQ ID NO: 28226 - DNA, 469 bp, Zea mays
  unsure (1)..(469): unsure at all n locations
actcagcttctaagggggaacacatcttatgattaaccaatgttcattntgagaaagacagggattgtagcgcatgccaagccgggaagcaagttggcacccatcatccacacaagaacatcatgacgaccgacaggccgcttgagctactccacatggatctattcggcccgattgcttacataagcatcggcgggagtaagtattgtcttgtaatagtggatgattattctcgcttcacttgggtattctttttacaggagaaatctcaaacccaagagaccttaaagggattcttgagacgggctcaaaatgagttcggcttaaggatcaagaaaataagaagcgacaacgggacggagttcaagaactctcannatgaaagcttctgaggaagaggcatcagcatgagtctcttctcctacactcacaacaaatggtgtagggaagaagatcgacttatggacat

SEQ ID NO: 28227 - DNA, 170 bp, Zea mays
  unsure (1)..(170): unsure at all n locations
tttcgtgagcgtgctggcatcgtccgcttgctctggataggcgtgttgctgggagacagcgctctccttcntctcaaacacgaggtcgacgctctgtgcgccccccgttggggcgctggggccgccgactctctctacagccgacgaggcgctgtcttctgcttggcctt

SEQ ID NO: 28228 - DNA, 448 bp, Zea mays
tgggctgctgccatgcaaccagaatgcggaggagaagaccccacgtgaacgtccatggaagtgtgagagggagaaccgactctaacaccctcgggggctgggttatagctcgcgctacccatccgagccgggtcatccccggcaacaccctcgggggttgggtaagcgctagcaccatccttaagggccaagctctctgtaaccgccacctctaaggctgaaggaccttcacccacttccatgggagcagaacaatccagaccagcctcctgacccttaagaccgcgctccaaggttgatgaggcgcgggacgccgcccaggataactccagcccagcatcaggcacatcagtgcaaacatccatcatgccaccgtctgctggctctgacaacagatcttctgggaccatgtcttcaagagtctgatcaaagttcgctacggataatt

SEQ ID NO: 28229 - DNA, 414 bp, Zea mays
  unsure (1)..(414): unsure at all n locations
gttcagaagggaganagctgcttctgccgatcatccgaagctcatgctcttgtgtgaggagatagtatagcagaaggtgctcttggaatctcaactgtccgaagaacaggagaaaaccttgataagttttttgttcaacaacaaagatgtttttgcttggtcagctaatgatctttgcggagttaacatggatgttattgaacactcgctcaatgttgatccatccttcagacctagnaagcagaggcttctgaagatgtctgatgacaaggccgaaggtgctcggaatgaagtgaaaagactcctcagtgccggagttatcagagaggtaaaatacccagaatggctggctaacactgttatggtaaagaaggccaatggtaaatggaggatgtgtattgattntactgatct

SEQ ID NO: 28230 - DNA, 231 bp, Zea mays
ttgtgaactttattattacttgtgaaatccaaaatggttcaccattgatatttgtacctagcatgtgtaggatgaattgagatcctctctggtgtcactagtatgctatgtggctatggctcgtactttgagttcatcattgactagatacatgaattctgtgctcaaatcttgatcaatgttactaagaatgtacaatcacgatgggttcgtcttttctcctcttcactg

SEQ ID NO: 28231 - DNA, 471 bp, Zea mays
  unsure (1)..(471): unsure at all n locations
ccctcactatgtanggngttctacagtcaccaagcgtacatacacctattcgtatattggcccatggatcatatgtgattgatgatatagcatcgacatcatggttcaattaaactaattacaagttacttgcatcaaattcatggggataattagcaatcagcagaggcagataacaaaataactcanagaaccgaacctttgcttcctcgtcatcttcatcctcatcttccagcatctctcgcttgggcctctaatcttcggcgttcttccttggtaggtcccttctgtaaacgaagatgagaatgataatgtcagtataaacaaaccacatgcacattattaatgcattatctaaacatcacttcataagcatactgcaaacctcatgctctcgtctctgtttctccttcagacggaagtcttcagcctgctaacactaataactccagaggtactctaccttgccca

SEQ ID NO: 28232 - DNA, 451 bp, Zea mays
  unsure (1)..(451): unsure at all n locations
taacgaagtttacagcccatctgaatgaagcctcttcattcgattctcacttatatgacccatacgacagcgccacatgtttgtccgacttatatcattatgccgaagccttttatcactaatattacagatatgcgcatgatcaagatgtacaatgaataacccattcataatggatgctaaagccactaacatgccattcttagagatcacacaaccattggtttcactcgcacatgaataaccatccttcatcgaacatgaatgagacataatgtatagactcatactacgaactagataacaattatttaactccaaaatacattctgatgggaggtggagtngcatcgtcccgacagtcaacgcagcaactcttgcattattgcctacccggaaatcaacttctactcttgtcacgcttctacttcttatcatgtcctacatcgaa

SEQ ID NO: 28233 - DNA, 473 bp, Zea mays
  unsure (1)..(473): unsure at all n locations
gagtgagtggctctaatttcacctcctggctatctaattaataatttcctcttcaaatgatagtttgatatatcatgcttctccacaaatgactntgttatgaaagaatgagatgcttcagaatcaaataaaattgatgcaggtatggagttaataaggaacataccatacaccacgtcagcgtcctctggaaccgtttccgcagtcacatgattcaccctacctttactctagttctgcggagttttgttttgtgtattaccatgagtgtattctaatcaaacctttgattattattccattgaggcatctatgggttgcgcttttggcagttgttagcatagtggccaattntgccacacttcaagcatctgctgggctaaactggggtacttggattgtatttctggtagtgcgncanagcgcttcttgacatttgcanatacaccagactctgactgctagaatattct

SEQ ID NO: 28234 - DNA, 280 bp, Zea mays
  unsure (1)..(280): unsure at all n locations
ttgggtgctctaacatgtttatactcattgggagtcttgtccaaaccggtccggcttataccatgggctattcacgaatgcccaatatgcttaaaagcgatcatatcagctagttttatagaggggggctatatatacttggtgcatggggttgtacatttgaagtaggcctctggaacacttgtgagcatgtttgaaccttctttctcatttctctcactcactntgtttagtggttgagctttattgagattgagagcattctattgcattgatcaat

SEQ ID NO: 28235 - DNA, 365 bp, Zea mays
  unsure (1)..(365): unsure at all n locations
agaacatgtgataggtttaaccaatgttcattntgaaaaagatagaccttgtgcagcttgtcaagcagggaaacaagtgggaggctctcatcacaccaaaaatgtgatgacaacatcaagacccctggagctgctacatatggacctcttcggacccgtcgcctatctgagcataggaggaagtaagtatggtctagttattgttgatgacttttcccgcttcacttgggtgttctttttgcaggataagtctgaaacccaagggaccctcaagcgcttcctaaggagagctcaaaatgagtttgagctcaaggtgaagaagataaggagcgacaattggtccgaattcaagaaccttcaagtgg

SEQ ID NO: 28236 - DNA, 396 bp, Zea mays
cattccaatccgagcccgcatctgactctggtgaccgtcacaagttggtgttctggtgcagtccgaatacagcatgttcaaatacttttccctttcggtcttcttcctgattcctaagcaaaacaagagtgcacgggtctccatggtctaaatatgatggacatgaactcaagagtgtaatcacctgatggttgagttgacgagcactagcgcgagtaatgggaccagaaattggtacttgtattggtatagatgcatcagtagtgtggatgtcttcatcagagagtcttgatgaaaggtagacttcgctcaactgatctggagatgaatctgttgagggcgggcaatctgcccgtctagcgctggacgtctttggcggactgccgaagcgtcatg

SEQ ID NO: 28237 - DNA, 149 bp, Zea mays
gagagccaatctagcagtcaaaagtaccgacaagaatcttcattttgtcttcattgacattaataggaattatgatggatttagtatagtttaaccttagcccagacaccatttcatagggttgcaggagagaattcaagaataatatt

SEQ ID NO: 28238 - DNA, 460 bp, Zea mays
  unsure (1)..(460): unsure at all n locations
ntcctcggagtactntggagaagctatatcgtgtactctttcgtgtctaaaactaaacctgttaatagcctcctttttttacctcacgtcgctgttggactgcagtaaaaaaaaaggctactacatgacagcgttccctgcaagtatctttcacggctgttgttatcaacagagggggccttgtccacgccacagtaacgactgaacaagtcgaggaggaccccttctgctgagccacagtaggctgtaccccgccgggaggccgtctggaccccactgtcaccacccctttctgaacctctcgctgtcgncacaggtttgcggcagccatatagcgagctacttactacacgaggttaaaataggagaagcttgactttaagacgatgattagagcatctcttctacttctacactgtagtttctttgccacaactctaactgctcgctgtgccgctat

SEQ ID NO: 28239 - DNA, 351 bp, Zea mays
  unsure (1)..(351): unsure at all n locations
tatgaagattcttcatcccacatgggctagtcggcgatgccagatcctacccatgttagtcttagcaattaaggaagtgtcgagttcagctctatcaaaatctactaagtatagctgaccctctaacactcccttaaatgctattgaatcatcacttcttctaaagacagtgacacctacatcagtaaaaagacagttgtagcccatttgacataattgagaaacgaaaagcaaattgtaatctaaagaatctataagaaaaacattggaaatggaatggtcagatgatatagcaattntactcaatcctttgaccaaaccttggtttccatcccgaatgtgatcgctctt

SEQ ID NO: 28240 - DNA, 327 bp, Zea mays
  unsure (1)..(327): unsure at all n locations
ttcagtagtccaaaggcatgaatgaattccctcgaattttctctggttccccgtgtttatgtttcaactacaacatgattctttttctaaactaaaatgtttgatctcatacactacatcaggtatgggaaaataaacctaaaatttgtccaattctgctcgccaataacaataatgcagcattcacaatactcaacttgcggatacaggaaaatagatatgaactcagttcagtagcagcataccattacgggtgacgaggaactgcttattggcggngagataccgcttcctcttgcttggatcgcccgcttccctgtgaacaca

SEQ ID NO: 28241 - DNA, 418 bp, Zea mays
  unsure (1)..(418): unsure at all n locations
tatgtcgatctgcttcactggtcgttcctccacaagcccacgaagggatgaccttacgacttattggacccttgtgcctttcgtgaggtcttttatccttccagtggacccaggggatatctgtcccccacaagcccccgatctttgggttgattttgaaataatcggcccagagatcctaagtccagcttgcggtctttgtttgtaacaggaagtactttctgggtaatctagtaacaacgatttcttactgtctccttctgcttttatcacttgaaaattggtgttctgtcttagacttttgcttcggaggtcagcatttcgtactgcgggacttcgaacttcattgggttgcacaaangtgcactcaatgggtgttgcccacgagcttctagtggaatatttgaaataatctact

SEQ ID NO: 28242 - DNA, 374 bp, Zea mays
  unsure (1)..(374): unsure at all n locations
tttttgctatgacttcgatgattgggctgtggggtgacactatgctgtcttgcagnacctctttccatcttctgtcgctggctctaccatatctaccctaaagaacaaaattgagcgaatcttctgttgttgacagcggctgtagtttgctattggtgcttcaccaaaaaaaatagatgtattttttgaccgtggcttccgaattagcacatgactcatgaaaagcagtggtctgctacaaacattgtgttgatagtggctcttgtttgtgttgatgcttcaatttgctgatgatgatgcttatactgtcgtttactactctaagnttgctngacaaactaattgtgatgatggataaagtgtgatgtgatgat

SEQ ID NO: 28243 - DNA, 429 bp, Zea mays
  unsure (1)..(429): unsure at all n locations
agctntgaattgccaccacaaaatgaattaccagttatttatccatccatccacttgcactgtatctgtccaaccctcacaactttttttattttctgacccacaaaaatctgcaatcaacaatcctacctaactaatataaactaaggatgntgttggttactggacaaatgaagatggaatagagcggcccctgggttgggggatggaatgattcctcgtattgtttggacggaaggatgagatgatccttgntttttgtttggttagaggtataactggggatggattgcgcccatcctttagttggtccgagaacagagcacataataatgttgcagccattgccccactcatgatatgtacaactatataagtcacaaacacaatttataattcacacatcatataattgcctacttacaatat

SEQ ID NO: 28244 - DNA, 397 bp, Zea mays
acactatgaatactaagcttcaactatattttaagcatcggagaatttctcggcgttttcttggcattttatgtacatgaacccttaataacttttgctgtagagatgatataaagtgtttagggaaagttgccataactcggatgaatttgtaaatctgcttttatttaatcgagcagattcaagcaagcgtatgatttataatttcatacaaatatttggttcaaactttgagaaatctttagaagacacttgatacataaagatgaattatgatatagagaaaacaagtcggtttgcataagaattaattaaaggttgacacaagagatgctgatagagaatgcggatgtgtataaatattctgacttaactgtctattcacatattctttcta

SEQ ID NO: 28245 - DNA, 406 bp, Zea mays
agcttggtgccgatggagaaacaaaaatccttgaaatcttggttgtcgaactgcttgccgttgtcaactgttagctcggacggtactccgaagcggcaaacgatgttctgccacaagaatttttgggcagtctttgatgtgattgtggaaacagccctcgcttcaatccatttggtgagagattcgacggctacgaaggcgaacttaaggttcccctgagcggtgggcaggggcccgacaatgtccaggccccagcgctggagaggccatgtatgggcaatcagctttgtatattgcgaggggttgcctgaccgaggagagaacttctggcaggcttcgcaggaccttgtgacccgatttgcggcgcagatcattgcgggccagtaaaacccttgtcggatcacct

SEQ ID NO: 28246 - DNA, 435 bp, Zea mays
  unsure (1)..(435): unsure at all n locations
taatgcccctaagaaattgtctaattntgttaagggcaaagctcccatggtttaggataacgagggctatattttatatcctgctggttatcccgaacataagattaggagaattcattctaggaagtctcactctggctctcatcatgcttttatgtataagagtgaggcatctagttctaggcaatccactcatgttaaattgcctaaaaagaaaactattgctgcatcaaatgagcctattatttcatttaagacttttgatgcttcatatgttttagctaacaaatcaggcaaagtagttgccaaatatgttgggggcaaatacaagggctcaaaaactttccgggggctcaagttggataattgatagcgggtgcacaaaccacatgacaggggagaaaaggatgttctcctcctatgagaaaaaccatg

SEQ ID NO: 28247 - DNA, 429 bp, Zea mays
  unsure (1)..(429): unsure at all n locations
tgtggaggctcttcatccncacatgtgctaagcggcgatgctcacagccagcccatgcaagtcttagcaattaagcatgcatctagaccggcctcttcttttgcaaaatcaaccaaataaagtttgccgtctagtacacccttaaaagctagtgaaccatcacaccttctaaagacagacacatctatatttgtaaatagacaattatatcccatattgcataattgactaacagataacaaattatatccaagagactcaactaaaaacacattagatatagagtgctcggatgaaatagcaattttacctaacccttttaccttgccttgattcccatcaccgaatattattgaatcttgngaatccttgtttttgacgtaggaggtgaacatcttcttctccncgtcatatggttgtgcatctgct

SEQ ID NO: 28248 - DNA, 361 bp, Zea mays
  unsure (1)..(361): unsure at all n locations
ctatacagtcgagctgccgcatgcntgcatgtatagggagaacacattgtgtgactgaccattgtttatcttgagaaagatcggatatgtagcgcatgttaagcacggatacaagttggtgttcataatccaaacaagagcatcatgacgaccgacaggtcgntcgagctactacacatggatctattcgggccgatagcttacataagcatcggccggagtaagtactgcctaactatcgtggatgattactcttgcttcacatgggtcggtcttttagcatgataaatcacaacgccactcagatcttaaagggattctcgagaccggctcaaaagagttcggtttaggatcaatagat

SEQ ID NO: 28249 - DNA, 436 bp, Zea mays
  unsure (1)..(436): unsure at all n locations
tctaaagagagaacacattataggactaacaaatgttcattntgagaaagacagggtttgtagcgcatgccaagcaagaaagcaagttgatgcccatcatccacacaagaacatcatgacgaccgacaggccacttgagctactccacatggatttattcagcccgatagcttacataagtatcggcgggagtaagtattggcttgtaattgtggatgactattctcgcttcacttgggtgttctttttgcaggaaaaatcacaaacccaagagactttaaagggattcttgagacgagctcaaaatgagttcggattgaggataaaaaaatattanaagcgacaatgggacggagttcaagaactctcaaattgaaggctntcttgaggaggtggagggcatcaagcatgagttctcttctccctacacgccaca

SEQ ID NO: 28250 - DNA, 450 bp, Zea mays
  unsure (1)..(450): unsure at all n locations
agctntcatccttcttctatacaaatagcgcttgacatccccaaggcgaagtgcttgggcgaataaataccttatacagcaactcttgcaactgcttcttcaactctgccaactcagcgggtggcattcggtagggcctcttggaaattggggccgttcccggttgcaactcgatggcgaattcaatatcccggtccggtggcattcctggcaattcatcaggaaagacatctgcatactcacagaccactgggatcttcttcacgggtaactccgtcggtaaagaagcacatgactgatagtaagcctgactaagcagaatcaaagtgaaattcccgcagaaaggagaattaacttccacggtacgactggctacatcaagcacaacttggtgcaaggtcatccaatttgctcctagaataatgtccacattttccaatcccaacacaa

SEQ ID NO: 28251 - DNA, 360 bp, Zea mays
  unsure (1)..(360): unsure at all n locations
aagtcacctgcagctgcagcttcgggttgcaaactgtatcggaggatttgtgttggagacctgggcgcgtccctgcctttttgcgcgagcgagctgtactacactaactatgtnttcggcttacaatctaatcattttaaggtgatgcaatgtgcagccctctctccataagttgtgtgccgacgccgagctttagtcgcaccgctgactaaagccaacttactcggttccctgggcagtgagcaccctccctatgatatcgagacgcatgcacaccgactgaaattggtcgccaacctttttcgattgctcctatgggttcgcttacgcgtgaacacaatctttggcagccttagcacg

SEQ ID NO: 28252 - DNA, 381 bp, Zea mays
  unsure (1)..(381): unsure at all n locations
agctngaagccatggtaagtagcataggctaataatatacgaattgactcaagcctaactacgggtgcataggtttcaccaaaatccaaaccttcgacttgggagtatcccttggccacaagtcgagctttattccatgtcaccacaccatgctcgtcttgcttgttgcggaagacccatttggttcctacaacattttgattatgacgtggaactaaatgccatacatcattcctagtgaagatggtgagctcctcttgcatcgccaccacccaatccgaatcttggagtgcttcctctaccctgtgtggctcaatagaggaaacaaaagagtaatgctcacaaaaatgtgcaacacgagatctattatttaccccctta

SEQ ID NO: 28253 - DNA, 459 bp, Zea mays
  unsure (1)..(459): unsure at all n locations
agcttgagttntgagagccctatattgcataggaccagtgactctctcaattaaggactttgccacccagatttgtctaggtctacttttatttggcggacctaggaatgtaaccttaatctttccatttgcaacctttcttagaacatagtgagcattgaaagcaaatggtcttgagtgcttatgcaagggagttggtggtttagctttgcagttgtgggcaaaatgaccttcatttccacactcaaagcatttgataggcttgtgagtctgctttggcttgtattgagtgatagctttcttttgcacaaaagcattgtatccaataccactctttgttattttcataacagtgttcataagcagctcattntggaggtattgacccttgttgaacttttgcacacttgttgcaagatgttcattntcactttttagtttcttgacctcattcttaag

SEQ ID NO: 28254 - DNA, 386 bp, Zea mays
  unsure (1)..(386): unsure at all n locations
tgaagctgacatcagacgctactgacgacagcatatcgtctgcagcttattctattctaattttaaggtaaagtttttccctcaactttttattgttttgcgatgaaggtgatttctgatgaaggttattttgcatagagtatgctactaagtaaagccttgaggatgcaacaggaccttgaagataagaaaaatgaggttataattgaaggcttggaaagtaaaatcaaagataatgaagctgctcttgaaaagaaagattttgttcttcaaacaatggagggttcattggcagaggcccaagccgaaatcgccagattaaacagtgaactcctcctaaagtcataaagctttgagcaagaaaagaaaanatttgatgtgaagct

SEQ ID NO: 28255 - DNA, 434 bp, Zea mays
agcttctaaagggagaacacgcgataggtcttacttatgttactttctaaaaagatagaccttgtgcagcttgtcaagcacggaaacaagtgggaagctctcatcatgccaaaaatgtgatgacaacatcaagacccctggagttacttcatatggacctcttcgaacctgtcgcctatctaagcataagaggaagtaagtatggtcttgttataattgatgatatttcccgcttcacttgggtattctttttgcaggataaatctgaaacccaagggaccctcaagcgcttcctaatgagagctcataacgagtttgagctcatagtaaagaagaataggagcgacaatgggtgcgaaatcaacaaacctttaatggaggagtatcttgaggagggaaggaatcaacacaagttctcgtccttacacaccaca

SEQ ID NO: 28256 - DNA, 429 bp, Zea mays
tgcccaacttcactgttatcccttattcagatcattgtttttctgtcagcttgacttaagacctaattatcttcaaatcttacatgacaccaaggcttaatcacttaagaaaagttatactcgtacaatagctctacaagtttgatgtgttgaccctatgcaaattcctaatgaactgaaagatacaaggttccaaagttggctctatgcactggttttcaaacttaaacatagggatgtatgtggtgtcctttttgcaaataagtccaaacttcgtcatttggcttgcaaatcctcaaatgtgagaaacacatagtttgtgatgttgtactaccttggtattttcacttgggtccaaaagtgtacaaattttacacttagccccctatggttacacacatagcaagtcacaccaatacaacttgtttg

SEQ ID NO: 28257 - DNA, 439 bp, Zea mays
  unsure (1)..(439): unsure at all n locations
agcttcgtgaaaacattctccgaagctataataaagttttatcttgtgccttatcacgattgtctctttntcaaagcattctccgaagatcaatactgtatccccttcttgttccacatgcaatatgatgtatgatgcttatgttatgcaaaatgatgtgatgatgttatgttatgcaaaatgatatttgtaccgaagatacacacatccctgcagtagagcacacaatctttttatatcagcgctgacttttcgctgtaagcctccgttaggagcttcttcgccttttacttcagcggaatcagcgtttatttttcgttgtaagcctcccttaggagcttcttcgccttttactttcagcggaatcagcatttattcttcgctgtaagccttccttaggagcttcttcgccttttactttcagcggaatcagcactta

SEQ ID NO: 28258 - DNA, 431 bp, Zea mays
  unsure (1)..(431): unsure at all n locations
tagcgggtctgcagccaagnactttcttccaccttcccctacactatgtttgcaagctactcgattgatttaacattcttattatgtaggcagtgccattgtcaaattacaagtactaactattttgcttctaaaccaggcatggaaagatatatgtgacagctgcaaagaagatcatggacaagggctctgactacactaagaaggagactgagaggcttcaccgcatgctggagaaggtgggcatataagtttccatcctccattcaatctttgagctatattactatttaagaagctaattttcataagtttcttagtggtgtagctagttcagtaaagatgaaaagcgtcaaaggtagtgtggaatggtggtattgtttatagtacatgtgtttggactttggacactgggttccaatgacattatg

SEQ ID NO: 28259 - DNA, 451 bp, Zea mays
  unsure (1)..(451): unsure at all n locations
agctntcggcactcggcaaagtcccgtattccggtagtgctggtccgcatttcatacagaggcatgagacgtcgtttagatcatttgatttggatttcattctaataataatcgtaatttagcacggaaaattaaactaatataattctatgtgaaatgtatttttatagtattgttgcctatgaaagagatatttatgtacatttctactataggatagcgagccgaagagaatgttataagttacgaagtaaaatcatagcatggggtgttaccaagatgtagccaatatgaccttctataagccaacttttgccagttttgatggttgaagtgacaatatatagtcattagaacctgtcacgtacacctatgcaggtcctaacaatgcaaattaattaagaagatgacatgaagttggaatggagatacaagtcaaaagcagcagtga

SEQ ID NO: 28260 - DNA, 428 bp, Zea mays
tctaaagggagaacacgtgatcggattaactaatgtgcaattcgaaaaagatagaccttgtgcagcttgtcaggcaggtaaagaagtgggaggagcacatcacagcaagaatgtgatgaccacatcaagacccttggagctgctacatatggacctcttcggacccgtcgcctatctaagcataggaggaagtaagtatggtctagttattgttgatgacttttcccgcttcacttgggtgttctttttacaggataagtctgaaacccaagggaccctcaagcgcttcctaaggagagcacaaaatgagtttgagctcaaagtgaagaagataagaagcgacaacgggtccgagttcaagaaccttcaagtggaggagttccttgaggaggaaggaatcaagcacgaagtcttcgctccctacacac

SEQ ID NO: 28261 - DNA, 451 bp, Zea mays
  unsure (1)..(451): unsure at all n locations
agcttattatctttctgctctattcttgtggtagatatacagtaganagtcattagaatgcatgttaaggctatattgtactgtctgtacatactcaaaacgctctaaataggtgtgttgcgttgaacttttgtactcacgccaagcgattaattgatataatgggtactcagacgtgtcaatcaggctgcgttgttaatcggctgagttatggtattggctaagcattggttgcgccatggcaacatgatgcagtatttgtgtcttacgaacttagctgtgtcatgtgattgctacgtcgcactatcatttagtcggaccgctcccgttgagtcggaccgtcatcgccgagtcgcgtaattnttgtgtagataaaatatctccaagttgatattatagttcctagatggaacctttccaaaagaaacaaagtttgtgttaaacacaaaag

SEQ ID NO: 28262 - DNA, 420 bp, Zea mays
tatgaaaatcaggtatgaatctgcgataatacccagctagtccaagaaaactccggacttggtgaacagttgttgggggtttccactccagaatatccttgaccttgctaggatctaccgcaattcctttagctgataatacgtgccccaaaaattgaatttcttccagccagaacgcacacttgctgaacttggcatatagctgatgttcccttaggcgcgtcaatacaatccgtaaatgctgagcatggtcttcttcattcttggaatatatcaagatatcatcaatgaagactaccacgaacttgtccaattcaggcatgaacaccgagttcattaaataagtgaaatgggcaggagcatttgtgagcccgaaagacattaccaagtattcaaacaatccatatcgcgtagtaaacg

SEQ ID NO: 28263 - DNA, 382 bp, Zea mays
  unsure (1)..(382): unsure at all n locations
agcttctaaagggagaacacgtgataggtttgactaatgtacaattcgaaaaagatagaccttgtgcagcttgtcaggcanggaaacaggtgggaggagcgcatcacagcaagaatgtgatgaccacatcaagacccctggagctgctacatatggacctcttcggacccgtcgcctatctaagcataggaggaagtaaatatggtttagttattgttgatgacttttcccgcttcacttgggtgttctttttgcaggataagtctgaaacccaagggaccctcaagcgcttcctcaggagagctcanaatgagtttgagctcaaggtgaagaagataatgagcgacaacgggtccgaattcaagaaccttcaagtggagga

SEQ ID NO: 28264 - DNA, 421 bp, Zea mays
  unsure (1)..(421): unsure at all n locations
tgcaagagaaatatcgcanattctggatgaaatgctaactgacctattatgtgttatatgacttgtactgtctagcaaattatttattttgcctcgtatgctgttcacagcagcagacacagatgttaccagtgtctcgatatccacagtagaatcatctttccatgtttgtgaattgttcatctcaataccaacatcattcattgcgttcacagtcacaggttctgtaatcttgtcacatgtgtcagtttggcatacccctgttgatccacttagattgtctgatacatctaaagcacgttgtccaaagttatcagcttccacagcagattgccctacctgcttagaatcctccctgtcatgatttgtgcttacatctttacccctttctaaaanatttgaatcagatctctcttctctt

SEQ ID NO: 28265 - DNA, 461 bp, Zea mays
  unsure (1)..(461): unsure at all n locations
agcttgacattgtctccctggtggaagccaatgccattcttaatgcatgggcgtctcccactatagagcatgcttttagcaaatttaaatttctcatttgctaagtcatgctcattaattttagcactaagttgagctatgtgatcattttggtgtttaattaaatctaggtgatcatgaatagcatcaacattaatatctctacatctagtgcaaatggtaacatgattagtggtagatgtagagggtttgcaaacatttaattcatcaatcttagcatttaaaatagcattctcattcttaagattggaaatagaaacattgcaaacatctaaatctttagccttagcaattaattnttcattctcaattntaaggctagagagtgatgcattcaacttgtcaatcttagtaatcaaactagcattatcatttctaagactaacaatcgaatcatcaca

SEQ ID NO: 28266 - DNA, 435 bp, Zea mays
tcagctccatctatgttatggattgcttttgagtcagtccatatttccctcggcctttctggcagcttcttgacttccatgaatagcaatgggtccttgatccgaaggtatcttcatgcaaaggtaagcaagatgaaggattgctttgaaagcgttgagggtgccacgaccaataattgcattgtaagggtattccatgtcaacaatatcaaacacaacttgctcagttctggtattgttgatgaatccgaaggtcactggcatggtgatcttgcccagtgctacaatctgtcttcctccgaagccacagagagggtgtgtagcatcatgaatcttatcttctggctcttgcatttgtctgaaggccttagcaaatatgatatcagctgcactgcctgtatcaaccaagacattgtggaccagaaaccctttgat

SEQ ID NO: 28267 - DNA, 445 bp, Zea mays
gtcacctgagctgcagcttctaagggagaacacgtgataggtttgactaatgtgcttttcgaaaatgacagactttgtgcagcttggccagcaggttaacaagtgggaggagcgcatcacagctagaatgtgatgaccacttcaagaaccctggagctactacatatggacctcttcggacccgtcgtctatctaagcataagaaggagtaagtatggtctagatattgttgatgacttttcccgcttcacttgggtgttctttttgcaggacaagtctgaaacccaagggaccctcaagcgcttcctaaggagagctcaaaatgagtttgagctcaaagtgaaaaagataaggagccacaacgggtccgagttcaagaaccttcaagtggaggagttgcttgaggaggaggggatcaagcactagttctccgctcctacacacc

SEQ ID NO: 28268 - DNA, 387 bp, Zea mays
tcgcactcctccctgaattcccattgctcttgagaatgctggtgcccttctggctgctggctctcggaataagtcggttgtaatggtggtgggggtgggagttgtggccaagaagcctatgaatggctagccgaagcaacagaagctgcaggatgattgcccacatactctggtattgtaggagaatgacacgaagcaatgtgcaagatctgctttggctaattctgccgagcttcggcttctgctatctccttttgcttctgaatggtgatttggtacattcttgtaatatggcccttgtcctcaccataaaataggcagtagatctttctatgctgatccccaaatcttccctcgaagcctctggctgctctaccccttggagct

SEQ ID NO: 28269 - DNA, 390 bp, Zea mays
  unsure (1)..(390): unsure at all n locations
accgcatgtgatggctatatatgtgctggctgtgcatactcaaaacgctctaaataggtgagtttgcgggaacatttttgctctcgccaaaccagattaatgatataaagggtactcanacgcgtcaatcacgctcgcgtattaatctgctgagacatggtattggctaaacattggttgcgccatggcaacatgatgcaatatttgtgccttactaacttagctgtgtcatgtgattgctacgtctcactatcaattaaacagaccgctcccgtagagtcggaccgtcatcgcccagtcccgtaaattttgtgtagataaatatctccaagttgatattatagttcctaaatggaacttttctaaagaaacaaaagttgtgttaacaca

SEQ ID NO: 28270 - DNA, 454 bp, Zea mays
  unsure (1)..(454): unsure at all n locations
agcntttaaagggagagcacattntgngactaacaaatgttcattttgagaaagacagggtttgtagcgcatgtcaagcagggaagcaagttggtgttcatcatccacacaagaacatcatgacgaccgacatgccacttgagctactccacatggacctattcggcctgatagcttacataagcatcggcgggagtaagtactgtctagttgttgtggatgattattctcgtttcacttgggtgttctttntgcaagaaaaatctcaaacccaagagaccttanagggattcttgagatgggctcaaaattagttcggcttaaggatcaaaaagattagaagcgacaacgggacgaagttcaagaactctcaaatcgaaggctttcttaaggatgagggcatcaagaatgagttctcttctccctacacgccacaacanaatggtgtagtgga

SEQ ID NO: 28271 - DNA, 153 bp, Zea mays
ctaccactttctcaccttgccggggctactatgatgacgactgtggcaactacccactctgcaaggagtgctgctcttgagcacgataagcttggtggacacctcaaagaagcacgccctcagcctgtttgcgatctgaggtcctctatgtct

SEQ ID NO: 28272 - DNA, 344 bp, Zea mays
agcttgccgtctagtacacccttaaaagctagtgatctatcacatcttctaaagacagacacatctacatttgtaaacaaacagttatatcccatattgcataattgactaacagatagcaaattatatccaagagactactaaaaacacattagagatagagtgctcatttgagattgcaattttacctaacccttttaccttgccttgattcccatcaccgaatattattgaatcttgggaatctttgtttttgacgtaggaggtgaacatcttcttctcccccgtcatatggtttgtgcatacgctgtcaataatccagcttgaacccccggatgcataaa

SEQ ID NO: 28273 - DNA, 429 bp, Zea mays
  unsure (1)..(429): unsure at all n locations
ntctcctcgctcgacccgctgcctcttgcttggctactcctctgaccacaaggggtatcggtgtctggacctcgcctcccaccgcatcatcatctctcgtcacgtcgtcttcgacgaagatgtgtttccccttgctggcccctcaccacccaccgacctcgactccctcctcaagtccgatccggtctccccctcttcctaggcgccccgccttgcgccgttacccacaccccatgcggcctcgacgccgtggctcacgcctattcccgcgccacgcgcggncccatcgatcacgcctgcgccacgcgcgggcctgtcgaccacgcctgcgcctcgcacgggcccgccgaccccccccccccgtcgatcacgtcagcgccacacacagcatttcatgaaacacctaaatttttgtgggccaaaagccca

SEQ ID NO: 28274 - DNA, 452 bp, Zea mays
  unsure (1)..(452): unsure at all n locations
agcttcaatcttggggaccctatcttggtgcctgtaactttctcaatcaaggactttgcaacccaaatttgtctaggtctactcttgcttggtggacctaagaatgttactttaaccttcccatttgcaacttttcttagtacatagcgagcattgaatgcaaaagatcatgagttctttgacaagggagttggtggtgtggctttgcaattgtgggcaaagtgtccttcttttccacactcatagcacttgattggcttagtagtttgttttgccttgtattgatgtgttgctttcttttgcccaaatgaattgtaaccaataccactcttattatttttcatgactgtgttcatgaggagctcattttgaaggtattggcctttngtgaacttttgcacactggtggcaagatngtttttctcacgcttgagtttcttgatttcttctct

SEQ ID NO: 28275 - DNA, 432 bp, Zea mays
  unsure (1)..(432): unsure at all n locations
ntacttcgcttaactntgagagtacctttgagctatctcgtgctaagaagttgaatgtatattcctgaatttaagtaatacggaggaagaatgaataaacaatgctaaggttcatgagatgagtttcatacattgttcaatattatcttgtttaatattgttttattcacatctccttttaaagactttcgtcctcaagctaacagttcgaagaagtgataacttaaggacaaaggtccagattccttaacttgtgttaccttgttttttatgccatatagcaattgaaaacaagatcataacagtgccaaaggttagcaaacctcctgtcaacacgcttgttgttgagagtgcgaaggttgaattggttgtgaaagtggttggtagcccgaagattaatcttgatttaaagctgctacctcaaaaacttac

SEQ ID NO: 28276 - DNA, 434 bp, Zea mays
  unsure (1)..(434): unsure at all n locations
agcttgccaatacttatcaaagcagcaacatttattatcacagcaactgcggaccatacctgtnacgtggccatttgcatgctggggactggacatgattggaccattcaagaaagctcaaggaggatacactcacatgctggttgccattgacaaattcactaaatggatagagtataaacccatcgcttctctgacttcagctaaggcagtggaattcatacaagatataatattcaggttcgaaataccgaatagcattataactgacctgngatccaatttcactagctcagaattctttgatttctgcgaacaaagaagcatccagatcaaatacgcatcagtagcacacccaagagccaacggtcaggtagaaagggctaatggaatgatattggaagcactcangaagaaagtcttcgacaagaatg

SEQ ID NO: 28277 - DNA, 377 bp, Zea mays
cggaactggcttcgtctgaaacccttaaaactggtgaccaacatgtccttcatcttttgccatgatgtgattgttcctagccgaagagaggagtaccaggtttgtgcaacatttttgactgccatgacgaaagatttcgccatgactgttgtgttaccgccataagaagatattgttgcttcgtaactcatcagaaactgcttcggatctgagtgtccgtcatacatggggagctggggtggcttgtaagacggaggccaaggtgtagcctgcagttctgctgacagaggagaagcatcatcaaaagcaaaatttccatgatggaaatcctcataccagtcatcctcgttgaagaagccctcttgatgaagctctct

SEQ ID NO: 28278 - DNA, 413 bp, Zea mays
  unsure (1)..(413): unsure at all n locations
agctntacacaaggcaggagatatccaacagaatggaagggcgtatcctagcaagtgtgttgcatgagttgaacatgaagagccgagggctgcagtatggaatcatgaggactggtgcaatgtctgctgagatatctggaataacaaaagaaggtaagaattggagagttcctgttgacattgagaaaagaacttgtggttgtggacaatggcagatttctggaaaaccatgcactcatgcaatagctctattntgtcagcttaaaaaacttaacattgagaactttgtagatgactactattctgtagagaggttcanattaacttaccagtatacagctgctccattgngtgataagactcattggccaaaatttgaccccgggtttaaaatgattcctccaaagctagaa

SEQ ID NO: 28279 - DNA, 430 bp, Zea mays
  unsure (1)..(430): unsure at all n locations
tgaatatcatcgactcttcatgtaatgaggtatgctaattatcagtcatagtaaactccatttggttttgcattttatctattaagtagaattctgctttatcagatccgaacttctctcaagttgaaagaaataatgaagaaaatccttctccttgggaataccctgaaccagggaactgctagaggtaacaataaattgcttcttttgtttgtcgtccagttttgtctacagtttgattgataacaatatcgtgtaagcctttctttgtgcttaatacacaaaaaatgaaatacttggttcttgctagttagagaatcctctgaattttctatgattacatactatntatgttatcgggctagttcttagctttgtggctatatttgattacaggtgctgcagttggcttccgggtggacagtcttct

SEQ ID NO: 28280 - DNA, 235 bp, Zea mays
  unsure (1)..(235): unsure at all n locations
agcttatggagattcttcatcccaacatgtgctantctgcgatgccagagccagcccatgttagtcttagcaattaagcatgtgtcgaggtcagctctatcaaaatctactaagtatagctgaccctctaacacacccttaaatggtattgaatcatcacttcttctaaagacagtgacacctacattagtgaatagacaggtgtagcccatttgacataattgagatacgggaa

SEQ ID NO: 28281 - DNA, 438 bp, Zea mays
  unsure (1)..(438): unsure at all n locations
tataaaactcagcttgacttacttgtntattatacttgcgcttgtgttgtttctcttgagtagctagnttcctcatgtagtttactagttacatgcttggcttgtgtagctaagtagccctagtttatatatctaagtagttgtatctctctagcggagtttgtatagctttgctagtgagtagtactagtgtagctaaggatttgtatatttttctcactagtatgtgtaagagcttctgacatacttagaagtactagtgcataggtttttatgaccttgctaactatatacttgtgtatgtaagctctctagctcgacgtcttagttgtataacttgngacctctataaagtgtttttgatactagatagaggaatatagntaaggctaaaatgggtgcttttattatgcnattttattaaccagtattttttct

SEQ ID NO: 28282 - DNA, 452 bp, Zea mays
  unsure (1)..(452): unsure at all n locations
agctntgtangagaaggagatggtatgaacctttgttgtgcttgatggagttaattcaattcttatcaactcaagctatcaatcttcaaatgatctacatattcaagattgacccaaggttacttcaatttattgtattcaaaactcatatcatctcaggaagatattaatgttgtaggaaataaagaatcatcatgtgcggaatatcaaagcctacaacatggaggaaaatcaaaggatggtaacatttatattcttaagtgcaattatcttaaattgttgtgtgtcttgtgtagtcacatagaaatagaaagcacttaagcatgttttaaaattatgtcatcattctttgaagaaattcctctcgtatggtagaatgtgttgttatcaattctatattatgacaatctacatgctttanatattgcagttctcatgcatgtnttacatta

SEQ ID NO: 28283 - DNA, 434 bp, Zea mays
  unsure (1)..(434): unsure at all n locations
ngacatcggttcccattaagaaaatttgtgggtgaagttttaaagatatatcagattttccttcaccagatcgctcccgaagcaattatcataatggggatcttcgtctgggctgtgaggagtcaaggtctagagccaagcgcaagatgtttttgcagtatgcacgagctttcgtgtgagacgaagccctatggtaaggaacaatatcataacaattttgggtgctacagcttcgttgctcgctctggcgcaagctacccagtgccaatgtttcggaagaggtagcccggggcctggatggaagaatggttttacgtgaaaaatgatttgaaggcaatagaagatattaaagaaatcatcatgcgacccatttggtcctgcttcggtctccgaaagccgaaggtagaaattgatgaggcagccgaagcatgccg

SEQ ID NO: 28284 - DNA, 446 bp, Zea mays
  unsure (1)..(446): unsure at all n locations
agcttctgaacctctccaagtgccacaattgagacatgttatcattagtgattagtgacttcagagagtgtnattcgtgtttcatttgttgctcttattgtttggcttttaatcgtgctttcttcatctccttctaaactctctagtgacttgtaaagctagcaagagacacttaagtgtgtggtggtccttgtggggtcttagtgacccttgagaattgagattaagaaggactcaagtgctctaagtgattgtttgagagagagaaagggttgaaaaagacccggcctcctcaacgcagagtaagttcttcagaaccaaatctcgggaaacaaattattgtgttcatttgttttgatcattatcctatgattgattcttctttatccctctctctaagttctcttgcttacaatcttntgagctagcacccaaagttatccata

SEQ ID NO: 28285 - DNA, 439 bp, Zea mays
  unsure (1)..(439): unsure at all n locations
ttggcaaccggtgtgtgcaacggctgaagcacgtcttcaactcatttggagccacatctganacaaatgaaccttcggttgaagacctgccaagcaccttcgaacatattgagggcgaagttgatgcacttgacgaagttatagctaggcacggtgacttctgtgccctgctagcttctcggggcgtagctgttgctttcatgaagactggttgcacgcatgggaagatcgtgaacaggccaaactttagcctgtcaccagcggatttaactgacatccctagtctagcccgaagcattggaaatagattcataactcaaatctgaacgaagggtgggcgagacttagctggtgacgaagcttgaagtcatctcaagcccggaatacacttgtacctatggcttaacttttccttgagatttgtgtttaccttataccc

SEQ ID NO: 28286 - DNA, 425 bp, Zea mays
  unsure (1)..(425): unsure at all n locations
agctttaagctccttgacaataaaaatacttcacctcttttaaacaaagatgtaagaatgaatgtttgagaagtttaaactangtattaagcagggtttaatgcatgaacatgctttctcttccttttatataagatatgcaaggaatgtaggaacatttangtacatgtatgaatgagattgaggagttttacccttttgtacctttacatagtgatgctctcttcattgtgctttgtccttagtcttattgaattcgcctaagacctatactcaagacaatgtatgaaagtattttgcacaagagagagttctacagctagtgatccttctctaagtcattggtttagatatcaagtagatcacacattgcataaatatatcatgaattctccttttaacttagtgcatatcaagatagatgt

SEQ ID NO: 28287 - DNA, 446 bp, Zea mays
  unsure (1)..(446): unsure at all n locations
ctataaaactaagcttanaggcaaagctagctntgatggcagggatcacaacatagtgtatgtcgcatcgtcactcgtgggcatcaccccttttatataagcattttttaaaatttaaccgttttactcacttagcactcagccccactgagcagagttatctaaaaagaaacttttcataacgagtttcgggaaggtgtttttggaccttcagcgcaaggcctcccaatcatatcttctgcggtctaaactcattatgaaaaatgaacttattccgcaaggggctacttttgggggcctatattgctgaagatcctcaaaaccctttgttttcaggacaagtgtatttcaggcatgccacaaagctgccctttggacggagcggctagagaagaaactttggctaaagtgtgcctatggcactatctgcttcaccgtaaaaagct

SEQ ID NO: 28288 - DNA, 455 bp, Zea mays
agcttcatcagttgttctgaccgaggatcttcagaggcttttttcttgaattttgcatgacaacttgctaatctgtttgtagcaaacttgtagccctatatacaaactacaattctgctatagagatcatgttcagctgcttactcctttgagcatgaatcaagcctaaagttcttcaaaactcactgaccgtccatattcagtttctgtattatctaacagccagacttagggccaattatctccatttttttgtataacacaatgcttaatcccttaagaaaaattgtactcctataatatctctagacttttgatgtgttgaccctaggcaaaatctttgtatttttggatctgcagagttccaaagtcagccttcatcaatgaattttcagacttagccatacatgagcactggagtggccttttgaattagactcaatctcatggttcat

SEQ ID NO: 28289 - DNA, 432 bp, Zea mays
  unsure (1)..(432): unsure at all n locations
tattatacctttaacatctacgttnttctcatatttgaattcaaatggcaggtggggtggggttttggattgcgtaccgactcctttgggcagaaagtcggggaagcgagaacgtaaaaaatcctcagtctcccacgtagcctcttccactgagtggtgactccattgaaccttatacattctgattgactntgcccgcgttgatctctctttttgatccaacaccctgacggggtgctcttgatacggcaagtctggttctatcttgatttctggttcaggtagtacttcagtgggtaagcggacacacttctgtagctgagatatatggaacacattatgaactgctgacatgtggggtggcaattccaattgatatgccacaggtccacaatttgctttgatctcatagggtccgatgtagcgaggagc

SEQ ID NO: 28290 - DNA, 364 bp, Zea mays
  unsure (1)..(364): unsure at all n locations
agcttgtagccttttatcttgaattgggatgcacttgttgactttcaaaagtcggaaagcaacaaaatatctgccttacgactcctaactcgactcccgcagagatctccaagaaatgtgccagtgcgctaattaatggttccaaatgaaactgcctgcatcaataactcaccaagtacggatccagtgagtcgaatctgagcaccacatcagcgagaacccctgggaggaagacgagtcgagcatcgtgaaatgaaagagtcagagccgttgtagagcacaagcaaacagaaggtaggtaccaaagagaacccacaccattcttgtccngtatgaggaacgaggtgatggcggcgccgacatt

SEQ ID NO: 28291 - DNA, 433 bp, Zea mays
  unsure (1)..(433): unsure at all n locations
tgtgaggaacactgtggcctttgctgttggttccctcgatcatcattntgggtagagttatgaattgatctaacgtgcctcggatagaaccttcctccgaagcccctggtcatttcagaaaacctgaaagcctcctcccttctttggcgaagatcattatcggcccgaatgtactcgtccatcttctggagcagcttctccaaagattgaggaggcttcctagcgaagtactgagctgacggtcctggccgaagccccttgatcatggcctcaatgacaatttcattgggcaccgttggtgcctgtgccctcaaacgcaagaacctccggacatacgctcgaaggtattcttcgtgatcctgggtgcactggaacagagcttgagcagtaaccggcttcgtctgaaacccttggaagctagataacaacaagt

SEQ ID NO: 28292 - DNA, 458 bp, Zea mays
tagagccacctgctgcatgcaagcttgataattggcataggaggaggctattttgttctctcagatcattcatactatcaaaggcctcctaagatgcatatgcctaaggaacgtcttcacttctttctgaagcccagtttctttcttgctgctcaggctcgagacgacactaaagtggcaagatcatttgctgaaactgatgttgaggagcttttattggcggcgcactgaacaccaacattgcgtaaggacacactagagcatggtagcacattatacacaacttacgttggagattctgggtgttctccgttcccgactggtattgctaacatctcttccatggttacctaatataatagctaaaggttgaacatcagcatagcataccgcaagttgtgagtacaaacatgaaaggaataccagcacttacaatagatttctgaagtattttgcta

SEQ ID NO: 28293 - DNA, 443 bp, Zea mays
  unsure (1)..(443): unsure at all n locations
aactcagctcggtataaagatgttagtgcaatagaacctagtgtttatatatcgagctcttgcgaatcacagaaacctccgataaggaaaacacaagagacacaatggtttatgccgtggatcgggcaagtataacacttgcctacctccacgttgtggtagtccaatggacgatggttacactcaaccccttttaagtgatccaatgatcaacttgaataccacgggattattccttatagatctcttcccgttcgtgaagaatctgcacaagatggaccccctcgcccttacaagattgatctcaaagaaagcacagagtaaggttgggaagagcgacgcacactataatttaatccacaccgcatacacgcacacaagtgagaagatgagcacacaaaacacgcgcggngagtctacaacatataaagtgctcaatctca

SEQ ID NO: 28294 - DNA, 454 bp, Zea mays
  unsure (1)..(454): unsure at all n locations
agcttctaaagggagaacacattntaggactaacaaatgttcattttcagaaagacaggatttgtagcgcatgccaagcaggaaagcaagttggcactcatcatccgcataagaacataatgacgaccgacaggccactggagctcctacacatggatctattcggcctgatcgcttacataagcatcggcgggagtaagtactgtctagttattgtggatgattattctcgcttcacttgggtattctttttacaggaaaaatctcanacccaagaaaccttaaagggattcttgagacgggctcaaaatgagttcggcttaaggatcaagaaaattagaagcgacaacgggacggagttcaagaactctcaaattgaaggctttcttgaggaggagggcatcaagcatgagttctcttctccctacacgcctgaaagggaaatgtgcctttg

SEQ ID NO: 28295 - DNA, 397 bp, Zea mays
taaagaattgcgataacaaggaggaccttcgaattatcaaaaaattcttcgaagcaacaaaaagtcgttctaaggaacgcagagtaagtttgccgaagtcacaaaaagccgttccaaagggagcgcagtgtaagttttttgctccaaagtcgttcccaagggaatgcagagcttacagcgaaaagtcaacgctgataccgcctaagtaaaaggcgaagcgcgaaaagtcaacgcgaataccgctgaaagtaaaaggcgaagaagctcctaagggaggcttacagcgaaaaataaacgctgattccgctgaagtaaaaggcgaagaagctcctaagggggcttattcaaaaagcaacgctgattcaaaagatatgtgtttatcgagggatgtgtggta

SEQ ID NO: 28296 - DNA, 453 bp, Zea mays
  unsure (1)..(453): unsure at all n locations
agctntgtgaactatgcctgtatccaatctgtctgttccagaactataagcgcttgccagataccctcgttctgatcgaccacgaccagcacccaacataagacttccctagttatttagccaagaccagagccatgatagttctcatggtagcactgttttcccaagtggtcactccatgttccaattatcacaatatgatcttgcttaattgtcggattaacaacaataatgtaacttaccatttggaacattgatatcatgagttggagtaacatcataaagttaaagttgtagcaatagcatagctacttgattagatcaaaacccaggttaacaaggagtaaggttggaaaggttaggtgtatctaaataggtaacccatcatattatgcatatatatcgaagaataaactntattaaatgtattgtttgcgatcaaacaaagtatgc

SEQ ID NO: 28297 - DNA, 427 bp, Zea mays
tcacgggctactggcggagctagccgaagcactggttgttctggagggtggctggagtgggctggccacggcggccgtagctctggcggcaatggcgggcggaaatgagctcaccggagctaatgaacggtggctggccggtgaaggtgagtgcggggcgaaaagaggtgcgcccggggaggctttataagcgcgggcgggcacggccgatggcgtgggcgtgcggcggacttgaccggacgccggggcgagcgcgcgcgcgggttgggcgagctctggcgtgccgaccagggtcgaacacgtgtgcccgtgcgttcttgccaagctctggtgcgtgtggtcgctcatccgagcctgctctcgccttggtcagtgcacaaaaacctcttcttcttcctacaagctaccattcttgtgtggaggtcat

SEQ ID NO: 28298 - DNA, 221 bp, Zea mays
agcttgtgaagcgacggcggacggcgtcagcagttcttcagctcgaccatgcatggatcacacacacacgatcgggcgaagcggaacacgaaaatggtacggactagtcacgtcatgcactcgtagcagccggccggttcactgaccgccagcagcgttttgtctggcctctcctttcttcacttgctacttgatactccctccgtttctttttatttgtc

SEQ ID NO: 28299 - DNA, 432 bp, Zea mays
tgtgcaacaccgtatggtctcacgaggaggcgagctcatctccaaaatgaaggtcttgtggtcgaacatggatgaagaactggctacttgggaagataccgaagcccttcgcgttaagttccaaggcgcaccgacatggggacaagccgactttcatggtcgggggaatgtcagcaactccaaggaggaagcagcaatggggtctcaatcggtcgcgtcgaaggagtcaacaactgaagaacctgatgagaagacaacgcaagcgcgggtacgacgtccaagtgtcaagtacaacgggccgcaatggatcctgtaaacacgagtgggttgtacgtgggtgcgttggccgtgaacgacgtcctatacgggcactggccggtgggtcacagtagacagtacttaagcaacgatcagaaatctgaatgggcatca

SEQ ID NO: 28300 - DNA, 415 bp, Zea mays
agcttctttaaagctggtttaagagttccttttatttatatgattgctgatgtactgaagaagtttgcgatctaccttcatcaattaactcctaacgttatcgttaagcttagtgtttatatctgggctctccgaagccaaggggtggaaccatttgccgaaggtttctaccgagtgcacgagcttcattatcagaccaaggctagaggagatgggctgcatgaaaactttggctgctacaattttgcctatcgcaagagtacaaaatttccagtgatcagttatcgtagcaagtggccagctggctggaagtctgagtggttttacgtcaaaattgacgaagaataggagaagctggtccagagtccgctagaattaatcttcagagagaccagaccccagtgcaacatgacac

SEQ ID NO: 28301 - DNA, 433 bp, Zea mays
  unsure (1)..(433): unsure at all n locations
tgtncattttgcgaagctatctgactacagttctatgcagatggagctgcaatacttccataagaatgtcatcacctgcaaccagttccgtatcatgctggctacactatcagcggcttgggggcaagccgcatttcgaggagtggggaatgtcagcaacacgtatccaggagatggctgagaaggcagcaacagatggagaaagctgtcagcaagctgagtagaaggaaacgtgggccaatgtgggccaaatgtgtgggctgcgatccagtatagatttctataaaaagaatgtcttgtaataggagagggaccaagaagagaatattgaaatccactgtcgtgtctatcggctcattcttccccttttccaagcattgctctcctgctacctccgatctcccttcttcgatcccaataatatctctgtcgt

SEQ ID NO: 28302 - DNA, 443 bp, Zea mays
  unsure (1)..(443): unsure at all n locations
agcttcggctccatctatgttatggatcgcctttgaattcgtccaactcccttcagccctcctggtagcttgttgactcccgtgaacagcaatgggcccttgttccgaaggtatcttcatgcataagtacgctgggtgaagtatggcttcgaaggcattaagcgtccctcgaccaatgattgtgttgtatgggtattccatgtcaacgatgtcaaagacaacttgttcagatcttgtgttgtggacgtaaccgaaggtaactgacattgtcattntgctaagtgctacaatttgtcttcctctgaagccacaaagagggtgtgtagcatcatgaatcttgtcttctggttcttgcatttgtctgaaagcctttgcaaatatgatgtccgctacactgcctgtgtcaaccaaaacattgtgtaccanaaatcccttgatgacat

SEQ ID NO: 28303 - DNA, 430 bp, Zea mays
  unsure (1)..(430): unsure at all n locations
ntgagagtaagttgatgaaggtatatttcaaattgatttttcactttaaccagcattttatacagaggaaatcgaaggccagtattggtccttgttctcaaatgttatacatcaagaacaagacaacacgatttttaataattagagaccttcgtccttcgaagcattatctgctttcggatataatgatctcccgacgaaggtcacgaagggcataatttcatcatctcagtgaacatatataaataagggtatatgaaatatgaaagaatataaataatgaatatgaattaatacgctatttatattctcgtttcataagcatgaataaacatcgacaatatctatattacattgatacctttggcttgctagaaggtgaagatgcgacagtgacgcacgagtgatcacaatccaacgtgaatagtac

SEQ ID NO: 28304 - DNA, 409 bp, Zea mays
  unsure (1)..(409): unsure at all n locations
agcttacatagacgaacagcgagaacatttgtaacgtatcgtangggatatacaaaatgatcataaaagggtagtgtgtgcgcttgataagtctactatggcaaatcttccttcgcacgagggtgaattgagggaatacacacataattcatcggctacatgttgtcacgaccagtcacaacccctttatgggatgccgatggacatgtaccctgtgcaatgacagcctcccacgcacatcggtgataaatttgctgatctgcgcatgcccggaccattcgcacgtgggcgcagaccgtccgggccagcggcggctgatcccattnttagaagcgaattaccgagacctgcacccaagccaccacatgtcgtgcaaaccctagataacccattcgtactggctgtgtat

SEQ ID NO: 28305 - DNA, 399 bp, Zea mays
  unsure (1)..(399): unsure at all n locations
tcacacctctggactaacttggctgcatcactctttgttgttggacagtagaaaccagacctgaagaccttccccactagagttctggatgctgcgtgtatcccgcactgtccggcatggatctcatctaacagttgcttcccagtaaccgaaggaatgcacttcatgaggactcctgctacgccccttctatatagtgcatccccaatgagggtgtagtgggttgactgcctcgcgatgcattctgccgcggctttatcattcggntcctcttcgntctttatatacttgatgataggttccctccattcattaaagtctgactctggctggctcanaacattgcattcttctgcttgatctgaggaaatgctcggattggcacctcttggacaaaac

SEQ ID NO: 28306 - DNA, 455 bp, Zea mays
  unsure (1)..(455): unsure at all n locations
agctnggacaatggtttgtgatggttcctanggaaccttcngtgcaggtgcggctgctgtcctagttgtcccttctaaactcagaacatgtttgcagcaaggcttgacttcagttgtacaaataatattgctgaatacgaagcacttctggtggggcttcggaagttaaaggcaatgggaataagaagggccatccttaaaactgactctcaagtcatttttggtcatgtagacaaaagtagtaaggcaagagatccgaggcttgaaaaatatttggatacagttcgaaggttggaggcttctttcgaaggtttttccgtcaagaatattccaagaggagaaaatgagcatgcagatctgttagccaaatcagcggcacaggggctccctctaccttcagaagtattttttgagacaataanagcacctttggttgaacttatgtagagagcagt

SEQ ID NO: 28307 - DNA, 432 bp, Zea mays
  unsure (1)..(432): unsure at all n locations
ntacttagttgatntcactaaagataatgccgatctagatgcatgttttatctgtaagactaatatgggatggctgtggcaccaccgtctagcacatgttggaatgaagaatcttcataatcttttaaagggagaacatgtgttaggactaaccaatgtctgttttgagaaagatagaccttgtgcagcgtgctaagtagggaagcaggtgggaactaatcatccagggaaaaacgtgatgacaacgtcaagaccactggaactcctccatatggatctcttcgggcccgttgcttatcttagcatcggtggaagtaagtatggtcttgttattgttgatgatttttcctgcttcacttgggtattctttttgcaggataaacagaaacccaaggtactctaaagcgcttcctaaggagagctcanaatgag

SEQ ID NO: 28308 - DNA, 459 bp, Zea mays
  unsure (1)..(459): unsure at all n locations
agcttgaagctggattatgcgctatgacgaaggatgatcttgcggatagccttgcatacaatagcctgaaggtacgagaactgcgtgtttggaaattttgtaatttgcaacttattcttttattcttatatcaactcttttacatatagggtttaatactaagcaacgcgctgagagcgcaaaagaatgccgaagacgagagctatgaaattgctttcaacaacctacgatcagaggttattaaactaagaaacgaagctctggaaaaggataaaattctgcttacattggtgaacaagacaaaagaagacgaagctgcctcaaaggcccaggctgaagcccanaagcgcgaaattaaagatcttcagaaacagctagctagagctaaagaagaacgtatacttgaagagacaaaacgagagcttagtgatcaatgggccgatcattnggaaataaatg

SEQ ID NO: 28309 - DNA, 398 bp, Zea mays
  unsure (1)..(398): unsure at all n locations
ntggctcattgctcctcgacttgatcatcctgtacatatcattgcgttataagggaaattcaagtttcagaaaacgtaagcacaaggtatgagtatattaccggcttaaggtgacttcgagcttcgtcaccagccaagttttgcccgctctttgcccagatttgagtaacgaatctatttccaatgcttcgggccaagccagggatgtcatccaagtctgctggtgacaggctgaagtttggtctgtttacaatgtttccatgtgtacagccagccttcatgaaagcaacagtcgtgccttgagaagctagcagagcacaaaagccagctatgactgtcgcgagagcttcaacttcaccttcaatatgatcaaatgtgcccggcaggtcttccaatcg

SEQ ID NO: 28310 - DNA, 451 bp, Zea mays
agcttaaccttgtaacgaggataagttgtctttgttctaaaggtggatggtccttaagcctctttgaaatccttaagggtaaatgcttaatatgtttctaacatgctttcataagtgcataaactgtcatgagcatcacacttatactatgacacaatgcacttcacattctgtatgatatagctatgttctcattaacctaattatgtgcaattggcttttaaggccaaaatatgtgttcttctccatgcacatatttagggggagcaatctatattgtatagaactatgatcatgctcaatttgatatatcctttgatcatgtctcttttatgtctatgactaatgtgttttcaagtgtattctcatgcttagtcatagaattgaaagggaaatggagtatttgcaaagacgaacgcttcactcaacccccatcggtagcatccactct

SEQ ID NO: 28311 - DNA, 436 bp, Zea mays
  unsure (1)..(436): unsure at all n locations
tgagtcagatcttctacagagaatcgttgatgcccaaagaaccgattatggtatgaagcatattcatgagaaaatagaagccggcaaggcaaattgcttcaggaaagatgaccaaggaataatatggtttaatggtcgcatagttgtgcccaaagatgcggaagtccgccaatagatcttggacgaagctcatcttagccgatattccattcatcccgggagtactaagatgtatcaagacttaaagcaacattattggtggacaaaaatgaaaattgaaattgcacgctatgtgacaaggtgtgacacctgcacacgtgtcaaggccatacacatgaagaccgctgaaccattacagtccttgcccatcccaacttggaagtgggaagatattagcatggacttcattgtgggattactgangacagttaaagga

SEQ ID NO: 28312 - DNA, 410 bp, Zea mays
agcttcccgaaaataagaagcacataattggtatggttatttttgttatcctactaagctttggaccaggatatcacacctatctagtgcgtcagcggacatgtctggtacttctaagcaacccgttattctttgtttcttcaatgactctttgttcatgctccttctagcttgtatcttggactcctgcataatctttgtatgtcttcaatgagtcttctaatgtcttgcttgaggtgttgaccttctcgatcgccactttgccttcatctaagtccacatgtatcctgtgaactatatttaagaacacttgcaaataatattagtaccaataatgtatgtcatcatcaaactacaaaatctataattaaataggtcttactctatattcctttgagagtagttagaca

SEQ ID NO: 28313 - DNA, 432 bp, Zea mays
tgaagattattcagctcactcactacgacctcatcttatgtatggactggttaagttcccacagccctatgtgggtacactgggaagataagtggctgattataccgtaccaaggctctactatcaaattgtgtggtatgggggttcaggacatgcagtgtactgttatggaggtatcttccttggaatccctcactaacaaggatcaagccattgtacaaaagttgcccgcagaactgcaacaggtactcactcaatatgctgatatatttgaaattccacagggtcttcctcccccacgcgagtgtgaccatcgtattccattgttgaccggtgcaagcccagtacaactcaggtcgtatcgttatgcactagctctgaaatcagaaattgagaaacaagtagcggacatgctccagacaggaattattc

SEQ ID NO: 28314 - DNA, 349 bp, Zea mays
ttctctatatcagggaagagtggaatcgtctcccatataccatgatgagccgacaatgcctgcggaacaacctcctcagcgagaagctcaccgatggaggaaccgacaccgaaatattcggcgacatcacaaagcaagggaacgggacccggcgcaccctgtattccgagatgaaatttcagaggcgggagacactcctgacgaacgagtctatagagagaggaggaactgtcgccgacgtgatcgcctgcgtgcttaagagcaagctgaacaagatgcgatgcaacgcccagagaaccctctcttggcgtgaaacctgagctctgactacacccgtgccatgaacaca

SEQ ID NO: 28315 - DNA, 403 bp, Zea mays
  unsure (1)..(403): unsure at all n locations
tgtgggtgtggcggcggcggagagggaagcgggttgtctgttgtatgcgcggatgccactgttgtgccggcgccggcggggccggtgatgcccgcttgagctgggtgggaatcgggcctcgttttgcgctgcctcgtggcgttccctgtgattactgagcctcctgacgctcgaatgggtgcgcgggttggtgcaggccaccgtgcgtcngatgtggacgagggagcgaggcggcgccagaccgaggttgcgtcgggctcgatttctactgggctgctgtctgctgaggtactgctgcttccctagctagaattcacggacctctgtggctctgttttagtcgacgcgacatgcccggattactactttnttttgcctgccagaaaattacttttcagaatgt

SEQ ID NO: 28316 - DNA, 449 bp, Zea mays
agcttattgtcattgtcttacagtaaggacacctgacaccactttatgtcaagaaatggagaagttgaatctagggatagtacaacaaggaactttgacacatttgaagcttgagtaagttcttctataaaggattattgatgttcaaagaacagatcagggtatgaagtatattcgtgagaaaatggaggccgacaaagctaattgttttaggaaagatgatcaaggagtaatatggttcaaagatcgcatagtggtgccaaaggatgctgaagtccgtcaacaaatcttggacgaagcccatcttagttggtattccattcaccctggaagcactaagatgtatcaatacttgaaacaacattattggtggactaaaatgaagattgaaattgtacgctatgtggcaaaatgtgacacatgtagacgtgtcaaggcaatatatatga

SEQ ID NO: 28317 - DNA, 389 bp, Zea mays
  unsure (1)..(389): unsure at all n locations
ntctatcctggagggaggcagtgttggcggggcttcctcttttcgttcagtctagcatccttggctcttggtccgcttccggatcttcttagtgggggcgagcttctttaacttcttatcgtagtccatcttcagggttcggtagtgtcggcgtttcgaccccggggggtccctggaccaacgagtaaattgtcgtcgcgtgtcccagcctatatgggtcggcacgagacagagcacgaagggggaaagaacggaggagacaggcgaaaggggaaacccgcggccttcgtgttgtcctgcgcccaggtcgggtgcgcttgcagtanggggttagaagcgtccgcctgggagagagcgagggactttacgcgttcgtccgtcctcccgcg

SEQ ID NO: 28318 - DNA, 328 bp, Zea mays
agcttctaaagggagaacacattgtgggactatctaatggtcattttgagaaagacagggtttgtagcgcatgtcaagcaggaaagcaagttggctcccatcatcctcacaagaacatcatgacgacccacatggatttattcggcccgatcgcttacataagcatcggcgggagtaagtattgtcttgtaattgtggatgattattttcgcttcacttgggtattctttttgcaggaaaaatatcaaacccaagagaccttgaagggattcttgagacgataacgatcaaaaatataagaagagacaacgggacagagttcaagaac

SEQ ID NO: 28319 - DNA, 433 bp, Zea mays
tatgttaatgacatggtaatcaaaacagaaagcttattatatttcatcgaagatttgcagctagtcttcaacatttgagacgataccggtggaagttcaaccaagaaaaatgtgtgttcggagtaccagcacggaagttactcggattcattgtcagccaccaaggaattgaatccaacctagaaaaaatcaaggccatcatgagaatggaagcgtcgcgatcacagaagaaagtgcaaaggcttactggatgcatggcagccttgagcaggttcatatcaaggctaggcaaaagaggcttaccgatctactaattgctcaagaaggtagacaagtttcagtggaccgcagaagcacaggtagctctcgaagcattgaaaaggttcttgaccacgccaccagtactcaagcccgcacgccgagccatgccaaa

SEQ ID NO: 28320 - DNA, 441 bp, Zea mays
  unsure (1)..(441): unsure at all n locations
agcttgaatgtccaaaatcaagaacttcaagtgcttcttgaaaattgcaagaacatcaatgcctcatctttattgattgaatctaagtctagctcctcaaataataccttttgcaaacattgtgccaaataccatgcttcttgttgtttaactaccatgcaaggaagaaaagcccacaagtgaaggtcaaagaaatattgaagagatgctctagcaatgatgggttaaagaaagttgaacccaagtacaagtccctaaagcccaacaatggaaaagggggcttgggttcaactcagttaaggaaaaccctagcatagtgcataaggggtggagatcccccaagttcatagagagaaccaccctatatgatgccttgtggaggattcactcctcanatgacaagtcaactcaagtaaaggtaaacttgagttccacaaagag

SEQ ID NO: 28321 - DNA, 429 bp, Zea mays
  unsure (1)..(429): unsure at all n locations
ngtgcaaagctaggatacctagacacattatttcccatctcagacattcttggcgaccacgacacgacaaagacgtcaagggaaccatcccacgtgactggctgcgaacaaattataaatcgcggaggcgatctttctaaagcagctccagtatatttaaaaatttccccggagttacattacatattgaagggcaagacttggacttgatggacattgatgcaaaaaatgcataagatgaaggaaggagatgacgcaaaagagaatccaccataagtgcataatctacaggaggggtcgaaccacataacaccaatgcgcacacctctggtttgctcctgtccacactgtatggcacaagaacaggtcacacgaatagggatggtgatcacgtggatgctccagcccatagttaggcactgaaccact

SEQ ID NO: 28322 - DNA, 460 bp, Zea mays
  unsure (1)..(460): unsure at all n locations
agcttactccactcacattaaaatctagcttctacaattaagaaaaaatatgatatttttaaatataagtacttacatccaattatttgtatgtaattttaaataatatacatgcacatgcgtttttaatagcaccattacctttttaatcgtcaaatctgtaccactcacatcaatcagtgctgtgctagtggtcaattgtccataatcgtgctgcacacatataccattattaatcattcataatcagcaacaaggaggtttcgttactattttgtattacaacaactttttcctcttttataatcatgtattacctgttccaatatttgttgtggcataacacattgngtatcgctcacaccaccctcttgtaaagtaggctccaattgaattacctgtcaaataatacgatggacagtaaatatgtttggttatgacanacagtacacaccattat

SEQ ID NO: 28323 - DNA, 450 bp, Zea mays
  unsure (1)..(450): unsure at all n locations
agctngaaggacgaaactaaaagcaagccccagtgtacattgtctccgaagttctcagtttatcaaagaaaaactatacagaattggagaaggtgctatatgctgtcttaatggcctccaggaagcttcgtcactactttcaagcataccatataatcgttccttcatcacagcctttgaaggatattatgaggaacagagaagctactggaagaattgaaaaatgggctgcggaactcaacgaattcagcattgattatgtgcacagatcctcgattcagtcccaggcgttagcagacttcatcgctgactggacgccaggggctcaggaagaagaagcaactaaagatgccgaagcctggacagtgttctgcgacggttcctggggaaaccttggggcaggtgcagctgctgttntagttgcaccttccaaagctagaacatggtatg

SEQ ID NO: 28324 - DNA, 379 bp, Zea mays
acggatctttgcgctaacatggctctccattggcatctcttatgtattttggataagggataaagggtatctattactgtcctggcgaacgtcttctgacagaattgcctactgactgcctgaaacttttaccacaagctcatatgatcataacaaggttactcccatatctccataagtgctggaagctgacctttatgtctaaaaagcaatagtccttccgagagcacttttaaatccctggtgatggggggccgacctagagattcgaaaaccaactttaccagagagcttttgattttatacagtccctacctttgcccatgtttttataatttctactgcccaaaccacttattggccaacctgctccaaccat

SEQ ID NO: 28325 - DNA, 414 bp, Zea mays
  unsure (1)..(414): unsure at all n locations
agcttcaggcctaaagatcaacttccataagagtgtagtgttntgttttggcgctgcccaggagaatttagaactttatacagaactctttggatgtaaaccgggtaacctccccatcaattaccttggtattccaatccacttccgaaagctaaaaaatagagactgggctaaagtcgaagagcgctttgagaagagacttagcagttggaaagggaagcacttgtctatcggaggacgcctgactttgattaagtcagtgcttagtaacctaccgatgtatatgatgtccttcttctccctacctaaaggggtccttaagaagttagactattttcgatcgaggttcttttggcaggggaatgaaaacaaaaggaaatatagacttgctaaatggaacattctatgtcaacc

SEQ ID NO: 28326 - DNA, 383 bp, Zea mays
  unsure (1)..(383): unsure at all n locations
ctaactattntgtatgtcacgctcagttgtggtgattgatgaacgtggccaccaaaagtactagaaagtattagtaagagaaaatcaagtggcaggactgaacagttaggccggtaatagattctggttctagttctgattgttctgcacttgggatcctgaattttcattataattcttcctaggaaactgaataaataaccatgcaaaaagagtgttaacagaatatgctttataaagtgcagaaggtcgattgtcctcgaagctttatacccataaattttcaattggtatctatcatattatgggggaaacttgactagttgacttgaaaaaagtagtttacgaagatttacttttgcctagacgaataatagtgcatt

SEQ ID NO: 28327 - DNA, 461 bp, Zea mays
agcttgccttttcctcagtatatcacccacaatccatctgcgtcatggagcgcgccaacggcaagattttcacggccatcaagaaaacgcttctcgacgacaagaagggtaaatgggccgacctgctacctgaagcagcctgtgcgctgaacacgaccgagtgccgggcgactggattcactccctttcgcttgctatacggatcggaagccatgaccccgcatgaaatcaaacatgggtcaccacggacaagcgctttagccgtcctcgatatagacgaaccaacctccaaagacctcatcgacggagaccgtgtcttcgccctgcaggccctcaacaaataccaagctcaaacgaaggcctggcgcaaccacgcagtcgtcccaagagaattcaacgaaggggacctcgtactcgtccgaacaacctatacagagtcacgggtaagctggagccaaagt

SEQ ID NO: 28328 - DNA, 429 bp, Zea mays
tcacgggctactggcggagctagccgaagcactggcttgcccggaagatggctggggtgggctggccacggtggccgaagctctggcagcaatggcgggcggaattaagctcgccggagctaaggggaagtggctggccggtgagggtgagtgcggcgcgaagtggggcgcgcttgggaaggctttatatgcgcggcgcggtgcactggcggtcgtggaccggcgagtgcgcgcgggcgtgcacagagaatgcgcggtgcgcgaacaggcgtgaaccaagggtgtcagccgcggtcgaacacgtgttcccgttgcctctgcccctgttcaagcgccgattgggagcaaatcttcgcgaatttgggcaagatcactgcaagggatttgttcaccacaccaagctctgtcttttgtgtatggacgacgtgc

SEQ ID NO: 28329 - DNA, 458 bp, Zea mays
  unsure (1)..(458): unsure at all n locations
agcttctaaagggagaacacgtgataggttngactatcgtacaattcganaaagatagaccttgtgcagcttgtcaagcaggtaaacaggtgggaggagcgcatcacagcaagaatgtgatgaccacttcaagacctctggagctgctgcatatggacctcttcggacccgtcgcctatctgagcatagggggaagtaagtatgggctagttattgtcgatgacttttcccgcttcacttgggtgttctttttgcaagataagtctgagacccaagggaccctcaagcgcttcctaaggagagctcataatgagtttgagctcaatgtgaagaagataaggagcgataacgggtccgagttcaagaaccttcaagtggaggaattccttgaggaggaagggatcaagcacgagttctccgctccctacacaccacagcaaaatggagtggtagagagg

SEQ ID NO: 28330 - DNA, 418 bp, Zea mays
  unsure (1)..(418): unsure at all n locations
taggnctacaataatataatgttgcatattcaatattngatacacatatgttctcactgacgaacctaaaaactttcgagaacctaagcagaaatcatgcttatactgtaaatctatagctctaactaatttttatccacgtttaactgtattttacttcttgctatatgtgtataggttcattagcactaataaaggagcctgggcaagagcccaagcttgcccccacataggtctgccactatctgttcctctaacaaattgtgttggattctatgggcactccgcttttagatgtctattaatgaacaacccgctttccttctctctccatttcttattctttcaccccccataaatntgatatggcattgtctacaacctatctacatcagaacggngcacaaaactgtatcac

SEQ ID NO: 28331 - DNA, 210 bp, Zea mays
gcatattcagactaattcatatcatatcgtctggtgaatgggaccattacatctgcattgccgttgatgcaacaggcaatccaacgatgcattttctattgcgagcaaagttgtactctataaattgcagcaaggatgggcagacccacactgactagccaaacctaagacaggctttgccctgctttgcttgctgagttcacgactatg

SEQ ID NO: 28332 - DNA, 432 bp, Zea mays
tctaaagggagaacacgtaataggtctaactaatgttactttctattaagatagaccttgtgcagcttgtcaagcagggaaacaggtgggaagctctcatcaagccaaaaatgtgatgacaatatcaagacccctggagttacttcatatggacctcttcggacccgtcgcctatctaagcataggaggaagtaagtatggtcttgttatagttgatgatttttcccgcttcacttgggtattctttttgcaggataaatctgaaacccaagggaccctcaagcgcttcctaaggagagctcaaaatgagtttgagctcaaagtgaaaaagataaggagcgacaacgggtccgagttcaagaaccttcaagtggaggagttccttgaggaggaagggatcaagcacgagttctccgctccctacacaccaca

SEQ ID NO: 28333 - DNA, 460 bp, Zea mays
agcttcatttccatctatgttgtggattgcttttgaatctgtccagattcgttcagcttttctagcagcttcctgactgccatgaacaacaatgggtccttgttccgaaggtatcttcatgcatagatatgcgggatgaagtattgcttcgaaagcattgagtgtcccacgaccaatgattgcattgtaggggtattccatgtcaacaatatcaaacacaacatgttcagtccttgtattgtgaacgaagccgagagtcactgacatcgtaattttgccgagcgctgcaatctgccttcctccgaagccacaaagagggtgtgtagcatcatgaatcttgtcctctggctcttgcatctgtctgaaggctttagcagatatgatgtcgactgcacttgctgtatcaaccaaaacattatggaccagaaatcccttgatgacacacgatatgaccataaca

SEQ ID NO: 28334 - DNA, 422 bp, Zea mays
cgcacccaggtacattggtcccttccctgtacttgagcaatgtgtgccagtggcataccgactccaactacccgaaacattgtctgctatgcataatgtgttccacgtgtcacaattgaagaagtgtcttcgggttcctgatcgaaccattgaagtgacggatgttgtccttgaaccggacttgacatactttgagcaccctatacgagtcttggatcaaaaggacagggttacccggagaaaaactctcaagttttataaaatacagtggaaccaacattctgaagatgaggctacatgggaaactcaagactttttagataagaatttcccaggctttttagcctcttgtaaattgtaaagcctgtataacgtgtaataaagaagtgactcccacatcacccctgccttgtaccagaaat

SEQ ID NO: 28335 - DNA, 459 bp, Zea mays
  unsure (1)..(459): unsure at all n locations
agctcggaggcgtctattggatgtcgacttggagtatatttcttcttcttttcttccgncgccttgaatgcgaccggttgagcctctgatgtatatggatcataaagctcgtcgatcttcctcgagccttcgatcatgcactccaaacttactaaatgcccgattacttccttcggggtcattttagtatatctaggattaccacgaattaattgtacttgagtagggttaccgaaaataagagatcttataataaccttaaccatttcatgggcatcgcactctacgctccctaggttacgcaacttggtcaccaaggtcttgagccggttgtacatatgttgtggctcttgccctttgcgaagccggaatcgaccgagctccctctcgatcgtttcccgcttggtgatcttggtgagctcgtcttcctcgtgcgcggatttgagcacatcccaaacc

SEQ ID NO: 28336 - DNA, 408 bp, Zea mays
  unsure (1)..(408): unsure at all n locations
gacacttaaatttaagcttgacacgcctattttggggtgggtagaaaaaattttattgcggaagattgttcctcttgctatgagatgctcaatcaattcggataaccttaggagcaaactcaaatcaatatgagcaagggaactttanagagaggaaagggtgaagggaaatgtacctaatcatttcatataattgattttggtggctgatgtccaacacaaaccacatggactaactaagttgtctagatatcatttatcacaggtgcataagaatcaacacacaccaagaaagaattcagctagtgactcactcagaaactgaagcaagacatatagtgtgctaaattttagcgcaccgaacactgtctggtgcaacaagcccgggttgaatcaaaccaaccactc

SEQ ID NO: 28337 - DNA, 372 bp, Zea mays
  unsure (1)..(372): unsure at all n locations
ngagaaatatttggatacagttcgaaggtttgaagcttccttcgtatggttntctgtcaagaatattccacgaggagaaaatgagcacgctgatctactatccaagtcagcggcacaggggctgcctttaccttctgaagtgttctttgaaacaataaaatcaccttcggttgaccttcttgaaagagaaatgctcaatatatctcctgtttatagcgaagattggagaactgagatcatgtcttttctccagggcaatattctttcatatgacgaagcttatctttagagaatagctgctagagctcccccatatcttataatttcaggggagttatacaagcatggagactgtcttcatttcccaaatgt

SEQ ID NO: 28338 - DNA, 436 bp, Zea mays
  unsure (1)..(436): unsure at all n locations
agctntagaggannnaaatgcattagatttaaggttcatgtgaaaagtttgtccatgataccaccgatgattgaggtaggagtgaagcctttcttgtatgatgtcttcttaaagaatgatcacatcgaagaaaatggttggaacgatgagacaatcaatctagggaaaaggaactcggtggagattaatgagacaaatgaaaaagaggatagggggagataaaaaaagctagatgtgataacaaggaagagggatctggtttgaataaactagaaaaaaggagtacctgacactaggaagggtaacttgactgtcatggcttcaacttataagaagaatggggaagatgaatctgngcttgtggatgatgatgagggagaatagaaagtggattatgatgggagtgatgatgattngttaagttcccaggagacat

SEQ ID NO: 28339 - DNA, 429 bp, Zea mays
  unsure (1)..(429): unsure at all n locations
tnttncttcccttcggccgncaacgcatcgcggtctaatttatatccaccgctctcggagtctataaattgagccccccctcggcttcgctatgtattttactagctatcggacccgctcccacacccgattgtgcaccagctcgcctgaattttgcacttcccccaaatcggttctccgccgccgtagaagtgaactcaccgtcgccagcccaactccggtcagtgcccgcccttttcttcctcgtttgagcattctcatgcctctgtgatgctccccgacccctttaattgaactagaccggcgcccatcgtcgggaacacgatcatgttgccgttgtgcttacggccaccgtggccggagctccctagtccaccgatagtgtaatttagttggggaaaacgttcataggaactcgaatttgggctc

SEQ ID NO: 28340 - DNA, 434 bp, Zea mays
  unsure (1)..(434): unsure at all n locations
agcttaacaacagggttaatagcctcatgtggtttgcaagataaaagttcattttcaacaagaagattgtcatgatcaaatttaatttgagtatagtcttccttaatctttactagtctattttgcaactccctattagcttcatttaatttgtcatatttttccttagcatcttttagggagtttgtgagctcatttacagttgatgacatagctttattttcttcttttatttcatcactagcctttataactatgtcatacttggcatttaaagattcattttcatttttcaacctatcacatttagctnttgactttctaatgatttgagtatattctttaagtaagtcagctaactcatcatatgaagggtgaagcaaatcttcatcactatcactatcactatcatcagcaatattaatatcattttg

SEQ ID NO: 28341 - DNA, 426 bp, Zea mays
  unsure (1)..(426): unsure at all n locations
tcatcccatttgaactctntgcctttctccagtagagaggttataggcttcactaacttggaaaaaccctcaataaatcttctatagtatcctgctaatccaagaaaacttctgatcttggacgcatccttgggttgcttccaatttagtatctcacttatctttcctgggtccactttaattccaccatcggtaacaatatgccctaagaaagcaacttccttcaaccaaaattcacacttcgagaattttgcgtacagttggttatcacgaagcttttgtagaactagccttagatgatcttcgtgtgtttcttcattcggagaatatatcagtatgtcgtcaatgaatacgaccacaaactgatctagatattccatgaatactttattcatcaagttcataaagtatgctggtgcattagtc

SEQ ID NO: 28342 - DNA, 457 bp, Zea mays
  unsure (1)..(457): unsure at all n locations
agcttctgcgcgatggcagaagggggaaccttcttaattatgaaaagacttcgggggcctcgacagattttcataagccgttaacaaatgtagtggacatggatgtaattttaccggggctgcgttccgcgtctataaatagatgaacagtactcccgtactgttcacgctgacttggcatttacttttgcgtcacgcttgcgctttttatcttctctcaggaccgaaggtacatttgtaatctaaaatcatttctattnttccatgtcaataaaatagaaatgattctatgatgatgcttatattatatttcatgctttatatgaatccttcgtcattactttgtatgctcacgaaggtatgtctcttatgaccttcgtcccgagctcattattttccgaaaggacataatgcttcgaaggacgaaggactntaacacttaacactttttatggtg

SEQ ID NO: 28343 - DNA, 417 bp, Zea mays
  unsure (1)..(417): unsure at all n locations
ctcaggctttcagacgaagccggtcacagctcatgctctgtttctatgcacgccagaccatgaggagtatcttcaggcgtacatccgaagggtcttgcgtctcaaagcacaagcgcctacagtgcccaatgaaattgtcattgaggccatgatcaaggggctttgtccaggacctactagctagtatttcgacaggaagcctccatagactctatagaagttgcttcaaaagatggatgagtacatcagggctgacaatgacttccgccaaagaagggaggaagcttacaagttctctgagatgaccaggggcttcagagaaagaatccacccgaggcatgtcaggtcaatttacaattccactcanaatgatgacagaggaagtcagatgcagaggccgcattattcttcacaatc

SEQ ID NO: 28344 - DNA, 454 bp, Zea mays
  unsure (1)..(454): unsure at all n locations
agcttgatacatggattaaacatcgccatatcactgtgcgtcaagagactgatggtatatggagattctctggtagtcatcagccagacaaacaaggaatgggattgttcaagtgattcaatgggaaaatactgcgccgccgtccgaaaactggaagataaattcgagggtctggagtttcatcatatagaaagagatcggaacacggcggccgatgtactatccaagctcggatccggtcggactcaggtcccgcccggngtcttcgtgcaagaaattccccagccgagtatctcgacggatcaaatagaagagtgcaacatcatagatcaacccgagtcagactctgacgattggagacagccgattattaagtatataaagaatgaagaagaaccagatgacaagaactcggcagaacgcattgccagacaatcatctcactatacactca

SEQ ID NO: 28345 - DNA, 393 bp, Zea mays
tgtaaagaataataaaaaataataataatcaattataagatagtaacatcaggggtgtggttctaatactatctccagcgatctcactatctcacttcctatttcaatcttcactctcacttcctatttcaatcttcactctgtagggttttgcacgctcatggagatggcctaagcattgacaagacatggtaatctttaaaaggtgaaggtatcaagtaggttactcaaagggaaatagggtcaaactttttcctaaatgattttggtgggtgaattgcccaacacaaataatcggactaactagtttgctctagattataagttctacacgtgccacaggttcaacacaaaccaataaaaaatacaagaaagggttcaaataaaaagagc

SEQ ID NO: 28346 - DNA, 336 bp, Zea mays
gccccacattggtagtgccagacatccacaagggatttgatgtgtattgcgatgcatcacaccttggacttggatgtgtgcttatgcacgaaggaaaagtaataacctatgcttctagacagttgataaagcatgagaagaattatcctacgcatgatctggaactatctgtcgtagtgcatgccttgaagacttggaggcactatatgattggaaacaagtgcaagatcttcactgatctacaaagcttgaaatacatattcactcacaaggaactcaacctaagacaaagaacatggcttgcgttgattcacgactatgatttggaaatacaat

SEQ ID NO: 28347 - DNA, 410 bp, Zea mays
tgttgacacgtttaaaaccaatgtctcttatgttcttttaaatttgacatttggtctaagaatggtaaaaaagattatccaacaagagccgataataaaaggaccaattggggtatgatttatggcgatgatgatgataccttttaagccccaatcggtggcacacgttcttttttcaaccccatcccctatacttctcaagacataattgtttctgtaagtgatttgctgcaagcagcaagccattgtgcatctcttgctcttgggactagttctgatcagcatacatggatagtgacactgtctagaagtatgatgatgattttaatctaataacttagcggcaagatcataaacttacgcatcctgctctttctatgttggctaaggatgttctaactatgtctgat

SEQ ID NO: 28348 - DNA, 442 bp, Zea mays
cccgcatcaccggaatagcgcaatcgtgctcgccggaattcaaaaacccgccggcgcacgtggaccgggtaagcctctgcaccattttccaattcgtcgcgcgcatggcctctacatcaccccgtggagctcctcgtgcaccttaattgaactataccgtcgtggtttggccggaacaggagccgccgccgacccctgccgcctgtgttcgtggccagggtagctccgaccacctccgacgccgacccgcacaccgacgtgaccgtcgtgacctcccggacgtcactgaccaccccgccgaagctcttctgccgccggtaagcctcgccgccgtaatctatgccgcggatactgtttaagtcagccagggagcgcgggttagatttcggttaggcccagggggttttgtgcgatgtcagtgacccacgccaatagtagactg

SEQ ID NO: 28349 - DNA, 422 bp, Zea mays
  unsure (1)..(422): unsure at all n locations
ntactccagggaaaattgccaaggcttcgaaagtgccaattgataccaaaacaaaattgaccgaagccaaagctacaatgagccaggctagcgccgaagttgggccttcagagcttgccaaggagaaaccctcggaaattggagaaaaggcagcggaggaagaagctatagaacaaattttgcctgaaaaagttgtcgctcctactcccgaagcacctttcgaagaccttggttatattattcgacatgcttcgggaaaaggattatctgaataagaaatttttgaagctaaacactatgcccgagaactgaagtacccgaaaggggccttagtgtttaatggtacagatgaagatgatttcttgtattgcctcctagacaacaaagaattatccgtctgccgggaaatggccagaagtatg

SEQ ID NO: 28350 - DNA, 477 bp, Zea mays
  unsure (1)..(477): unsure at all n locations
atccttaagtcacctgccgcatgcagctngccatacttgtaaaacaacaacatctgttttatattaactgcagaccataccagtaacttggcctttcgcatgctggggactggatatgattggacctttcaagaaagctcaagggggatacactcatgtattggtagcaatcgacaaattcactaaatggatagaattcaagcccattgcttctttaacctctgctaaggccgtggaattcatacaagacataatattcagattcgggataccaaacagcatcataactgacttangatccaacttcacaagttcagagttcttcgacttctgcgagcaaaagagcattcagatcaagtatgcgtctgtagcacatccaagggccaacgggcaagttgagcgagccaacgggatgatactggaggcactcacgaaaaaggtctttgacaagaatgataagttcgcangaaagtggat

SEQ ID NO: 28351 - DNA, 415 bp, Zea mays
gaccttaaaactaagctttagggatttctgtggtcaaattggtacgaagatccattttgcatcagtcacgcatccggagtcaaatgggcttgttgaaagagccaatggcattataatgacaggaataatgaagttaatcttcaatcaacccacgggaaagtggccagatcagttaaccaaagtggtgtggagccacaacacaacaacatcaaggtctacaggctttactccattcaagctattattcggtgacgaagcaataactccggaggaagctaaaactggatcaataagagtagtagcttcggcataatcaggttctgaagatgcttattctgtggaaaaagatgctttagaagggattatgcttcaagctgtggagaatatcaataaatatcaagccgaaacactcaaa

SEQ ID NO: 28352 - DNA, 413 bp, Zea mays
  unsure (1)..(413): unsure at all n locations
agctngtagagntcanatattntacagaaacgtgatggctatctttctaaatatgtttggacaaatattatgtagtagtaacatgttcgggcttgaactccgggtgaagaacgacagaaatatatggtatatagcctgagacaccatacatacatgtatataatgaataaatacatatatattacgccgtaccattattggtattctttagtttgaattgattgagtgaagctcttcagtagattcagatgcaatgaactgcggtgtggtgtactggtatgacctcgtgacattgaaaaggcggcgggcacgaggacgaccatgaccaacacagcatcgtggtgcacatgctagacaacaagcgtggcatgagtcggacgtatgtggctagaccgacgtcgtcacgggagtct

SEQ ID NO: 28353 - DNA, 401 bp, Zea mays
  unsure (1)..(401): unsure at all n locations
tggaggcgttgatggagagtctacttgatgtagactcttctttcttctcctccgtcgccttgaatgcgacgggttgcacctcaggtgtggaggaggcgccttgctcgatgattntcttggagcctttgatcatcaattcaaagctcacaaattttcctataacctcctcaagagacattagcttgtatctaggatcaccacgaattaattgaacttgtgtgggattaagaaaaacgagtgatcttagaataaccttgaccatttcatggtcatcccattttgtgctcccgaggttgcgcacttggttcaccaaggtcttgagccggttgtacatagcttgtggctcctccccttggttgagcatgaagcgaccgagctccccctcgatcattttcctcttg

SEQ ID NO: 28354 - DNA, 464 bp, Zea mays
  unsure (1)..(464): unsure at all n locations
agncttctacaataaactgttatttttgcaacagaccctatatatcttcttgggaaaagcagactggagctacatttcaggattgataagagcttgcttgtgctggattcacaacatttagggtttctactgtgacgttggcctaaccttatatgatgatctcaagaagctcccacccgtttgaccatggcttcagctcacaagcccacaggatgaaactaggtctaagtaggcccttaatttcttacatcgagatcctaanaggaaaagtagcagaactatgaactccagaccgttgctacatactgtaagtggctgattacctggaaacctaacaaaagtcacggattgtttacatcacaagtgtaatgccccgatattctcacatgaatcacgcactcaaaaaacctgaagaggcgtncataaaaacacagacattcttctctgtggtccgtgcaatgttg

SEQ ID NO: 28355 - DNA, 434 bp, Zea mays
cgacgttgactcgccgaagcaacagaaactgcagggtggttgcctacatattctgggatgtaaggcgaatgatacgaagctgtgtgcatgacctgcttcggctgagcctgttgtgctgcagcttcggctatttccttttgcttctggatggtaacatggcacatcctggtggtatggcccttgttctcaccatagaacaaacaaaaaaaatcttcttggttgatctccaaatcttccgccgaagcccctggcgcctctgcctcttatagctggcggtcggaaggagctttgctgttgccccgaagcctgtgaggagcactgtggcctttgctgctggctccccctatcatcattttgagtagagttgtgaattgacctaacatgcctcggatagaatcttcctccgaagcccctggtcatttcagaaaacctgg

SEQ ID NO: 28356 - DNA, 381 bp, Zea mays
attcatattctgctttggtgctgcatcaccgtttgatgggctgatgggacgtatatcacgttggagcccattacgggcgcgaccagtggacacacacgcctgtgacctctattttatcaatacacgccaccacattagggtttgggttcttcttacatcatatctgttatcgaacacatatcattgttcatcatgttgtgagaccgcacctcgcaatcaacacaatcttgactgcgtgcttcatgttcttgcttgcgatcatgattgctcttgtaaggataagccttcgtagcgaggtcactggcgtgtcatcggtgaaaaccaatggagcagcggcagagtgattgcgacgatccattcgatctaagccttgatcatcaa

SEQ ID NO: 28357 - DNA, 424 bp, Zea mays
  unsure (1)..(424): unsure at all n locations
tgtatatctaggggtagnttagaaaatagtaaatacccatctattattgaggaggaatgactacacaaccaacaatatctttggcctttagtttagaaaatagatctataggtgttcttgttcttcacacttacgttcttctttggataaaacgatggcactcgaagaatgtgtattgattatagagatctagaccaggtaactatcaagaataagtaaccacttccctcgattgaagatctatttgacaagatgagaggtgcaaaggtttctcaaacatatatctaagattnggtgtaacacctctggtgttacgagaactaanactttggcatgacatcgtatgcattggcattgcattatgtatgatatacctacactgcattcactaggcttaaatatccaaacaaaacatgtgatgtga

SEQ ID NO: 28358 - DNA, 446 bp, Zea mays
  unsure (1)..(446): unsure at all n locations
agctngaagctgggttaagtgccatgacgaaagatgatctctcagacagccttgcgcacaacagcctgaaggtacgagaattaaacacttgagaaaaaaccccctttntttttacgcaactcattccttttttcttatatgaattcttttttcatatagggcctgatcctaagcaacgcgctaagagcgcaaaagagcgccgaagatgaaagttatgaaattgcgtttaataatttacgctccgaagttatcaaactgagaaacgaagctntggaaaaagataagattctgcttacactggtagataaagtgagaaaaaacgaagctgcttcaaaggcccaggccgaagctcanaaactcgaaataaaagatcttcagaaacagctggccagagccgaagaggatcgcgctcttgaggaaacgaaacgagaacttagtgatttcat

SEQ ID NO: 28359 - DNA, 394 bp, Zea mays
  unsure (1)..(394): unsure at all n locations
ntaactaactntagtttgattccactcgaaacaaatgaggtaactacaacaacaataaagcttttttgtcccaagcatgttggggtaggctagagatgaaaccccatatgaaaacatcagagctcaacctccaaagaaaagaaaaaggagacaaatgcgaatgaaaaccgtacaacgacgaaacggggaaacacattacaagagatataacccacaagaaccaccaagatctaaaggggcacaagaaaaggtcaaacgattaaagaggaaaggcggaactacaaatcagagatctggcacgtgaattgcacactttcaccccttcctatccacgacaagctctttatcaatattccactccttcaggtccctcttcacaacctctgtccacgtc

SEQ ID NO: 28360 - DNA, 415 bp, Zea mays
  unsure (1)..(415): unsure at all n locations
agcttgtatcgcaaaaaaaagaattgtggtagtcccagctatagaagaaaagaaaggtttgagatcgagagttaattactgaccggtttaaaagtatgctcgtgcatgtcgtcaataaattttgacactttcgctgcaaccacattgctagccattatgtattgtactcgctctgtatgaaagtaaaattcgttttactttttagtaaattcatataatacttggtgtatatgttttatacatgtgtctatacttggcatcatccagntgaatatatacataaaaatcaagagcttaagcgaatattattttaaaacagagggagtatatatatcaattattgttaccttccaatataatggtaacctgccagcgagaaatataatagatacaccaaatatgtcaaccttatgat

SEQ ID NO: 28361 - DNA, 229 bp, Zea mays
  unsure (1)..(229): unsure at all n locations
tatacatgagtgtggacgctctattggagcgcctaacactccaacaagaaccgtggcggtgctctctggtcaagcgcggacggtctgcggcctgnggctnaanataatatacattaaactaatgcttatatccttttacttgctggatactaactattaccatctcctgaggaatatgcccttgtttttcaccatatatactaaccaataaaagtttccttggttgaac

SEQ ID NO: 28362 - DNA, 438 bp, Zea mays
agcttaatggatactaatgaagcttgaatagataactgtagaaaaactctaagaactctctgtaacaccccaggtgttaccaagactatggttacatttatgcactaatgactgtgatcacatgtggaagaaaagaacataaaacattggaaacaagagaagttaatggcaagggtttcaaccacacaattggaacaatggtcatggggacccaaggtgattaaaccctaaggacacctaagagcactagacatccaagccagggatcagtggataagataaccaaattgccaaagcatgatcttagtccctaaacaagttttagtaaccttgtaacctagcaaatgagggagggaacattgctaaagaccccttgaagaccccaattccccccccctccttaaggagagagcacactagagctctctaattctttct

SEQ ID NO: 28363 - DNA, 423 bp, Zea mays
  unsure (1)..(423): unsure at all n locations
tatcaagnctactntcatatggatccggaagtatagtcatatctgttctgaggccgccgtaatcattgttttcttaccgagacatttcctgccttttctgcccatggtgctgcgtcaccctattttggcccaatgggtcgtgtatcaagttaggtccattagggacgcatcctatggttgcagcacgaccccaatacccttgtggtcgtgctcccatgtttataaaccccctagccgccaccaagaacagcgggttttgtttagatcaagattagctctcgctacttgcttgcaagcgcgcgtgctatttcagccgcccgtcttcttgtcttctgaaccccaccatattgtagttcgatctttagacctacatttagatctgggaattcagtacttgttctacattgtcttgctagttcttcg

SEQ ID NO: 28364 - DNA, 460 bp, Zea mays
  unsure (1)..(460): unsure at all n locations
agctntaagctctttgacaatagagacactttgtcttgttctagcacagatgcaataatgcgtgagtgagatcttaagaggctaaactaggtatgaagcagggataaatgcaaaggacatgctttctcttccttatgtataagatatgcaaagaatgcttataagaggaagatttaggtacaagtttaaatgaaaggaagtggttttacccttttgtaccttctcataaagacgttctctccattgtgcttatgtccttggtctcgattgcttaagacctatgcttaataaaagtgtgtgaaaatatttcgcacaagagagagttctataactagtgatctttttcaagttattgttagcataaatcaaatggatcacaagttgcataaatgaatcatgaattctcctttttccttagtgcatatcaatagagattaaattcacattacatgaggcacta

SEQ ID NO: 28365 - DNA, 420 bp, Zea mays
tcaaccctcgcgagacctttccccgactctgtctaaccatggttaattcagtatcatatgtgagattctatgcatatgtactttattcgtgctcttatatggaggactgtttgtgacctaattcgaacggatggatgtatgaatgcttgcaatcgcatagagaacaattccgtcaatgagcccaaagaactatcatgagaagcccctgaggagcaaccgctggtggacgcaagagacccttgacctatctctgtcctattcattctttaattcaccttccgcattacacatttatgcctaaggattgactagctttgttatccatgtccttggctacctatatgggttggattattattggttagctttatgctattgctcaaactctaatcaatgaacatgatgagattatctatgata

SEQ ID NO: 28366 - DNA, 418 bp, Zea mays
  unsure (1)..(418): unsure at all n locations
agcttgtgaaggttcttcatccncacatgtgctattcggcgatgccacagccagcccatgctagtcttagctattaagcatgcatctagaccggcctcttcttttgcaaaatctactaaataaagtttgccgtctaatacacccttaaaagctagtgaaccatcacttcttctaaagacagacacatctacatttgtaaatagacagttatatcccatattgcataattgactcacagatagtagattatatccaagagactcaactaaaaacacattagatatggagtgctcattagaaattgcaattttacctaaaccttttaccttgccttgattcccatcaccgaatataattgaatcttgggaatccttattcttgacgtaggaggtgaacattntcttctcccccgtcatat

SEQ ID NO: 28367 - DNA, 436 bp, Zea mays
gacactataaaactcagcttagaaagactatattctccatgattactaagatcttattctagttaacttggacaaacaggtcattttcgaaatcagtacagaatctggacagattctgaaactggacttggaaaaatcataacttctaaactactgaatctatggttatgaaatttttacacaagcaagataaaaagattatctacaagttttatatataacatttctacagaaaacacggtttactttacttaactagccacgtaataaaattgaacatgcagtccaaacagcaagaactctaacttagatcttatttaacttctacacttatcatgcttttaacatttagaacactcaacactttatctttagtagaactaaaaccacataatacaacaaggcattcatgtcaccatacattagaaattcactc

SEQ ID NO: 28368 - DNA, 451 bp, Zea mays
  unsure (1)..(451): unsure at all n locations
agctntntgcacattcacatgggtggactatataaatatacaaccactatgattcaaaagtaggaagaatgaaatactagcataataccacctctaacaatatgtagattaactatatttatataaaatatattgatacttatacttccaaatataataggattacaggggtgtatgtagcctgtggatctaggatgtcgtcgctctaaccctcggtgacgcccaaaggtcaagggaaaaagcacactctcaacactacaaagcagatgatacaattaaagtacacacgaaaaatgaaagattaccacatacaaatgcgatgttatttgtacggccatttggtcatgattaaaagaaacatcataattaatttagctagctttcggtgcacaatagtctcttgtgcagaattggtgatcccatgctcctaattgcactacagcataagagt

SEQ ID NO: 28369 - DNA, 415 bp, Zea mays
tctctacgagccaaactcaacatcggtcagtgctaaacataaccgagtgaaccgcgaattcgtaaaggtcctgttaccgggaactgtggtgatcatagtgctgctccaagagttcttgtaattcaacgttggtgcctaaccaccggcgagaaatcgccatctactcccggcctctcacgcccgatgaagcaatgcacgattcaatggcccctaatgagccccctgatctcctgctgagcgatggtaaaggcgtgtagttatggcattagttccatctcttcttgctcggccaacaagttcttgtccactgggatgtggctcaagtttctctgtgcttggtttcctcatggtccatggtttggcgatggtaaggtcgcacgggccttggtattatgcgtcgggacacttgattgga

SEQ ID NO: 28370 - DNA, 457 bp, Zea mays
  unsure (1)..(457): unsure at all n locations
gcttatctcatcttctggagtatgataaatatttacttatatactcttcaaattacagctgagagctcgaaggtatcttctaaggcggagcaaatccacactttcctatttcaaaaagtaccccctatgtatggcactgctcctttatttataatcataagatacaactttgtatgaaatcacaaacatgcccatgaatcttacacataggatttgcaagtcccacagcgacatgatcgtctttcctccttttcttcccatgatgaacaagccttccgagccctcttcttcttctttgcttcttacattaaaaccttcgaagctgaagtcacctccttcgacacgtatcgtcacaacgcctatgcgtggatgaggctaagtagcttcttattattngaaagctacttccgatgaaggatatcttaggtggtcgttcacattgtacctganacacacc

SEQ ID NO: 28371 - DNA, 433 bp, Zea mays
  unsure (1)..(433): unsure at all n locations
accgncgattcctcgaagctcggaaaagaatcgcaatctattctcgacgcacaacaaatacaaacaggcacaaacaaacatatacatgtataagaacattacaccatacaagataaaacattatagaaacatgcagtgtgaaatagagctcgctactacggtcacacgaggaaaagaaacgtcgaactcgaagttgtggtggagaagttaacgggtttacgctaaacaaatatttactataacatttaattcggctttatcaaatataaataatatctaccatctaggttcgattaatctgctacactaacagttgttagttaaataagttatttaattaacacgagagattctaagggaggcgaatttatgacacacgaaacagcacgacagcgtgcagaacgacgcgcagacacacacgacatacacgaac

SEQ ID NO: 28372 - DNA, 462 bp, Zea mays
  unsure (1)..(462): unsure at all n locations
gcttataaggttatggatgagaagtggtcacccaagttttgttgatgaagcaccacaagaccaatcgaggaaggaatccatgtgggagttcgcaagagaaaggtttgtgtgttggcatccatgcttcctcaataaactagctgccaagcgaaacctagaagcctgaagatgatctttgagtagccagaatctgtgtttgcaatcggcaatcagatgctccgcagaggctagattttgttgaagttctatctcctcgaagagtctgcaaagtgaagatatgtagctgaagtaaagctatacccataacccttcttagctgaatctcgaggacgagattcattttaagtggggtagatttgtagcatcccaaaaattcatatcttaaaaatttctcaaactccctctaaattcgaaatggaattcaaatntaatntcaaaatggttgtttgcgagttgatatcc

SEQ ID NO: 28373 - DNA, 126 bp, Zea mays
tggatcgagaacctgcagacgacgactaccaaagataggtacgtgcaaaacaaatagatctaaaagagctggaccggtgatcaagcctggcccgactttctatcaattgttgcctaaatatgtgaa

SEQ ID NO: 28374 - DNA, 461 bp, Zea mays
  unsure (1)..(461): unsure at all n locations
agctngagtcggntcttctgcanaagattattgatgctcataaaagtgataagggtatgaaacacattcatgagaaaataaaagacggtaaagcacactgtttcagaaaggatgatcaaggcatagtatggtttaataaccgcatagttgtgtctaatgatgatgatgtccgctagcaaatattggatgaagcacatcttagtcgatattccatccatcccggaagcactaagatgtatcatgatttanagcaacattattggtggacaaaaatgaagattgaaattgcacgctatgtggcgaaatgtgacacatgtagacgtgtcaaagccatacacatgaagactgctggtccactgcaatctttgcccatcccgacatggaaatgggaggacattagcatggactttcattgtggattacccaagacagcaaaaggatttgattctatctgggttata

SEQ ID NO: 28375 - DNA, 430 bp, Zea mays
tattctaggattgtggggctacgaggaatgtctgagaaccatgctatggccgagagatacaacatctcaaagtccttgttctcttccaagctcacagaaagtagcccggctagtcctcttgtgatcaagatgattggttacatcgagactttggacaaacttggttgtgaactcaatgatgacatggctattcaagctattctctagtcgctccctccgagctacgagctgttaataatgaactaccagatgaatggcttggagaaaaaattagctgaattgcatgggatgctaaagacaactgaggaaagcattaagaagaatcctactcatgtgacgatggttcaaaaggagaacaagaagaggaagcgttggacacctcccaagggcaaagaaaagggaaagaatgtacccattgagaccttaagct

SEQ ID NO: 28376 - DNA, 448 bp, Zea mays
  unsure (1)..(448): unsure at all n locations
gcaagctgtggaggttcttcatccccacatgtgctaagcggcgatgccacaaccagcccatgcaagtcttagcaattaagcatgcatctagaccggcctcttcttttgcaaaatcaaccaaataaagtttgccgtctagtacacccttaaaagctagtgaaccatcacatcttctaaagacagacacatctacatttgtaaatagacaattatatcccatattgcataattgactaacagatgacaaattatatccaagcgactcaactaanaacacattagaaatagagtgctcggatgaaatagcaattntacctaacccttttaccttgccttggttcccatcaccgaatattattaaatcttggggatccttgttcttgacgtagggagagaacatcctcttttcccncgtcatgtgggttgtgcatcggctgtcgataatcct

SEQ ID NO: 28377 - DNA, 423 bp, Zea mays
  unsure (1)..(423): unsure at all n locations
ctaagcctttggaaaataggccaagcgcggaccgtccgggcctttgcggcggaccgtccgcgacacctaaataacccactgacagaaccaatgcaaaaacacatgtctctactaccgaccgtccgatggaagagcaagcaccgtccgagaccatgcgcggaccgtccgggctcaggcgcggaccgtccggtaggtgaggaaccaaaaaacccgaaggtgacgggttcggccaaatgaattatagcgtcctcgcggaccgtccggggtgcacgaccggaccgtccgcgactggctttatctgacatttgacgacgcattaaatgcaatatagtcgntgatatagcccgtactgctgaccgttgcgttntcagccgttgatcagcatgggcagaccgtncggaccatgggcgcgaaccgtccgcg

SEQ ID NO: 28378 - DNA, 449 bp, Zea mays
  unsure (1)..(449): unsure at all n locations
agcttctagtaagataactcctaggtagaccctatgtcttgtccatgtacaagtgcgtctccgatatggacactcagaaatacctctatgttggctttgctatcgagaatgtgcctaaactgatgtgagccatgtttccactagtatatgatggcgatcacaccacaaatatggttggtgcatctcataaggctacaagcccctctgagtataaaagttatgcttgcaagcactgagtgagaaataaagaggcatgcaaacctctcaaaatactaggtctaaacctagaacaagcataagtggtgatctaactagtccaagcacctcacagagtattaattntaatcatctattcttttcttaagcacatatggtggctacaacttgaggcattgntcacactccttattcaacacactccaaccatcacaaaatgtcacacccggatt

SEQ ID NO: 28379 - DNA, 432 bp, Zea mays
  unsure (1)..(432): unsure at all n locations
ntaccttgattcccaaaaagccagcatatccttgagagtctttttctttagtcgggtaagacttgcaaaagtacactccatactcatggtttctgaacccatgttgttgtaggtgatgaaattgctgagttttgttgtttctgctccaaggttgtcccaaagcaggaagaagaaaactaagaactacctatggaaggtgtttgcattcctgtgatgtaataagtttatgcactcgaacctagttatgtaatgatgactctttctatattgtacttatgaatgtaaattatgttattataaccctttccgatttactctagtggtgtgtaatgtctacgttttgggatgaacgcatttgggcgatgtgaaggagatacatggaaccggacctgncgagccatttgatgcacctgcacgactgtccgaggtctt

SEQ ID NO: 28380 - DNA, 460 bp, Zea mays
agcttgtcttcagcgagggacgctaatggtgtgtttggtttgtggagtcactctatgcttcatgaggtgatgcattataaggtcattccatcaattttggtggaatcaatccactcctaacgtatatactaattattagcttatgatgaatggagtggtgatggatcaacccattctattccacaaaccaaacaaaaaagtgaggagtaagaagaagatggatcacttcattcttcaaaccaaacacactctatagcgtccgatacactatacttagcgtttctcgacgtccgttactgcgctagcaagaactagcaaatcgttcggtaaaatatagtggcagctcggtgaccggtaaatgtggagtgttgatgttcatccgctattagtccgcacggagttgttgcctggatctcgtcatcttcgtcgttggcgtgccacagcacgacagctccgctgc

SEQ ID NO: 28381 - DNA, 423 bp, Zea mays
  unsure (1)..(423): unsure at all n locations
accaattgaaagacacaatctctatttattattttccatganatatcttaaaagagattgtattagtaacacaagcaatagtttcctatttagcaacctctagtatatgaatgacaagaaggttactaaaataaagaaacctcatgatatgaactaaattacccttacaagcatcatacataacatcaattgtaaaatagatgaaagtagcatgattatttaattaagtttacatggcaagtttaattcatagcatggtgagtgattaatgtagaatactcaaaaccaatttaaacaagaatgaatacatcacatagtattggttcgatcttctttgaatgttgaatggcacactccatttgggaaacacattctcatgttgtgagactacatanacacttggatagaaacattagtctcaca

SEQ ID NO: 28382 - DNA, 144 bp, Zea mays
  unsure (1)..(144): unsure at all n locations
cgtacccgcgatcctctgagtcacctcangcatcaactttttggaattngcgaggatttgatcacttgtgtgtgtcttgtattgaatgcctagctcttgtaagtagttggaaggtggaaaacttggatgacttgaatgtggggt

SEQ ID NO: 28383 - DNA, 402 bp, Zea mays
  unsure (1)..(402): unsure at all n locations
gcttaatgctaaaaacaaaaacaacaaccttaatgctttatacaaaaacataggtgtgcatgacatattntatatcctaattattcataataaaaaagaccaaaaacttaatatcccaacaagtatcattcggattcatccatacaagctctatacttcatggcaagacgtgtagaggacttcaaggatcgaatgtgttggcgccgatccgggcgctaatcactgcattgagaaccggcggcggtgctctgcacaggcgtggacggtccgtggctaaggaccggacggtccgcgaactggagcagggctatggttcccttgctgacgggccggacggtccgagcctatatgccggacgatccgcgcgtgcgcatgtgcggccgagttcgtcgacggcgcctg

SEQ ID NO: 28384 - DNA, 417 bp, Zea mays
  unsure (1)..(417): unsure at all n locations
agcttgtgaaggttcttcatccccacatgtgtttagcggcgatgccacaaccagcccatgctagtcttaacaattaagcatgcatctagaccggcctcctcttttgcaaaatcaactaaatagagtttgtcgtctaatacacccttaaaagctaatgaaacatcacttcttctaaagacagacacatctacatttgtgaatagacaattatatcccatattacataattgacttacggataacaaattatatccaagcgactctactaagaatacattagaaatagagtgctcatttgagattgcaatcttccctaagcctttaaccttgccttgattcccatcaccgaatatgattgaatcttgggaatctttattctttgacgtaggaggtgaacatcttcttctcccncgtcat

SEQ ID NO: 28385 - DNA, 409 bp, Zea mays
  unsure (1)..(409): unsure at all n locations
tgcacccaggtacattggtccattcctagtgcttgagcaatgtggaccagnggcataccgacttcagcttcccgaaacattggctgctgtgcataatgtgttccacgtgtcacaattgaagaagtgtcttccggttcctgatcgaaccgttgaagtgacagatgttgtccttgaactagacttgacatactctgagcaccccatatgagtcttggatcaaaaggacagggttacccggagaaaaactctcaagttttataagatacagtggaaccagcattctgaagatgaggctacatgggaaacccaagacttcttgaataaaaattttccaggctttctagcctcatgtaatttgtaaagtgtatatagntattgcaaaaaaggaatgaactcccacaccacccct

SEQ ID NO: 28386 - DNA, 435 bp, Zea mays
  unsure (1)..(435): unsure at all n locations
agctntatgacggaacgaaagcatgaaagctaagaacatcttcaaatgcagagattggagaattaaagcttcaaaataagcaattaatgtcataagaacaaccgcgaactagatgcccttaggctgcctccaacaaggtcctgtaaagggtcctgtccggtaaatgtaggggacggtcaggtcccctacgccttcaacaaggaactctaaagcgtcctctaaattttagaggatgtggcagacaccctaaatgtggaggcctccgagagtgcgctatttgcgctactcctccaccagccgccgcgaggaaacttccgcctcctgctaccccgcgttggcgactgcgtctaccggagctgagccctcgatccggcgtgcttcgccgacggcatctaggcatgtgggcaaaaagtgggcgtgcggtggcgagtcttg

SEQ ID NO: 28387 - DNA, 409 bp, Zea mays
tatgaagattcttcattccaacatgggctagtcggcggtgctatagccaacccatgttagtcttagcaattaagcaagtgtcgagtttagctctatcaaaatctaccaagtatagctgaccctctaacattcccttaaatgctattgaattatcactccttctaaagacagtgacacctacatcagtaaatagacagttgtagcccattttgcataattgagatacggaaagcaaattgtaatctaatgaatcaacaagaaaaacattggaaatggaatggtcaggtgaaatagcaattttacccaaacctttgaccaacccttgatttccatccccgaatgtgatagctcgttggggatcttggttgttctcgtaggaggaaaacatcttcttactccctggcatgtg

SEQ ID NO: 28388 - DNA, 355 bp, Zea mays
agcttgtggaggttcttcatccccacatgtgctattcagcgatgccacaaccagcccatgcaagtgctagccattaagcatgcatctagaccggcctcttcttttgcaaaatcaactaagtaaagtttgccgtttagcacacccttaaaagctagtgaaccatcacttcttctaaagacagacacatctacatttgtaaatagacaattatatcccatattacataattgactaacggatagtaaattatatccaagagactcaactaaaaacacattagagatagagtgctcattggatatagcaatcttgcctaaaccttttaccttgccttggttcccatcaccgaatatta

SEQ ID NO: 28389 - DNA, 378 bp, Zea mays
  unsure (1)..(378): unsure at all n locations
tggactatgtcgtcccagctggagatctgtcccggaggcatgtgctctaaccacgcgtgagcggtgtcngagaggaacagggggaggttgcgtatgatgaggttgtcatcgtccgttccacctagttgacaggccagacggtagtccgcgagccacagttccggtctcgtctcccccgagtacttcgtgatagtagtcgggggtcggaaccgggtcgggaacggcgcccgtcctatggcccggctgaaggcctgcggaccgggtggctcgggcgagggactccgatcctccctgctgtcgtagcgttccccacgcctggggtggtagccttggcgcaccctctcttcgaggtgggcccgacggtcgcggtgatggtgc

SEQ ID NO: 28390 - DNA, 413 bp, Zea mays
  unsure (1)..(413): unsure at all n locations
agcttgcaacatatgaaatatccactcaacctgagttcccataaggctatggatctacatgatatcaacaacaggaaggcgaaacacgagaaccaacagctaaacaacgagtatgcaagaatgggagacacgcatatacacgggtatgggttaacacctggtggtcaaagcaaacgcccaggatgcgcttgacgcacgaacatcttaatattccttatatcttgagtaatccttacgtttctatgtttccagattgccacgaattaaaccatttagctatatcaacgattagatgaagaaacaatttgcagcaccccaaaggctcttcccgcaacaattcangccaacggttaataagaagatagctataaacatactccactcgataacataaaaacatactcgacagcatg

SEQ ID NO: 28391 - DNA, 419 bp, Zea mays
  unsure (1)..(419): unsure at all n locations
tgctaatgttaagggtgtggtcgatcagttcatctactatgagatttacaagcggaaggcatgggggagcaacaaaagccaggcagatgtactatccatgtacacgaaattgagctgggatcccagtatgagcgagcagcaaaagacagactttctccgtgaaatggttgtggggttcatcattgctgggaaggacctcattgtcgncaagctcacatggttcttttacatgatgtgcaagcacccaaaagttgaggcgatgatactcgaggagctcaaagacttgcagagctgtaggtggcctatgttctggacacacaacaggacctctctagggtcatccaaattattatggaggacatactggtgtttcaggtcttgtgcccactacatgtaccatgatagcttaagcggttaca

SEQ ID NO: 28392 - DNA, 448 bp, Zea mays
agcttaagttattttattacagaccagaactaattatgcgagtgctgagtagtaatattatacaaaccaagggaggcacagactcctcccgataagttataagcaaaagatcctatgtggaggaccgagtcctcccacacttcagtcttgtttttcttctttgggaaccaccctggcacagaagcagcagaaatctgctacttcctcacctaaaaacaatgaagggataaaccctgagtatggaattactcagcaagtcttacccgactaaagaaaagactctcaagggtatgctgggtatatgggagtcaaggtaaggcttttcaaaaatcaaagactctgttttgcagaaatgcttacttaagtggatccttaaaaatccaactttaattgtcaagtaagtaaaattacctgcactagagttctttctaccctagatcaatcactg

SEQ ID NO: 28393 - DNA, 397 bp, Zea mays
tggtgatcacatggccagatgtggcttgtagatcaaccaccttagtgttcttcattgaaatcctatcatccccagtgtcttcatccaccttgcaatcattactctccatcacagcaccattgttcttcggcaggagctttaaaacacctctctattggaatcctaccattaccagcttccccatccacctcagtttgacttgacagaatcttaccatcaccgataataccccttttcccttgcaaccttaaaacctcctattggctagaatcaagtgctttgccctgatcagtctcggaaacatgctactgctaaactgaaacctgctactactaagcaacatgcttaactgatactgctaagccactactacttgctaattagaacctgttcaaac

SEQ ID NO: 28394 - DNA, 434 bp, Zea mays
  unsure (1)..(434): unsure at all n locations
agctntgaatgtgctcacagggttggatttactagggagtgatgcgttcaggggtccaaccgcaggtacacgagtacagaactcaccagtacagagcactgcaagcctagagagtctggataaccgaaagtccaacgaggtgaccagttgcgcggcggacatttggccttgagcttcaagccattgatctgattcaaagcttgctccaccctcaaaaaaaggaccagagtttgtcaactcanatagctggtggcttgagcagagcttctggcacgagttctcttgaaccatatttccacataagctntataggatgcatcactcttttgatgtcacttagtttcaagtataaaatgaagctgtctttgtacaaagctgcaaatgagaagtaaatgaaacgtcctggacaaacttgtgaagtaggaatgatacat

SEQ ID NO: 28395 - DNA, 435 bp, Zea mays
tgaagccatggtaagtagcataggctaatagtatacgaattgattcaagcctagctacgggtgcataggtttcaccgaaatccaaaccttcgacttgtgagtatcctttggccacaagtcgggctttgttccttgtcaccacaccatgctcgtcttgcttgttgcggaaaacccacttggttcctacaacattttgattaggacgtggaaccaaatgccatacctcattccttgtaaaattgttgagctcctcttgcatcgccaccacccaatctgaatcttgtagtgcttcctctaccttgtgtggctcaatagaggaaacaaaagagtaatgctcacagaaatgtgcaacacgagatctagtggttacccccttatgaatgtcgccgagaatggtgtcgacggggtgatctcgttggattgcttggtggactc

SEQ ID NO: 28396 - DNA, 434 bp, Zea mays
  unsure (1)..(434): unsure at all n locations
ngaagctagcaacaatggaaggggacatctagatagtatcagaagcccaccgaacgacgaataaacctccctggaagtgaaagaaaagcatcatgtgagaaaaaagcacattgaactatcgagcaaaaggagaaatggccaaaagcaaataaatgagtgcatgttgctttcttgttgaatgtaaaattaattttttttctaaataaagcaaatattttctttatttggaaaaaacaacacatatattttgtaatcccatgtacatatggaaacaaataaaccctacactacaattctcctctctgcattcttttattgtgccagcatacatcgcagtagtaaaatagcaaaaaaagaggatatattgtttactaacccatttccactggcaggaagagtgttgctgctagctaggtccaaacacaactggataa

SEQ ID NO: 28397 - DNA, 426 bp, Zea mays
agcttctgctctatgggtcgcacacgaacggaccatgcccaatctgtgctcaatcatggctcggctgactccgaccacatcgatggcagaccacgcgaatacatctttatgtcttggctaggcagcacacaagattctctatttcaagcgaggtgatgactactctgatagtgcacttgcctgcatcggggtgaggccatgatcgaggaggcgacagtcattggtacacgtcgtgcgcactcgcacactgcgcgcttgtgcgagcttgcttggcgcacgagctggccggttcatggacctcgctctgagacctgagacagtgttcgtatatctgatcgggcactagaacccgctcaatgatgcacgccgtctgctgggtgccggagactgtgatggagcctaacagacctggtatcgtcatacata

SEQ ID NO: 28398 - DNA, 432 bp, Zea mays
tgtgaatgttcttcatcaccacatgagctaagcggcgatgcctcaatcatgccatgctagtcttagcaattaagcatgcatctagaccgacctcctcttttgcaaaaacaactaaataaagaatgccgtctaatacacctttaaaagctaatgaaccatcacttcttgtaaagacagacacatctacatttatgaatagacaattatatcccatattgcataattgactaacagataacacattatatccaagagactcaactaaaaactcgataaatatagagcgctcggatgaaatagcaattttacctaacccttgtaccttgacttgattaccatcaccgaatataattgaagctagggaatcctcgattttgacgtaggaggtgaacatctttttctcccccgacatatggattgtgcattcgctgt

SEQ ID NO: 28399 - DNA, 452 bp, Zea mays
  unsure (1)..(452): unsure at all n locations
agctntatcaaatggacgtgaaaagtgcctttctttttgtgacaatcaacgaagaggtctattgtgagcaacctcccggctttgaagatagtgagtaccctaaccatgtgtataaactctctaaggcgctttatgggctaagcaagccccaagagcatggtatgaatgccttagagaattccttatcactaatggattcaaagtcggaaaggccgatcctactttattcactaaaactcttgaaaatgacttgttgtatgccaaatttatgttgatgatatatatattgggtctactaacaagtctacatgtgaagaatntagtaggatcatgacacanaaattcgagatgtctatgatggnggagttgaagaacttcttaggatttcaagtgaagcaactccaagagggcacctttcttagccaaacgaagtatactcaagatatcctaag

SEQ ID NO: 28400 - DNA, 384 bp, Zea mays
ctatcaaatggacgtgaaaagtgccttcctcaatggacctatcaaggaagaggtctatgttgagcaacctcccggctttgaagatagtgactaccctaaccatgtttataaactctctaaagcgctttatgggctcaagcaagccccaagagcatggtatgaatgccttatagatttccttatagataatggcttcaaagtcgaaaaggctgatcctactttattcactaaaactcttgaaaatgacttgtttgtatgccaaatttatgttgatgatatcatatttgggtctactaacgagtctacatgtgaagaatttagtaggatcatgacacaaaaatttgatatgtctatgatgggggagttgaagtactttttgggatt

SEQ ID NO: 28401 - DNA, 455 bp, Zea mays
  unsure (1)..(455): unsure at all n locations
agctnntaacccccccccgcgagaccctttcccgtttctttctaaccataatgaatgcgatatcgaatgtcatacttgatgcatatttactttatttgttcccttgtatgatgtactgtttgtttcccaatttgaatggatgaatgtatgtatgcttgcaatcgcatagagaacgatccggtcgaagagcccgaggaactcgcaggagaagcccctgagcagcagtcggttggtggaggcaagtgtcccttgacctatctctgtcctattcattatttaattcacctcccgctctacacatttatgcctaaggattgactagctnttgttacccatgtccttgtctacctatctgggttggattattattgtttagctttatgctattgcttaactctaatcaatgaacatgatgagattatctatgatacgctgntttcccttctttattatga

SEQ ID NO: 28402 - DNA, 422 bp, Zea mays
  unsure (1)..(422): unsure at all n locations
tggtcccttgngtggaaacccaaaggatcgagttctctggtgccggncttgctgctgagctcggaggacttggaatttcctcttgaggtgacctttttcttcttcccttgccctttccacttgtatggctttgtttgagaggtgcgagaagctgaggaaatcttggttgtctaggatggtcttgagttctcgtctgagacctttcaaaaagcgggccatcttcttagcttctatgctgacgtcatcaggcacgtagcgggccaattctgtgaatatgtgcacgtactcactgacagatcttccaccttgagttagttcccgaaattcgtcttccttgagctgaacgattccttggggcacatggtgctctcggaaagcaatttcatactctgtctatgtagcatctcttgacagtagtgctg

SEQ ID NO: 28403 - DNA, 399 bp, Zea mays
  unsure (1)..(399): unsure at all n locations
agcttatcctgaacaataatattggtgaaatactatttcgtatattnttttcttaatcgaggaactcgacaaaaacctttttgcttcgctgtgaagcaacagtggcggcttttgcatcgtcaaatttgcaacagcaacagcaacagcgcggtggtggtgaatcttgtgagtggaagggagagtcaaggtggaatggacggactcgcgactttacgaggggtggggggtggcgccgtgggggtgattgaacgctgatgggacgaccccaaaggcaacgccaaagctgagggcataaatactcgatcctgtaactgtaacgggatgaaagtggccatgggggccccatggtcggcctgcatggtgcgccactgttgttagtaaggtaggcgaataaagctt

SEQ ID NO: 28404 - DNA, 362 bp, Zea mays
cagatataacagtctaagcgccatgtgtgtgttgaatcaaaacaaccccgcaagcctcataaagatgctgaggcgaggagtttggcacctctagaacttgatcattctgatctgtgcgagatgaatggaattttgaccaaaggtggtaaaagatactttctcactgttataaatgactccactagattttgttatgtgtatcttttaaaaacaaaagatgaagcgttcaattattttaaagcctataaagctgaagttgagaaccaacttgagaggaaaataaaacgtttaagggccgaccgaggtggagaatatttctctcatgtgttcgatgagttctgcggggagcatggtattattca

SEQ ID NO: 28405 - DNA, 434 bp, Zea mays
  unsure (1)..(434): unsure at all n locations
agctntgggcaagaccaagttggaagatattttatttataattgggatcaaggagatcaagatcagttgaaacatgccttagggggagaaatgttgttattaagtcctgtttcctaagcactctcctaggtacttgtgctagttaattatagtcattaaagaccttgagcagcttaacaggtgtgtgcggctgccaaggctcctatctgattagctaagctctaatgagctgttatgtaatcaatgtgactcatctcatctttctatataatcaagcaatgatggctgagggtagcacctgcggcaaaactactctgtttacctctaacattgtttagcgtatcagcgtgtttttaggattagcatatatagaaaattgtcaaaatataatcatcaacttatattcgactagtcgcgactagtctactagtcgg

SEQ ID NO: 28406 - DNA, 427 bp, Zea mays
  unsure (1)..(427): unsure at all n locations
tcngcagccgatgcgtgcagcggctgaaagatgtgtttcattctgtccgagccagctctgcaaaatttacaccttcagctgaaaatctgcccagcacattagaatatattgaaggcgaggttgatgcccttgacgaagttattggtaggcatgccgacttctgcgccctggtagcttctcggggcacagctaccgcttttctgaaggctggctgtacgcatggaaatattgtgaatagaccaaacttcagcttatcaacatcagatctgatagatatcccaagcctggcccgaagcattggaaatagattcatgacctagatctgggtaagtggcgggcgaaaaatggtaggtgatgaagctcgaagtcatcttaagccggtaagaaacttatatttgntatttttactttctccttgaatttgcac

SEQ ID NO: 28407 - DNA, 432 bp, Zea mays
  unsure (1)..(432): unsure at all n locations
taccgatttttgttttttgacctcgccatcttgcttctgctgtacaagcgctacactgactgcagagtgataagctgctacatataagaacaatggagcccctgcaaaggtggagttagagcagtcaagtctatcaagtattgctttaactcttctaaagctttctgctgagccggaccccattgaaaaacttcggctgacttcagtatttcaaagaatggcagatatctttctgctgatctggatataaatctatntaatgatgtcagtcttcctgccagccgttgggcccccttttttgtatttggcgggtccatccgacagatagcttcgatcttattgcggttagcttcgattcccttcgttgataccagacatacaagaaacttgcctntcttcactccaaagacgcacttttctggatctaatttc

SEQ ID NO: 28408 - DNA, 370 bp, Zea mays
tgctgtaagaaggggttttgttctagcgcccggaaataatattccaaagcctctgtatgctctccattgcttatgtgcataaggcctatacagtatataacttcgatcataggggtcaatttctagttgcatagcttcataataattctgcaaagctttcgcataatttccttcggattgagccaacctccgttacggtcgttcattctattcaaaaaatcttcgttccaaaaccgtacatgaggttttcatctcatacagcttctcccttctatacatagtactaagagaaaaatctgtagaataaaaatcgaattactcccatctcattatgcaccaaagggggctggtatttttccaagaaatctct

SEQ ID NO: 28409 - DNA, 215 bp, Zea mays
gtgcatttcgaagaagatagaccttgtgccgcttgtccagcacgtaaacaagtgggaggagcgcatcacggcaagaatgtgatgaccacttctagatccctggagctgctgcatatggacctcttccgacctgttgcctatttgagcataagagggagtaagtatgggttaattattgttgatgacatttcccgcttcacttgggtggtcttttt

SEQ ID NO: 28410 - DNA, 427 bp, Zea mays
  unsure (1)..(427): unsure at all n locations
ttgggatccctttgtcagcttcagtgtagcacacgaatgacagaatactgaaggtgttccttctcttttagaatcgttttcagtcaaatgaattggatttccaacctttctgtatggctatatcattgtttgcagacaatgagacaaaaatagagcagacgagtagtatataggaagcaattttgtttatgggagcacaatagaagcaattttgtttagcaaacttgcaacagaaatagttcagtcaatttattcctgccatcatttcttttcagtatattggcatttagtaaacttgataaatttgcattggtttccagagacaatattggagggacttccttttgttcaatttagnttatttcttgactagtcaatcttagtagatatctctagttctcaacctttgtgataagaacacaccatc

SEQ ID NO: 28411 - DNA, 317 bp, Zea mays
  unsure (1)..(317): unsure at all n locations
tcctcccttctttggcggaagtcattgtcagccctgatgtactcatccattttttgaagcagcttctccagagtctgtggaggctttctagcgaagtactgggcagtaggtcctggacgaagccccttaatcatggcctcaatgacaatttcattgggcactgtaggggcttgtgcttttagacgcaagaaccttcggacatacgcctggagatactcctcatggtcttgcgtgcattgaaatagggcctgagctatgactggcttcgtctgaaagccttgganactttcactagcatatccttgaagttctgcatg

SEQ ID NO: 28412 - DNA, 70 bp, Zea mays
ccttgctcacggagatcgcgggagacgttgaactaactggcgttttcatacatattgtgcatgtgctgct

SEQ ID NO: 28413 - DNA, 316 bp, Zea mays
  unsure (1)..(316): unsure at all n locations
tgcaagcttcaccggnttgacatgaagagattatattttctattagcgggctatctcataaatgcatttaataacagcattagttaaacttacctactaaacaaaatacagatatagacgcggtcctcgccagccttgcttgttggacaatgatacaattaggggcgctcgatatttcttttggttcaactcttggaaacgacatgtagtccttttgtttgctaacattactgctctctgcataatggggaccacacctcaagagttaatcccactgattntataataatgaaatacatataaacatgtggtcaat

SEQ ID NO: 28414 - DNA, 266 bp, Zea mays
  unsure (1)..(266): unsure at all n locations
gacacttagaaactcaagcttatgaaagcagggcttcgatttcctctggatattatgctggtcgaagngctgaaaaccttcgaagtttaccttcatcagcttacccccgaagccatcatcaagatggggatttatatctgggccatgaggagtcaagggctataaccaaatgctaaatgtctctggaacatgcatgaattgtcttatgagacaaaggccaccggaaaagagcgacgtcacaacaactttggttggtatagcttcgt

SEQ ID NO: 28415 - DNA, 431 bp, Zea mays
  unsure (1)..(431): unsure at all n locations
agcattgtgaagcttctagatatgtcgatgtgactaatgatgagggtgaattggtagttacgaaggtcgcagctaaacaacttcgtcggttgcctatcattcctcggctntcaaggctgttcctcaacaaagaaatagctctgcatatgacgtggccaaaaaatggtgtacgtctcgtcactgatccagacataatggtccatccgtcggacggtgatgcgtggaaggcatttgacgagtttgatcccgaatttgcaaacgaccctatgagtgtacggcttggtctatcgacggacggattcacacctttcaataccagtgcaagcccttactcgtgttggcctgtcttcattgtgccatataatcttcctcctgagttggtcaataaagaagagttcatgttccttgcactagtcatcccaggccccgag

SEQ ID NO: 28416 - DNA, 368 bp, Zea mays
  unsure (1)..(368): unsure at all n locations
ctatcaccagcaggaggattngacaccaaactgatgaaagtcttggaaggaggcagattccagactgaatacgcaacaggagcaccgacatttgacacattgcctctaagaatcatctcaagccggcttaccagatccacagcaagaatccttctgttggtaacccgggtcgagttagtgatgccacgatacagataagttgggtacgctttgtccttcagtggctgaatgttcttaaaaacaaaattggcgaccacagcttcagcagtcagacctttctccttcaacaagccaacctcggcaagcagaaccctggcctcggctatctccaagtccgtgggggattcagaacaacttggagcgcgaac

SEQ ID NO: 28417 - DNA, 399 bp, Zea mays
acaatgaaactattacatgaaatctaaacaatgtcctttattacacaaaaaataaaactgaatgaaaaagactgctatcaaggtaggatatttgtcaatagatgtgctttgactcttgcacaatgcttgtgactgtgcgagcttcggactgttctctgaagtccctttggtgtggagcatattgtctcccttctggctgctggcctttgtgcaacggtggtggaggcggaggctgttgccaggaagcttgaggttgactcgccgaagcaacagaaactgcagggtggttgcccacatattctgggatgtaaggcgaatgatacgaaacagtgtgcatgacctgcttcggctgagcctgttgtgctgtagcttcggctatttccttttgcttctggatgg

SEQ ID NO: 28418 - DNA, 430 bp, Zea mays
  unsure (1)..(430): unsure at all n locations
agacattattacttaatggtcatgtgttgtccgaaagacacacttgatgtcatcatatagatgcaccaaataaccatataaaaccttcaatgtccatacaactctgtaatggaccacacttgttcctttgaaataattcaaagaacttaaccaattcagatcggattntaagataagagggacttaaaatctcattcccaatgatactcatcaagtatctatcttatgggaaaaacatgaccaatagaattgtccataacttttcatttcatcccaacaatgggatgaccaattcaatcttactcagcgtggtaagtatcatcacttgaaaagttataacatatgcaacactttgtatgggaggatgtatgtagaatacaagccataagaaatgtttctgagaaacatatgcaatatccatcactatcac

SEQ ID NO: 28419 - DNA, 439 bp, Zea mays
  unsure (1)..(439): unsure at all n locations
ggaccttaaatactcagcttctgcatgtgggcccgcctgggtgtccggtgcacaccggacatgcactgttccttgtccggggtgccggaatgggcgcgcctgacttctgcgcgcgcagagcgcgcattaaatgcgcggcaaagagcccgtggcgcggagatgaccgttgctccggagtcgcaccggacagtccggtgcacaccggacagtccggtgaattatagcggacgagccgttggcttttcccgaagctggcgagttcctgaggccgaccccctttggcgcaccggacactgtccggtgtacaccggacagtccggtgaattatagccgagtcgcctccggaaaatcccgaaggtggcgagttcgtgttggagtcctctggtgcaccggacactgtccggtggtgcaccggacactgtncagtgtacaccggaca

SEQ ID NO: 28420 - DNA, 376 bp, Zea mays
caatgaacctaatgttcgcctgggaatcactggctatctgatacagcttgtctagtagtacaggagggatgcttctgtcaactattctatcaccaacttcagctagaagctcatattcgatgttatcacagacataataatagtcctcttgcgaactagcagaaaaagtcccataccgcatatttgctagtggaatcagtggaaggccattcatgcatttaccgatatcagtattgtaaacatcagtaagacaatattccaataatattaacttatgagactttcctagcgtagccaagttagcataatccttgaggaaatgcctcactatagcaggacttactattttgagcatagactgcatataaaatttgaa

SEQ ID NO: 28421 - DNA, 284 bp, Zea mays
acaagaacatcattacgaacgacaggccgcttgagctacttcacatggatctattcggcccgattgcttacataagcatcggccccattatgcagagcctatctgacttagaagaaaagaaagacttgtgctcctttgtcctaactgatcagactagaggatcagctacttagccaactttcataattaaatattggcactgcatgaataactcttattgtgaaaatagctatttactctacaatggataggtagagccgaagaatgcgaacataattagtgac

SEQ ID NO: 28422 - DNA, 424 bp, Zea mays
  unsure (1)..(424): unsure at all n locations
catgcaagcttattcttagggtcattttatgacttttaccctaaagtacttaggttttcttaacttgggttaagttttacccctttaactactatttagggttaagtccattaaccagggttccatttgcaaaacacttaaaacaatacaacttgtttgaaatttttgcctagtgaatgcactctangtgtgtcaaacatatgcaatgccaatgctcatgatgccatgctcaagttttagttatagtaacaccaggggtgttacagtacctgtcaaaacagcagcatctaccagcacagcagctacagactatacccataacttggtcgntcgcgtgctggggaatggatatgaatggacnncttcaaanagctcaaagaggatacactcatgtactggtggctatcngataatcactaaatga

SEQ ID NO: 28423 - DNA, 440 bp, Zea mays
tggtactgcaattataggatgattattgaatgaaaactttatttttaatagtaataagggtttttttctatcaaacacaatcaagatttgttagcttgcttgctgctgcttagatcaatattggtttctcacatcaactatgctaatgttgaggtgataatcagtccttcactagcataaggatgtatatgcagactaatttttgtctctgttgcatggcatttgtgttgttgtataccgctcaagtattgcttatgagcttgcttgaactttatcctggagcctcaagagttgtcgttgatcaaagctacttgtatctttctttcagtgttttgctagaactcataatgtttcgagtttgcagaaggatgaagcatagaaagttattgtgtgcatccatggttgtggtcttgaacagggttatttatgtgaaatgatgg

SEQ ID NO: 28424 - DNA, 386 bp, Zea mays
ccatttccttctttagaagctttttgagtgtccccattccaacatgtgctaacctcttatgccataactatccaagtaatgtttttgtgaagaggcaagtccttagattagcatccttagaagtgaaatccactaaatataattattgtatctaaacccttgaatatgacatgtcgatcatccactttagtaggggtgtaaatggtacgtatattatccaagcattcgaccatccgaagaggctaattattcgactggatagttttttcggatattcgtataatttttgaatttcggatttggactcggatagtacaacttgaatatcgaatacggatatgagatgagtgatatccatcggatttcggatatccagatatcttctc

SEQ ID NO: 28425 - DNA, 434 bp, Zea mays
  unsure (1)..(434): unsure at all n locations
tnccaccatgggaagtcatctggcgagggcatacttcgcccaacgcccagccatgcgccaaaggccataccccgtacgccacaaactcctcaaccaaatcgcgcccgctgctcaggccggcggcgcaccgaaaggccccttcatccgcatcctcctccgccacttcaaacggcgggtatgctgagtaataatgcgagcacatctcggacacggngagccccggatggtcttcgactgtgccctccgcgacgtagaaccaaaactcatgccagttgccccacttgttgcgggcgcaaggaactaactcaactacctccatcgaggtcttgccggtcttcggcgtaaatgtataggacccaaactgggcaacttcatttccgatcatcctcttctgccagtgcaggcaatagtacttcgcgaagacttcaactgat

SEQ ID NO: 28426 - DNA, 409 bp, Zea mays
  unsure (1)..(409): unsure at all n locations
tgcaagcttgaaaagtatctggatatggttcgaatagttgaagattccttcgagggattntctggcaaaaatatccctcgaggacaaaatgagcatgctgatttgctagctaagtcagcaacacaagggctgcccttaccttcggatgtgttcttctaaacaataaaagcaccttcggtggaacttcttgaaagagcagtcctcaatatatctcctgtttatagcgaagaatggcgaactgagatcatctcttaccttcagggtaaattcctttcagatgacgaaacttataacaggaggatagaggcaagagctcgtccatatgtcatgatagaaggggagttgtacaagcatggagtttgtgctctgctactcaagtgtttatctagaaccgaaggtatagaataat

SEQ ID NO: 28427 - DNA, 440 bp, Zea mays
  unsure (1)..(440): unsure at all n locations
cgatgatttagatnagagagctgaagtagttctgttgagtactgcggagttggatctgcgcaactacttacagaacaggcttgctcagctactccgggaggaggaaataaagcggtatcaaagagcgaaggtcaaggagctcctggagggggatagtaatactaaatattttcagatgatagccaatggaaaattcaggaagaatcgaatcttccagatgacggatggagctcgtatgttatacgacgagggagaattaaaaagtcatataactggttattataaaaatctctttggccccccagaaagcacgtcttttactctggatgaggatcttagagatgatataatacaagttactcaagttgagaacgagaagctcacccagccattttctgaagatgaagtaaaagcggtggtttttagtatggaacataaca

SEQ ID NO: 28428 - DNA, 374 bp, Zea mays
agcttgtgcgtctcaagggacctagtctttgcctcatggagggacttcctgacctaatagactggcttttggatggttccgacccatcccagtggtcccgataccttaaactcctggccttctgtcaacatcatggtggtcggaccaccaccttctcctaggggaacttttttaccccccctggggatattgtgccatcctttcgatgactagcaccatgctcaccgcctctgtagccgctgcaatgtataagtacaacggctcccctggctctggagctaccagtattggtagggacacaaggtgctgcttgaactcttgaaaggctcgttctgcctcttcggtccaagagaatggacaggacttccgcaata

SEQ ID NO: 28429 - DNA, 443 bp, Zea mays
  unsure (1)..(443): unsure at all n locations
tctcctcttcgggtagcttcgtttcagcaattgtcttcttggtttgagacatcttatcttcagaactgacgaaaatatgtccttaaatccgaagcttagaaaatttgagaaactaagcaactgttggaaagcaagagctaagaaatcaagcaaagcgaaaacaggcgtaccaaatgcgcttggggtgagttcttatttatatgcccagcgcgctccaagttggagggccccgtttgtcattgactgttgctattctagcaaagggaaggtgttttttcggaccttcggcttagggacttcgtccatatcgcaatctgaatttgttattctaacaaattaaccttgcgaggggctactggtgggggccttcgtcttctgaaggtcctcanaaacatgatttaacaatgtttctggagtataatacatgaacaggtacctttggg

SEQ ID NO: 28430 - DNA, 435 bp, Zea mays
agcttcgaatgcagcagaactagtccgaaaatgtgaaggctgtcaaaaatgtgcaagagaccagaagcaaccttcatctctcactcagttaatatagcccacttggccattgcaaaggtgggccctcgatttgctaggcccacttccaccagcacaaggaaatctaaaatatgttgaggtggcggtagagtatttttccaagtggattgaggcaaagcatttagccacaataacttcggtcaccgtctagaaattcttctggcaaaacattgtttgtcgcttcggagtgccgaaggctattactgtagacaacggaacacagttcgatgctgaagctttcaaggaattctgtgaacaaattggcacaaagattcattttgcatcagtcagacatccagagtcaaatggacttgttgaaagagctaatggcattat

SEQ ID NO: 28431 - DNA, 467 bp, Zea mays
  unsure (1)..(467): unsure at all n locations
tattaggacctataaaactcagctttacagaagaagaaggagccttcggttgccgagaagcccgctgaaccaaaaaagcgaaggattattactgtcattgaggctattgaagaaacaccaccgtcggcctcagcgctgaaaacaacagaagccgaagctgctcctgccgaagcttctacttccgaagctgcagcagccgaagccacaaatttggaaaacacacttactgacattgatgaaatgattttgaatatggctgaggaagaaactgctgcagctgctgaggaaaccccagctactgtgcctgaaaaagagaaggagcttgccgaagatgcttcggaagaaagaaatttcaactttcaaaacaaaattgggcaagagttgtctaaggctgaaaagaagagctgagggactntgctatatcttgtgggtactagccaggggcgctgctcttcggtggtatagac

SEQ ID NO: 28432 - DNA, 292 bp, Zea mays
gacttgggagtattccttggccacaagtcgtgctttggtccttggcaccacaccatgctcatcttgcttggtgcggaagacccatttggttcctacaacattttggttaggacgtggaaccaaatgccatacctcattcctagtgaaagttgtgagctcctcttgcatcgccaccacccaatccgaatcttgaagtgcttcctccaccctgtgtggctcaatagaggaaacaaaagagtaatgttcacaaaaatgtgcaacacgagatcgagtggttacccccttatgaatg

SEQ ID NO: 28433 - DNA, 436 bp, Zea mays
  unsure (1)..(436): unsure at all n locations
ngagaagtgtgcattgtccataananaatatgcaacaaccaagagacaagcagttgttgaacatcacgaacgtcagttagaacatgacatcgatgcaacacttgaggtggactcactgccaagccctgaggccatatctcaaagggaaatattggaaaaacattttggaatcgagtacgatagcgaccagtcctggggctgttgatgcggattctggagtttgacaaataactatatatagaactaccagtcgttaggtcgtgaacaatctactatgtagtcatgtcgaaggttgtatgttgtagtcaaactgctaggtactattgtgtgtgtttatgtttggatttgtggaacgatgtctgaactcccggtactagtattccagtgctgctgcattgcctcttattactatcacttcagtacacttcaatactaa

SEQ ID NO: 28434 - DNA, 424 bp, Zea mays
  unsure (1)..(424): unsure at all n locations
agcttgtgaagattcttcattccaacatgagcaagtcggtgatgctagagccagcccatgttagtcttagcaattaagcaagtgtctagttcaacattgttatcattgaaatcaactaagtatagctgaccatctaggcatctagcactcccttaaaagctattaaatcatcacttcttctaaagacggtaacaccaatatcagtaaatagacaaatgtagcccattttacataattgagaaacaaaaagcaagttgtaatctaaagaatctacaagaaaaacattagaaatggaatggtaaggagatatagcaattttacccaaacctttgaccaaactttgatttccatcccggaatgtgattgctctttggtgaatcatcgttntctcatatgaggagaacatcattttctcccctgtcat

SEQ ID NO: 28435 - DNA, 438 bp, Zea mays
tgaagtgcagaagtttctcggcaaggtaaattatttacaaatgtttattttctaacctggccgggaagatttatgccttcactcctatccttcgacttaaaatgatgccgaattcacctgggggcagagcagtaggaagcatttgatctcattagaaagcgccacaagtaggagtaccgttcatattatacattacaactgaagataaagttattggagctgttctgatgcaagagaccgaaggaaaggagcatgtggtgacctacctaagtcggaggcttgtggatgctgaaatgaggtacagtttaatcgagaagttatgcttatgcctattttatgcatgcactaagtgtagatgttatttactgtctagtcattgcacccgttctggtcaaaccgatgtcatcaagtacatgttgcaaaacctgattatgagtg

SEQ ID NO: 28436 - DNA, 381 bp, Zea mays
tggatatggagatggatgaactcaagtagaataatataccagtagacttcaagatagctggattaaaagcaagggcatggtgtctaaagtctaaactgggtcgacttggatgcccgcaatgggctatattattagaggcagggatgggctgattgaacaaacatttttttgatttaccagaatcatggtttgatgttgttgagcggacctcaaaggacaataacaagacactacagtaagtatttattctattagctaccacaagggaaataaaatccagttactgtgtgacatcataatgcaatctttcaggaagctgaagtatgaagaaatagttgccaacatatgacccagatttgaactaatggaaggagataataa

SEQ ID NO: 28437 - DNA, 415 bp, Zea mays
atgagtgaagctgccgataaatgccagagggccttcggcgttatctgttcttttattggaacgagagatttagtacaagagcatatcgccttccgggtatggcctctcgcggagagatgggaaatgccacaagaaaccataaaagaggccgacgaaggtggacttgtcagactgaagtacaccttcaagttcggagataaattcgttgagccagatgatgactggttaaaaagcattgaaaatttaagtgatgagctgcttggggcttattcgaaggccgaagatactgcgatgtcagcagccttcggaggccgaaaaaagaagaggctgaatcgggtatttgatgcaattgggtttgtctaccctgactattgctatcccattcgaaggcagaagagaaaaagcacaacctctg

SEQ ID NO: 28438 - DNA, 308 bp, Zea mays
tcgccgcggtccagcgtgcgtgcggcgcgctgtgagcggcttcactgagtcgttagaacgcatgtgtgcgtgcgtgtgtgcgttggctgtgtgcgcggccggggggccgcgcgggggacggccgttagggggcgtccacttatttccgacggcccagttggccagccgtccgaaataggcttatttccgacggcgggttgaggagccgaacgaaatattcttattttctattgttggccgcgagcccaccggaaatatacttatatcctactgtttcctaagaatcgtccgaactagtgaacgctgcc

SEQ ID NO: 28439 - DNA, 380 bp, Zea mays
cccatgttagtcttagccataagcaagtgttgagttcagctctatcaaaacctaccaagtatagctgaccctctaacactcccttaaatgttattgaatcatcacttcttctaaagacagtgacacctacatcagtaaaaagacagttgtagcccatttgacataattgagaaacggaaagcaaattgtaatctaatgaatctacaagaaaaacattggaaatagaatggtcaggagatatggcaattttacccaatcctttgaccaaaccttgattttcatccccgaatgtgatcgctctttggggatcttggtttttctcataagaggagaacatcttcttctcccctgtcatgtggtttgtgcacccgctgtcgata

SEQ ID NO: 28440 - DNA, 388 bp, Zea mays
  unsure (1)..(388): unsure at all n locations
acggagtcgctttatccgagcgcaagttacttatcgcagaaggtgatgagtgaggtatccggatcccggaggcgtaggagtcccttggctcggtcagccttggctgcttacgtgtactcccatgaagcaaccaactccttggctgcttacgtgtactcccggaggcgtaggtatccgtatcctggtttcatcaggcagcctggggtcgggcggagcggagtttcgtcgtcttccgggtcttagcccgagtccgagccctgnggtcgggcggagcggagttcgccgtcttccgggtcttagcccgagtccgagccctggggtcgggcggagcggagttcgctgtcttccgggtcttagcccgagtccgagcccttgggtcgggcggagc

SEQ ID NO: 28441 - DNA, 424 bp, Zea mays
  unsure (1)..(424): unsure at all n locations
gagaacacattttaggattaacaaatgttcattttgagaaagacaggatttggtgcgcatgccangcaggaaagcaaagtggagcccatcatccacacaagaacattatgacgaccgataggccgcttgagctactccacatggatcttttcggcccgattgcttacataagtatcggcgggagtaagtattgtcttgtaatagtggatgattattctcgcttcacttgggtgttctttttacaggaaaaatctcaaacccaagagaccttaaaaggatttttgagacgggctcaaaatgagttcggcttaaggatcaagaaaataagaagcgacaatgggacggagttcaagaactctcaaatcgaaggcttccttgaggaggacggcatcaagcatgagttctcttcttcctacacgccaca

SEQ ID NO: 28442 - DNA, 407 bp, Zea mays
acatattctgggatgtatggctaatgatacgaagcagtgtgcatgacctgcttcggcttgacctggtgcgcggcagcttcggctatctctttttgcttctgaatggtaacatgacacatcctggtggtatgacctttgttttcaccacagaataagcaaaatattcttctgggttgatccccgaatcttccgccgaagcccctggcgcctctgcctcttggggctggtggtcggaaggagctttgctgttgccccaaagcctgtgaggagcactgcggtctgttctgctgactccccttatcatcattctgagtggagttgtggatggaccttgacatgcctcgataggatcttcctccgaagcccctggtcatttcggaaaatctgatggcctcctcccttctttg

SEQ ID NO: 28443 - DNA, 69 bp, Zea mays
ggaaaacccccataaacaaacggtttggaggggagtttttttcttgtttaatcaacaaccgggaaacta

SEQ ID NO: 28444 - DNA, 438 bp, Zea mays
  unsure (1)..(438): unsure at all n locations
gctttcgaagctaaccccgcattcctacactgggccggcggatgatttggccagagacatcatgaagtgggttgatcttgaatctggattttaaatcaagtgagctcccatttaaaaatggatggtgctctccacagtttttctttttgacaacaatggagaaaataaataaccgacaggaaccataggaaacgagaatccaatgcgcgtggcctctgacctgtctaccgagataatctacatgctgaccatttatataattctggcacatgtaaaatgcgcctcaaggaattatgcaagctgtatcttgactggaaaattgtcgagctgaaaaagttgactgctcgatttcttatgagtactgagttgactggaaaaggagctntatacgaactcagacggactgtctccgataaaaattcggaggaaaaaaatgtc

SEQ ID NO: 28445 - DNA, 283 bp, Zea mays
ttggtgccccactgcttgagagccttggcgaggcggaattctccggactactgtccgccgagccgcgctcggcgaggggaatgcgtccttgtaacgaggcttgcctgaccggccctcagttttgtatttggctgagggctaccaccgtgttggagtgtggggtcccctattactgacccacagtacccccgacctcaaggagtgtggactccttggagcttgccgattctctggagggacggcttctagtatctttgtcgggggtgccgcgaggccccgcggt

SEQ ID NO: 28446 - DNA, 435 bp, Zea mays
  unsure (1)..(435): unsure at all n locations
tatgtagtggtaagaaactaattatgttatgcttggatgttcttgntgcttctcacaatcttggttattgtatgaatggctactgctaccaacacaatcgctttattatctctaatatttgagtcacatcttttgtttgttagtgtatacactgattcctggttgtctatttttttcaacaatattttttgtgtatttacagtagtgtagctgcatctaattgagtggctttttgctagcagcagtgtgtatttatagcattgttcctagttcctggttcctgtttgttagcgtatacacctgaatgaagcacataatcatgttcatggcattgtccactgttgtgtgccaattgtcttccaacatgttcacttgttattgttttggaagcaattgcatcttgctgctgcattgcagtaacatcaggccaacaac

SEQ ID NO: 28447 - DNA, 439 bp, Zea mays
  unsure (1)..(439): unsure at all n locations
tcagcaacttcaacactctntnttggaattgtgcttgaagacttaattgtctccaagacgtctagtacatttaccattcttttcctttttggggtcactgatggccccttttggttttttgctgtcccaatgattgctgtaggactcaaaacttctgatgttttggagccctcagttgcttctcttacctcctcaattttttctgtgagcggcgcttcggttttctcttttgtttctgacaacaaaatgtttgattgttctgattctatctttggtggcacttcggccgtttctgcgatctctggcaacaaggctggctcgattagtttttcagcttcggtggctgaagaagttttcccggtaaactccgacaccgaagctggttcaatataacgcggccgttgcgtaagaacctttatctttntccttttcggttctg

SEQ ID NO: 28448 - DNA, 430 bp, Zea mays
  unsure (1)..(430): unsure at all n locations
agcttctaaagggagaacacattntaggattaacaaatgttcattttgagaaagtcaggatttgtagcgcatgccaagcaagaaagcaagttggcactcatcatccacacaagaacatcatgacgactgataggccactcgagctcctacacatggatctattcggcccaattgcttacataagcatcggcgggagtaagtactggctagttattgtggatgattattctcgcttcacttgggtattctttntgcaggaaaaatctcatacccaagaaactttaaaaggattcttgagacgggctcaaaacgagttcggcttaaggatcaagaaaataagaagcgacaacggaacggagttcaagaactctcaaatngaaggcttccttgaggaggagggaatcaagcatgagttctcctctccctacac

SEQ ID NO: 28449 - DNA, 443 bp, Zea mays
  unsure (1)..(443): unsure at all n locations
ggctatcaatgtggacgtgaaggtcattacttccgtttctgttctgagaaaagttcactacagatcacctccgagatgaagctatctcagtcttcagacatggaatatgaacaaaaatgcacagaaacttctaccaacatagtaaagacaactccaccatgtaacttatcaagtcgtgcttgctttggctgtggtgataccggccaacttgttaatggttgtcctaagaaggatgtggagatcaataaggtccaaaagaaaagacaacaccctcaaacccatgcatcaacaaagaataaactacggaaagagaccacaggaaagataagttatgcagtgacaggaactattccatatgataatgcagtgattnttggaacactagtcattcacaaaaccatcgccaccgtgttgtatgatcctcgtacaacacattcctttat

SEQ ID NO: 28450 - DNA, 394 bp, Zea mays
agcttctgacagacctacttcaatggtttcagatccttcgtcgtctgacagtaaggttgcgtccctccgcgcttaccgtcgggcacgaggtctctgtcaatactgtgctgacaaatgggttaaaggccacaagtgctctcccactatccagttgcatgtgatgcaggaactttgggatctactcactccagagtcccaggaaccagaggctgaatttcaagatacatcagaacagttcatgatactgctttctactgaagctgtgtcctccaagtcctctcggtccaccttccggttatcgggttcgctgttcggccaggaattgttgatgttactagattctggcagctctcattggtttcttaacacgtcactggcaagctctctcacaggg

SEQ ID NO: 28451 - DNA, 421 bp, Zea mays
tggtctcgtgcagacatgataggtgatcaatcttgttttataaatgcactaacaacttgtttggaggatgaagaggaacaaatggtaatagtggttttgttaacatttatttttctttgctttgtttgactgaatacttatatttacttgtacatttcactacttgtcaggatgaaccaaattgttgatatgttgaatgctctataggttgatgacttgatgttcaacaaaggtaatacttatatttttgaatcatttttttgctttgagcagtagcagcactgctgtctgctgcacgcctgagccctgagcagccagccggtgacttagtgagccagcaaccagtagcagcactgctgcacgcctgaacagtagcagcactgcttgacgcctgcactgggccactggcgcactgcagctg

SEQ ID NO: 28452 - DNA, 456 bp, Zea mays
  unsure (1)..(456): unsure at all n locations
gacctatgaaactcagcttctaagggggaacacattntatgactaaccaatgttcattttgagaaagacaggatttgtagtgcatgccaagccgggaagcaagttggcactcatcatccacacaagaacattatgacaagtgacaggccactggagctccttcacatggatctattcggctcgatcgcttacataagcatcggcgggagtaagtactgtctagttattgtggatgattattctcgcttcacttgggtgttctttttgcaggacaaatctcatacccaagaaaccttaaagggattcttgagacgggctcaaaatgagttcggcttaaggatcaagaaaattagaagcgacaatgggacggagttcaagaactctcaaattgaaggcttccttaaggaggagggaatcaagcatgagttctcttctccctacactccacaacaaaat

SEQ ID NO: 28453 - DNA, 412 bp, Zea mays
agcttcggaaaaccaacactcttcgacagagtggtgataatctttgctccagttcaatctcgaatacattctaaggcttcttctttaattccgccgaagagcatcgatcctggctggtagccacatgatatagtatactcctgcagctcctctttctcagccttggataattcttgacccaatatattttgaaaattgaagcctttttgttccgaaatatcttcggcaatttccttccctttttcaggcactgtggcccggacttcttctgcagaaccagcagtctccttcgcagccaaatccaagagcactttatcaataccagataatgtactctccaggttggtagcttcggcagtcgtagcttcggcagaagcagcaacttcggcagcttgtgttatttatggtgctg

SEQ ID NO: 28454 - DNA, 428 bp, Zea mays
  unsure (1)..(428): unsure at all n locations
ngagcacattagcctccacactactgaatttaccaaatgtgcttacaatgatgattgtttgtcttggtattcagaatgatatccataaaggatatgatgaatctgtgatagattcgaaaatttcagatcattaatgaccatcagtaatgaattgtcatttccaactggttatggttggagtcaggaagttttgcacgctcctgacttgtgattaactgcatgtactgcatgtacaagttcccctatggtttttagtacgtgggaatccgtgaaagatttcccatgcgtacattgggtatgttcccaatctcaccaccgcagcgtacatgtatgggcacacagaaagctggggatctatgtgagaattcattctccgtcgatcattaagttttagaatctcttcatgagaatctatntacggcccgtac

SEQ ID NO: 28455 - DNA, 429 bp, Zea mays
agcttgtgaaggttcttcatccccacatgtgctaagcggcgatgccacagccagcccatgctagtcttagctattaagcatgcatctagaccggcctcctcttttgcaaaatcaactaaataaagtttgccatctaatacacccttaaatgctagtgaaccatcacttcttctaaagacagacacatctacatttgtaaatagacagttataccccatgttgcataattgactaacagatagcaaattatatccaagagactctactaaaaacacattagagatagagtgctcattagaaattgcaattttacctaacccttttaccttgccttgattcccatcaccgaatataattgaatcttgggaatctttattcttgacgtaggaggtgaacatcttcttctcccccgtcatatggtttgtgcat

SEQ ID NO: 28456 - DNA, 436 bp, Zea mays
  unsure (1)..(436): unsure at all n locations
tggtgccaatggagaagcagaaatccttgaagtcttggctgtcaaactgcttgccgntgtcaactgttagttcaaacggtactccgaagcggcaaacaatgttttgccaaaagaacctttgggcagtttttgatgttattgtggaaacagcccttgcctcgatccatttggtgaagtactcgacagcgacgaaaggcgaacttaaggttcccctgagcggtgggcaggggcccgacaatgtccaggacccagcgctggagaggccatgtgtgggcgatcagctttgtatactgcgaggggctgcctgaccgaggagaaaacttctggcaggcttcgcaggaccttgtgacccaatttgcggcgcagatcattgcgggccagtaaaaaccttggcgaatcaccttagcagctagggctcttggccctgcgtgtgagc

SEQ ID NO: 28457 - DNA, 302 bp, Zea mays
  unsure (1)..(302): unsure at all n locations
gagactcttttttgtgcagtcactcgcctgtctaactttatcattaaaatcccaaggttgtacctgccaaggtacatcttgtctgatgttgacccatcatggccctgacggatccatcatcaagttttattttggaaacatctcttccacttgagcatcatcttttgtaaaaacaaacatttgttttcttaagtagaactaacctcagaaatattttaataaacanatatcaggaatggaaatagttccagggaggatatgcgcaattggttagcacacaactctatcacctatgcatatat

SEQ ID NO: 28458 - DNA, 439 bp, Zea mays
  unsure (1)..(439): unsure at all n locations
ttctagaaagcactaggntactatttattgattaatattttttaagttatgattaaaacaagtaactgctgaattgctgtccaaaaatctgcaagtgcccatttgatggttgagttcacccatctggctaaaaatggctggttagcacttaattaatatagacttgccatggctaagctagagatgacatgtgtgtattgttctatatgttacttctttagntgattgtgatatagaatttccatagacattgatgcctatgtcattggctggacttgcgtggctggtaatgcttttgtgtgatcaatagaagaactaacgaaaagccgtatcatattaaataaacgcttgtacttatggggtcgtatttgcgttgcgtatatatacaaaacgtttgttgactttctgtggtgttaatgttgtgcgctcgatgatatgt

SEQ ID NO: 28459 - DNA, 420 bp, Zea mays
cagctttaacaccccggcccacatccgaatggtcaccagctcgcctgaatttcgcggtgcccccaaatctgttctccgccaaccgaaaccacccatcaaccgggctagcccttttcagggtagttcatctctctctctcccttggttaagcaccctggttactctgtgatgcttgccgagccttcaatttaaactaggaaaccaccagtcgccgggaacatggttatctcgccacaacattctcggtcaccggggccaaagctccttagttagtcttggatgcaattacgttacgggaaatgattaaggtagccccaatttcatttatgttgctcggagaacctagttgttgacccaatcaaccggtacagaggctcgccggaacctctctgcgctcgacgccgtcggggacctttccct

SEQ ID NO: 28460 - DNA, 450 bp, Zea mays
  unsure (1)..(450): unsure at all n locations
aaaactaagcttgaatcgagcacacatgctacactaacataacatctgttttatatccgnaatataaagcaaactaccaattattgaacgatnaagtttttgatcaaccatagtacactcttcatctaagtctagatgaccatttgntgccattggagtcttgataggcttagcattttctaaaccaaacttcttgagcatgtccttcaaatattttgattgacttataaaaaatccatctttcaattgtttgatttgaaggccaagaaagaagctcaattctcctatcatagacatttcaaattcttttgacatcatttttccgaactcctcacaaaataattcattagtagatccaaaaataatatcatcaacgtagatttgacaaacaaataagtctttgccaattcttntagtgaatagagtggtgtcaaccttccccaatttgaa

SEQ ID NO: 28461 - DNA, 378 bp, Zea mays
tcttgtgttccatcttgcatcaacccatctggacaggggcacgcggcacaaaattcactagttggtccggttgaaggtcccccgggtcccaaacaccgacaaaatcaattcccatcccttatcttatgaatttgggatgtgcttgtatctaaactttggaaagtggtggaatgtcaaatttcaaacaaataatttgaattctaattcctttaaaataaatagatccaaacggtccctagatgtaatagatcatcatgtgtctaggtaagtgcacatagtggctcacattttaatgctggaccaaatattgtaactcgttcattcacactctaatgctgctccaaatgcccctactggttcaccttctaatgctggacc

SEQ ID NO: 28462 - DNA, 391 bp, Zea mays
caactcttgtaaatagaattaaactggtcttcaaggaactttggacataccttggaatatattcttacccttcgattgaagtgctttgattgggacgaaatcagttttttgagccgaaggcgaaaaaacaccttcccttcttttcgtacacaacgaagcataaaaggccgcttcctctttttgccgaagcctttccttacataacaaaacataaaagactgctactcttatctgccgaagcttttccttacataacaaaacataaaagactgctactcttatctgccgaagcttttccttacataacaaaacataaaagactgctactcttatacacaacgattcataaaaaaccacttcttcgaaacttttcttttacataacgaatcat

SEQ ID NO: 28463 - DNA, 412 bp, Zea mays
gatcagcaaatcttagtgcacaagagctaaaaattttagtgggccgaagcaaaaggcaagtgtgcgtaccaaatcagttcgcgatgtgatcttatttatacgcctagggcgttgaaaattgaaaagccccgcttgtcagtagatgttgctattctagcaaagggaaggtgttttttcggaccttcggctcaaggccttcgtccatatcgcaatctgaatttattatttacaaattaatattgcgaggggctactgttgggggccttcgtcctccgaaggtcctcaaaaacatgatttgacaatgttttccgagtggattatgtgaacaggtattttcggatccagaattatgaatatggagcacggcccggacgaagcctgaaccagacgaaggtcgagtgtagccgaagct

SEQ ID NO: 28464 - DNA, 399 bp, Zea mays
  unsure (1)..(399): unsure at all n locations
ctaagctttcactctcgcgagacctttccccatttctttctaaccaatgttaattcattatcgnatgtgatattctatgcatatttactttatttggtctcttggatgggggacttgtttgttcctaatttgaatggatggatgtatgtgtgcttgcnatcgcatagagaacgatccggntgaagagcccgaggaactcgcatgagaagcccctgagcagcagtcggtttgtggaggcaagtgtcctttgacctatctcttgcctattcattctttaattcaccttccgctttacacatgtatacctaaggattgactagcttttgttatccatgtccttgtttacctatttggcttgattatttatgttagcttatgctttgctcactctaatcatga

SEQ ID NO: 28465 - DNA, 295 bp, Zea mays
  unsure (1)..(295): unsure at all n locations
tatacgctcttctaggcgctttatgggctcaagcaaagcccccaagagcatgggatgaatgccttanagatttccttatcactaatggattcaaagtcggaaaggccgatcctacactctttaccaaaacacttgaaaatgatttgtttgtatgccaaatttatgttgatgatattatatntgggcctactaacgaatctacattgtgaagagtttagtaggatcatgacacagaaattccagatgtcaatgatggtggaagtgaagtacttcttgggatttaagtgaagcaact

SEQ ID NO: 28466 - DNA, 452 bp, Zea mays
ctatgaaactcagctttgggtctcttgccttactggtcttggccacatgaccagagattacttgtgaattagtcttgaggattggccttcttatacacattggcttaagtttccgaagccctaagagaagagcttcgtactctgcaatattatttggacagctgacgtctaattttactgcatagcaagttctgactttggatggtgcaactagaaagacagttgcccctgcgccgaaggtcccccaagacccatcacaaaataccatccaggcttcatcatcgtttattctttcttcatctcgagcccctggtgtccaatcagcatgaagtctgctaacgcctgagactggatcaaagatctacagacataatcaatggtaaatttggtgagttcaacagcccattttccaactcttcctgtagcttctctgttcctcattatatccttca

SEQ ID NO: 28467 - DNA, 378 bp, Zea mays
ttattgggatggtaacgactaacagctggagaacacctaaatattcatcactacaggggtgatgcgggcccagccatattcacacgaacagggttgccctgtgcgtcgtcctctttccatgagatatgatgcgagtggcaatgacatgagcaactgcttagtgacaaactcgtataattaattggaggtagcaaaataaactctccctttcataagctcacaactctatatcataagactctgataaaaacttcttgtgtgcgacaaaagcctacaaacagcactggtacacagaattcgcaaaacaaagtgagacagatgtagcacgaatacgtgatttaatttggaccgaaaactgagtgcatgcatggtgtacat

SEQ ID NO: 28468 - DNA, 433 bp, Zea mays
  unsure (1)..(433): unsure at all n locations
tgccgccatggngaagtcagagaattcggtggccaattttcgcctctgtctatgcccgccgccatcgctgctcggtgcgcctgtctgctgctcgcggtccggctcagttgctgcgacgtcgagctcaagcagccgcggggggattcaccatcgcacgccaagcgggcgtaccgtacacacgaagaaccgacgtggttggctcctcaccaggtcggagctccatcgccgattagtgctgctgccagaacctctggtgagaatcttccccaccccccccttgccacttctgctttgctcgtccgtgccggtagtactccataggctcagattctggggttctggcaatctatgggtcggtcgccgtgcagccgtggtcctggggcgggtgcagcgtcaccactcggcaaagatgaggtagaagaaaacgccgtga

SEQ ID NO: 28469 - DNA, 427 bp, Zea mays
  unsure (1)..(427): unsure at all n locations
tccactgcanatctacaagatttttcatttgggtccacaagtggttacattcaacaatttggtatcatttacatgttttctctagactttgatcagagtaaatatcatatcttatgctttccatgctgctaaatgcatatgttgtcaaaatatcttttacctatgtatatggggagttagtctaatcaaaccatagcttgcacctctctttctcatgtgctttttctaagtggaggatcactgtcagggggagtatttctttatctatgacaaaggggagaatattctttcaaaagggtgaatactcttttaggaggagtaatcttttagaactttaattgataaatattctagagggcaagtcttaaattgcttcctatacgctttttaatgtcttccttttcggtgggtgatgccaaatggggag

SEQ ID NO: 28470 - DNA, 429 bp, Zea mays
agcttaaccttgtaacgaggatgagctatctttgttccaaaggtggacgttccttaagcttctttgaatccttaagggtaaatgcatcaaatgtttataacatgctttcttaagtgtgtagtctatcatgagcatcatgtttatattatgacatataacacttcacaattcctatgatatagatatgttctctttgacctcattatgtgcatttggcatttaaggcctaactatgtattcctctctatgcacatacttagggagagcaatctatattgaagaactataataaagcttaattgacatatctttttatctaatatatctctttcaattaagtacctgctcttaattaatatttttgcttaaaacaaagttcaatgtgtagaacttgcatcctcagacctcacaagtcctaaagtgcattga

SEQ ID NO: 28471 - DNA, 439 bp, Zea mays
tgtgaaggttcttcatccccacatgtgctaagcggtgatgccacagccagcccatgcaagtcttagccattaagcatgcatctagaccggcctcttcttttgcaaaatcaactaaataaagtttgccgtctaatacacccttaaaagctagtgaaccatcacttcttctaaagacagacacatctatatttgtaaacagacagttatatcccatattgcacaattgactaacagatagtaaattatatcctagtgactctactaaaaacacattagagatagagtgctcattagaaattgcaattttacctaacccttttaccttgccttgattcccatcaccgaatatgattgaatcttgggaatccttattcttgacgtaggaggtgaacatcttcttctcccccgtcatatggtttgtgcatccgctatcaataat

SEQ ID NO: 28472 - DNA, 421 bp, Zea mays
  unsure (1)..(421): unsure at all n locations
agcttggcanaagaagatgaggagaagacttctttcatcacatcctttggagctttttgctatacctccatgttgttcgacctcaagaacgctggagcgacttaccaaagagccatctaaacatgcttagccatcattggggcaagcgggtggaagcttatgtcgatgatgtagtcatcaagatagaaaactcagaaaacttcatcgaggatttgcaactgatcttcaacagcctgaggcgctatcagtggaagttgaacccaaaaaagtgtgtctttggagtatcagccggaaagcttctcggattcattgtcagccatcaaggaatcgaagcaaatctggaaaagatcgaggccatcatgagaatggaagcgccacggtcgcagaaaaaggtgcaaagccttactggatgcatggcagc

SEQ ID NO: 28473 - DNA, 430 bp, Zea mays
  unsure (1)..(430): unsure at all n locations
ttcaagaaaacccccaaatcaagctttttttgttgtgactcattgggaattctgaattgcagaattctgaaattcaaaccttgagccacagatcacggatgttcaccttgatccctaactcgaatcctaatggccccattgacaaattagtgtctaactaacccctctgtcgggtgccagaagatggcattgggacgcgagccctagacacgacaaaacttgggatttgcctcgggtttgggcagggagacagaccagatttcctggctccatatctctgcaaccagtaggcaaaatcctatgacctccacacaagaatggtagcttgtanggaggagaagaggttttgtgcactgaccaaggcgagagcaggctcggatgagcgaccacacgcgccagagcttgtgcagaacgcacgggcacacgtgtt

SEQ ID NO: 28474 - DNA, 325 bp, Zea mays
  unsure (1)..(325): unsure at all n locations
catgacattggttgggatatataagatgagtgcttaataagaatactccatcatgtacacaaaggttctctttcttattatctaaaccatttgggtggtctggagaacacaactattagagaatgcttccttgcttattttaaatcaagtaattatgcagggcagaaatttaaggttcttgatctacatattaattgaccaatgctgataaaccaatgctgaatacacatctaatagaagcatttaagtatcaaaattttgtctgtattgaatgcaaattggtggaaagcattgcagtacagntattgtttatttttttcgatgg

SEQ ID NO: 28475 - DNA, 431 bp, Zea mays
  unsure (1)..(431): unsure at all n locations
atagtgattagagagagtgattgttgtgttcatttgtgctcttgcgcttggattgcttctttttctcattctttcttgcgatcatctcaattgtaatcaaggcaagagacaccaattgtgtggtggtccttgtggggaagtttggttcccgtttgattgagaagagaagctcactcggtcggagggaccgtttgagagagggaaaggggtgtaagagacccggcctctgtgaccacctcaacggggtgtacgtttctgagataccaacctctgtcaaataaatacttgtgtctcacttctttattcgcttgcgattngattttaccccctctctcggactcgcattatatttcttacactaacccgacttgctgttgtgattaactgttttaatttcatttatgcactattcaccaccctctatgcgactt

SEQ ID NO: 28476 - DNA, 416 bp, Zea mays
  unsure (1)..(416): unsure at all n locations
agcttaatcctgagaagtgtgtcttctgtgtgccccgaggcatgctcctagggttcatcgtctctgagcgaggcatcgaggccaacccggagaagatcgcggccatcaccagcatggggcccatcaaggacttaaaaggggtacagagggtcatgggatgcctcgcggccctgagccgcttcatctcacgcctcggcgaaagaggtctgcccctgtaccgccttttaaggaaagccgagtgtttcgtttggacccctgaggccgaggaagccctcggcaacctaaaggcgctccttacaaaggcgccagtcttggtgccgccggcggacggagaaaccctcttggtctacgtcgccgcgaccactcangtgggtagcgccgcgattgtggtcgaaaggcangaagaagggcataca

SEQ ID NO: 28477 - DNA, 433 bp, Zea mays
tgaagccatggtaagtagcataggtcaataatatgcgaattgactcaagcctagctacgggtgcataggtttcaccgaaatccaaaccttcgacttgggagtatcccttggccacaagtcgagctttgttccttgtcaccacaccatgctcatcttgcttgttgcggaagacccatttggttcctacaacattttgattaggacgtggaactaaatgccatacctcattcctagtgaagttgttgagctcctcttgcatcgccaccacccaatccgaatcttggagtgcttcctctatcctttgtggctcaatagaggaaacaaaagagtaatgctcacaaaaatgtgcaacacgagatctagtaggtacccccttatgaatgttcccgaggatggtgtcgactgggtgatctctttggattgcttggtggac

SEQ ID NO: 28478 - DNA, 428 bp, Zea mays
agcttattagaatttttgtatgaccagttctaccaaattatgcattctaatatattcacgccgagactctagatacaaatatgagatcaattgtgttcttatatttggatgtgccaaagttttatattcattgtttggacaggagacaaacacaacgatttctgtagtttgatcttgagtttaaactgtttcaaccagcaaccaaatgagttaccacttgcaaacaagcttcaggccagtatacaacgtccattttagacaatcttttgctttgtaggtttagcaaaaaaatatatgttgctcagttgtactgtaattgaagtgatcagatgaatagaatattctaacgttatgtgatcacttgtctagccggaataacatattgataagtctttttttgtagtgattagattaacctttcttcatat

SEQ ID NO: 28479 - DNA, 436 bp, Zea mays
  unsure (1)..(436): unsure at all n locations
tcctccatgggcatgccttttgtccctcgttcttctgatgtgcctctctatcctcctcccncagagatcaatgagtggcaccagcaggcctaccgtgtgccttttatgtctgcagatgatgaagatgaagaagtctatgttgatgatcgcgaggagtttgccccgcctccctaccatggggatccgggtcaatcatcctcccaccctccgccttcttacccgggtccgggacccattcctagtgaccctaggccatccggctctggttaccaccaccacccttctcctactcctgatcatcgtacatcttcggcatctgttatttctgcggctgatgagccacctcgggactccacttttgaggaggacgcgatgaggacttttttccctgactacacttcatatnctccatcatatcctccgtcatatcctcctc

SEQ ID NO: 28480 - DNA, 250 bp, Zea mays
gattccagtgaacaatcgcagaacacaaacaaatagcatgttggtatccatcaagtgacctgtattttgatagactctagataaaccaattgcacatctcatatttatggtatgaaattgagaataatactcatttgtgttgtcacatatggattgacacatgtgtattacagctcacatttggattctcgaccttttatgctagacaattcccaagaccatactggagaaactatattaaagcagctta

SEQ ID NO: 28481 - DNA, 407 bp, Zea mays
  unsure (1)..(407): unsure at all n locations
tcttttcgtcgtcgatgagcgacgccaacgcgagcaccttctttcattgtgtgtttgctggggtttccaagtaagaaacatggattcatctttggcgttggtttataaaaatgactcacaagtcagagccatggaaaaatattacggagaataaatgtcacacatataaaagaataaggtgaaaacattattcaaacaaaagaaattgcatgcaaggctcttttttaaatactactccatccatccaaaaatatgattcaggaatctcgntgataattatctactactacacattgggcaaaggtagcaggtacgctttgggagagatgtagtatatatttttactgtaacagatattgacataaacacacatgtggtgtaatggtagctacgagcatatttgctta

SEQ ID NO: 28482 - DNA, 395 bp, Zea mays
cccacatgtgctaagcgactatgccacagccagcccatgctagtcttagcaattaagcatgcatctagaccggcctcctcttttgcaaaatcaactaaatagagtttgtccgctaatacacccttaaaagctaatgaaccatcacttcttctaaagacagacacatctacatttgtgaatagacaattatatcccatattacataattgacttacagacaacaagttatatccaagcgactcaactaagaacacattagaaatagagtgctcggatgaaatagcaatttttcctaaccctttcaccttgccttggttcccatcaccgaatatgattgaatcttggggatccttgttcttgacgtaggaagagaacatcctcttttcccccgtcat

SEQ ID NO: 28483 - DNA, 433 bp, Zea mays
cacgtgatagggttaacttacggacatttcttatgagatagaccttgtgcagcttggcaagcaggtaaacaagtgggaagaacgcatcacagcaagaatgtgatgaccacttcaagaaccctggagctgctgcatatggacctcttcggacccgtcgcctatctgagcataagaggaagtaagtatggtctagttattgttgatgacttttcccgcttcacttgggtgttctttttgcaggataagtctgaaacccaagggaccctcaagcgcttcctcaggagagctcaaaatgagtttgagctcaaggtgaagaagataaggagcgacaacgggtccgagttcaagaaccttcaagtggaggagttccttgaggaggaagggatcaagcacgagttctccgctccctacacaccacaacaaaatggtgtgg

SEQ ID NO: 28484 - DNA, 303 bp, Zea mays
  unsure (1)..(303): unsure at all n locations
ctaaccatgtgtataaactctctaaggcgctttatgggctcaagccagccccaagagcatggcatgaatgcctaagagattttcttatcactaatggcttcaaaagtgaaaaagccgatcctaccatctttactaanactattgcaaatgacttgtttgtattgccaaattatgttgatgatatcatatttgggtctactaacaaattaacttgtgaagagtttagtaggattatgattcaaaaattcgagatgtcaatgatggggggagtgaagtattttctaggatttcaagtgaagcaac

SEQ ID NO: 28485 - DNA, 425 bp, Zea mays
tttttggcagcaaaacagtgcaatagttatgaatgcttgggtaacttcacacctactcgtctggttatatagtgctgtaagggggaaagtgaatcgtcaagtcttccgcaccgagtcaacagtcgcccacacccactgaacggtggaccacggaactcgagaaggtgaatcgtaaggacacgcgtactcgccgcatggtgggaccattccgcgctcggaatattttaatcgtttctcgacaacgagctcagggaaggtgttttttcagatcttcggctttccgaagcctagaagactttttcacggatcaagctcgttacgaaaaatgatctaacaccgcgaaggggctactgttgggggtatgcttcgtcgctgaagatccagtaaagaagaaacaccttcggaagatcctcacaaaagcagca

SEQ ID NO: 28486 - DNA, 397 bp, Zea mays
agcttactacgatgtggactaattattctttctcctgtgctaaacacggactcagatgccactgttgaaaccggaattgcaagaaaatcacgtgcaatctttctaaagtaggatatttaagcccaccatgctgccaccactgaatgatatccaaatcatgtgtcctaggaagcagtggttcctctaagtacaaatccatctctgtgcgcacataagtggaagtcacgtctggttgcttggacatgtaatcatcaaaagtgtccatccaatcctcctcaaacatgtcattaagagcactacttgtcctaggttgagcaccatctgttgtggcaacaacttctacagtatcttgatattgaaagcccctgaagattgacaagtgctgacagagctggag

SEQ ID NO: 28487 - DNA, 435 bp, Zea mays
  unsure (1)..(435): unsure at all n locations
agattcttggcaatttgaagataaatttgacacacttgcacatataggaagggtatgggttcaagtatctttgatatatattagtgactttgaagtgcagatgacaataatttcacccctcccgattcctttacggtgatgtggtaagttgtttatggcttaatgcttgatataatttatttctgaanatttgatattgttttattaatgcgtttgatatcgctggtcatttgtgagattgaagttgttactatgcttgtgatatacaagtatgcctatgttgttttcaccatgttttcatggntgagttttattacaataatattggtatatatgcttgattgaggatgtttctaagaggagtgtgaattgtgtgttttggggtacaagataatcatcaatttgaaatttaagttgtgagtggttgggggatag

SEQ ID NO: 28488 - DNA, 315 bp, Zea mays
agcttgtcagaccagtctagatagactggcgctgccaccctcaccgagtagacctctcggtgctcttgcttgcggtgccgagccgaggcgttcgccacctgtccgccgtagatcatgaagcagttgtggacctccaagaactcctcttccttgtcaccccccttattgttgccttggtctttgccaccttttgtcgagggtccagccttgttgaagtatcatcagagcatgtcgcactcctcaagggtgtgcttgacaggaccccggtgatagggacacgactccttgagcatcttgtcgaacgcgtcgacccct

SEQ ID NO: 28489 - DNA, 438 bp, Zea mays
tgtagctaaattagacattaacatattctgagaagagccatatgtcttgaccactagactactagtgatgataatttgtgatagaaatatgaagatcttgtagagacctgttgtatcctctctactcctgatgatttcttcgtacgagagcagtactatctggtgttgaagatggatcctatgcggataccagtattgttttgttcttgccaagcagttatcatcatttgcttcatcaaaagctagttatatgatgattttcccagataaaatgaattcttggccttgtctgttctattccaaagcttctctttttgtcaaacaacgaagagatcgaaataatgctttatagaacaaattggtatataatatgaggagaaatgtttgtcctgctggcagcatcacaaattattaactattgttataaattctctctca

SEQ ID NO: 28490 - DNA, 421 bp, Zea mays
agctttaccaaatggacgtgaagagtgcctttctcaatggaccaatcaaggaagaggtctacgttgagcaacctcccggctttgaagatagtgagtaccctaaccatgtctataggctctctaaggcgctttatgggctcaagcaagccccaagagcatggtatgaatgccttagagatttccttattgctaatggcttcaaagtcggcaaagccgatcctactttattcactaaaactcttgacaatgatttgtttatatgccaaatttatgttgatgatatcatatttgggtctactaacgaatctacatgtgaagaatttagtaggatcatgacaaagaaattcgagatgtcgatgatgggggagttgcagtattttctaggattccaagtcaagcaactccaagagggcaccttcat

SEQ ID NO: 28491 - DNA, 442 bp, Zea mays
ttcaatttgagagttcttgaactccgtcccgttgtcttttcttattttcttgatccttaaggcgaactcattttgagcccgtctcaagaatccctttaaggtctcttgggtttgagatttttcctgtaaaaagaatacccaagtgaagcgagaataatcatccactattacaagacaatacttactcccgccgatgcttatgtaagcaatcgggccgaatagatccatgtggagtagctcaagcggcctgtcggtcgtcatgatgttcttgtgtggatgatggactccaacttgcttccctgcctggcatgcgctacaaatcctgtctttctcaaaatgaacatttgttaatcctaaaatgtgttctccctttagaagcttgtgaagattcttcatcccaacatgggctagtcggcggtgccagagccaacccatgttagtc

SEQ ID NO: 28492 - DNA, 400 bp, Zea mays
tcagcagaatgacagccaagggccttcattctcaaatatgcaggaatgtgctgacctatgttgatgatatcatagttaaaagcacgaagcaagaaaatcacattgctgatttgcaagagacatttgccaatttcaggccagctggcctgaagttaaatccagaaaagtgtggttttggggtgaagaagggcaagttccttggttgtctagtatcaatgaagggaattgaagccaacccaagcaagattgaagctatccttcgaatggaaccgccaagtacaaagaaaggggctcaacggctggtaggtagattagcatcattaaacagattcatatcatgatcagcagaaagaaatctgccattctttgaaatactaaagtcagacgaagtctttcaatg

SEQ ID NO: 28493 - DNA, 405 bp, Zea mays
cttcagctcgacaatctcattagtgagtgttctcctctccaaaactgaaggcttagtgagctcttgcaagtacacgcgaagagaagaggtggagcttctgagatagcccctatcttaaaatgatgaaatgttctggttagttgtacaaaaagaaaaagaagtcattccaacacaagatgttgttgttgtcgaagctgaaccaatactttcgaagctaacagtgacaacgaagatgatgatggcattttaagtccgagcaaacctagccatattgagtttggaaaatccacgttaaagcagaagatctggttttaatgaagaaattagcatattttggagagaatgatgacgaactagttctgtttgcggcggaagaagtgattctagatgcaagagatgaccaag

SEQ ID NO: 28494 - DNA, 433 bp, Zea mays
  unsure (1)..(433): unsure at all n locations
tgaatgttcaaaatcaagaacttcaagtgcaacttgaaaattgcaagaacatcaatgcctcatctttattgattgaatctaagtctagctcctcatatattgccttttgcaaacattgtgtcaaatatcatgcttcttgttgtttaactaaccatgcaaggaagaaaagtccacatgtgaaggtcaaagagatattgaaaagatgctctagcaatgatgggttaaagaaagttgaacccaagtacaagtctctaaagcccaacaattgaagaagggggcttgggttcaactcatccaaggaaaaccctagcatagcgcataaggggtggagatcccccaagttcatagagggaaccaccctatatgatgccttgnggaggattcactcctcaaatgacaagtcaacttaagtaaaggtaaacttgagctccac

SEQ ID NO: 28495 - DNA, 427 bp, Zea mays
  unsure (1)..(427): unsure at all n locations
agcttacaaaccaactctntacgagttggtgcttccctactattactacattacattactactactactatactactctacattactactacattattctaactactctatactaatatctaaataccagtggcgcttagccactggccttgctgctgctgccaccgccgccgcccctggtgcagcctttgctgctgccgcctctggtgctgcccttgctcccatcgccgccgccgccgccgcccccgccgctgccgctgccgttgccatcgccgttgccaccgtcgtcgtcgtcgtcgtcgtcctcgccctcgccgccgtccgagtcctcctcctccgaggagaactccgactcatccaagccctcgagcccggagcgctcgacggcccagatgtacgttcagacttccgcggcaatcccctggga

SEQ ID NO: 28496 - DNA, 437 bp, Zea mays
  unsure (1)..(437): unsure at all n locations
gttttgaagcctanaggctacagtgcatgactgaaccaatgtgagcgtactgcacgtggtgacacgtctcatggcgatgaagacaaagtacaccttcttcaacaactgctacaatgattttgtgaaactgattattgatatcatcccaaccgaatcataacatgccgaaagacttataccattgcaagaagctcgtagctggtctcggcgtgaactaccaaaagattgatgcttgcgaggacaattgcatgttgttctggaaggagcatgaaaataccacacattgcatccactgcagtaagtcaagatatgcaggggtgctagatgaagatggaaacgaggttacgacaaaggtgccgatcaagcaactctggtacatgcctatcactccacggcttaagcgtctctgtctaaatcaagagacaacaaagcaaatt

SEQ ID NO: 28497 - DNA, 247 bp, Zea mays
  unsure (1)..(247): unsure at all n locations
cggcggaaccccacgcccctctggaccccctaaaaaggggaccgggccaagtccaagaacacttcacccgcacttcactggagcggtggcggnggtaacttccgctcgggccccaacaagcaaaaggttcgaacgacgaccccacaccaatggtcaactaaataaaaacaagccaatggtccggccgtgggacgggttaccataataattatattaaatatccaaccaaaagaatttaaaggttttt

SEQ ID NO: 28498 - DNA, 437 bp, Zea mays
tctaaagggagaacatgtgataggtctaaccaatgttcatttcgaaaaagatagaccttgtgcagcttgtcaagcagggaaacaagtgggaggctctcatcacaccaaaaatgtgatgacaacatcaagacccctggagctgctacatatggacctcttcggacccgtcgcctatctgagcataggaggaagtaagtatggtctagttattgttgatgacttttcccgcttcacttgggtgttctttttgcaggataagtctgaaacccaagggaccctcaagcgcttcctaaggagagctcaaattgagtttgagctcaaggtgaagaagataaggagcgacaacgggttcgagttcaagaaccttcaagtggaggagttccttgaggaggaagggatcaagcacgagttctccgctccctacacaccacagcaaa

SEQ ID NO: 28499 - DNA, 409 bp, Zea mays
atgacctagctcttcgagttctacgagattgaagaccctgagcatctgtttggtgaaggcaagtgtcctctgacccattatgtcctatctacttataattcactgtcccgcatactatgaacaacctaaggatttactagctttctatttacctggtccttgatttaccttttgggttactatggttagctacatgctagcgctttactttaatcaatgaacatgatgagatacaatgatgatactatgattttattctggatatgatgatatacttgtggcatttaggggactcgggctgtttcccaagtacctctccgtaaggacctgttcgttgagagaccacccgggataacagtgcaaccatgagggtgaaatggggcgcccttagctaattaattagagaaac

SEQ ID NO: 28500 - DNA, 445 bp, Zea mays
  unsure (1)..(445): unsure at all n locations
tgacattgtctccctggtggaagccaatgccatccttaatgctctaacgtctcccactatagagcatacttctaacaaatttaaaattttcattttctaagtcatgctcattaattttagcactaagttgaactatgtgatcattttgttgtttaattaaagctaggtgatcatggatagcatcaacattaatatctctacatctagtacaaatagtaacatgatcaacactagatgtagggggtttgcaaacatttaattcatcaatcttagcatgtaaaatagcattatcatttctaagattggaaatagaaatattgcaaacatttaaatcctcaaccttagaaattaatttatcattctcaatcttaaggctagaaagagattcattcaacttggcaatcttagtaatcaaactagcattatcatttntaagtttgacaag

SEQ ID NO: 28501 - DNA, 420 bp, Zea mays
  unsure (1)..(420): unsure at all n locations
agctnttacagaagaaagaagaaccttcggctacaaaaaaggcagatgggctaaagaaacgaagaattggtagcgtaatgtaggccattgaaaagacgccaccatcggcctcggcatctaagatagtacctactataagcgccgaggccgctgctgaagcaaacatatcggccgaagctgcagctaccgtcaaaacttccaacctggaggctaccttatctgggattgataaaatgatactgggtatgcctacagaagaaacatctgcggctgcagaacaagtcatggccccagtgcctgacaaagggaaaggaattgtcgaagctgcttcggaagaaaaaggtttcgatcttcagaacctggtcggacaagaactatctgaggccgagaagaaggagctacaggaatatgacatttcct

SEQ ID NO: 28502 - DNA, 437 bp, Zea mays
tgagtgggacggaaggcgatcatgacgaaggttaaaataatcactaagttatgcgcaggaaagcttcgacatgacggcagaaaagaggaaccgacttaaagatgaaaagcccaattaaacctcgaagaattattatatagttattgataaatgtaaagggtattaatgtaattctacacgggctgcgtcccgcgcctataaatagatgaacagtactcccgtactgttcacgctgacttggcattcgcttttcgcatcacgcctgtacctttactttccgtcaatccgaaggtacatttataatttgttattatggatattggaatataaataaaaaacaagttgatgataatatatgtattattacttatatttcatatatgcattcttctttatcatttatcaagcttatgaaggtctcttcctttataaccttc

SEQ ID NO: 28503 - DNA, 368 bp, Zea mays
aagaccaaactgcttcaaaagcccaggcccaagctcaaaagcgcgagattaaagattctttcgaaacagctggctagagctaagagagcgcggcttgagaaaccaacgagaacttagtgattttatggtcaacaaattggaatcaaagttaaggagcttcgcacatctcaggggaaatgctatgtcaaatctgtagaatgtgtgaataaaattaaatccagcttcgccagcgtaggcgccttttccagcgaagagaatttctctcgaggcaatcccgaacgtccgctggaatggattatccacgaagcagaggccttcgaagagattctgaacagtcgtggcgacatatgtgtcttttcgggcgccag

SEQ ID NO: 28504 - DNA, 411 bp, Zea mays
  unsure (1)..(411): unsure at all n locations
taaggtgcatctcatttatacccctgggataccaaaaaccctaattgggaccctggaaaaaaccttatactaaaccctatgggcttattgtcaaaagtggtgaaactttggactaaaagggaaaaactactatggttaaacatataaagtcatttggttcacaaatatgtgaatttgcaagttaaaccctatgttttgggcttattagcaaaaatcaccttttaagcactataaagcctaagtctgaaattcagntgagttggttcaactgtggagccctgtatctttgaaaatataaagattttgcccaaagtgaccacaacaagtttgtagaccaattaatggagaacaactatgcttaacgctgtagctcacttgatgagaaaaatctacagatatgtaagcctgaag

SEQ ID NO: 28505 - DNA, 402 bp, Zea mays
tctgggtatgaagcacatacgaaaaaagataatggctggagtagccaaatgtttcaaggaagacgatcaaggtgtgatatggtttaaaaaccgcatagtagtgccaaagaacgaagagctccgccagcaaattcttgatgaagcacatcttagtcgttattctattcatcccggaagcactaagatgtatcaagatttaaagcaacattattggtggacgaagatgaaaattgaaattgcacgctatgtggctagatgtgacacttgcagacgtgtcaaggccatacacatgaaaactgctggtccattacaatctttgccaatcccaacatggaaatgggaagacatcagtatggactttattgtgggactgcccagaacggccaaagggtatgattctat

SEQ ID NO: 28506 - DNA, 398 bp, Zea mays
  unsure (1)..(398): unsure at all n locations
agcttgacaacaccgtatgacatttcacataaaatttctgagatcaagaatatntagttcatttctcaacatgcaaaagcgggtcttatcaagaggcttagtgaaaatatctgctaattgatctttcgacctcactccttctaaaatgatatctcctttagcaacatgatctctaaggaagtgatgacggatatcaatgtgcttggtgcgagagtgttgtacaggattattagcaattttaacagcactctcattatcacacaacaaaggtaccttttctagaactacgccatagtcgataagggtgtggttcatatataaaatctgtgtgcaacaagcaccagcggcaatgtattccgcttcggcagatgacaaggcaacactattttgctttttgg

SEQ ID NO: 28507 - DNA, 444 bp, Zea mays
  unsure (1)..(444): unsure at all n locations
ntagatattctaccaagactcttattgtaagagccccttaatgtctgaaatccatctcctatttaaaaatgcttctttcaccggccttctcttaacaattcttcttggaattgagttgtaaaagctgggggcaatggcagaaattctagtgccatgcaaccatctatcatcccaaaacaaagtgtttgatccatccccaacctcaaaaatcatggccatagagaaaaagctctagctntgtttgggacctgtatgggaaggtctgcccaaggccgccccaaatatgttttctgtagccacaaccatctcatgcggagagcccaacaaaactctgggagactagagattcccaagcctcctagttgaaggggtcgacacactatntcctaggccaccaaacaatgtcctccctttggttcctttctacctctccatagaaaacat

SEQ ID NO: 28508 - DNA, 410 bp, Zea mays
  unsure (1)..(410): unsure at all n locations
agcttagctctaaagtcgttcctaagggaatgcagagctgaaataccaccgaagtaaaaggtgaagagactccaaagtcattcctaaggggatgcagattcttatttgcacatcaatgtcatttgcatcatatcatcacatcatattgcatagcatctcatcatcatcatcctgcatcaacataaacaatgcaaaaagaaggaaaattgctccttcagacatactgcttaacccatgaggttaatcctatttcggcaaaagagccatatcaaaaatacaagatacatgattttgacaggtgttgtcatatgaagcttatattttcgacaacaatattattatgcaacgttcagggcaaaaccttcagtgttacttcagcaaaagaagggatntatttctttgtgaagtgt

SEQ ID NO: 28509 - DNA, 440 bp, Zea mays
tctaaagggagaacacgtgataggtctaaccaatgtacatttcgaaaaggatagaccttgtgcagctggtcaagcaggtaaacaggtgggaggagctcatcacagcaagaatgtgatgaccacttcaagacctctggagctgatgcatatggacctcttcggacccgtcgcctatatgagcataggaggaagtaagtatggtctagttattgttgatgacttttcccgcttcacttgggtgttctttatgcaggataagtctgaaacccaagggaccctcaagcgcttcctcaggagagctcaaaatgagtttgagctcaaggtgaagaagataaggagcgacaacgggtccgaattcaagaaccttcaagtggaggagtttcttgaggaggaggggatcaagcacgagttctccgctccctacacacctcagcaaaatg

SEQ ID NO: 28510 - DNA, 431 bp, Zea mays
  unsure (1)..(431): unsure at all n locations
agctngaaccgagggcccgcgtcaccggagaggccaaatcgcgctcaccggagttcaagaactcgccggcgcgcgtggactgggtaaaccccttcaccatttcccgattcgttgcgcgcatggcctctgtgtcatcccgtgaagctcctcgtgccccttaattgaactctcccgccgtggtttggccggagcaggcgtcgccgtcgatccccgccgcctgtgttcgtggccaggggagctccgaccacctctgacgccgacccgcacatcgacgtgaccgtcgcgacctcctgaacatctccgaccacctcgccggacctccctcgccgccggtaagccgcgccaccctttcttttcccgcggctactatttcagttaagggagggactgcgggtgagagggagagaaatccagggggttaagtgaaaagt

SEQ ID NO: 28511 - DNA, 436 bp, Zea mays
  unsure (1)..(436): unsure at all n locations
tctcctagacaagcgccgcacttactgtagagtgtgaagctgccacatacagcagcagaggagcccctggcgctggtggagttaaggttgttaaatctatcagatactgcttcagttcttcaaagactttttgctgagctgatccccattgaaaaacttcggctgacttcagcacttcaaagaatggtaaatttctctctgctgatctggatataaatcgattcaaagatgccagtcttcctgttagccgttgagcccctttctttgtgcttggcggctccatccgaaggatagcttcgattttatttggattagcttcaatcccttttgttgaaaccaaacaaccaaggaatttccccttctttactccgaagacacattnttctagattcagcttcagaacagctttcctaaaattagcgaatgtgtcctgcag

SEQ ID NO: 28512 - DNA, 442 bp, Zea mays
atcttataacaaccgcaggagcaaacttggatggcgtggtggggtcattatcttataaggactggagaaatccaaccgattacaatggactctgcctctgtcgaaaaccataatggttgcctgcctggccatttattttaatctcgacctttccactggttactgtaaataaggtcttatatgcaccatataactctttgtaagttattttttgaagtcatggatccaaagatatcacctgaaaaactgtgtcaagtcttggaacagcacaacgtgcttgcaatgctagccaatttaacacatcatctctcaattgtctaggtgaaaatgatgatcttggtatctgggtgacgtgctggttttcattaaaaaactgagaccatatccctgctatactgccatatatgtgggtgcatgaaagtcttgcattgaaatgtcatgg

SEQ ID NO: 28513 - DNA, 436 bp, Zea mays
  unsure (1)..(436): unsure at all n locations
taaagccatggaaagtagcatatgcgagtaatatgcgaatagattcaagcctaactacgggtgcataggtttcaccgaaatccaaaccttcgacttgtgagtaccccttggctacaagacgagctttgttccttgtcaccacaccatgctcatcttgcttgttgcggaagacccacttggttactacaacgttatggttaggacgtggaactaaatgccatacctcgttcctaatgaaggctgtgagctcctcttgcatcgccaccacccaatccgaatcttgtagtgcttcctctaccctgtgtggctcagtataggaaacagaagagtaatgttcacaaaaatgtgcaacgcgagatctagtggtacccccttatgaatgtcgccgacgatggtgtcgacggngtgatctcgttggattgcttggtggactctt

SEQ ID NO: 28514 - DNA, 319 bp, Zea mays
ctatcttgtcgtaccttaaattgatctccttaattaaggtaccggattaccattaagtaccaccaatcaaactgaaaatgggtagcatgaaggtgtatggagcaagccacatctgggtttttggtaaaacagaagggtggcgacttgataactttgtggatggccttgccattaatgtgattaatatgcctttccctaaataacaattgcgcccttcctcttgatctttttccaaaaaaaggttctgtacactgccttcaatggcttctgctctgcatccaagtcctctttaatcctgtgccacccctttcagtgtttc

SEQ ID NO: 28515 - DNA, 292 bp, Zea mays
  unsure (1)..(292): unsure at all n locations
ggagccaggctcacggnctcactaagaagctatctggggcttgaatcgatcggagggggactggagaggggttggccaccgcggtggctcttggtccgcactggcgggctgcggggaggtcgccggaggcaatggctggctcgggcgagtccggcgcagtacggaggaggtaacggggaaggcaaccgagcgccggggtgggttgagagcctgtgcgttgcaagacaagtcacgatgggacaaaaggttaccttatgcagaattctcctacaacaatagttaccacgccagc

SEQ ID NO: 28516 - DNA, 436 bp, Zea mays
gcaagcttgactcaagtatccacacactaatccttaattctcttttcccgcctcatggacaaaggtcctccctggatccaagtccatagaccaacatatattccattatcacgatgaatacaatcaattttctgatctcgcgcgagagctagaaaaatcactcgacttctaccgagatcctgatagcaagcagctactcgacctaccatactagtattcatctcaaaaaggaaacctaagatcatgcaactagaggttgcaagcaactcctacacttaagtgcacattacaatcctactagcattaagtgtgataaagtagcatataataatacggttatgcataaaacccgagcttgccttcaattgctggggttgcggcgagatccataatagcagcctctgaagcctggctctggtcctcctcttggacaggg

SEQ ID NO: 28517 - DNA, 446 bp, Zea mays
tgaccgccgattccacgaagctcggaaacgaatcacagtctattcacaacgcacaacgaatacaacaggcacaaacaaacatatacttgcataagaacattacaccatacaagataaacttaaataaaaaaatgcaaaacaaaatagagcgcgttactacggtcacgcgaggaaaaagaaatgtcgaactataagctacgaccgagaagatatcacgtttacgctaaataaatattaactataatatttaatttgacattatcaaatataaataatatctaccatttagtttcggttagcctgttacagtagcagctatcagttaaaccagtactttaattaaagcgagagattctaagcgaggcgaatttacgacgcgcgaaacaaaacgacagcgtgcaaacaacgcacggatacacgcgacatatcacgctgacgacacatga

SEQ ID NO: 28518 - DNA, 416 bp, Zea mays
  unsure (1)..(416): unsure at all n locations
agcttgtgaaggttcttcatcctcacatgtgctaagcggcgatgccacagccagcccatgctagtctaagcaattaagcatgcatctagaccggcctcctcttttgcaaaatcaactaaataaagtttgtcgtctagtacacctttaaaagctaatgaaccatcacttcttctaaagacagacacatctacatttgtgaataaacagttatatcccatattacagagttgactcacagacaacaagttatatccaagcgactcaactaagaacacattagaaatagagtgctcggatgaaatagcaatttttcctaacccttttaccttgccttggttcccatcaccgaatatttttgaatcttggggatccttgttcttgacgtaggaagagaacattctctnttcccccgtcat

SEQ ID NO: 28519 - DNA, 434 bp, Zea mays
  unsure (1)..(434): unsure at all n locations
ntaccaaatggacgtgaagagtgccttcctcaatggaccaatcaaggaagaggtctacgttgagcaacctcccggctttgaagatagtgagtatcctaatcatgtctataggctctctaaggcgctttatgggctcaagcaagccccaagagcatggtatgaatgcctaagagatttccttattgctaatggcttcaaagtcggcaaggccgatcctactttattcactaaaactcttgacaatgatttgtttgtatgtcaaatttatgttgatgatatcatatttgggtctactaacgaatctacatgtgaagaatttagtaggatcatgacacaaaaaatcgagatgtcaatgatgggggagttgaagtatttcttaggattntaagtgaagcaactccaagagggcaccttcattagccaaacgaagtata

SEQ ID NO: 28520 - DNA, 338 bp, Zea mays
  unsure (1)..(338): unsure at all n locations
tggactgtatttgcaataccattctgttcttgagaagaatagactcgattcggctgaagggcttgaatgagtggggaatcctgagaatcatacttttgcctcctgttatcagctgtcctcctagtataaacttttaaggacgtactgccctggccagttaaatttttattctgggctgcaactaaactgagggtccaagcagactctggagggggcgaaatttggacgctcggttccagcgacccgacaaaggtatgctggggcgaaaccaacgcaccagattccagcggcccatccaaatcagaactgcccagcagattattacgcangagtgagtg

SEQ ID NO: 28521 - DNA, 433 bp, Zea mays
  unsure (1)..(433): unsure at all n locations
agctttctatgatctatcctagcatcaacacttagaccttttaaatcgntattgggcaactttttttggcaccatgtcaccgtgtcaccatgattttttgcaatcctatttatgtttatcttacattttggaactagttgatgaagttcagataagattgagaatacaacctattgcatctactatataagcttatttctcccagttgctactagtttctttcatcatccaactacaacacattcaatttgtgttattccaaataaatcatatggtgtatgtatatctgatcaatattattttctgagtcttaaatctactatcgcacttctcatacgagtgttctttcaccagttggtactcttacaccttattcctttcttaattttgtattctaaagtcattaataggtagggcatagggtttttttctg

SEQ ID NO: 28522 - DNA, 431 bp, Zea mays
  unsure (1)..(431): unsure at all n locations
tgcagctagggcccctcggcatactgtcgcatttcaaataccaagtctnccacttggaaacctcggggccgaaccctttgggcgtggtagagtcgcacggactgctgataccacgccgagtgtagtaaagctacgtcccgagcctcttctatttggtccaacgagtcttctcggttggtctggttgctttggtcgtcataagcctttgttctcggagaaccgtattctaagtccgtgggtaggatggcctcggccccatagactagaaagaacggcgagaaacccgtggctcggttcggtgttgtcctcagactccaaaccaccgagagtagttcctttatccaccgcttgccgaactagttgaggtcgttgtagatcctcgacttcagtccctgcaaaatcataccgatggcgcgctccacctgcccatt

SEQ ID NO: 28523 - DNA, 388 bp, Zea mays
cccggaatcgttccagctaatcaaaggttatataaattaaagaagcaatccggctaggaatcattccgacccactaatccggcacaaatgaataaggccttaaggaacccccattagaaataatttttattctaattttttttaagattttcaaatgaccttgtagaaaaaatcaccaatataaaagttgtggatctctaaaagttatgaaactttgtagttgacaaatttttttatttgaaatcattctggctctaaaaaattgcatctaaatttattaaatttaaaatgcagattttgccaacgaactcggatgagaaaagtaccaaaataaaagttgtagaaccctaaaagttatgaaactttatagctgacaacgttttcattt

SEQ ID NO: 28524 - DNA, 340 bp, Zea mays
caaagcatataatcagcaaaagcttcgtgtctattgtctaacattctatgttctgtaccttgctcaaaaaaattatcagcttttgtcaacataagaacattcactaccgaaatttggttctttgccgagtgtcatattctttgccgagtgttatatttcgggcactcggcaaagagctctttgccgagtgccacacaaaaaaccctcggtataagaaaacactcggcgaagaagctctttgccgagtgtgttatctttgacactcggcaaagagttgtcgttttttgacacttcacaaagggctctttgccgagtgtcacaaatacaacactcggcaaag

SEQ ID NO: 28525 - DNA, 367 bp, Zea mays
  unsure (1)..(367): unsure at all n locations
cttccttgtcttgactaccatgncatagacgtaggcctcgaccgtgctatcgatgtgttcgccgaacacatggttcatgcaccggtggtatgtcgcacccgcattcctcaaaccgaacggcatggtgacataacagtacatgccgaagggcatgatgaaagaagtcgcgagctgggccgactctttcatcctgatttgatgataccccgagtaggcatcgaggaaagacagggtttcgcacccagcggtggaatccacgatttgatcgatgcgaggcagaaggtatggaaccttcggacatgcttttgtgagaccagtgtagtctacacacatccgccatttcccccctttctttctcacaagcaca

SEQ ID NO: 28526 - DNA, 407 bp, Zea mays
  unsure (1)..(407): unsure at all n locations
cagcttgatagtttaagcgtatacatcttaaatcttcttcgaaggtattttctctagcatagttagaaggaatgataatcttgtctaaaatttggtctaattgtggatcaatggttctaaaagcatttatcaccctagtagaccatgaaacataattagaacaaccaagaagtaatatctcaagagttacctccttgatctcctgggtcttcttgttcttttgggatcttctacgagccatcacttcgagttgttagactcaagatgaagtgcctggctctaataccaattgaaagtcgcctagaggggggtgaataggaaaaacctgaanataaagctttatcccccaactagatcccttgattagtggttagaacaagatatacaattatcggagtataaaaact

SEQ ID NO: 28527 - DNA, 436 bp, Zea mays
tgtgaaggttcttcatccccacatgtgctaagcggcgatgccacagccagcccatgctagtcttagcaattaagcatgcatctagaccggcctcctcttttgcaaaatcaactaaataaaagttgttgtctagtacacccttaaaagctagtgaaccatcacatcttctaaagacagacacatctacatttgtaaatagacaattatatcccatattacataattgactaacaaatagtaaattatatccaagagactcaactaaaaacacattagagatagagtgctcatttgatattgcaatcttacctaaacctttcaccttgccttggttcccatcaccgaatatgattgaatcttgggaatccttattcttgacgtaggaggtgaacatcttcttctcccccgtcatatggtttgtgcatccgctgtcgat

SEQ ID NO: 28528 - DNA, 447 bp, Zea mays
  unsure (1)..(447): unsure at all n locations
ttatcaaatggatgtaaaaagtgcattntaaatggcttcatatatgaatttggatatgttgagaaaccacccaggttgaagaccctagatatcctaatcatgcttataagttgtccaaggcgctatatgggctaaagcaagctccaagggcttggtatgagtgtcttcgcgacttcctcatcgagaagggcttcaagatcgggaccgtcgacacaactttattcataaagaaacataacggtgatattttcatttgtcaagtttatgttgatgatataatttttggctcgacaaatgattatcattgcaaggaatttggtgagttgatgtcgaaggagttcgagatgtcaatgattggtgagctaacatacttcctcgactntcangtcaagcaaatgaaagatggggacttcctctcacaagagaagtataccanagacttgttga

SEQ ID NO: 28529 - DNA, 429 bp, Zea mays
  unsure (1)..(429): unsure at all n locations
agcttggttataaagatgttagtgcaatataaccaagtggctatagagcgagctcttgcgaatcacaataatcacagagaaagacaacacaagagacacagtattttatcccgtggttcggccaagtataacacttgcctacttctacgttgtggcgtcccaatggatgagggttgcaatcaacccctttcaagtgatccaaagatcaacttgaataccacggttttcttccttatagttttcttcccgtttgcgagcaatctccacaagttggagcctctcgcccttacaagattgttcacaaagaaagcatggagtaaggttgggaagagcaacgcacactagaattaaatccacaccgcanacacgcacacaagtgagaagatgagcacacaaaaacacacacaaggagtttacaactcgaaaagt

SEQ ID NO: 28530 - DNA, 439 bp, Zea mays
  unsure (1)..(439): unsure at all n locations
tatgaagattcttcattccaacatgggctagtcggctgtttcttagccaacccaagntagtcttagcaattaagcatgtgtcgagttcagctttatcaaaatctactaagtatagctgaccctctaacacacccttaaatgctattgaatcatcacttcttctaaagacagtgacacctacatcagtaaagagacagttgtagcctatttgacataattgggaaacagaaagcaagttgtaatctaatgaatcaacaagaaaaacattggaaatggaatggtcggatgatatagcaattttacccaaacctttgaccaaaccttgatttccatccccgaatgtgatangctcgtggggatcttttgttttctcatatgaggagaacatattcttctcccctgtcatgtggtttgtgcacccgctgtcgagtatccaact

SEQ ID NO: 28531 - DNA, 431 bp, Zea mays
  unsure (1)..(431): unsure at all n locations
agcttagcaagtgtgagttctggatcagcgaagttctattcttgggtcataatataaaccgagatggactagttgtggatccaaagaaggtagcagcgattctggactggaaagcaccgaaagatgtccgaggaatcaagagtttcattggaatggacggttattatcggcattttattgaaggtttctccaagattgccagaccaatgacagccttgctagcaaagaaggttgagttcaagtggaacccagcgtgccaagaatcattcgagatgttgaagcagaagttaacaacagctccagtgttggttctgccagatgttcacaagccattctcagtgtattgcgatgcttcgtacaccatactgggatgtgtgttgatgtangaagggagagtagtgacatactcatcccgacagttgaagattcat

SEQ ID NO: 28532 - DNA, 441 bp, Zea mays
  unsure (1)..(441): unsure at all n locations
nttctttatcatcattaaccttaacatagaaccattccgatttccaccctgctgcccatttgcttcggtagttgatcacaggatacttcgtagttttccgataagcaaaattatagcaaccaaaattgtcatgtaatccatcctttctagcctttgtctgatagtgcagttcgtgaactcggcaaaagctgtccgcaaacggttccaccgcctggcttcggagtgcccagatataaacactaagcctaacgatagcgttaggggttagctggtgaaaatagattccgaaattcttcagtatctctgcaataatcccatgaagggggaatcttaatccagcctttaggaagcttttaaaaataacaatttcatctttctccggctttggggtagtctcttctcccccgaagcgtaatagcttcttttgattntcagtaaaat

SEQ ID NO: 28533 - DNA, 256 bp, Zea mays
tcttgagttgtaggcctaagagccaaccatttaaatagatgtggtgaaaagagatggcaaacatctctgtgacagttaaaaaagtcttaaaaacatctccccataggggtgagaagcattatcattcgggggtggagttgtctcaactgatcctgtaaaaaaaaggagctccattgtaaaaacggaatgaagtgaaggaataatcaaacctgccttttttaccgattatttttatgattgttaaaatatgctaaag

SEQ ID NO: 28534 - DNA, 355 bp, Zea mays
tgggtatgaagcacataccagagaagattagggctggagtagcccaatgtttcaaggaagacgatcaaggtgtgatatggtttaaaaaccgcatagtaatgcccaagaacgaagagctccgccagcaaattcttgatgaagcacatcttagtcgctattcaattcatcccggaagcactaagatgtatcaagacttaaagcaacattattggtggacaaagatgaaaatcgaaattgcacgctatgtggctaagtgtgacacttgcagacgtgtcaaggccatacacatgaaaactgctggtccattacaatctttgccaatcccaacatggaaatgggaagacatcagtatgga

SEQ ID NO: 28535 - DNA, 337 bp, Zea mays
  unsure (1)..(337): unsure at all n locations
aaatgggtgcctctgtccgatactatcttttttggaatggcatgccagcaccccatccgagacatgtattattctgccaacaccgcacttgtatatgtggtcttgactggtatgaaatgacccgcctttgtagaacgggttactactacccagatagaatcataaccagctcgagtgcagggtaggccgactataaagtccatcccaatctcattccatttccactanggaatctgtaacggctgcaacaaacctggggcctctgatgttctgccttgatcctctaacacctgcgcatctggccacatactctgctatctctcttttcataccatac

SEQ ID NO: 28536 - DNA, 443 bp, Zea mays
  unsure (1)..(443): unsure at all n locations
taatgcctctaataaattggctaacttcgctaagtgccaagctcccatggttcgggataatgagggctatattctatatcctgctaattatcctgagcacaaaattaagagaattcatgctaagaaacctcattttgtttctcaccatgcttttatatataagaatgagtcttctacctctaggcaatcaacccatgttaaattgcctaaaaagaaaactcctactgcatcaaatgagcctaacatttcatttaatacttttgatgcatcatatgttttaactaacaaatcangcaaagtagttgccaaatatgttgggagcaaacacaaggggtcaaagacttgtgtttgggtacccaaggtgcttgnttctaacgtgaaaggacacaagactgtttgggtacctaagaacaagacctatattgttntgcaggtttatgcat

SEQ ID NO: 28537 - DNA, 423 bp, Zea mays
aagctctttgacaatagaatcacttcatctagttttagcaaagatgcaataatgcatgagtgaaattttaagaggttaaactatgtatgaagcagggataaatgcaaaggacatgctttctctttcttatgtataagatatgcaaagaatgcttataagaggaagatttaagtacaagtttaaatgaaaggaagtggttttacccttttgtaccttctcataaagacgttctctccattgtgcttatgtccttggtctcgtttgcttaagacctatgcttaataaaagtgtgtgaaaatattttgcacaagagagagttctataactagtgatctttttcaagttattgttagcataaatcaaatggatcacaagttgcataaatgaatcatgaattctcctttttccttagtgcatatcaat

SEQ ID NO: 28538 - DNA, 444 bp, Zea mays
  unsure (1)..(444): unsure at all n locations
tcaaccctcgcgagacctttccccgcctctttctaaccattgtaaattcattatcttatgtgatattctatgcatatttactttatttggtctcttatatggngtactgtttgtttcctaatttgaatggatggatgtatgtatgcttgcaatcgcatagagaacgattcggtcgaggagcccaaagaactcgcaggagaagcccctgagcagcagtcggttggtggaggcaagtgtcccttgacctatctctgtcctattcattctttaattcacctcccgcattacacatttatgcctaaggattgactagctttgttatccatgtccttgtttacctatttgggttggattattatatgttagctttatgctattgctcaaactctaatcaatgaacatgatgagattatctatgatacgctgttttcccttctcttatcg

SEQ ID NO: 28539 - DNA, 428 bp, Zea mays
agcttgtccttcaccgctcccggtccatcggcacgaacccgcatgaccttcaccattgtcgtcggccaccgtccttgtgctccacacctacacaccacaaggtgacagacatggttgcacaacacataactcacaccccagttagtccacgactcaacttgagaccctacctattgacaatcacttgtcatcaacctaaaccacaagggacaaatcaaccttgtgttcgcaatctcctccttgatgagtgcattgtcaacaccaccatcataagatctaaatgagcagcaaaaagagaaagaagaagaactcactcgaatgaccaaaagccggacaaaagccaaaataggtcatttagagcgagcaaagcttggtccccaaacaaatgggcaacgactcaacacgaacaagtgagagaatgtatagtc

SEQ ID NO: 28540 - DNA, 434 bp, Zea mays
tgtcctataatttaaaatgcacacattataatgtagaatggacacacatactgtagaagtttagttcaatctctcctaaaaattttctggcttcatccctgttctacgatctcgacgcgcgtgaccacttgtcctcgatcacctggcaccaagttctcatgcctcgagatgacttagtcatcctctatcttgatttggtcaacaccatctccacatgtagacttactcatatcgatatccccatgtgtcagccactaggtctatcttccagccctcggtctatcttccatccctcggtccatcggcccacgcctccatatccatctgtggttgctcctagtccatcagcatgaactcgtttgttcttctcaattgtcattgaccgccgtctcatcattcaatatctgcacatgagaaagccaagagacatgtcg

SEQ ID NO: 28541 - DNA, 409 bp, Zea mays
  unsure (1)..(409): unsure at all n locations
tcttcatccccacatgtgcttagcggtgatgccacagccagcccatgctagtcttaacaattaagcatgcatttagaccggcctcctcttttggaaaataaactaaataaaggttggcggctagtacacccttaaaagctagtgaaccatcacatcttctaaagacagacacatctacatttgtaaataaacaattatatcccatattacataattgactaacagataataaattatatccaagcgactcaactaanaacacattagatatagagtgctcggatgaaatagcaaatttacctaacccttttaccttgccttggttcccatcaccgaatattaattgaatcttgggaatcttggttttgacgtaggaggtgaacatcttcttctcccccgcatatggttt

SEQ ID NO: 28542 - DNA, 383 bp, Zea mays
  unsure (1)..(383): unsure at all n locations
acctataaaactcagcttgcattgcttnccttgtggaaaccaatgccatccttaatgctcaggcgtctcccattatagagcatgcttctagcaaatttaaacttttcattttcaagttcatgctcattaattttagcagtcaatttagctatatgatcattttgttgtttaatcatagcaatgtgatcgtcaatagcttcaacattattatctctacatctagtgcaaatggaaacatgctcgacagtagatgtagagggtttgcaaatatttaattcttctatcttagcatttaatatagcattctcatctctaagacaggaaatagaatcattgcaaatattcaatttttcaatcttagaaactaaactagcattttcatt

SEQ ID NO: 28543 - DNA, 434 bp, Zea mays
  unsure (1)..(434): unsure at all n locations
agctngagaacggaacaacagtggcatgcactatatcccttgaagaaaatgtcaaggactngaggattgccaagaggagcgaacaaaagaataaaatcaatacctcttccaaaagcctcaaccatgcctccatacaaggtaacatccaaggtaatgatcaagccacacttcacattaagaggtgtagtgaatgctttgaaaagggacacttgattaggtcttgtccctacattaaaaatggcttgactattaacaaggatgatagactttgttttgaatgctcaaagaagggacactttattaaatcttgtccccatttgaaacaaaaagacatagggttagaaaagaaagtttttactaaccatgtagcaagcaacaaacaaggaaagaagaaattttcaaaacttggaaaacgcctatgctacacatgccga

SEQ ID NO: 28544 - DNA, 446 bp, Zea mays
  unsure (1)..(446): unsure at all n locations
ctaagcttctaagggagagcacattntacgattaacaaatggtcattctgttaaagacagggacttgagcgcatgccaggcatggaagcaagttggagtccatcatccacacaagaacatcatgactaccgacaggccgcttgagctactccacatggatctattcggcccgattgcttacataagcataggcgggagtaagtattgtcttgtaatagtggatgattattctcgcttcacttgggtattctttttacaggataaatctcaaacccaagagaccttaaagggattcttgagacgggctcaaaatgagttcggcctaatgatcaagaacatgagaggcgaccatgggacggagttcaagaactcacaaatcgaatgctttcttgatgaggagggcatcaagcatgagttctcttctccctacactccacaacanaatg

SEQ ID NO: 28545 - DNA, 423 bp, Zea mays
  unsure (1)..(423): unsure at all n locations
ctcaacgaagcctgcccgagctggtgttcgggcgagtcgagggtgcgtccgttgcttgaagaggccctcgggcgaggcgagaattcgtctgagactactggtcccacccgaggctgggctcgggcggngcgagatcacgtcccttgagcagacgaagccttgacctgaatcgtgcccattagcctctacagcttgtgctgatggtggttaccagccgtgtttaggagtgttgggggtacccctaattacggtacccgacaatagcccccgagcctcaaagggagtgttggtactcgcttggaggctttgccgcactttnttgcgaggggaccggtctttctcggttacactttgttccggtgggtgcgcgcgagcgcaatccccgggtgtagcccccgaggcctcggaggggtggtttgactc

SEQ ID NO: 28546 - DNA, 442 bp, Zea mays
  unsure (1)..(442): unsure at all n locations
tctggtaatggacgtatagntcatctgtgcacgtgaacactgtttagatccttgtgattagaatttagaaaggaacttttggatctagtcgtataatgaccacaaaaatgtattggtcctgatttggaacttccgaaactatggccttattgatcttattgtttntgtagttccatctggctataattttttgggcaaattttggttcttttgcagagcaggttaggcttataaccaaatgctgattcaagatttcttaaatgtttgaaaatattatatgactcatgtccacaaatcctggagatggaattctttccaccaaaaaggggaagggtcatgaggtatgtgcattggacattgatgtgcttgtgctcatgtgctagacttcttgagctgtcgagtgtcagatgcatcgaatgccttctgataatataatgacatt

SEQ ID NO: 28547 - DNA, 422 bp, Zea mays
  unsure (1)..(422): unsure at all n locations
gcttcacggtctcctggggaagctattcgagggctccaaacgagcggaggtggaccggaatggtctggccacggggggcgccctctggcggctctaacgggtcgcggggagttcaccggagctgccggcgagctcgggagggttaggcccggtgcggatgaggcaacggggaagatggtcgtgcacgagggtgggctttatagccgctcgcgggcacggtacgggcgtgggcacggtggcggccgaaggcgcacgtgggggtgcgcgtgcgggcgtgctctgtcacgtttccgagtgtctgcccacgtcgaacacgtggtggtttacttctgncagtgttcaacgacttgtttggtcccttagcatgcagatctcagcanaaatcttgtgtacgggcttttctctgcaccaatcctattttt

SEQ ID NO: 28548 - DNA, 326 bp, Zea mays
  unsure (1)..(326): unsure at all n locations
actcaagctttaagggagaacacgtgatagggttgactaacgtacaattctaaaaagatagaccttgtgcagcttggcaagcaagtaaacaggtgggaggagcgcatcacagcaagaatgtgatgaccacttcaagacccttggagctgctgcatatggacctcttcggacccgtcgcctatctgagcatagggggaagtaagtatggtctagttattgttgatgacttttcccgcttcacttgggtgttctttttgcaggataagtctgaaacccaaggaaccctcaagcgcttcctaaggagagctcanaatgagtttgagctc

SEQ ID NO: 28549 - DNA, 282 bp, Zea mays
ctagtacacccttaaaagctaatgaaccatcacttcttctaaagacagacacatctacatttgtgaatagacaagtatattccatattacaaaagtgactcacaaacaactaagtatatccaagtgactcaactaagaacacattagaaatagagtgctcggatgagatagcaatttttcctaaccctttcaccttgccttggttgccatcaccgaatatgattgaatctgaggatccttgttcttgacgtacgaagagaacatcttcttttcccccgtcat

SEQ ID NO: 28550 - DNA, 201 bp, Zea mays
actaagcttttacctggatacgtatctgaaagtgagcatgccttcctttagtgggcagctcttttaccttcattctcttgacttgatagatcatctgggtcctgcaatctactcaaggaagtttgcttgcgtcgacacaacttagcacatggaatgcagttttaatttgaatacatgtgcctgagtggaatgtgggattta

SEQ ID NO: 28551 - DNA, 438 bp, Zea mays
agcttgtacagatagcaacacaacatgctaacacattgataagagtgctggaaatagcaagccagatgtcaaacctgtgagttatataagaaatactacaaataccatgactaatcgggaattatactttcatgatggtagaaggcaattcaagcaagaaaacatctccccttttccaagtattcttagttggagcagaagtaacccataactaaagtagatcagatccatatccttcttacgcaaaaatagaagggcaagcaaatagaatatacctagaactggaaaccacactagcttaacatgcagtcataactaatacagaattagagtacatacacaccttaaagcacagaaaacattgtgttctgcacagaaatatcaacgctacagggccaaaaccctatgaaaacataaaaaaaactaatagaactcaac

SEQ ID NO: 28552 - DNA, 404 bp, Zea mays
  unsure (1)..(404): unsure at all n locations
tgagataatgtttgagcatacaactatggatggatcaacttcatgcacaccacgacaaaatatggatgtagaaggacctgatgctgaaggagtagaaggtacaacagaagacaaactcgttagaattggcggcatgaaaaggggtctatgcactacaagtgttagtagtccaaagaaaagaacaaggagccctatggtcagaataatgaaaggaatgtgggagtctgcgactatgcatgaaactaatgttgtagcccagaaggcgatacagggagagtacataaaagaatccatcgatgcatggctttggttaaagaatgtgacgcgcctacaagaagtgaagagcactntatggctagtaaattatntgttaagcttgaacatcgagaggttttcctcaccat

SEQ ID NO: 28553 - DNA, 398 bp, Zea mays
agcttgccaatacctgtcgaagcaacagtacatgcccgcacagcaactacagaccataccagtaacctggcctttcgcatgctggggactggatatgattggacctttcaagaaagctcaagggggatatactcatgtattggtggcgattgacaaattcactaaatggatagagttcaagcccattgcttctttaacctctgctaaggccgtggaattcatacaggatataatattcagattcgggataccaaacagcatcatcactgacttaggatccaacttcaccagctcagaatttttgacttctgcgagcaaaaaagcattcagatcaagtacgcatctgtagcacatccaagagccaatgggcaggttgagcgagccaacggaatgatact

SEQ ID NO: 28554 - DNA, 440 bp, Zea mays
ggcgtagactacttcatcatcactagactcataatcactcgtagaaacatacgtaatagtacttcgagtgcttaccttgttctcctttgccatgaggcacgtgtgacgcttcgtggggaagagagacgatttgatgaaggccgtggcggcgagtccttcatcggcggagtcggacgaagaacaatccgagtcccactcttttccaatgtgtgcctcgcccttagccttcttggaaaccttcttgttttctctcttcccattctttccttgttcctggtcactatcattatcaggtcagttagcaataaagtgaccaatcttaccacacttgaagcaggagcgctttcccttcgtcttgctcttgttgggatgctccttgcgacctttgagcgccgtcttgaagagcttgatgatgagggccatctcattctcatttagcc

SEQ ID NO: 28555 - DNA, 433 bp, Zea mays
agcttcagttccatctatattatggattgcttttgagtctgtccaatttccttcggcccttctggcagcttcttgacttccatgaatagcaatgggcccttggtccgaaggtatcttcatgcaaagataagctggatgcagaattgcttcgaaggcattaagagtaccacgaccaatgattgcattgtaagggtactccatgtcaacaatatcaaacataacttgttcagtccttgtgttgttgatgaatccgaaggccactgacattgagattttgccgagtgctacaatctgccttcctccgaagccgcagaggggatgtgtggcatcaagaattttatcttcgggctcttgcatctgtctgaaggccttagcaaaaatgatatcagctgcactgcctctatcaaccaaaacattgtggaccagaaatcct

SEQ ID NO: 28556 - DNA, 342 bp, Zea mays
ttgtgccgggtgcacgagcttcattatcagacgaaggctatataatatgggctacacaagaatttcggctattacaactttgcttaccgcaaagatatgaagactccggtgatcagctatcgcaccaaatggccaaccggttggaagaatgagtggttttatgttaaggttgatgagaagaatgagaagatagttcaaagcccactggacctaaccttcgggttaactaggcccctgtgcgacatgttgcaagggtcaccatgccgagaagcttggggcgaattccgagttgtgtctgagcatatcggtaatagagatttggtgtaggaatacttagcttat

SEQ ID NO: 28557 - DNA, 188 bp, Zea mays
tgcacttaaaaaatttgttataattttgtttattcaccccgtcccaaggaacctctgactttatgaacaatggtgcggtgttttcactcccaaatgtccctgactttgctgggaactaccacaatccccctgggagacaggacatgttccaaaaattgaattttctcccacccaaacgcgcctttact

SEQ ID NO: 28558 - DNA, 434 bp, Zea mays
  unsure (1)..(434): unsure at all n locations
tcttcaccatgtgatcacgttatcttgagaaggatgatcaatgcactttcctttaagttgtgtcaagctcatatttagcctctcattttcttccttgagcttttgatatatatcatcttttgttcctgcaaaacctaactcaaaggaagagttgcttgtcgacggacaacaagcattaacacatggtaatatagtttgaatttgagtacatgtgcatgagtgaggttgttggaattttaaattttctatcactacctcatgagtaatgtctaacatgatatgatcatccataagattttcataagaacatagaagcatatcatgtttttctagaagagctagattntcaattnttagcttttctaattggtccttaagcaaggtatttctattcactaattgagcgatacaatgtanagcgttatcttgctcaa

SEQ ID NO: 28559 - DNA, 390 bp, Zea mays
  unsure (1)..(390): unsure at all n locations
atcacctattctcccccccccctctaggngctctcaattggtatcagagccattctcttcaagaaagggactaaccgcccaaagagattgatcctaaggggaagggaatcgtgatcaacgaccaggagaaagagtcctttctcaacgaacccaaagatgacaagcctaccgacttcggcttcggccataaacggaaggaagggaaaaagaagaagacaaggcgcatcaaggagattgtttactactacgacagcgacgaatcttcctctttccaaaaggacaacgactaccagccaaggaaaccgggtaattctaacttttcttttgactactcttcgattccgcanaggtcaaattcacatttgcttttcatttcactttggcagcccc

SEQ ID NO: 28560 - DNA, 421 bp, Zea mays
  unsure (1)..(421): unsure at all n locations
gtagcataggcaaggaatataccaattgattctagcctaactacgggtgcataggtttcaccaaaatccaaaccttcgacttgtgaatatcccttggccacaagtcgggcttttgtccttggcaccacaccatgctcatcttgcttgttgcggaaaacccacttggttcctacaacattttggttaggacgtggaactaaatgccatacctcattcctagtgaagttgttgaactcctcttgcatcgccaccacccaatccgaatcttgaagtgcttcctctaccttatgtggctcaatagaggaaacaaaagagtaatgttcacaaaaatgagcaacacgagatctagtagttacccccttttgaatatcgccgaggatggtgttcacggngtgatctcgttgaattgcttggtggactc

SEQ ID NO: 28561 - DNA, 229 bp, Zea mays
gctgaacttggcatacaaccgatgttcccttaatccgcgtcgtacaatccgccaatgttgagcatgctcctcttcattcttagaatatatcaagatatccacgatgaagaaccgcacgacctgttctactcgggcatggacaccgagttcattaaataatttaaatgggcaggagcgtttgttagccctgacgacattaccaaatattcaaatataccataccgcgtcg

SEQ ID NO: 28562 - DNA, 440 bp, Zea mays
tgcggaggttcttcatccccacatgtgctaagcggcgatgccacaaccagcccatgcaagtcttagctattaagcatgcatctaaaccggcctcttcttttgcaaaatcaactaagtaaaggttgtcgtctagtacacccttaaaagctagtgaaccatcacatcttctatagacagacacatctacatttctaaataaacaattatatcccatattacataattgactaacagatagtaaattatatccaagactctcaactaaaaatacattagagatagagtgctcattagatattgcaatcttgcctaaacctttcaccttgccttggttcccatcaccgaatatgattgaatcttgggaatccttattcttgacgtacgaggtgaacatcttattctctcccgtcatatggtttgtgcatccgctgtcgataatc

SEQ ID NO: 28563 - DNA, 423 bp, Zea mays
  unsure (1)..(423): unsure at all n locations
agctntaaaaaaattagcgctattagagaataacggcagtttgttgggccacttgatgaggtagaaatgacattgtgtttgaacgtaaatatgtgacaagttctctgcatgttcttcatttggctatccgctggctccgtttctgggttgtgctatagaagcctatctttcaggagttagttttgactatttgtcaacgtttgatggcaagtggcttgggagtttttttttacctaagctcatgggtgacaatctaatcttaggattgattactactggagtgttcgggttagtccagtttggaccgtgtgcatctcgtgcgatacaaaagtcggagtttttgttgtcaagagagttatgagttataactatcttgatacaataaattntcctttattgaaaaaaatagattntgttatatgt

SEQ ID NO: 28564 - DNA, 430 bp, Zea mays
  unsure (1)..(430): unsure at all n locations
tcatactcngctgcgttgttagaggcccggaatagcaactggagagcatacttgaggtgttcgcctccacgtgcggtgaagagaatccctgctcctgctccctgcagcttcagcgagccatcaaaatacattcgccatacttctgtcggttctggattggctggaacttgctggtctgtccactctgatatgaaatcgaccagtgcttgagttttgatggcagtgcgaggtcggaactcgatatcatgggatcccaactcgcaagcccacttggctattcggccaatggcttccttgttgtgaagaatgtcccatattggaaaaccagtaactactatgactttgtggtcgtcaaagtagtgacgcagcttgcgggcagttagaagtactgcatataatagcttctgaacctgaggatattttttcttcg

SEQ ID NO: 28565 - DNA, 307 bp, Zea mays
  unsure (1)..(307): unsure at all n locations
acttcaaagagagcaacttaatgcttgcatatttctagatagcagcacaacgggtaattgttttgctcctaactcacaaaatatgcatcgaaaattagtaaactaggattntatggaaagcttataaagtccactatacccttggtattaacatcacaacaatatttgacacttagaaaggtcaaacaatgctaaacgtaaattctgtccagacttggacataattcaactacccaattcaaaaatccataattggagtctcaaacatccaattcaggtgctcccagactttntagaaagctagtag

SEQ ID NO: 28566 - DNA, 430 bp, Zea mays
ttaatcacgtcttggattaaacctttctttttcttattctattttgatccttacaagggtttctcagtaactggcttccaaacaacctcaaacttttaccaagtgttcaacatcggataacaagcctctccaaaaaattccatgatttttggtgctcaactcttatttctaaaattccaatagtttttccaagagcacccttaattcacttaaaattttctgatagatctaaaaattctaaaatcaattttatcaggaactttacattattgtaaatcccacaaaaaaatttttttttgctatttttgatagctttttcaatctgccagctaaataataaagggaaatcaggaatagtgcctgggctgaaaccgacccaagacgatccagcaacggtgaatccccgcgcccgcagatccaacttttcatg

SEQ ID NO: 28567 - DNA, 373 bp, Zea mays
  unsure (1)..(373): unsure at all n locations
tctggtttgggagctnatatcttccgatggacacatggcatacgaaggcagtcagtggcgaatatatacataacggatacagatcgaacacngaaaacctacccggaacttgagtgccgcgtcagggttcccgggattcttgtccggatgcaccagctccgcctgaagaaatagaaaacaggcacaggcacccaaacaaaacaattgatgaaggcgagttcaatagctacctatgcccgtcacagcatgcaaccgtacggggcgcggacgacgcggtaggaaatgacggggttggggtcaccttaatgtaatacgccttcttgatctcggcgggggacgcgtcgacactgagccccaggacatcctacaacgc

SEQ ID NO: 28568 - DNA, 429 bp, Zea mays
  unsure (1)..(429): unsure at all n locations
agcttcacgggctactggcggagctagccgaagcactggcttgcccagaggatggctggagtgggctggccacgatggccgaagctctggcggcaatggcgggcggaattgagctcgccggagctaaggagaggtggctggccggtgagggtgagtgtggggcgaaatgaggtgcgcccggngaggctttatangcgcgggcgggcacggccgagggcgtgggcgcacggcggacttgaccggacgccggggtgagcgtgcgcgcgggttgggcgagctctggcgtgccgacagggtcgaacacgtgtgctcgtgcgttctgcccaagttctggcgcgtgtggtcactcatccgagcctgctctcgccttggtcagtgcacaaaaactcttcttcttcctacaagctaccaatcttgtgtgggggtcat

SEQ ID NO: 28569 - DNA, 328 bp, Zea mays
tcttgcgtctgaaggcacaagcaccaacggtgcccaatgaaattgtcattgaggccatgattaaggggcttcagccgggaccttcagcccaatattttgctaggaaaccccctcaaactttggagaagctgctccagaaaatggatgagtatattcgagctgacaatgacttccgccaaaaaagggaagaagcatacaggttctctgaaatgaccaggggcttcggaggaagaatccacccgaggcacgttaggtcaattcacaactctactcatagtgatgacagaggaagccaacaacagaggccacagtattcctcgcaagcttc

SEQ ID NO: 28570 - DNA, 335 bp, Zea mays
  unsure (1)..(335): unsure at all n locations
ctatggtgaacaaccttccggctttgaagatagtgagtaccctaaccatgtttataaactctctaaggcgctttatgggctcaagcaagccccaagagcatggtatgaatgcctaagagattttcttatcactaatggcttcaaagtccgaaaagctgatcctactctcttcactanaactcttgaaaatgacttgtttgtatgccaatttatgctgatgatattatatttgggtctactaaccaagtctacatgtgaagaaattagtacgatcatgacacnaaaattcgagatgtctatgatgggggagttgaagtattcttacgatttcagtg

SEQ ID NO: 28571 - DNA, 436 bp, Zea mays
tcttgtagctgctgccaaaaatgagaggtaaactgtgtttctcggtctgacactatcttcttcggcacaccatgaaggtagactattcgagacatgtataactcagctaacactgctccggtgtacgttgtcttcacaggtataaaatgggccacctttgttaagcggtccaccaccacccagatggaatcatagccggcccgggtacgaggtaggccaactatgaaatccatcccgatctcatcccacttccactgagggatctgcaatggctgcaacagtccggcgggcctttgatgctctgctttggttctttgacagctatcacaaacggcgacatattctgcgatttctcttttcatgccataccaccaaaatctcctttgtaaatcctgatacatcttttcacttccagggtgtatggagtaggctgtct

SEQ ID NO: 28572 - DNA, 429 bp, Zea mays
agcttagcttttgcacccttggggtactatgctagatagagttgagtcttttgggacaaatgatgtaatcgtgataaactctcttggaagcatgtttgatggatgttgttatcagttctaagtttggaaggaaaaatttatgcttttttaaatccttttgttgaagttggagtctatcattttgcttttgactcttttcgccgcgattaaatcttgaacttggagatatggtgttaagtatatatgtggtttttcagatggccgggaggcagcgtcgtggctagaatgagcgcgttcctccaccaccgccaccgcctcccactctgcaagagctgatggcttagcagaacgagatcttgaggcagctagctcagcgtcagccaccacctcagcactatggtggtggagaccatcagcgtcaccccgcga

SEQ ID NO: 28573 - DNA, 451 bp, Zea mays
  unsure (1)..(451): unsure at all n locations
cggacctataaaactcagcttgttgaatttacctacggatgcacttcgtgtttttacgtaatgaaatgtcaatgcatatgatgccatgcccaagttntaattcttgtaacaccaagggtgatacatatatgtggtctgtgggatctcccttatatgctgtcattgattcttgtgcacaagattgatgtcatgcaccaagaaagtaatgttgctaaagccctcatacacacatggatgcattttgaaaaaaacaaaggacaatctgaaacctcgaagagatctaacaatgctttgtgaccgactaccccaagtgctcaatgacaacagcaagccgccatgtgccttgttctgtttacctctaaagacagatcgaggtaatgagatggatgaaaaaattaaatttcctgatggttatgctgccggcttgataagagctatgaatntgaaaaca

SEQ ID NO: 28574 - DNA, 425 bp, Zea mays
agcttctaccacttgccccagtgattggcttaggatgtttgaatagctctcttgtaagtcgctccagcattcttgaggccgaacgacatggaggtatagcaaaaagctccaaacggggtaatgaatggttgttttttcctcatcttcttttgccaggctgatatgatggtatccagagtagtagtccaggaaggacaacatagaactccggcggtcgaatctaccacatgatctattctaggaagtccaaagggatccttcggacagtgtttgttgagatctgtatagttgacgcacatgcgccaatccactttattctttttgagtacaagaacaggatttgcaaaccactcaggatgcagtacttatctaatgaaccctgctgtgactaagcgagctagctcagcgtgaatagcttctctctt

SEQ ID NO: 28575 - DNA, 360 bp, Zea mays
tcagcaactggggctgcagctctgcaaccgctagaccccaatcatgagactctctcccttccggaggcccgaagccagaagaggaaggctgtcagcccgacaccgcccgaggatgagcttgacccagaaatcagagacatggagatgcttcatcaacaagggcagaggaagaaggaaaagatggcccagctagctgaacttgaaaagcagatagacgaagcttctgaagaagttcggcatcttactcaggatgagcagaaccgaaggcctcagaataaagaccttcatcaggagagtttcctcaacgaagatgactggtatgagaattttcaccatggaaattttgcttttgatgatgct

SEQ ID NO: 28576 - DNA, 421 bp, Zea mays
aaccccgcagatcaacctggaaatgttgattcacttttttatccccaagcccgaaccaacccacggttttctacaattaaaccccggctattcaactcgtttttttaaaatcaacttaatttagtgaaccatttacccttcccttaaaagccaattggatcatcacttcttcttaagacagtaacccctacatcatgtaatagacagatggcgccccttctgcattattgagaaacagaaaacaaattgtagtctaattgatctacacgaaaaacattggaaatataatgggcaggagatatatctattttacctcaaccctttgaccaacccatgaattccattcccgatcgtaatagcttttggggatcttctttttttcatatgacgagaacaaaccttcttctctgcatgtggttgg

SEQ ID NO: 28577 - DNA, 433 bp, Zea mays
  unsure (1)..(433): unsure at all n locations
tcatcattatttattaagcttcggctgtgtgcccttcattttttcatcttgctcctcagcttcgtcatcctgtacatattcaagcatttgaaggaaaattcaagtttaaaggaaaaggtaagcacaagatatgatnttgttaccggcttaagatgacttccagcttcgtcaccagctatgcttcgtccacccttcgtccatactagntttataaatctgtttcctatgcttcgggcaagactgggaatatcaaccagatctgctggtgataaactaaagttgggcctattgacaatttttccatgtgtgcaaccagatttcaggaaggcgacaactgtgccccgagaagctaccagggcacataaatcaccatgttcgactataatttcatcaaggtcatcaacttcaccctcgatatgttcgaaggcccctg

SEQ ID NO: 28578 - DNA, 410 bp, Zea mays
  unsure (1)..(410): unsure at all n locations
agcttgtggacccgttgcctatcaactgatgttgccacccagcatgtcagctgttcatgatgtattccatgtatctcaattgcggaaatgtgttcgcctacccactgaagtgctgcccgaaccggacattgagatagaaccagacttatcctaccaagagtaccccgtcaaggtattagatcaaaaggaaagatcaactcgggcaaggtcggtcagaatgtataaggttcagtggagtcaccattcagcagaagaagctacatgggagactgaggattttctacgctctcngcttcccgactttctgcccaaaggagtcggtacgtaaccccaaaaccctaccccacctgccctttgaattcaattataagaaaaacttagatagcaaggatagtctaagctgtggattt

SEQ ID NO: 28579 - DNA, 438 bp, Zea mays
  unsure (1)..(438): unsure at all n locations
acagcttgtgaacagtaccnattcagaagggagaaagcagcttcttctatcagccgaaacccatgctcttgtgtgaggacatagcagagcagaaggtgctgttgggctcccaattatccgaagaacaggagaaaaccttgataaggtttttgttcaacaacaaagatgtttttgcatggtcagccaatgatctttgcggagttaacagggatgttattgaacacttgctcaatgttgatccatcctttaaacctaaaaagcagaggcttcggaaaatgtctgaagacaaggccgaaggagctcggaatgaagtcaaaagactcctcagtgcaggagttatcagagaagtaaagtacccagaatggctagctaacactgttatgtgtaaaaaggccaatggcaaatggcgaatgtgtatcgactttacggatctcaaca

SEQ ID NO: 28580 - DNA, 428 bp, Zea mays
cagcttactcctccctgtgaaaggtcattcattatcgcccagaatttgaagcccgggacatacaagctgggccacgatcgaggggagggctacagcaacgcttggaacattcaataactacgtcgcttctacccttaaaaaggttcaaggcgctcatgtatctcgctttctttacatacataaataaagtctaaccatcaaggaaggatcagccttgtctctgcaaagcccgacccttccttcggggctagaagggggaaccccttctgcgtcaaaaattttctcggaaaaggtttctacccgaacgactcttgtgcctttcgactgcgtcgataaccaaaaccttatgacgagcgagagagaccttgaacggcaaggcccaccgagtcgaaggacctctacgccttcgggataccgatacctcactc

SEQ ID NO: 28581 - DNA, 441 bp, Zea mays
tctagatatgtcgaggtgacaaatgatgagggtgaattggtagttacgaaggtcgcagctaagcaacttcgtcggttgcccatcattcctcggctttcaaggctgttcctcaacaaggaaatagctctgcatatgacgtggccaaagaatggtgtacgtctcgtcactgatccagacataatggtccatccatcggacggtgatgcgtggaaggcatttgacgagtttgatcccgaatttgcaaacgaccctatgagtgtacggcttggtctatcgacggacggattcacacctttcaataccagtgcaagcccttactcatgttggcctgtcttcattgtgccatataatcttcctcctgagttggtcaataaagaagagttcatgttccttgcactagtcatcccaggccccgagcatccagggccaaagctgaatatg

SEQ ID NO: 28582 - DNA, 425 bp, Zea mays
agcttggtgtctgtgttgtcttttctgtcttggtagagctgactaaagcacctgaagactgttgagcgacttgaaaaacatttattctagtctaactaggactcgtgtattgtatcagtctttctgggtgagcaaggaacctaaaggctgatgagctcctgagttggaaccctagaacacgctttgtttgtaaccatgttttcttgcccacaccatttgttatcttagcaccgcacaacacaacactcatagagttcgtcatgatgtgtgccacccataaaccttcttctcgtttaatctgctacttcttgttgacctgcgaatttatcttgattcttgcagtacactctgatgaaagatcctgtgacactgccatcatcgaaggtcacagtggatcggcccgtaattatcaggcatctgctgag

SEQ ID NO: 28583 - DNA, 371 bp, Zea mays
  unsure (1)..(371): unsure at all n locations
tcttcaccatgtgatcaccgctatcttgagaacgttgggcatatgcatttcccttctagatgtgtcaagctcttccttaccctctcattttcttctttgagcttttgataagaatcatcatttattcctgcaagttctagctcaaaggaagatttgctngttgacaaacaacaagcattagcacatggtaatatagtatcaatttgagtacatgtgcatgagtgaggttgttgggattttaaattttctatcacaacctcatgagcaatgtttaatatgatatgatcatctctaagattttcatgagagcataggagcatatcatatttttcttgaaaagctagatttttaatttttagcttttccacttg

SEQ ID NO: 28584 - DNA, 410 bp, Zea mays
  unsure (1)..(410): unsure at all n locations
agcttatagctcacaaaacgatattgtgtctacatgtccctgtaggatctgactgcttgctgcattcttattttctttaattatttggctcttgttgggtacttgggtttcaactctactaaaccccagcttcctttgaagcaaaagattttgttcttttcgttgtagttgtaatccctatgctaaagttgacccatttggttgtccagtcactctcatttatgttaattgaaagctttccccatcttactagctntggcaaagggaggcaggaagcttgaggcagcaactgcataacttgcaagagcaccatcggtatgaccctcaaccaacctacgataaatagttcaaatcattgtgagagaaaaaatggcctactcnaatattttttctagtactctaacagacta

SEQ ID NO: 28585 - DNA, 439 bp, Zea mays
tcgcacctctgaactaactcggctgcatcacttttcgctgttggccaatagaaacccgacttggagaccttcccgactagtgtcttggatgctgcgtgtattccacattgtccagcatggacctcatctagaagtcgcttcccagtagatgagagaatgcatttcatgaggacgcctgatgcaccccttctgtatagtgtctccccaatgagtgtgtaatgagctgactgtctagcgatgcgctcggctgcatttttgtcgtccggttcctcttcatttttttatatatctgatgatcggccttctccagtcatcagagtctgactctggttgattcacgatattacactcttctgtctgatccatcgagatgcttggctgtgatatttcttgtacaaagactccaggtgggacctgagttcgactggatcctagcttg

SEQ ID NO: 28586 - DNA, 369 bp, Zea mays
tgtcttataatcatcatctcgatcttcgtgtatgtgagtgatggacgccatcatatatgttatgatcagtgctacccctacctagcgcgccaactattgaagaatcctcgatagttcttgatgaatttacgaggagtatgcacgtgatcaataatcaaaaggtaaaacacaagggacacgagatttatactggttcgggctcttgaaagagataatacagcatgtctaggttggcggtggctaccttatgattattttccatgccccttgagggacacctctcctccttttatagtccaaggaaggggttagttgtgtcaagtccgagtccgaattgctgaagggatccaaaccaggagcagaaacttg

SEQ ID NO: 28587 - DNA, 362 bp, Zea mays
  unsure (1)..(362): unsure at all n locations
ttcttttgtcttagcgntagnctcgctcttagttaagtcttagttagacagggtagtttgctatatcctgtgcattcatgtttgtcatgatgaactatgtttggtttggatctttgtaatgattgtcaccagagtgtgggtatcccctgcattttggtttacctattatgttgataaagttagttatatagtgcggaaaccttttattccactttcctctttatctgagaagctgtgtggtctgtgttggagatcagtgaagatgctcatctgttcagtgctgttgaagaattctatcctctttccttatgctgcaagatttgccagatcagttctgatgtgtggttgcattctgcagatgt

SEQ ID NO: 28588 - DNA, 356 bp, Zea mays
atcttatttatgtgaattctggttagaaaagatagccctccttgggcatatcttgactgcaaaagcaatagaagtagaccccgtccacgtagaaacagtatccaaatggaaatagccatccaacgtcagagaaatttgaaactttctatgaatggtaggatattactcgccgtttaatcaaaggattctctagcatagcaaggcctatgaccgagctcctcaagaaatacaataagtttgtgtggtcccccaaatgtgaagaaagcttccaaatcataaagaaaaagctcacaaccacacaccgtttgacactgccagacatacatcacgatttccgccgcttttgagatgcttca

SEQ ID NO: 28589 - DNA, 138 bp, Zea mays
ttggcttgagggtttggttgccaaaagcactaactgagtctataaatcaagtttttctttttcacagtttaatgtgactctcttgagactaaatggatacctatcaattatacttggtatcaacatttagcaatcaca

SEQ ID NO: 28590 - DNA, 368 bp, Zea mays
attttgttcttccctcagtatatcacccacagtccaatggagttgtggaacgcgccaatggaaaaattctcatagctgtcaagaagatgctcctcgacgaaaaaagggcaggtgggccgatttgttacctgaagcggtctgggcgctaaacacgactgagtgcaaggcgactgggttcacccctttctgccttctatatggatcggaggccatgaccccacaagaaataaagcatgggtccccgcgaacagtttcgtcagctgtccccgacgtggacgaacccacttcgaaggatcttatcgatggagaccatgtcctcgctctacaggctctaaataaataccaagcccagacaaaagcatgacgcg

SEQ ID NO: 28591 - DNA, 179 bp, Zea mays
  unsure (1)..(179): unsure at all n locations
ttctttgtgtggaatttgggagaggatttgatctcttgagtgtgtctagaattgaatgcctagctcttgtaagtggttggaagtgtgaaaacttggatgccatgaatggtgggtggttgggggtatttatagccccaccaccaaactagccgtttggtggngctgactgtcgtatggtg

SEQ ID NO: 28592 - DNA, 356 bp, Zea mays
tttttttcttaagggagagcacattttaggactaaccaatgttcattttgagaaagacaggatttgtagcgcatgccaagcagggaagcaagttggagcccatcatccacacaaaaatgtcatgactaccgacaggccgctggagctactacacatggacttattcggcccaatcgcttacataagcatcggcggtagtaagtattgccttgtaattggggatgattattctcgcttcacttgggtattctttttacaggaaaaatctcaaacccaagagactttaaaaggattcttgagacgggctcaaaatgagttccgcttaaggatcaagaaataagaagcgacatgggacg

SEQ ID NO: 28593 - DNA, 372 bp, Zea mays
tctttcttataaaaatctggtatgaatctgcgataatatccagctagtccaagaaaactctggacttggtgaacagtggttggggatttccactccagaatatctttgaccttgctaggatctaccgcaattcctttagccgataacacgtgccccaaaaattgaatttcctccagccagaacgcgcacttgctgaacttggcatacagctgatgtttcctcaggcgcgtcaatacaatccgtagatgctgagcatggtcctcttcattcttagaatatatcaagatatcgtcgatgaagaccaccacgaacttgtctagctcgggcatgaacaccgagttcatcaaataggtgaagtgggcaggagcattt

SEQ ID NO: 28594 - DNA, 365 bp, Zea mays
  unsure (1)..(365): unsure at all n locations
tcattcttttangttttcttcatttgggttaagttttgcccctttgagccttatttagggtcaagttccctatccagggtcctatttgcaaaacactaaaaacaatacacttgtttgaaatttttacctagtgaatgcattctaagtgtgtcaaacatatgcaatgccaatgtttatgatgccatgctcaagttttagttacagtaacaccaggggtgttacaattatcctctcattctctttaatccaaacattctaattgacccttcaactttgaatgctactatctagagacttgctctagcccataaatgatttcttccataacaaaacctttagctcgcaccatgtattcgtttcataca

SEQ ID NO: 28595 - DNA, 230 bp, Zea mays
tctttcatatttattgaaataatttttctgaaccttttcctcggccctccttcaaccatatcaaggcctaaaagaaaattaccttttcttacaaggttcaagaccaagttttagcatagtacgacatcgtcgtccatataaagcttcaaagggtgccatcttgatactttattgatagctattattatatgaaaactccgccaagggcaaacattcattccatttctgtg

SEQ ID NO: 28596 - DNA, 388 bp, Zea mays
cggattgcattttttttatggtcccccatcccgacatgtgctaaggggcaacgccacaggcagaccatgctagtcttagcgattagacatgcatctaaaaccgagactgctcttattgcataagttcatgctaagtaaaagttatggcgtactaaacacacgccttagaaagctaatgaaccatcacttcttctgaagactgacacgtctacatttgtgaatagacaattatctcccatattgcatacttgactaacagataacaaattatatccaagagactcaactaataacacattagatatagagcgctcggatgaaatagcaattttacctaaccgctttaccttgccttgattcccatcaccgaatattattgaatcttggg

SEQ ID NO: 28597 - DNA, 352 bp, Zea mays
  unsure (1)..(352): unsure at all n locations
catctttattttcaaagggaccaactggtgagagcacaatagctaccgaagctgcaccttcggaagctacagccggcgaagctggcaccggcaaagatgtagatttagaacacacaatttctaatattgataagatacttctagacatggccgcagaagaagctgccgcagccactgaagaagctatggccccagagcctgataaggagaaggaaatagccgaagacactttgaaagaagaaattntcaactttcaaaacttagttggacaggagttgacgaaggctgagaaagaagagttaaaagaatatgccatatcttgcggatatcaaccggnggcactagtcttcgg

SEQ ID NO: 28598 - DNA, 403 bp, Zea mays
  unsure (1)..(403): unsure at all n locations
aacctcggacccgggatccttagagtcaccctccagccttccattctaattcgcttggctaccaaggaattggttttaaagccgaaggaggatgaagtgttgtttttaaagcctcttcaggacaaggccttccgttcttctatattaatataataagggaagttttgaaaaagtttgaaatatatcttcatcagctgacacaaaatgccattgtcaagctgagtgtttatatatgggctctttgaagctagggtatgagtgccaatgccgaaggtttctgtcgagtgcatgagttacactaccagacgaaggccaggacggatggccttcacaaaaactttggatgctataagtttgtgtaccaaaaagacaccaangccccggtaatcggctaccgcacaaa

SEQ ID NO: 28599 - DNA, 376 bp, Zea mays
attttttacttttttacaggctatggcagtacgtgttctccatccacggcagcatcacgtacgcatatggcttcaataacgacactacagctgcatatgcacgcacacgatatatagtccatgtacacaaaatgcatgcacctttcgtcgaatctaaacgttgtgccaagagagcatatataattcctttagaataaagttatgggtatatatatgagcacatgcatgtaacatatgttttggcttatatattacttgtgcattgtctagtacgcatggtcccaagacctggagtggaggccggccgggtctccgcaccgtctcttcacgtgagcatgccccatccacatgtgtttcgcgcgtccatgcaatatgt

SEQ ID NO: 28600 - DNA, 366 bp, Zea mays
  unsure (1)..(366): unsure at all n locations
tattcttaagctacataagcagccattcctagcaaccatgccaaggaattttcctaagactcctgcctcctctccaataggttggccgagctcgttacagttaactacaattcgttttcctttttgaaggttccaaacatgtttaagtttgttcggaccacgacttattgcttcattagtttgacctatgcagttttatgttagaaacaattaaaagaatggttgaaattttaaaataaattacaatttatgaagtgtaagaaccttcaacagaatcctctatatctgcatcatcaggagaagggtacactccagaagtagtctcaaaagatgttgtatcttttttatgatgatctgaanacatat

SEQ ID NO: 28601 - DNA, 364 bp, Zea mays
tttcttgaccaagatattcagggatatctaatatatccctcatcatacatagaacaaatacaaaatcaaatgatattagatagttgaaagaagtatctccatcggcccggtttgcaccagcagatgaatctgcagctaagttttgtagaactgaactgacagcattgaacatgtcaataaaggatgaaatagagcctaagtgtgaaccccaccttgtctctcctggacgtttcaatgagcggatctgattcactcctttaccggtctcaagctcgtcaatatctaacaagcgtgcacagtcaaccatttgagcatcatgaagctcatcgtgacgcttggatgatgagtcaactgtgttcacgat

SEQ ID NO: 28602 - DNA, 359 bp, Zea mays
ttatcttaatcccgaaaaatgtgttttcggggtaccagcaagaaagttactcgggtttattatcagccaccggggaattgaggctaatccggataagattgaagctatcatgaagatggaagcgcctcgatcacaaaagaaggttcagcgacttactggatgtatggcagctctgagcagatttatatccaggctgggggaaaaaggtttaccattttacaagctactcaagaaggtggataagtttcagtggacttcagaggcacaggaagctctagatgcactgaagaaattcttgacaacaccaccagtactgaaaccaccacgacgagctacgtcaactcaaccagctgaagatc

SEQ ID NO: 28603 - DNA, 357 bp, Zea mays
ttttcttgtaacccctactacaagcaccccggtgcaagataatataagcctcatcctccctcttgtgtttcatcttgcatcaacccatctaagcagggacacgcggcataaaattcactagtcggttcggttgagggtcccccgggtccgaaacaccgacaatatgtttatcttctctggtcatcaacaatggatcccccaaataaggaggttattaaatgtggagttttgccttccttggtacaattgctctccatggaggactaccctcagctcaggtattacaggaaactacttttgaggcacattcagtcttaaacttttgcattagctttatgattatgtacgtgcattaca

SEQ ID NO: 28604 - DNA, 312 bp, Zea mays
  unsure (1)..(312): unsure at all n locations
tcaatcntgggacattngagncgccccatgcctggccgctgtcagcgcctacggcccagcccgaagcgggacgcggtgatgaccaagaggtcaggctgttgtcggtcgcctggaaccaagattgcggatgcttcgcggctggtaccaacaaaggggttaggatctttaactgcgaccctttcaaggagactttcaggagggatcttaagagcggcgggttcgggatcgtcgagatgttgttccgttgcaacatccttgcccttgtaagagggcggctccatgtgcagtacccgccgaacaaggtgatgatct

SEQ ID NO: 28605 - DNA, 366 bp, Zea mays
tgcttgtctttctttatcaaacggacgtgaaaagtgccttcctcaacggaccgatcaaagaagaggtctatgttgagcaacctcccggctttgaagatagtgagtaccctaactatgtatataaactctctaaggcgctttatgggctcaagcaagccccaagagcatggtatgaatgcctaagagatttccttatcactaacggcttcaaagtcggaaaggccgatcctactctatttactaaaacacttgcacatgatttgtttgtatgccaacattatgttgaagatattatatttgggtctactaacgaatctacatgtgaggaatttagtaggatcatgacacaaaaaattcaaatgtcta

SEQ ID NO: 28606 - DNA, 355 bp, Zea mays
cgcggctttctttcttatagggtttctgagatgactaagggcttctgaggaagaatccaccctatgcatgttagatcaatccacaactccagtcagagtgatgacagaggaagctagtttcagaagccacagcatagctcacaatcttcatggcaacaacaaagctctttcaggccaccagcttcaaggggcagaggcagcaagggcttccgaggaagatatggggatcagcccacgaaactctattgcttattcagtggtgaagacaagggccacaataaaaggacatgccaggtgaccattcagaagcaaaaagagattaccgaagcataagcgcggctaaatcagccgaagc

SEQ ID NO: 28607 - DNA, 360 bp, Zea mays
  unsure (1)..(360): unsure at all n locations
tgccaacttttttttggtgaccgaaaatagagatttggagaatggaattagggttcaaatgagtcaggttgatgtgataaaaatcaaggaggccacggaaaaaagggatatggaaaggccgaggccgcgaagaaagaaaggagtgtaaactactgactcgtgggtatcttcggttgggacagtagtcccgtggcaagcccgccaagaacaaagttcccgcggaggaagaaccctgatggagacaaggcggagaagctcagcttcagaaattacagacatgtggttacctgcgaagggtaactggctgttngggtcgattgtggggatcactgcagcagacgagttcgcagtttttctctt

SEQ ID NO: 28608 - DNA, 360 bp, Zea mays
agcttggaagacgcgttaaaccaactcgacgaagctcgcgatgtagcactcttgcggtcgacaagatatcagcaggcgctacaaaggtaccacaaccgccactttcgaaggaccctgcaagtaggagacttagtacatttacgggttcagactaacaaagaccgacacaaactgtccccaccatgggaggggccatttgtagtcatagagggcctcgagaaaatcgaaggaagcgaaaaccgaccaaggccacccttcgagagagccctggtccagggaactaaatgaaacccaagggaccactctccggtaaggacccaaacccgttcaaattcctttggcagggaccaaaaaacgaaa

SEQ ID NO: 28609 - DNA, 335 bp, Zea mays
ttttggttttcgccgatgatccgggccttagcgctggtcaaaggctaagttatgccacagtcaggccacagacgcttggctgtccaagatggagaggaggttgacgctctcttctgtcttgctggcggtgctaccttccttcaacacgaacggcaagcaacaaccttttagttctcggcgatgcccaaatgccgtgcttatgggagagagtctgctactactctgaatgccatgcgcccgagcctaccaggatgacacacggtctacctccagcgccatatgcatgacgtcgacaggttaagtctcggtgcccagcctgacctctactttagcac

SEQ ID NO: 28610 - DNA, 358 bp, Zea mays
tagcttctaaagggagaacacgtcgtaggtttaactaatgttaccttcgaaaaagatagaccttgtgcagcttgtcaagcaggtaaacaagtgggaggagcgcatcacagcaagaatgtgatgaccacatcaagacccctggagctgcttcatatggacctctttcaacccgtcgcctatctaagcataggaagaagtaagtatggtttagttattgttgatgacttttcccgcttcacttgggtgttctttttgcaggataagtctgaaacccaagggaccctcaagcgcttcgtaaggagagctcaaaacgagtttgagctgaaggtaaagaagataaggagcaacaatgggtccg

SEQ ID NO: 28611 - DNA, 367 bp, Zea mays
tttattcttttatgatctgcatatatatggcatatatttcccaataaataatgaccccatattttaaaggcatgaaccacagcagctaattctaagtcatgagttggataatgtttctcatgccagcgcaactgtcttgaaacgtatgctataactcgtccttcttgcattaagacacacccgagaccactgcctgatgcgtcacaatacacatcaaaaggcttttcaatgtccggttgagctaataccggagcagtggtcaataacaccttcagctgctcgaaggcttcgttgcatcttgaggactagttaaatttcatatcgttctttaataaacttgtgaatggcttcacaagcttagagaaat

SEQ ID NO: 28612 - DNA, 351 bp, Zea mays
tttcttgcacgacggcggttctgcgagacgtggcaaggttctggttctggcgatgagggtctgtggaggggtccgggtcaacaggggggtttgatttttttatagcgccaggggaggtcggtcttgaggcgcccacaaccacccccggtttccatggcgaagacccgagcatcaccgtgtaacgtgcccgcggggagagacgagctgacagattggcccacagatcggtggcagagaaaatgaacgcgcgatgcggtgtgagtatggacagcgggcccatggtgtcagcgtgccacgcacagtcggtttgggccgcgcgtacggaagtcctattgggctgaattcgagtct

SEQ ID NO: 28613 - DNA, 350 bp, Zea mays
tatcttctaaagggagaacacattttgggactaacaaatgttcattttgagaaagacaaggtttgtagtgcatgccaagcaagaaagcaagttggagcccatcatccacacaagaacatcatgacgaccgacaggccgcttgaactactccacatggatctattcggcccgattgcttacataagcatcggcgggagtaagtattgtcttgtaatagtggatgattattctcgcttcacttgggtattctttttgcaggaaaaatctcaaacccaagagaccttaaaaggattcttgagacgggctcaaaatgagttcggcttaaggaccaagaaaaatagaagcgacaa

SEQ ID NO: 28614 - DNA, 365 bp, Zea mays
  unsure (1)..(365): unsure at all n locations
agtttttagagaatcncgcgatcgaattggcacgaagatccattttgcatcagttcgacatccggagtcaaacggacttgtcgaaagagctaacgagatcataatgacaggaataatgaagtcaatcttcaatcagcccaggggaaagtggtcagacgagttaatcaaagtggtgtggagccataacacaaccatgtcaagatcaacaggctttaccccattcaaactattgtttggggatgaagcaataaccccggaagaggccaaagcaggatcaataagaacagtagcttctgcagaaagcaaagacgaagctgattgctctgttgaaaaagatgctatagaagggatcagacttcaagctg

SEQ ID NO: 28615 - DNA, 363 bp, Zea mays
tcattctttaatgcacaaattctccccctttgacatcaaacaccaaaaccatattcaagcaagaacataggatgatgtcaagggacagcagggtgttaaggaggagagacacatgaccaacactcccccttacttattgagcatatgcactaccaacatatatgcaagaagattaatacttacttttgtacctttaccaagttgtagtgtacttcccatcttgaaggtatttaatctcacgtgagcttctccacacttgtgcctgattctttatcctaactttttcttgttgctaagacatcaaacttagaacaagttatagtattgtgcacaagaagaaacttctattctaatgattatcaa

SEQ ID NO: 28616 - DNA, 357 bp, Zea mays
atcttgcacggtaagctacacatgacacacgagaagggaatctgggatcacaagtagttagcaagtgcagtgagcatgtggaggagtgagctaataagatgtcacagaaaccacaagtccacaaagcaatgtgatgtcttctttttcaaaaaaaagaaattgtatacaaaaatatttggaatcgtcagttcactattgcatgacatttgtttgttcctgaatactaaataaataattcaactacactgcacgtcgttgacatgtaaagcaattaaaaatatgaccaaggagcaaaaaaaggaagaaaggaagcaagaatttagtagtggaagaagccagcaaacgagggcgtgattt

SEQ ID NO: 28617 - DNA, 334 bp, Zea mays
attttttttgttatttttgaaccaagctgcatcttgaagcctgcttccgaaaaaaaagtattaaagtttcacaagttcataattaaatggccagagttcgctctacagctagggttgagcgtgagggggaccaaactgaagcttcggagaccgtgcccatctccgaagcgatgcatcgcttcggactggggactactgaagaaatagctgctgccggagcaaaccccacatgttgcgaacgagagggaacattgaagaaaccgactccgaagatgactaccgtattgccatgcccagcaaacccagccacctagacttcggaaaatcgactgtt

SEQ ID NO: 28618 - DNA, 364 bp, Zea mays
  unsure (1)..(364): unsure at all n locations
cattttatataatacacaattttggaaccttcagactatggaatgccaagctatccgcgagatcgtccttcgtcatggtgcaaaggccagcttcgagcttcgggaaccccatgcttctagccatctcccggcagacggataattctttattgcctgggagacagtataggaagtcatcttcgtctgtcccattgaacactacggcccncttcggatacttcaattctcgggcatagtgattggcttcaaaaatctcttcttcagatagtttcttccctgaagcatgtcacacaatataatcacgtattttggaagatgcttcggnggtggcagtgtcgatttcctcaatcaaaatcggctctgt

SEQ ID NO: 28619 - DNA, 360 bp, Zea mays
  unsure (1)..(360): unsure at all n locations
agctttaaaagtgaactacaactttggtatttttacctccacaggattcagctgttagcaaggtcaaaaagtgcaattacagcagcacttgccagatttggacagattctgacttgcaacttcaaaaattcacaactgaagattcaggcatccaaacaaggtgatcctagactttatggaaaggtaataaaattgtctacatatcatttataaacatcttaaggtgattcaatatttaattaaggataaaatacactagaaggctttgctgtccagaattggacagattcagtcttcagagtttaaacatccttaacttaatcttcagatcaccaaanatagtgatccaagactttttgg

SEQ ID NO: 28620 - DNA, 288 bp, Zea mays
  unsure (1)..(288): unsure at all n locations
tgcttctttacaacgacgaggcggacggggcaccgaaaatgagaaggggcatccgaacgaactagattgagcaacaccaaggtgaatgaggacatatgcataaatgtggggagtaggctgaggaaaaagacatggtcaaaaaggctagaccggtaagacaagaaagcccagaatttgattgtgttttaatccatcttaaacttagtttttatatgtttaatagtagatgtatattangtttaagaggttatagaaaactgggggggggggcatatgtcctactttgcg

SEQ ID NO: 28621 - DNA, 371 bp, Zea mays
atctttttttagaagctgatggtggggtaactttgttacaatcccattatgtggaaaaggtattgagtcgctttggttttagtgaccgtgatcctgcttcaacaccttatgatcctagtgtgctattgagaaagaatcagagaatagcaagggatcaattgacatactcccagatcattggctcgctcatgtaccttgcaagcgcaacaagaccagacatctcatatgctgtgagtaagctgagtcggtttgtgtcaaaaccaggagatgatcactggcgtgctcttgagagagtgttgcggtatttgaaaggtactatgacatacgatattcattatactagaaacccaaaagtgcctgaaggctattgt

SEQ ID NO: 28622 - DNA, 366 bp, Zea mays
ttttctttaccaaatggacgtgaaaagtgtcttcctcaatggaccaatcaaggaagaggtctatgttgagcaacctcccggctttgaagatagtgagtaccctaaccatgtttacaaactctctaaggcgctttatgggctcaagcaagccccaagagcatggtatgaatgccttagggattttctcatcactaatgaattcaaagtcggaaaggccgatcctactctattcactaaaactcttgataatgacttgtttgtatgccaaatttatgttgatgatattatatttgggtctactaacaagtctacatgtgaagaatttagtaggatcatgacacaaaaattcgagatgtctatgatggg

SEQ ID NO: 28623 - DNA, 362 bp, Zea mays
  unsure (1)..(362): unsure at all n locations
ttttttcttcttatggcaagnctacattaattaagtgctaaccaaacatttttaccaaaaaaggtgaactaaacaatcaaatgcgcatttgcagatttttggacagcaacacaacagttaccttgtttaatcataactcttcaaatattaatccaaaaatagcaaacaaggactttatggaaagcttaaaaagtgctctacaactttggtatttttacctcaacacgattcaacacttatcaaggtcaaaaagtgctaacacgacagctctgtccagatttggacagattcagacttgttttgcactagtgtagcctccccataatcgttcagtgtcatcatatggacaaatggcatgatta

SEQ ID NO: 28624 - DNA, 359 bp, Zea mays
tcattcttcttgtaatagtttatgtcatactgaaaacatatggttagccacgtttttgaggaccttcggaagaggaaggcccccaacacaggtactacccaaaaattcagtggtaaacaaggcataaagatagtcaaactaaagtaacctattgggttccatcaaaattaacctatgcagatcattatgattaattagaacatgacagtgtaaaaagaagtgatcaagggcacaacttgcctaggacttgagattctaggtaccaacttgctcttcaggtgactcgtaacctcgtgctagttgtagcaatacaaacaaacatagtataggcaaaattaacatcacaccaaacataagaa

SEQ ID NO: 28625 - DNA, 357 bp, Zea mays
tctttctttaaaaatacctagacacagtccgaaggatcgaagcttccttcgaaggattttctgttaagaatatccctcgagggcaaaatgaacatgctgatttgttagccaggtctgcagcacaagggctgccgctaccttcggatgtattcttcgaaacaataaaggcaccttcagtggagttacttgaaagagcagttcttactatttctcctgtgtacagggaagattggagaactgaaataatttcttaccttcagggcaacttcctatcagatgaccaagcttataataaaagaatagaggcaagagctcgtccgtatatcattatagaaggggagttatacaagcatggag

SEQ ID NO: 28626 - DNA, 362 bp, Zea mays
ttcttctttacgtccttgacttgggctgggggcctcattgcctcgattgctctgatcttctccgtgttcacttcaatgcctcagtacgaaaccaggaatccaagcaacttcccggcggaaatgccaaaaacacatttgtccaggttcagcttcgtgcgggtgacccacagcttgtcgaagactagggttaagtcttccactagggtcgaccctctcttagtcttgaccatgatgtcatcgacgtagacctctactttgtccctaattaggtccccgaaagtctcactcatcgcccgcacaaaggttggcagggcgtttttcagaccgtacgacattacaacatagcagtacagcccatccac

SEQ ID NO: 28627 - DNA, 359 bp, Zea mays
  unsure (1)..(359): unsure at all n locations
tgtttttttttgtgaaggntcttcatccccacatgtgctaaacggcgatgccacagccatcccatgctagtcttagcaattaagcatgcatctagaccggcctcctcttttgcaaaatcaactaaataaaggttgtcgtctagtacacccttaaaagctaatgaaccatcacttcttataaagacagacacatctacatttgtgaataaacagttatatcccatattacaaagttgactcacagacaacaagttatatccaagcgactcaactaaaaacacattagaaatagagtgctcggatgaaatagcaatttttcctaaccctttcaccttgccttgggttccatcaccgaatat

SEQ ID NO: 28628 - DNA, 355 bp, Zea mays
tatcttcagctccatctatgttatggattgcttttgagtcagtccaattgcctttggcccttctggcagcttcctgacttccatgaatagcgatgggtccttgatccgaaggtatcttcatgcaaagataagcatgatgaaaaattgcttcgaaagcattgagggtgccacgaccaataattgcattgtaagggtattccatgtcaacaatgtcaaacacaacttgctcagttctagtattgttgatgaacccgaaggtcactgacatggtaatcttgcccagtgctacaatttgtcttcctccgaagccacagagaggatgggtagcatcatgaatcttatcttctggctcttg

SEQ ID NO: 28629 - DNA, 280 bp, Zea mays
tgggagacacacgtgataggtctaaccaatgttcatttcgaaaaagatagaccttgtgcagcttgtcaagctgggaaacagggggaagctctcatccccccaaaatgtgatgacacatcaaaaccctgaactgctacatatgacctcttcgacccgcgcctatctgagctttgacgaagtagtttggctattatcgtgatgacttcccgcttactgggtgtcttttgcagataagctgaacccaaggacctcaacgcttctaagagagctcaatgattga

SEQ ID NO: 28630 - DNA, 354 bp, Zea mays
  unsure (1)..(354): unsure at all n locations
agctttatttgatgtggcgccaggggacttagcttgatagacaaggattcaatcattacctttagaatttctaccacgtccgtagcaaaaggtgttgcaggagtttcttcttctatatcagtcgccttctgcttcggtgccgtagcttttctcttcttcggagcaactggtgtcggctcagggctcaatttcctcttcttcaggttttcttcatcttcttttaccattctagcggcctgtctgcccacaacactaacaactctttntcttttttgcccttcggcaactttgttcaaacgctcataatcaggatattcaaaatttagtgcatccattacccgattcaatctttgc

SEQ ID NO: 28631 - DNA, 197 bp, Zea mays
agtggaagtttgcaccagctcactataccacgtcgattgttaatgacgctcgctaccatgtatgagcagacacgttctcttgtagccctgatagactcacacttgactttgagtaacttaaaatgttgatgtataaactcaggtaatggttttggcaaccgaccgccacagcccacctactgcgtgggtctaggtag

SEQ ID NO: 28632 - DNA, 373 bp, Zea mays
  unsure (1)..(373): unsure at all n locations
attcaactggcagccttccatttttattgaaggataaatcctcagcctgactagctccaacaaggatctctaaagagttctctatcctaaatttagaaggataagtctatttatatccatccttcatataaaaaattccagcaacgtcctctgtacccgttctttacagtcttctctaaagattacatcccctatatattcttcctctccaacaacgttctctaaatcatgtactctatacacaaatacctatattaaagacatttctaaaaattttaatttttgtacatacgtatttaccatactctcaaatgtattgtacatattntagttntgctaaaccagttgcttaaagtattcaaatagacatatg

SEQ ID NO: 28633 - DNA, 367 bp, Zea mays
atctttattgtttaatgagagtgatttgttgtgttcctttgagctcttgcgcttggatcgctttcttctttctcattctttcttgagatcaatactcacttgtaaccaaggcaagaaacaccaattgtgtggtggtccttgcggggaagttttgttcccggttgatttgaaaaaagaaagctcactccgtcggagggaccgtttgaaagagggaaggggttgaaaaagacctggcctttgtggcctcctcaacggggagtaggtttgtgagaaccgaacctcggtaaaacaaatccacatgtcacactctttattcgcttgcgatttgttttgcaccctctctcacggatttgattatatttctaac

SEQ ID NO: 28634 - DNA, 361 bp, Zea mays
  unsure (1)..(361): unsure at all n locations
tatttttgctcagcagcatactctgcgcacaaacaaccttcgttagaaaacatatttgttattacaaacaataaaagttagagaanaagttgttaccttgaaattggaataaaataaactaccgacgatgtgctgtcgtcggtagcggctgatatctgtttcgagcttcgggaaaccgatactctntgatagagtaccaataaccttcgcaccaatctgatcccggacgcaacctaacctttcatcatcgatgccaccgaagagaagcgctcccggccgatatccgcaagatatagcatattcccttagctcttctttttcagccttcgtcagctcttgaccaactaaagtttgaaagttg

SEQ ID NO: 28635 - DNA, 358 bp, Zea mays
tttttcttctaaagggagaacacgtgataggtttgactaacgtgcaattcgaaaaggatagaccttgtgcagcttgtcaagcaggtaaacaagtgggaagagcacatcacagcaagaatgtgatgaccacttcaagacccctggagctgctgcatatggatctcttcggacccgtcgcctatctgagcataagaggaagtacgtatggtttagttattgttgatgatttttcccgcttcacttgggtgttctttttgcaggataagtctgaaacccaagggaccctcaagcgcttcctcaggagagctcaaaatgagtttgagctcaaggtgaagaagataaggagcgacaacgggtc

SEQ ID NO: 28636 - DNA, 265 bp, Zea mays
tcttttcttttgttgaccccatcattggagcatataaatttatggatgagaaatggtcacccaaaatttgttgatgaagcatcccaatatcaatctagggcaggaatccatgtgggagttcgcaagagaaaggtttgtgtcgttggcatagatgcttcttcaataagctatctgtcaagcaaaatctagagaccagaaaatgatctttgactagccagaatcagcgtttgtgaaatggattttcgattacatcaatgacttcatt

SEQ ID NO: 28637 - DNA, 365 bp, Zea mays
atcttgtgaagattcttcattccaacatgtgctagtcggcgatgccagagccagcccatgttggtcttagcaattaagcaagtgtcgagtttagctctatcaaaatctaccaagtatagctgaccctctaacactcccttaaatgctattgaatcatcatttcttctaaagacagtgacacctatatcagtgaaaagacagttgtagcccattttgcataattgagatacagaaagcaaattgtaatctaatgaatctataagaaaaatattggaaatagaatggtcaggagatatagctattttaccaagacctttgaccaaaccttgatttccatccccgaatgtgatagctcgttggggatc

SEQ ID NO: 28638 - DNA, 403 bp, Zea mays
ggcgaatcactcgtacccggatccttaagtcacccgcatgctttttatctttatatggacgaccatgtcgtactccgctaaattggtctgaacctggtgaaaggtacttcttcaagcctgatatggtgaaagaaactgaagaaaaggttcagaaaataattcataatatgaagaaagcccaagctcatcaaaagagttatgcagacaaacggcgaatgcccttatatttccttgagggaaactatgtctacttaaaagtttcaccaatgaagggtgtatcgcgtttcggggttaaaggaaagcttgcaccacgatatattggtccttttcttatcctggaaagatatgggccagtggcataccgactccagttacccgaaaccttgtctgctgtgcataatgt

SEQ ID NO: 28639 - DNA, 362 bp, Zea mays
ttgtatgcaagcttgttctgcattgctattgttctacaaaacaaaaaaatcgttgcagtttcttgcacgacagcatgactcagtagagcgtaatcacatatatatttttttttcacacaaaactaaccgtctctaaagtcgtattttgtgcaggtagattgcctttctcttcctgtacagacctaaccaccttcatttcctacgagcaaaatgacaggatggtgtgctgctcctgctagagaccagaccaaaggtaaaaaggaataaaagtcgacagaatgagagggcgcaccgatttcagctgttccacttcagagtcaagtccttttttgagaccctggagttcctgtaaaccacacaat

SEQ ID NO: 28640 - DNA, 383 bp, Zea mays
  unsure (1)..(383): unsure at all n locations
caaccggaaggctgccaagttaattaaaatcctcaattccaacatgtgccagtcggcgatgccaaagccagcccatgttagtcttaaccattaaacaaggtgtccggttcaacttctaatcaaaatctacttaatataactgaaccttctaacacttcctttaaatgctatttgaatcatcactttcttctaaaagacagtgacacctacatcagtaaatagacagttgtagcccatttggcataattgccaaacggaaagcaaattgtaatctaaggaatctacaagaaaaacattggaaatggaatggttaggtgaaatagcaattttacccagtcctttgaccaaaccttgnattccatccccgaatgtgatcgctcttt

SEQ ID NO: 28641 - DNA, 361 bp, Zea mays
agcttgtcatagtctcgatgatgtatgcctttagatagtccaagtcttctaaagctattactttttatgaaaccgcattgaaaaagtaacacaagcgtgtgatgacaactttgacatgctctgtttcgagggctcttaccgcaatttggaggaacaccgtcatcatcacatggtagtcatgagagttgtagccaaatagagacaagtccttcatcctgactagtttgctgatattggatgagaaacctgtgggcactttgaccccacgcaaacatttgcaaatcattgttctctcctcaactgacaagttgtagctagctggggggaggtaaggcttccctttgccactatccactggatg

SEQ ID NO: 28642 - DNA, 348 bp, Zea mays
  unsure (1)..(348): unsure at all n locations
tactttatatcaagaggatagaggcaagagctcgtccatatgtcataatagaaggggagttgtacaagcatggaagttgtgcttcgctactcaaatgttatccagagccgaacgtatagagttaatgaaagaatacatgcaggcctgtggggatctcacatcggatctaggccattacttggaaaaattttccgccaaggattttattggccgaaggcagcttcggatgcagcagagttggttcaaaagtgcgaaggttgtcagaaatgtgcaagagatcaaaaacaaccttcgtccttaacacagctcatacaacccacttggccattgcaaaggtggngccttgat

SEQ ID NO: 28643 - DNA, 371 bp, Zea mays
agcttttattggagaacacactttaggactaacaagtgggcattttgagaaaaacagggttagtaacgcatgccaagcacgaaagcatgttggtgcccattatccacacaagaacatcatgacgaccgacaggccgctagagctcctacacatggacctataccgcccgattgcttacataagcatcggcgggagtaaggactgtctaagccttgtggatgattattctcgcttcacttgcgtattcttattacgggaaaaatctcaaacccaagaaaccttacaaggattattgagacgggctcacaatgagtttggcttatggatcatagaaatgataagcgacaacgggacggagctcatgaattctc

SEQ ID NO: 28644 - DNA, 339 bp, Zea mays
  unsure (1)..(339): unsure at all n locations
ttttttacattgnctccttgngggaagccaatgccatccttaatgccagggcgtctcccactataaaacatactacgagcaaatttaaatctttcaatctctacttcatgctcggcaattttagcatctagtttagctatatgatcattttgctgtctaatcatagcaaggtgatcatgaatagcatctacattatatctctacatctagtgcaaatagaaacatgatcaaccgtagatgtagagggtttgcaattatttaattcaacaatcttagcatgtaaactagcattctcatctctaagattggaaatagaaatattgcaaacatctaattcct

SEQ ID NO: 28645 - DNA, 384 bp, Zea mays
tgcgagctctgatctcgtggatgctaataaatcgagacggatgcattctttcttgaccatactcccctgcatgaataatgtttaggaccaccttgtcaggctctttaactctatcaagtcttatgaatcacctttcatcagagactgaccgattcatcggactgcgacgtctactaacatgtaaagctgaggagggagacatgatgatgcttgctgataacgcttgctaccatgaatgattcgacaatgcactctatccttccaagactcgcacataatcatgactcatgctcactacatatctacaaacttatgtagcgctctctgcaaccgaacactacattcaagatgatgcgtgtatatatggagaggagtagactcctc

SEQ ID NO: 28646 - DNA, 364 bp, Zea mays
tcttgcttgaagcctctgacatctcgagctacctaaaggaaaaatgtccagctggatcatgtggtatccaagacggcacacccattgtagctgacaaggaggtctttgggccgttggagcctatcacaaatcttccagatggtggtgatggttttgatatcggtgagatgctgaggatgatggaaagcgatccacataatgcaggtggagccgacgctggcatgggacagccctggtatcttgatgagctggattcgagtgtcttaaagagcatgctccaaccggagccggagccagagccagagccattcctgatgtctgaagaaccggacatgtttcttgctggcttcgaaagcgctggttt

SEQ ID NO: 28647 - DNA, 361 bp, Zea mays
  unsure (1)..(361): unsure at all n locations
agtttatatgaaaattcaatcttaagtttgtgatcaccgttcttgattcgcttggtggctgctgctatacccttaagggtaccacacccctcctttttgaagactccatcattatctacatatataccaataacatctgaatgggtagaaatattcaaagtagaagattgcaacattcgaataaaaacactcttagtaaaaaataccaggatctcttttcctatgacgtctagcatgagatggccaattagcagtaggtttggtgctgccatgaatttcttcatctgataatattaggtcatcattgcttttgcgttcatacaatactgcggatagcatangcatcagttacatctctaac

SEQ ID NO: 28648 - DNA, 357 bp, Zea mays
ttatcttgtacttcgcctcaacatggcctgattggtgattggcacgccgcttccgtgcgtctgctgacgtactcaccgtcaatccgccttcggtcatgccaactgccatatttgttctcgcggctgattggcccgcggcccccacgcctggtggtttcgttaggccacgtgcggggcgattcgataccgctgcattggtttaaaaatttaccttctgtgttctgccgcggccccaaggaggtgcactaccggcgcgtgcggcggttcgctctttccgcacccaggatccagcacccaaggagtatgacctgtgggcctgggcccccgtgtcatagattaggctgttgtctcttgcgg

SEQ ID NO: 28649 - DNA, 358 bp, Zea mays
tcatatcttgacaacgaagagatggctcttatcatcaagagcttctggcaaatccttaaacaaaggaaggggaaggactacaaaccccgctccaaaaaggtttgctataagagtggtaagtccggtcattttattgctaaatgtccatatataagtgatagtgttagggacgacgaccagaaagggaagaagaagatgaaaagaaaagatactacaacaaggagaaaggtggcgaagcgcacatggggcgggaatgggactctgataagagcttcaccgactcctccgacgaggacgccaccaacatcaccgtcaacaaaggcattctcttccccacgtcggacacaaatgcctcatg

SEQ ID NO: 28650 - DNA, 359 bp, Zea mays
atctttggtgaccaagtgatcaagctcctcgagctctacgagattgaagatcctgagcatctgtttggtgaaggcaagtgtcctctgacccattatgtctcatttactttataatacactgtcccgcatactatgaacaacctaaggatttactagctttctatttaccttgttcttgatttatcttttgggttactatggttagctacatgctagcgctttactttaatcaatgaacatgatgagatacaatgatgatactataattttattctggatatgatgatatacttgtggcatttaagggggactcgggctgtttcccgagtacctcttcgtaaggacctgttcgttgagag

SEQ ID NO: 28651 - DNA, 340 bp, Zea mays
  unsure (1)..(340): unsure at all n locations
agttttcttacatagctcttttgaataccgttgatcatatctcttttatatgctatgactaatgtgttttcaagtttaattttaaaccaagtcataagtatattgaaaggggaaatggagtcttccgcgaagataaaggcttccactccgtaactcatacttcgccaccactccgagcaactctcttttctttgggggagaaatgagcatcaaggaaaaggacttcattcttgggggagagagtaaaagctcaaacgcanaaggacttcgtctttggtataatcctaactcacttatttatgacctaaggggaagattgcacttcgagggctctaatgct

SEQ ID NO: 28652 - DNA, 372 bp, Zea mays
agctttttttttggtaactgatccatttattgctttggcctttattttctccccctttggcatcaagcaccaaaacgggatcaatcttggccctttaacctcattgcctcaccaaaatcttcaattaagagcaaataggccataagagtttaaagatgaacttggaataagttaccctctcatcggagtgcagtggaagtctttcatggtccaagtccacctttccctttcaatccttcctttgaggctaaaacaaccaaactcaagaatatggttagtctcaaagggtcaagttgtaacacatctccccctaaaactgtgcatcacttacacaaggactttgtgaggtccggggaatgtttgacaacttga

SEQ ID NO: 28653 - DNA, 377 bp, Zea mays
  unsure (1)..(377): unsure at all n locations
tagctttctaaagngganaacacngtgatagggtttgactatacgtgcaaattcgaacaaagataggacctttgtgcaggctttgtcaagccaggtaaaacaagtggggaagagcaccatcaccagcaaagaattgtgatgaaccactttcaagaacctctggnacctgcctgccatatgggacctcttacggacctcgtccgcctaatctgagcattaggaaggaaagtaaagtcatgggtctagtctatctgtttgatgaactatttcccgctttcactttggcgtgtttcttttntgcagggaatacagtctgaaacccaaggggacctctcaaagcgccttccttaagggagagcttcaaaattgaagtttga

SEQ ID NO: 28654 - DNA, 326 bp, Zea mays
tttatcttcggcatcaaactgtgttccgttgtccacagtaatagcctttggcactccgaagcgacagacaatattctgccagaaaaatttttggacagtaaccgaagttattgtggcgaaaggtttcgcctcaatccacttagaaaaatattccactgccaccacaacatattttaaatttccttgtgctggtgaaagtgggactagcaaatcaaggccccatctttgcaacggccaagtaggctgtattaattgagttagagacgaaggttgtttttgatctcttgcacatttttgacaaccttcgcatttttggactaattctg

SEQ ID NO: 28655 - DNA, 363 bp, Zea mays
tcttgcttgaagctggactctgtgctgtgacgaaggatgatcttgcagatagtcttgcatataatagcctgaaggtatgagaactgcgtgtttggaaattttacaatttgcaaatcattcttttattcttataccaactcttttacatatagggtttaattctaagcaacgcgttgagagcgcaaaagaatgccgaagacgagagctatgatattgctttcaacaacctacgatcagaggttattaagctgagaaacgaagctctagaaaaggataaaattctgcttacattggtggacaagataaaagaggacgaagctgcctcaaaggccaaggctgaagcccaaaaacgcgaaattaaag

SEQ ID NO: 28656 - DNA, 374 bp, Zea mays
ttgtctttctattcttttcaaagctgggcttcggctgcccttaaacgaatttggggctgaagttttaaagatattccagatttttcttcaccaaattactcccgaagcaatcataagaatgggaatctttctctgggccgtgaggagtcaaggcttggagccaaatacaaaaagtttctacagtatgcacgaactgttatatgaaacgaaaccctggggcaaagagcagtatcataacaattttggctgctatagcttcgtcgctcgttctggctcaagctgtcccgtgccaacctttcggaagagatggcctgtggactggatgaatgaattggtctacgtgaataacgatttaaaggcacgagaagacatta

SEQ ID NO: 28657 - DNA, 352 bp, Zea mays
tttgcttagcttgcaagcctctttgagagaaagccattggaaacccacaaagcagaatatttaggtatctgtaatacatgccaaatattggagtatggtataccatcgtcgggctccttccaatatttaaatagtagaaaactcacaaaatatatgcataaatagggatttaagccataattggtgactccaaaccaacattgacgcctagccagcagaacatacatgtctttgtactttatattctctatgctcaatcataaatgaaaaccgttgcaacgtatatgcacctcgctagtttattattaaactactcgcgtgactggtttctttctcgggacgtgcagttgta

SEQ ID NO: 28658 - DNA, 356 bp, Zea mays
agcttcccctgtatgccgaggatatggagatctcaggtgttaggacaccaaaagcttaccccagcagcaaacatttgtagctccaagcgctatattctttatgtccctgggcccacatgtcgggacccagtacctttgtgcatgccccccttcagctataaaaggggaggcatgcgacggtacaaggagacccaatcttaggctcactcagatactcttaagctcacgagcaatacaccacacagtggagttgggtattacgctccggtgacccgaatcactctaaatctttgtgttcttatgttcttctcgttttccccactaacaagcgaaacgcctaggctccttctcatctt

SEQ ID NO: 28659 - DNA, 215 bp, Zea mays
accggaagccagccatccttctggggtggcactaaacggaggcgcgctccagggctccacgcacacgtcgcgcgctaatttggttagccgggcgctgagaaaataagcctcccatggcccatcaatagccagcccactgaagaatccgtcgggccccgaatacactcaatcctccccacaagccatcccaaaggtcgaagcggccgccccgaacg

SEQ ID NO: 28660 - DNA, 362 bp, Zea mays
agcttattatgattcttcatcccaacatgggctagtcggcggtgccagagccaacccatggtagtcttagcaattaagcaagtgtcgagttcagctctatcaaaatctaccaagtatagctgaccctctaacactcccttaaatgctattgaatcatcacttcttctaaagacagtgacacctacatcagtgaatagacagttgtagcccatttgacataattgagaaacggaaagcaaattgtaatctaatgaatcaacaagaaaaacattggaaatggagtggtcaggggatatagcaattttacccaagcctttgaccaaaccttggtttccatcccctaatgtgattgctctttgggg

SEQ ID NO: 28661 - DNA, 354 bp, Zea mays
agctttcttaattggtgttctagcctccctcgtgtgcccggtagctcacagacccattcaattgagcttgaccgcactggattgccctgaacaccatagtttcctctcggttttcgccgtcgtcgtgaacagacatgctccaggccggtttagtgcaattggtggagggattagtgtcgccgagggtagaattaggtgttgagcaacgaagggtcctagtcgttgcgttttatgacaggtacaagctcatcagagcaactgctccaccgttcgtggtccgggatctcaccttgcgaagaaacagaaaaggaggggcctcggtgcaattgtcagaagcacatgtaaatagtgcat

SEQ ID NO: 28662 - DNA, 371 bp, Zea mays
  unsure (1)..(371): unsure at all n locations
tttcttgttatcaatgtgaacgtgaagggcgtgacttccgtaactctcctgagaagatntcactacagatcacctccgagatgaagctatctcagtctacccgcaacgtaaagacaactcgaccatgtaacttatcaaggcgtgcttgctttggctgtggtgatacagaccatctttttaatagttgtcctaagaaagatgtggagatcagtaaggtccaaaagaaaagacaacaccctcaaactcatgcatcaacaaagaataaacaacagaaaaagtccataggaaggataagttatgcagtgacaggaaccattccatatgagaatgccagtaattttggaacactggtcattcacacaaccatcgcc

SEQ ID NO: 28663 - DNA, 370 bp, Zea mays
  unsure (1)..(370): unsure at all n locations
tctttcttctctaagattttattttactacgctaaaaacatatatattatatatataataaaattattgtccattatttagaaaaagagaagaaaagcaagtaaagaagagggtaacatctgaatttggtggatatcagaaaagaaattttaaccctcaaattcagggtgttacattatcctgngagcctggacatggtggagacatagaaatgtttgcttattcgaaggcaccccctcggcttgctgctgacttatctatgtttgagagtgatctttggtactgggataaggcaggagctaaggatattcagctcctggaggctacttctgacctagtccgagccttcatgtttttaggaggtcgtcta

SEQ ID NO: 28664 - DNA, 359 bp, Zea mays
tttttcttatgaagattcttcatcccaacatgggctagtcggcggtgccagagccaacccatgttagtcttagcaattaagcatgtgtcgagttcagctctatcaaaatctattaagtatagctgaccctttaacacacccttaaatgctattgaatcatcacttcttctaaagacagtgacacctacatcagtgaaaagacagttgtaacccattttgcataattgagatacagaaagcaaattgtaatctaatgaatctacaagaaaaacattggaaatagaatggtcaggagatatagctattttaccaagacctttgaccaaaccttgatttccatccccgaatgtgatagctcg

SEQ ID NO: 28665 - DNA, 355 bp, Zea mays
agtttggctcgccaagtggagctgatggagagcgaccggccggtacagcaaccaccgcggccagcaccgcgcggtcacccgggccctgcacagcgggctgccctgccggcaacagcgccgctcctggcgctccctgcccctccagcggccgcccagcagggccgcggcgagaacgaccagaggcgtctcacaccggaggagatggcagaacgacgacgcctagggttgtgcttcaattgcaatgagaagttcacccgtggccacaacagattttgccgccgccttttcttcctcaatggtgtggagatcgatgacgtcgcacgggacggcaacgcagcagtggaggatcccggcg

SEQ ID NO: 28666 - DNA, 365 bp, Zea mays
agcttcgacatctttgcttgtcccctcttcgtgagcccctggcatccaatcagcgatgaaatctgctagtgcttgagattgaattgaagatctgtgcacgtagtcaatagtgaattcattaagctccgcggcccattttccaatccttccagtagcttctctattcctcatgatatcctttaggggttgtgatgagagaacaattatgtgatatgcttgaaaataatgtcgaagcttcctggacgccattaacacagcatacaacaccttctccaattctgtatagtttttctttgataaattcaaaacttcggagacaaagtatactgggactttctttttagcttgtccttcgagcttctctt

SEQ ID NO: 28667 - DNA, 309 bp, Zea mays
tttcatcatgaaactttgccagaccatcctttgtgaatgaatcaatgggcctcatctctattatccttgctgaccgattcacactcgatctcttggcgggttcaaatgtgacacagggccatcaaccaattttgccatcaaaggtgcaattgtcaccactatcaaaccttggcatacccgagagctgttaaaatatacatttttggaatataatacttgttcttccgtgagcgagtaggctctacttcactaggagttgaataatatcgcttcggtttcatagtgacgaaaaacatttttcgtaatgac

SEQ ID NO: 28668 - DNA, 372 bp, Zea mays
ttattctttaccctaaatagggattaaaggggtaaaacctaacacaagttgagaaaacctaaatactttatgataaaagtcataaaatgaccccaaaaacaaagttgaatcacatttatacccaaggtaccaaaaaccctaattggaaccctggaaaaccctacaaccaaatcctagggacttatgtgcaaaagtgatgaacctttggactaaagtgtaaaaactactatgtttaaacatataaagtcatttggttcacaaatatgtgaatttgcaaattaaaccctaagttttgggcttatttgcaaaaatcacctcttaagcactatagagcctaagtctgaaattcagtttagttgggtcaactttgga

SEQ ID NO: 28669 - DNA, 343 bp, Zea mays
cttctttcttgacattgctctcctggtggagggcaatgccatccttaatgccccagcgtctctcattataaagcatactaccagcaaatttaaatttttaattttcgagctcatgctcggaaattttagcagttaaattagctatgtgatcattttgttgtttaatcatggcaaggtgatcatccatagcttctacattaacatctctacattctagtataaatagaaacatgctcaacagtagatgtagatggtttgcaagcatttgattcttctatcttagcatttaatctaagattctcatctctaagacaggaaatagaatcattgcaaacattcaatt

SEQ ID NO: 28670 - DNA, 355 bp, Zea mays
gacaactgccagttcgaccggggcaacatcttttgttcgaacaacctttcaacctaaattccttttttatatgtgtgacatttattctcccgaatattttgcctatggatctgacttgtgagtcatttttataaactaacgccaaagatgaatccatgtttcttacttggaaacaccgaacaaacaccactggcaggaggcgctcgcgttggcgtcgctcatcgaccatgagaagaagcttgacaactgccagttcgacctctggaagcagtcctacttggccgcatgcctcgctatgttcggcaagctccggcgccaccgtcgcttggacgcagcccagaacggctacaccact

SEQ ID NO: 28671 - DNA, 355 bp, Zea mays
  unsure (1)..(355): unsure at all n locations
tacaacatattacatatacccaaacactctatatgcnaaagntcttcctcatgatgtcattcatatgaaaacatattttcatcaacacatatcatgtgaaatccaactataagttttttggctacagaaagaactacatttacttcagcaacaactctttatttacaacaagaatgctagaactattatttccatgtgagaatagtagggggagaatgacatggtgtagtcatcaaagtaagtgctgaagattccttacagaccttgtcccttatcatcactagcttcagttgcaggtctcntcttagccttttgggctcgttgaaatacttctctatatgatcatatatcatat

SEQ ID NO: 28672 - DNA, 263 bp, Zea mays
aaaaatgtattatgctcgcgatttgcagacctttctgaacacacatgacaactgatatggctctgcaacaaacgcaagacctttgtacggaatgctacccgacttgtgcagacgacgacaaactgaccaacctgtctgacagtatctcctgaagactgactgtcaaattgagcatcattatgactgagaacatttttttaaaaaaaattatctgggatagaagctggccaccacaggagttgtggtgacttaccccccacttt

SEQ ID NO: 28673 - DNA, 351 bp, Zea mays
tgaacagcaaccctcgggcatcacgtgtagatagcttcagccgatgctatttcttcctgcaggaccttccgcgacgaagcatggtcccaacacacagctgtagccgaagctgtttctttctgcaggaccttcggcgacgaagcatgtgtccaacacacatcatttttcaaaattaaataaagaccatgggaaatttatcctaattgcactagagaactgtccaaacataagtttaagttgtaagacacactttttcaacatgcagttgctcataatgtggaatgttataagattgaaatatagatcaccctgttaacctcaaatgacgttctatgatattgtgggccttga

SEQ ID NO: 28674 - DNA, 431 bp, Zea mays
  unsure (1)..(431): unsure at all n locations
acatattctggtatgtatggagagtagcatgaagcagtatgtaaaacctgcttcggatggttctgctgggcttctgcttccgcaatctctttttgcttctgaatggtatttggcacgttcttgtagtatggcccttgtcttcaccacagaataagcaatagattttcctgggctgatccccatatcttcctccgaagcccctgccgcctctgccccttggagctagtggcctgaaggagctttgctactgtcctgaagactgtgagctatgttgtggcctctgaaactngcttcctttgtcatcactctaactggagctatggatngatctgacatgcctacgatgngattttctccgatgccctagtcatctcagaaaactataagcatcttcccttcttggcngaanatcatattagcctgatgactca

SEQ ID NO: 28675 - DNA, 418 bp, Zea mays
  unsure (1)..(418): unsure at all n locations
taatgatgtatgatgcaatgtcatgatgcaatatgatgtgatggcgtgatgcaatatgatgtgatggcatgatgcaaatgatgttaacgcgcgaaacacanaagataagactttgcatccccttatgaacgaccttggagtctcttcacctttttcttatgtggtatttcagctctgcattcccttacgaatgactntggagctcagctctgccatcccttaggaatgactttggagcttcttcacctttgacttaggtgggcattatgctctgcatccccttagaaatgactctggagcttctttacctttcacttaggtggatcttagctctgcatcccgttatgaacgactntggagcgtcgtgatacttattattacactcggtggtgtagcacagacttattacatacagttg

SEQ ID NO: 28676 - DNA, 80 bp, Zea mays
cattctaggggccactatatcacaattgctttgtggctcttcttcttttgtgaggacgaatcgaccgagttcttcctcta

SEQ ID NO: 28677 - DNA, 309 bp, Zea mays
  unsure (1)..(309): unsure at all n locations
caccgaaatccaaacattcgacttgtgaatatcccttggccacaagtcaagctttgttccttgtcaccacaccatgctcatcttgnttgtacgaagacccacttggttcctacaacattctgattatgacgtggaactaaatgccatacctcgttcctagtgaaagtgttgagctgctcttgcatcgtcaccacccaatacgaatcttgaagagcttgctctatcctgtgtggctgagtagaggaaacaaaagagtaatgttcacataaatgtgcaacacgagatcgagtagttaccccctcttgaatg

SEQ ID NO: 28678 - DNA, 372 bp, Zea mays
  unsure (1)..(372): unsure at all n locations
tactgatagagctcaagcattttattttgttcatatgtaatatattcaaaacattaagggagcttctctatgttttgtacatatgtaatagatacactaatatttgagctaagttactgacttcattttctactgcttatatatagcgaactaaacttaaatcacgcattctgtattggtctctatagaggaagcactgcccagcattactaaaaactgagaaggtctggacacacatatgattttgtgtaatttaaacaaatcagcatcctgataatagtgaatgtntggtagatcatctgtcaatcaggtatttttttgtcttgtatttgaatgaccacacattttttttatcgcattttaacgcatgag

SEQ ID NO: 28679 - DNA, 340 bp, Zea mays
  unsure (1)..(340): unsure at all n locations
ctacatgtgctaagcggcgatgtcacattctgtccatgctagncntagctattaagcatgcatctagaccgggctcctcttttgcaaaatcaactaaataaagtttgccgtctaatacacccttgaaatctaatgaaccatcacttcttctaaagacagacacatctacatttgtaaatagacaattatatcccatattacataattgactaacagatagcaaagtatatccaagggactcaactacaaacacattagagatagagtgctcatttgaagatgcaatctttgctaagcctttcaccttggcttggttgccatcaccaaatatgattgaatc

SEQ ID NO: 28680 - DNA, 319 bp, Zea mays
ccttaacacgattttctctttctcaaatattctccgaagatcaatactgtatgcccttcttgttccacatgcaatatgctgtatggtgcttatgttacgcagaatgatgcgatgatgttatgttatgcgaaatgatatttgtgccgcagatacatatgcctgtaatagagcacaaacacttgtatatcagcgctgacttttcgctgaaagccttcctttgagcttcttccttttactgtcagagaatagcgtgatttttccttgaacctccctaagagccctggcgtttctttaatggaatagcgttattttcctgtag

SEQ ID NO: 28681 - DNA, 314 bp, Zea mays
cgccgaggatatgcagatctcggatgtcatggcacaagaagattgtcccagcagcgagcatttgtagctccaagtgctatattaaagatgtccctatgcccacatgtcggggctcaagtaccttgtgcataccccccttcggctataaaaggggaggcatgtggcgttacaacacagatccaatcttatgctcactcggacactcacaagttcatacaagcactcaagcaatacatcacacagtggagtatggtggtacgctccggcgggccgaaccactctaaatacttgtgtgtcttgtgttctacccatct

SEQ ID NO: 28682 - DNA, 338 bp, Zea mays
  unsure (1)..(338): unsure at all n locations
gcttgatgtagcaacctcatgtgatgacttgattcaagaagatcaaactattctacatgatgtattgactgaaaaagntgaagtcctgactttagacaaccaacaattgaagaattacttgactgatgcaactactataggaaaagttgctatcgagaacaatgatntcaacaatgagttggcagtggataatcaaatgcttaagaatgacgtccagaaactaataagtgaaaatgaacatcttgcaacaagtgtgcaaagttcaacaagggtcaatacctncaaaatgagctgcttatgaacactgttatgaataataacaagagtggtattggata

SEQ ID NO: 28683 - DNA, 495 bp, Zea mays
  unsure (1)..(495): unsure at all n locations
ctaagcttctnagggagaacacgtgatanggttgactaacgtgcaattcgaataagatagaccttgtgcagcttgtcaagcaggtaaacaagtgggaggagcgcatcacagcaagaatgtgatgaccacatcaagacccctggagctgctacatatggacctcttcggacccgtcgccgatctgagcataggaggaagtaagtatggactagttattgttgatgacttttctcgcttcacttgggtattctttttgcaggataagtctgaaacccaatggaccctcaagcgcttcctaaggagagctcanaatgagtttgagctcaaggtgaagaagataaagagcgacaacgggtctgaattcaagaatcttcaagtggaggagttccttgaggaggaggggatcaagcacgagttcttcgctccctacacacctcagcanaatggtgtggtagagaggaagaacatgacgctcatcgatatggtgaggactat

SEQ ID NO: 28684 - DNA, 333 bp, Zea mays
  unsure (1)..(333): unsure at all n locations
agaggaaccgacttanagatgacaagcctatatagacctcgtagaattattatagagntattgataaatgtaaagggcattaatgtaattctacacgggctgcgtcccgcgcctataaatagatgaacagtactcccgtactgttcacgctgacttgacattcactttttacatcacgcttgtacttgtacccttgctttccgtcaattcgaaagtacatttataacttggtgctacaaatatgataatgcggataaaaatgagttgataataatatctgtattattattcgtatttcatgtatgaattctttcttatcatctatcgagctta

SEQ ID NO: 28685 - DNA, 202 bp, Zea mays
gccaccaataccaattccacctaaacctcgggctgaacccttctggcgtggtaacgtctcatagactgctgataccgtgccgagtgtatcaaggacacgtaccgagccactttcagctggtgcaatgagtcatctccgctagtctggttgctttggtcgatgtaaaccttttgtcttcgggaacacgattctaagtatgtgg

SEQ ID NO: 28686 - DNA, 373 bp, Zea mays
  unsure (1)..(373): unsure at all n locations
tcttcacctacaagaaagattaggaatgctcaaggcttatgtatggaacacattgtttcaattggtagttgatcaatagtagttccttccaagtggcattctttcaattggtaataatatattctatggaaaggaatgtcaatatgaaggttaaattccttctggcttaaatttgtaaattagtgcatattgtgaattcactgctccatgtgcattaacttaaaaggaatntaatttatgcccttacgcctcataaatgatgaattgttgccattcatatatagatatcatcattcattaaatacttccttgtaccactaatatatctttnttcaaagtgctttttcgactatgttttaaaggaaaagagata

SEQ ID NO: 28687 - DNA, 284 bp, Zea mays
atctatgccaggagtgggattcggattgctcctcctccgactccgacaatgaaagactcgccgccactgtcttcaacaagtcatccctctttcccaacgagcatcacacatgccttatggcaagggagaagaaggtgagtactcaagactccacttatgcttcttctagtgataatgagtctagtgatgatgatgacatatattattcatgcttgttcaagggcttagatagatctaagatagcataaaataatgagctgattgatgctttcgatgataagaat

SEQ ID NO: 28688 - DNA, 329 bp, Zea mays
tgatcgatctttctctttatcaatggaagagcgcgagccattatgcttgtgagaatatacatgtacgagagaaaaattcttctgccgggtggtggagtgtacctgccctgatctttagatgtggaggcagcctatggattgcctgattatgtggaagaacaccagaacacaagtgttagagcggttcaaggccgcagaatgttataccctacatctattgtgagttgtattgctagaagtctatgtgtgtatctgtccaaagaaaagcatgagccctgtctctgagacttgtcctctaccatgagtgtgtcctccttttatagcccaag

SEQ ID NO: 28689 - DNA, 250 bp, Zea mays
actcacgatcagtcacttaatgaccgatatttctatctgttgagccgcgaatattgtttttaccaacattctgcttttgccatggctggtacctatatggccaaggggatgttaagtagccataggaccttaggtgacacaccatacctgggtgtctcatttataacgtacgaaaaaacggttgtaaaagttacctctatgtcaccctgattaccccgtttgttaaaccacatgggtatttaacaataac

SEQ ID NO: 28690 - DNA, 176 bp, Zea mays
tagtcttagcaaccaagcaagtgtcgagttcagctctatcataatctaccaagtatagctgaccctctaacactcccttgaatgctattgaatcatcacttcttctatagacaagaacacctatatcaataaatagacagttgtagcccatttgacataattgggatacggaaagc

SEQ ID NO: 28691 - DNA, 359 bp, Zea mays
  unsure (1)..(359): unsure at all n locations
cctccatcatcagtttgagcagagttatggattgacctaacatgcctcgngtgaaatcttcctgcgaagccactggtcatttcagagaacctgaatgcttcctcccttctatggcggaagtcattgtcagctcgaatgtattcgtccatcttctggagcaacttctgcaacgtttgtggtggctgtctggcaaagtactgcgctgacggttccggccgaagccactttatcatgggctcaatgacaatttcattgggcactgtctgtgcctgtgccctcatgcgcanaaaccttctgacatacgcctgaagatactcttcatggtcctgggtacactggaagagagcctaagcggtgac

SEQ ID NO: 28692 - DNA, 429 bp, Zea mays
  unsure (1)..(429): unsure at all n locations
ttgaatacccacacaatccttattgtggcctctctctttgtgtaggcacccacatatacttgacaaccatcttacatggtttcaagtcaatatttaatcacatagataaaaaaactagagctaagaatangagccttttctccttttattaatacatcattgtgttgccttcttgatgatgaacctaccttgactttgggtgcacctagcttatcaagggtagtcgcacaagcattcatatcataaagacaagttatgcatggaattaacaacttagtgatccaattcaatgtgaagcattttgataccgattgaagtagaattctagatataaaatatgggtttccaaaatatagagtgtggatcactaattgtaccttttacagtctaaaatcatatccatgtagtgcatatgttgcatgaaataac

SEQ ID NO: 28693 - DNA, 389 bp, Zea mays
  unsure (1)..(389): unsure at all n locations
agaacagagaanaatttcttntgctgtacaattttaaagagtaagaagaatttagtcattctaataccagacatggcaaagcccccagtggactccaatcacccaacctttcccggttttcccataggaataaaaagcaggcgacataattccatggattttgtaataatcaatggaaaagaggaggtcggaatcgtttgggacaaatctataccattatgcaaagctccaaactntggcttagactaatgtaaaacgccctgcgccggtaataagggaaccggacctttccccaacatactactctagtgcccactggccactgcccaccactgtttttatagctgcntattacngcgaatctcgngaagtngggtcatgacattgca

SEQ ID NO: 28694 - DNA, 419 bp, Zea mays
  unsure (1)..(419): unsure at all n locations
tactaagctntntanagctgggctacgattccctataagcaggtttgtggtagaagttctgaacatatatcacgtttaccttcatcaacttacccctgaagcaataataagaatgggagtcttcgtctgggccgtgaagagccatggcctatagccaagtgcgaaaagcttttgcaatatacatgagttattatatgagacgaagccctgcggtaaagagcaatatcataacaactttggttgttacagcttcagtgctcgctcttgatcaagctgtcccgtgccaacctttcggaaagatggcctgggaatggatgaggaatggtctatgtaaaaatgatttgaggttcgagaagatttaaggtatcatctatccctatctggagcgcttcgactccggaaccgacgtagaaatggtg

SEQ ID NO: 28695 - DNA, 363 bp, Zea mays
tgcagagcatcacaacaagcttaccatctctcaactgtgcttgatgctccattgcttgaagccttattttcaactctgttggtctgagtaaccaattcacctgagtccctctgccaataagcacagccagattaacttaaaaccatcacaatcagatggtgaatcgaaatccccaccagctctatataacagacctgcagcattgtcaactgtgctgagagtgtcgtagcctctgtctgcagcacttgcaccttatgctcaaactcctgaatgtacctcatcttgcgctactttgacctggctgctgactgccgattcggcagaatcctgatgaaaaaaccgcagatcacaatgcccattttt

SEQ ID NO: 28696 - DNA, 121 bp, Zea mays
atataaaattagggcaactgccacaggttttggaaataatggattgtgtgaacaattaaacaaattaattcttttggtacgcatcgggacgaactattgctgtggccgcccccaaatcttt

SEQ ID NO: 28697 - DNA, 386 bp, Zea mays
  unsure (1)..(386): unsure at all n locations
taccttcagctcaattggttctccctaagaacctncatggttcatactgattgaatcggntttctggtcggntgaaccagtccctagccggtccactgtcagtggtcaatctgacctttctaaccatctagcgcgcagacagactgtgatgtcagactgcgctagcagtctgcagcgttagtctgcgcatgacgcgtcagatccgctttttctggcgcagaccgattgaaccggcccnctcatatcngntgaacccggcctgcctagctggcagtcggtcaaacggtcaanttgaccgttctgactgcgcagtgtgtcaaagcctntatcttttgttagagcaactcttgcttttggcatgattcctttcccttttgttagaatct

SEQ ID NO: 28698 - DNA, 284 bp, Zea mays
  unsure (1)..(284): unsure at all n locations
ctcacttgagccatgacatataggggctcgaagcncttctttcttctttattatacggtcagagatatactaacataatcctcactaagaatttcgatcggccccacaagtcatatgattgtctacaaattgttaaaaaataacttaactgtctgtctcactcactcaatatttgggcacttctaactcgaattaatgtgcagcatttgagcgttgtcttatgcatttgtgggtggagatacctctagaattgttaatggtgccctagattggcattgcgcctc

SEQ ID NO: 28699 - DNA, 322 bp, Zea mays
  unsure (1)..(322): unsure at all n locations
ataagcctatttcgaaatccttatcatataaagattatcatgtgcggatcagaacaacaaatgcttatatggtatgatcgnntattgatgtaaattaacatattcttatctgttatagaattttttggaaccaaacgcgaatttttctcctataaatgcttacctacgggtgctgccatcaaatacaaccaacacatgtagtctcgcctcttcctttctattgcgctgccgtgtactctactccatctctatcgctggcgtgtacctgtgaataggagagcttgtttctagagccgtcgttctcaacgattgacacccggag

SEQ ID NO: 28700 - DNA, 412 bp, Zea mays
  unsure (1)..(412): unsure at all n locations
tgagactaatacacataatagacttgagaacaagtattagtctcaaatacttagattatagagtagtctccccttgaaaatgtctgtatacaagttttgaatacttataggagacacgcactttgattttgatatcaagagaggtaaattatctataatctgagctttggcacatatcaaacaagatgacaccacttggaaaatagatgcacttgtagaatataaactctgaagcagagcattagtgtcatctatttatgaatgttaaataagctatgtgtcgtgcttaactaaacaatttataccatgtaggttcgctcaaggatatgaattgaaaacaagcattcctaccatataattgacctagtatgcattcagtgctaatcaagagtanataacacatggtaaacta

SEQ ID NO: 28701 - DNA, 367 bp, Zea mays
  unsure (1)..(367): unsure at all n locations
tctanagggagagcacattttgggactaacaaatgttcattntgagaaagatagaatntgtagcgcatgccaagcagggaagtaagttggtgttcatcatccacacaagaacatcatgacaactgacaggccactcgagctcctccacatagacctattcggctcgatcgcttacataagcatcggcgggagtaagtactggttagttattatggatgaatattctcacttcacttgggtggctgtttacaggaaaaatctcaaacccaagagactttgaaatgattcttgagaccggctcaaaatgagtttggcttgaggatcaagaaaattagaagcgacaatggaacggagttcaagaactctc

SEQ ID NO: 28702 - DNA, 365 bp, Zea mays
  unsure (1)..(365): unsure at all n locations
ctttatctctatatgagcaagtcgaccatgctataatcaacccatattagtcttatcaattaagcaagtgtttaggtcaacattatcatcactgaaatcaactaaatataactgaccgcctaacaccactaaaagctaatgaatcatcatttcttctaaagacgattacatccacatcagtgaatatacgggtgtcgccccattntgcataaattgagaactcactgaagcaaatttgttaccctacagatcttactagaatatacattatgaaatggaatagtcacgtgatatagcaactttacccaattctttgaccaacttgattccataccaatggatgctcttggagatatcattttctc

SEQ ID NO: 28703 - DNA, 405 bp, Zea mays
  unsure (1)..(405): unsure at all n locations
taagcattnttcctgaagttctttataggatgtctgcaaatttgagtatttatccacttcagctttcaggcttgcttcaaaatatttcttttcttgctcgacattttccgattggtggagtaattcattctttaatttgtcattctcactttggacttcggccaaagagccctccatggtctgaataacaaaatccttcttttctagtgcaccttcgtgctctttgaccatgatctcaaggtcttggattacgaaatctttctttttcaaaatggcttcgtgattntcaattntttcagccaaatcttcaatgacagctttgtttttctcttcctccagatcttgttgcattttcagaaccttgcttaataatatgctctgtcgaaatgatcttcgttagaacac

SEQ ID NO: 28704 - DNA, 354 bp, Zea mays
  unsure (1)..(354): unsure at all n locations
agctagcccatgctagtcttagcaattaagcatgcatctataccggcctcctcttttgcaaaatcaactaaatagagagtgtcgtctaatacacccttacaagctaatgaaccatcacttcttctaaagacagacacatctacatttgtgaatagacacatatatcccatattacataatngacttacggataacaaattatatccaagcgactctactaagaatacattagaaatcgagtgctcatttgagattgcaatcttcctaagcctttaaccttgcctcgattcccgtcaccgaatatgattgaatcttgggaatctgtattcttgacgtacgaggtgaacatcttct

SEQ ID NO: 28705 - DNA, 378 bp, Zea mays
  unsure (1)..(378): unsure at all n locations
catgacgctgaatagcaatgtatgttgtggaacttctcaccgacttgtctgtttatatatcgctgcangagaagaaggagaaccgccaggacatgcgtactgactgatcggtggaccgacaatcgctgtgaatatatatatagggtttaataacaagctcagggaaggggtttttctaaccttcgacatccccaagccttcgttcttttcgcggatcgagctcgatgtgtaaaaacgatctatcaccgcgaaagggctagtattgtgggaatctatgtgtcatgcttaactaaacaatatacaccatgtaagctcgctcaacgatatgaattgacaactagcattcctaccatataattgacctagtgtgcattcagt

SEQ ID NO: 28706 - DNA, 408 bp, Zea mays
  unsure (1)..(408): unsure at all n locations
tctttcgaagggttgtctgtcnagagtattccacgacgagataatgagtacgctgatctgctagccaagtcagcggcacaagggctgcctctaccttcagaagtattctttgagacaataagagcaccttcggtggaacttttggaaagagcagtgctcaatatatctcctattcatagtgaggactggaggactgagattatatcttttctccaaggtaacttcctttcagatgatgaagcttataataagagaatggaggcnagaacaagaccatatgttatgatagaaggggagttatacaagcatggagtctgctcttctcttctcaagtgtctatccagaactgaaggtatagagctgatgaaggaaatacatgcaggantgtgtggatctcacattggatct

SEQ ID NO: 28707 - DNA, 342 bp, Zea mays
  unsure (1)..(342): unsure at all n locations
aatgcgaattgactctagcctaactgccggtgcataggtttcaccgaaatccaaacctttgacttgtgaatatcccttggccacaagtcgggctttgtttcttgtcaccacaccatgctcatcttgcttgttgcggaagacccacttggttcctacaacattttgattaggacatggaactaaatgtcatacctcattcctcgtgaagttggtgagctcctcttgcatcgncagcacccaatccgaatcttgaagtgcttcctctatcctgtgtggctcaatagaggaaacaaaagagtaatgttcaccacaatgagcaacccgagatcgagtagttacccc

SEQ ID NO: 28708 - DNA, 380 bp, Zea mays
  unsure (1)..(380): unsure at all n locations
tagaccttatgtncttatacccctttctttgatgggtgcatatgagccttatatggtacacacgtttcagctcacgtatgtcatgagtcaaggcatgaacacataaatataaaaaggtggcctagctacaatgtattatgtatattggacatggatatgcggttcacttttttaagtgctangttgcctggttcttgtcatgacatggcagtgctcaagagttgtatgtgttaagcgaactatccacacccaccaacagatatggtggcatgcatgttatgtngacattgcatacattgtattcatgcattatgatctagtaaatctttttctaagtttatctgtttgtgtacagggaggtattatctagtggatgttgg

SEQ ID NO: 28709 - DNA, 425 bp, Zea mays
  unsure (1)..(425): unsure at all n locations
acataacaaaacataaaagactgctgctcttatccgccgaagcttnttcttacataacaaaacataagagactgctgctgttatacacaacgattcataaaagaccacttcttcgaaacttttcttttacataacgaatcataacaaaccatttatccgaaacttttctctgtgccgaagcaaccatgtacgaacacaaatgctatgaatgctgatgcatgcgaatgccatgatgttatgtgcacatgaatggtcgaagcgtatgtccgaagccacactcatccatcatnttcttaggagcaaacacacgtcagctctgcattcccttaagaacgactatggagcatctttgccttttacttatgcagtatcagcgttgactcttcgctgtaagctctgcattctcctagggacgtcgttggagc

SEQ ID NO: 28710 - DNA, 405 bp, Zea mays
  unsure (1)..(405): unsure at all n locations
acacctacatactaagcttcggctcttacttgcttcttctctgagccctggatccagttttcttttaatctgctaacgcctgngactgaatcgtagatctatgcacattatcaatgcagaactcattgagntccacagcccactttccaatcctttctagtagcttctctgtttctcataatatcacttccaggctgtgatgaatgaacaactatattgtacgcttgataataatgttcaagctttctggatgccatataaacaccatcagcaccttctccaattctgtataaattttctttgacaaactgagaacttccgaaacaagagatactggagcctgttatttaaatgtccttcaagcttatactgaacaaccgcccactttctgaaattgcgatgctg

SEQ ID NO: 28711 - DNA, 373 bp, Zea mays
cttgtttgaaaattttgcctattgaatgcactctacgtgcgtctaacatatgcaatgccaatgcttatgatgtcatgctcaaagtttaggtatagtaacaccaggggtgttacatcctgtcccccataaaagaatctctttccaagattaaaagtcctatggttattaatggtaaaggaaacgcatcacatttttatgtccttatttatggtacaagacacgggtgatgtgtgggtcacttctttattacacagctatacagactatacaatttacaagaggctaagaagcctgggattattcttattaataagtcttgggtttccatggtacctcatcttcagaatgctggcctcactgtatcttataaaac

SEQ ID NO: 28712 - DNA, 460 bp, Zea mays
tgcactctatgtcgtctagctttgagatctccttcatgtgacactctaatgatatttctaatgtgacgggcatcttctctttcttgaactttccagaattcttccagacgaagactccctttaattatgctcactgcttgagcatttcagagaacctcttgcatcatttgcggaatcatctattctccttgggcgggcttattcatacctacattaacaatctaccagagactaggatgcacaccgattaaatgcgacttcatacttgtcggcccactcattatagatcaactcactaagagatggcaacttccaagtgggcagaaataagtaggaatataattctaagaatcgaatgaatttgctaatcatacctttgtttggagatgatcttcgtgtgagactacttgtcgatccttaacccaaagatcctaatcgcttatatcaatgtccttactta

SEQ ID NO: 28713 - DNA, 171 bp, Zea mays
ctaagcttgcacccagactctgctggttcggagcctggcgctcgcaactcactctggtatgtgaccctgcaagttcgcttaccttctctgtgtgtgctctggtcgaaccaggtttatttgcggcgcgtgggtggcgttgctccaccggtcacgaccgtggcgggtgtgggc

SEQ ID NO: 28714 - DNA, 356 bp, Zea mays
  unsure (1)..(356): unsure at all n locations
agaactgtgttgttccccacatcaaacaactacactacactagtgtaatgaagatgtgggtggccaacgtactatatatactcgctccagtacgggtcctgttgcgctttctcttttttgccaaagtgtggagcatctgcttggctggagttcccacgagggaaaaccggccctcaaatgctcggatgacaggtggtattggctgctgcacatctgctttgcacgacagccaatggatggataatgaaggaaggaaagaatgagtggctatctanctgctggccctgtggctgactgactgactactgcgagtgacaccgangcgagcctgtgagcgcgcgactgcgcgtgagtgc

SEQ ID NO: 28715 - DNA, 383 bp, Zea mays
  unsure (1)..(383): unsure at all n locations
agcttctgcttttcttggtcgaagctttctgactgggagagaagatttgtatttagtttctgctatttagcttcagcttctgccaataagccctcggttgtctgaagctctaagtccttcttttcaagagcagctgtttggtcttttattttgctctctaaactctcaattataacttcgcgttgtttatcgtctaaatcttgctgcattntcaaagctttactcaaaagcatactctgcgcacaaacatcctttgttagagaacatctttgttattgaaataatataagttaaagacaagttgtttaccttgaaattggaatagaataaactaccgacgatgtgctgtcgtctgtagcggctaatgtcccgctcgagcttct

SEQ ID NO: 28716 - DNA, 318 bp, Zea mays
tatctccaccatattcagcagcaccgaccacaccaccacccagtgactagcatcgtgagttcatgagtcacaagccaccactttcttcagctccccagatgctctataattgatgattggtcgaaactagtggataagatgctcatcaacgcccaatgcactaacaaagagaatgtattatatgcattgggttggcttactaacctcactgctgactggcgggattcttactgtgctgctcgtgccgctgctgacaccatcacctatgcagagttcttagcttatttcagaaactaccatattcctgtgctttgatga

SEQ ID NO: 28717 - DNA, 452 bp, Zea mays
  unsure (1)..(452): unsure at all n locations
tatcagggacatcatgctgcaatatcaaaccatcagaagtcccaaatttgcaggcattctactatgacctggatagtgagagctcctctgatgtcttgcactctantccaaagaattgttaaagaaacaactcaactatatgaccttgggttattaagagggtgacagcatcgagtttaagctccacaaccattaatatacccctagaatatctgcatatctgttcaccaatacacaacaaagcaagagaaggtatttacctccattcccattgctttgatcggcaattaactctaagagaacacggagtaactcaagccagtcttcatgccgatcttgctgtccaatagctgctacagccatgctaatatcagagcgaatttcccattgaatcaccaatgacgaagcagagctgcgtatgccacctgaacaaacagcattggagaatgtaa

SEQ ID NO: 28718 - DNA, 355 bp, Zea mays
actcagcttcttgggagagccatttatgactaccaatgttatttgagttagacaggtctgagcgcatgtaagcatggagcaagttggaacccaccatccacacaagaacatcatgacgaccgacaggccgcttgagctactccacatggatttattctgcccagtcgcttacataagcatcggcaggagtaagtattgtcttgtaattgtggatgactattcttgcttcacttggatgttctttttataggaaaaaatctcacaccccgagactctgaatggattcttgagacgagctcaaaatgagttcggattgagaatcaacaagataagacgcaacaatgggacgaagttc

SEQ ID NO: 28719 - DNA, 371 bp, Zea mays
  unsure (1)..(371): unsure at all n locations
gtagcataggcaagtcatatacgaaatgactcatgcctagctaccggtgcataggtttcaccgaaatccanaccttcgacttgggagtataccttatccataagtcgggctttgttccttgtcaccacaccatgctcatattgcttgttgatgaagacccacttggttcctacaacatttngattaggacgtggaactaaatgctatacctcattcctcgtgagattagtgagttcctcttgcattgccaacacccaatccgaatccttaatgcatcttgtaccctgtatggctcaatataagacacaaaggagttgtgttcacacaaatgagcaacacgagatcgagtggttacncccttttgaatatcg

SEQ ID NO: 28720 - DNA, 401 bp, Zea mays
  unsure (1)..(401): unsure at all n locations
tctgctttcttggtctngacagttggtctacattaagagagtgctctatgacatctctattgacaccacacagatcattggctgaccaagcaaaaacatccttgntattgaacaagaattttaatatagctttttcctgttcctcagataattgngacccaaacaacacattttgttcagctatgtcttcgcacaaaatcatagactntggttgatccgctgaggcagctttatctcttatatacttatgatgctgatgagcttcngcttcatctatattgtgaatggccctggaatctgtccaattcccttcgacccttctagcagcatcttggcttccatgcacaacaataggaccctaatcagatggtatcttcgtacacagatatgcttgataaagt

SEQ ID NO: 28721 - DNA, 356 bp, Zea mays
  unsure (1)..(356): unsure at all n locations
tattcttgagcaatgtggatcagtggcgtaccgactccagttacccgaaaccttatctgctgtacataatgtgttccacgtgtctcaattgaagaagtgtcttcnggttcccgatcgaaccattgaagtaacggatgttgccttataaccagacttgacatattcagaacaccctattcgagtcttgaatcaaaagggcagaattacccgaagaagaactctcaaattttacaaaatacagtggaaccagcattcagaagatgaggctacatgggaaactccagactttctagaaaagaatttcccaggcttcttatcctcatgtaatntgtacagtgtatacaatttgttgtaat

SEQ ID NO: 28722 - DNA, 435 bp, Zea mays
  unsure (1)..(435): unsure at all n locations
tcctccatcattcttgagcccctcangcatccgaagataacaatatgtaccactatgggttatgaagctggtctttggcttatcttccttcttcatccagatttggtggtagcctgaataacaatctagcagactcatgagctctgacgaagctgctgcatctactagagaatctattgttggtaatgggaactcatcctttgtacaagccttgttcagatcagtacaatcaatgcacattctccatttactattagccttcttcatcataacagngttggctagccactttgggtatttcacttctctgatgacaccagcactgagaagtctttttacttcgttccgagcaccttccgctntatcgttagacattctccgaagcttttgttcctgngtcgaaggatggatcgacattganggaatgttcaatga

SEQ ID NO: 28723 - DNA, 428 bp, Zea mays
  unsure (1)..(428): unsure at all n locations
ctcagcttcaccactttgttctagtgacctttgtatgcttattctgtcgagactaatcttaatacggaagtcagctacgacaagcttatgttgggttaccacacactctccacgtattaccttgcaatctaagcaggcatgcctgtcctctgttctcaagacgatgaaatcaatctggctagtgtgttggccactactgaaggtcaccaagagggatttcctcttcctatagaaagtgtttgctataagcatgtcatatgctacggcaaagttcaggatttcctccncttcttgatacctagtcccaaaggcgaagcctccatgcacaccctcgaaactggtgctaaatgtacccacatggccattgagatctctctctatgaagagcatctcgccaactgggacactactacctccagggccttcca

SEQ ID NO: 28724 - DNA, 388 bp, Zea mays
actcagcttcacacgtatgggctgacttcaacccacacagcccacccatatgggttagcgcccgcgtgcgcccgcgccctagtgactctgctaaaagggccccgaagtttttactaactgagaacaggttctttcactgttaaaccaagtcactgactgtttgcactaagaaaccccatcttctatctctttgcatggtgaagtacccgacagctgttcctgcggagagctcatctccggcgatgctaaccgggcggagagggccaagaccggcgctccctagcgcctgtcatcgaattggacccaccctgatccatttcccccacctaatttcactaatgaccctatggcttgcactggccacgacgaccaccgatgttgcgggtgg

SEQ ID NO: 28725 - DNA, 190 bp, Zea mays
atcaagacattctatcccctccagcacgaaagatagagctgttcacataccagacacttgatttttgggaacagataaaaccccacggtatacacaattgcattcatgtttcttttgccatatattagaacttctgacatatcattgcttcctctcgagttacgatgtctttgagatgctctggattata

SEQ ID NO: 28726 - DNA, 353 bp, Zea mays
  unsure (1)..(353): unsure at all n locations
tctacccatctcctgacanacagatatctctttgctattcgggagacagtacaaaaaatcttccttcccactaccatcgaacactaatgcccccttctgatatttcacttgttgggcatagtgctgagcttctcgctcttcgtctttatagagactcttttccagagcatgccggatgatatattcaatactttcttttaaagcttctggagcacgagtgacaactttttcacgcatagactgttctatagcctctttctcttctgccctctcttcaatttctgaaaggtattcttatcgggctctgaagacccagcttcagtaccagcttgcattattacagcttcaatttc

SEQ ID NO: 28727 - DNA, 188 bp, Zea mays
ggcattcgaaaaatagacttggcacatgtcagcacgtaacagtgggggagccatcacgccagaatgtataccacatcatgccctggactgtacattagatctttcgacccgcgctatctagcatagggaagaagatggctattattgtgatgactttccgctcactggtgtcttttgcggatagtctg

SEQ ID NO: 28728 - DNA, 312 bp, Zea mays
  unsure (1)..(312): unsure at all n locations
acggcgatgccacagtcagcccatgctagtcttagctattaagcatgcatctagaccggcctcttcttttgcanaatcaactaaataaagatttgtcgtctaatacacccttataagctagtgaaccatcacttcttctaaagacagacacatctacatttgttaatagacagntataccccatatgacataattgacttacagatagcacattatatcctagactctctactaaaatacattagatatagaatgctcattagaaattgcaatttacctaacccctttaccttgccttgattcccatcaccg

SEQ ID NO: 28729 - DNA, 214 bp, Zea mays
tgctttcgcctcagtatatcacccacaatccaacttgcgtctggagcgcgccaaccgcaagatcttcacggcgatcaataaaatgcttctcgacgacaagaatgagtaatgggccgacctgctaccttgaacagtctgggtgctgaacaccaccgaatgtcgggcgaccggatttacttccttttccctgctatacaggtcggaagccatgacc

SEQ ID NO: 28730 - DNA, 399 bp, Zea mays
cttaaaactaagccgtcaccgcactcaccgagcccctgaggcatgctctttcacagaaagcttctacaaaattaaaacagtcaacaacttcatcaaacattgtgaggaattcatcatcgaataggcagggtacgtttcactgtcagggttacacgtgacggagaaaaagccacatctgctgagaccactcctatattccaactgatgaaaccgcctgggctggtaatgccagatgatgtttctaatcgacgagcacctgctgctgaagctgaacagggtgatgctgatgaacgcgaatctgattatgattacagtgcgctgccaatttatactcacaccctggagttgtgaagacactataccgaaatgatgtgctaagtgataaggatgctattcact

SEQ ID NO: 28731 - DNA, 385 bp, Zea mays
  unsure (1)..(385): unsure at all n locations
aagcttcggatnntttatttgctctctaagccttcaattataacctcatgtttntatcttcaaggtcatgttgcatcctcaaagctntacttaatagcatactctgtgaaaaacaaccttcgtcagataacaccttcatcgtttaaatagtgaaaagccaaagataatattatttaccttgaaattagaatagaataaactaccaacgatatgctgtagtcagtagcggctgatgtctgcctcaagcttcatgaaaccaatactcttcgatagagtactgataaccttcgctccagttcggtctcggaggcatcctaagctttcatcgtcaataccgccaaagagtaacgcttctgggttgaaccacaggatatancataatctc

SEQ ID NO: 28732 - DNA, 315 bp, Zea mays
  unsure (1)..(315): unsure at all n locations
ttttcttctggtgctttctcttcaatttctacaggatgtatttcagcggactctgaaggcccaactntggcactagcttgaattattgcagtttcaatttctgcctgctctgtttcaacttcagtttgcgccttcgaggctttggcaattttctttgaaggagtcgagttcaaagtctttaatgtttctagcacatctagtacattagccatccttcttctcttgggagttgccacanaactttattgtgccttcggcactgttacttctgtcgaatggccttaaatttctaacattttttatccttcaattttt

SEQ ID NO: 28733 - DNA, 485 bp, Zea mays
  unsure (1)..(485): unsure at all n locations
ctcaagctgactccggtatccacactttaatccttaattcctttctctcgtcttatggactatgcatcctccctggatccaaggccatagactaacatatattccgttatcaagatgaatacaaccaattcctgacctcgcgtgagtgctagaaaaatcactcgacttctaccgagatcctgattagcaaagcagctactcgacctagcatactagtattcatctcagaaaggaatcctaagttcatgcaactagaggtttcaagcaactcctacacttaagtgcacattacaatcctacaagcattaagtgtagtaaagtagcatataataatacgggtatgcataanatcggggcttgccttcaattgtcggggctggcgggagatcctcaatagcagcctcggaagcctgctcctggtcctcctcttggacagatcctttgctcgggatgagcacgtactcttcgtcggcaagatacaatct

SEQ ID NO: 28734 - DNA, 353 bp, Zea mays
  unsure (1)..(353): unsure at all n locations
atcgtgcgcccaccgtgcacaccgttcggagctcataacacgcacaatatacttacttgttgaagtgagtttatatacaccaacacatggatgcctgcaaagctcatcgatgcttcaagagtgatggntgacgctgcactggaggactcaactatctcgtagtcgtccacatcatatgatcgcttcatctcattctcaaaaattgcgttttgcacaatgatacaagcaaacatggtcatactatgtacttggttgaaaaagaacgacctatcctaacttaaatatggaagtgagattgaggacccagatgtctctctacatctttcatgaccctnctacatatagcaacatct

SEQ ID NO: 28735 - DNA, 302 bp, Zea mays
tattgtatttgcagatgtatagtgctcacataggatctcctatgggaccccagttcacccgtccgtcacaatctggacagacctcatacaccaacgaaacacagatataattgtgtagcatatgtactttcatttaccattattatcatgcatcattatatttgggtatatggtgctgagaccggacaatgaaacccacagatggacattcagtggtcgatgcctcctagacgacagattctatcttcttcacaaccaggtatgggatattggccgccaccaccatggggatatcttacaca

SEQ ID NO: 28736 - DNA, 168 bp, Zea mays
atgtcatgtatggaagcaagttggtgttcatcatccacacaagaacatcatgacgactgacaggccactcgagctcctacacatggacctattctgcccgatagcttacataagcatcggcgggagtaagtactgtctacttattatggatgactattctcgcttcac

SEQ ID NO: 28737 - DNA, 315 bp, Zea mays
tgctcgtgctctataatagttggggaacctagatgctcgtctctatatatcatggagctatgttggtgacacattggactccacctacttagatggaaaggacaacatctcatggttaatgtacaaaggaggtattgacctttttgcgtatttgtacctcaaattccctccaatgcattttgcatgtgtttaatgtgtaacgggggagtaatgctaagttggtgcattttcctgctttataacctgctgtcctttgacatcattctatgttcttgaaagaaaatggatcggccgttgatgtcaaaaggggagaat

SEQ ID NO: 28738 - DNA, 355 bp, Zea mays
  unsure (1)..(355): unsure at all n locations
atttgcacaagaagatgccggcctagatgcatgcttaattgctaagactagcatgggctggctgtggcatcgtcgcttancacatgtggagatgaagaacctccacaagcttcttaatggagaacacgtgatatggttgacttacgtacaattcgtaaaagatagaccttgtgcagcttgtcaagcacgtaaacaagtgggaggagcgcatcacagcaagaatgtgatgaccacttctagacccctgtagctgctgcatatggacctcttcggacccgtcgcctatctgagcatatggggaagtaagtatgggctagtcattgatgatgacttttcccgctttacttgggtgttc

SEQ ID NO: 28739 - DNA, 349 bp, Zea mays
  unsure (1)..(349): unsure at all n locations
cttcaacttaccacgactcaagaacgtctgctatgaaagtgggtgtgtggacacantgaggggtcgacagagggggtgttctctgcggcgcggagaactgatttgggggagaacccgaatttgggcgctaccgtggatgatgggaggcgagaagtggtgtgctgggcgcgtaacaagtaagcggaataagggtgcctacaatttatagactccggctgagcttatcacgaattntggattgngatcgaggttaccgcggctaggatatttttacggtggcttgctcaccgtggcgcgtgagagggaaatggttcacggatgataactggttgcttgcacgatctttatg

SEQ ID NO: 28740 - DNA, 396 bp, Zea mays
  unsure (1)..(396): unsure at all n locations
ctagganatggacgtgaagagtgccttcctcaatggaccaatcaaggaataggtctatgtttagaaacctcccggctttgaagacagtcagtaccctaaccatgtttataaactctctaaggcgctttatgggctcaagcaagccccaagagcatggtatgaatgccttanggattttctcaccgctaatggcttcaaagtcggaaaggccgatcctactctattcactanaactcttgataatgacttatttgtatgccacatatatgttgatgatattatagtgtgggtctactaacgagtctacatgtgaagaatttattatgatcatgacacagaaattccagatgtctatgatgggggagtcgaagtacttcttgggatgtcaagtgaaac

SEQ ID NO: 28741 - DNA, 315 bp, Zea mays
caccgccgactggtctcgctgggtggagaatatgtgccgctggccattggctgctagattggtcgccaaccgtgtggaacatagagctatggttaaatactgtgcgtagatcggcaaagcaaggatgtcaattagaagcatccatacccattcctgatgttaactcagagccgtccggtggtaattgggatgatcacaattgtaggaggcgcaccgcattctcggccatggatcacatagtcgatggccatcattttcgaaccacggcatgtatggcacgatctaatcgagcgcctgcgattcgatcctatggat

SEQ ID NO: 28742 - DNA, 327 bp, Zea mays
acacattcttcacgtattttcttcacactcgatccccagcagaagagaaggccatcgctgttctcatactatccagtcggcgactacgccatgattgtgttttctgtgcagagctcactcccaatagctcccacgtatgccactatctacaccatgctgttaaccgctcaccgctgagtatctgcctttgtgcgcgctcggcattctgcgcaggaacggccttcgctcagccgacgatggctacctcgccgttggcctccaccactgagcgtacgctcgatgccggactgttacaccagtcctggcgccctgctctgaccatgctcg

SEQ ID NO: 28743 - DNA, 209 bp, Zea mays
agcactttgataatagaatgagaaaggaagaaggcaatcctagcgacttgaacaacaaaagaacacaagtgatcctctcacaagcccttaagtactagatgtagatttgggaactcggaatggattgattgctttgattgtgtcttggagtgttggactttgctcttgtaatgaatgaatatttcaaaaggcttggatggctttgaatg

SEQ ID NO: 28744 - DNA, 380 bp, Zea mays
  unsure (1)..(380): unsure at all n locations
tcttcagggaatntcaagtgacttctccagttcacaatctacatgaacaaagaaaaacatatgtggagatcttataaagctaccgaaacacttttcttactaaaagtaagcaaggcagctcgaatataaagcccactttattaacgaagcgtattgagcggtagagctcatttgaccagctgcaaccactaacttccagccactaatgccccgtttgaatccaccaagctaatagttagctggtacagattaaaaaaaactttacctgcaggggtaagacagcccttgcgcattatattaagaaaaagacattctcacgttagtcgagataacccccaaacccctggcccacccatacacagtggcaccgtatgcccatg

SEQ ID NO: 28745 - DNA, 360 bp, Zea mays
  unsure (1)..(360): unsure at all n locations
cacaatgggagtggagagatggcaagagtagcgtgtaccctccatggcaagaggctggacagtggtgtatctgtgctctcagttggcgtgaacccattctggtcttgagaaacccagtggcaagttgacatatgcaatggttaagtgctacatatgtcgtgtggttggagatccccacctaggtattaattgattcggatcattcgtacttctcggacatgaagatgtggtcactgccctacacgtagcaatcaagtgaaatgaaggaatgtttaaagactgctagcatatgccaagtgcctgatctatgatagaaagaactttatatgcacgtnactacttaacctgataataaaaatg

SEQ ID NO: 28746 - DNA, 231 bp, Zea mays
actaagcttgtggcgtttcagactgggggtgcctaaggcgacattgtatgtcttcgcgtgccccaccccaaatgggtcgacgcgatgccgatcgcatatggtgaagtgatgtggccggagacctgcgtgagagaggtgggaattccgctgccttcgtgttcgttccgcgcccacgtcaggtgctgcttgcaataaggggttacaagcgtccacgccggagagggagcgagc

SEQ ID NO: 28747 - DNA, 375 bp, Zea mays
  unsure (1)..(375): unsure at all n locations
tcttcagcttccgctctatggactagcttctggcgcccattcctacgtgggtacgcacctgaacgctntgctcacttctggcgcgtcgcttaaccgccgaaatggtctcgccacagccgccaaaaataactaaccacgtcttttgcacgcgggctcggcccacgtaaacaaatacgtaaacctaggcccacgtgaacgcttacgtaaagcctggagcacagtctgacccacgcagtagtagatgtgctttaaagagcggcccaatatgagaccactttgagctaaaggcgagggcgaggtattctgtcaacgatcggtcgggactccggactcgggagtcggcactcgggtctcgacgtctcgtctcgtctcgtc

SEQ ID NO: 28748 - DNA, 269 bp, Zea mays
ccttaaactcgcgttcttatgggccctgcacctgttattgtatatttcgacgcgcctcttggtgggcctgttcaccacataccatttgtcccatagtgtggaatgtcgcttatgggcgcatttgtcataaacaatacgtggatgtgcctgcaattgtcttattgtgtggcccgggtgatagaaccgcgttgcgcacttacatcgcttattataagacgctctcatgctcatctctgacttatctagtacagagggtttttgggcatgcc

SEQ ID NO: 28749 - DNA, 324 bp, Zea mays
gcctgtcacccctgtgagagatggtgtgattgatgaacctatgagagatcctcctcagaaacaagtgtgggtgtcaaaacctaaccatcttatgaacacacttgacacctttctcgacatctctagcgatcccctttctatagcccctcgaccatccaaaaagaatatcctcttccacatacaaaatccacccaagagagaggtgaagtaccattgtgaatattgtgagaaggatggacatctagcctatttctgctctatgaggaagagagatgagcgacgggtttctgagtcgagtagtaaggacatgaaccacccctctca

SEQ ID NO: 28750 - DNA, 353 bp, Zea mays
actcacttgtggatgaagattatcctctgtgtgtctaaataatgctaactcttgtaatggtggaagtcgaaactagatacttaatgtcggtgcgaccccccccaatccacacttttacttcctcccctccgaccactatgatctttcacttttcttattgtcttcaccccatccctttgatctctcttactacttttttctctagaatatttgaactcttcctttaactagtgctttaactctcttcccttgaactacttgacttctcaccttcatatgtggattttctttctccctaccactctttgacttgccacctctattcctcgtgggtacccacttttcctacttaa

SEQ ID NO: 28751 - DNA, 313 bp, Zea mays
  unsure (1)..(313): unsure at all n locations
agcttgtacctcggngaagagcatctgntgcagaaaaggtccatgtcttcattagttcgagatatctccgttatggtactggagaagggaaagagatggtctatcagcaaacatatggatgccaaccacagtgtgattaaaaaaaccatttatagtcatagatgaacaaaaaaacttaacatatggaggtagcattatggaagtggaaccaaccaatactgaaaattgttagtgggggcaccttaatagtcacgaccggtaagcacaaggagcaagttgttgtgggggcacctaatcaatactcattacagct

SEQ ID NO: 28752 - DNA, 386 bp, Zea mays
  unsure (1)..(386): unsure at all n locations
tagcagatcacagtgcacaagagctaaaaaatgagtgagcangagtggttggccagaaagcgtgcaaaataagtttgcggtatggccgtatttatacgcttgatgcgttgaaagttgaaagaccccacttgtcattgaatgttgctattctagcaaagggaaggtgttttttcggaccttcggcgtaaagccttcgttcatatcgcaatctgaatttattatttcaaacaaattaatattgcgaggggctactgttggggaccttcggcgtccgaaggtcctcaaaaacaggatttaacagtatttctgtagtacaatgtgtaaacaggtactctcggactaaagtcgacattgcagcagaccgaaataatacgaagcttgataca

SEQ ID NO: 28753 - DNA, 360 bp, Zea mays
actcaagcttctaagggaggacacgtgatacgttagacttacgcgctattccaacaagaagaccttgtgcagcttggcaagcaggggaacaggtgggaagctctcactccaccaaaaatgtgatgacaacatcaagaccactatagctgcttcatatggacctcttcggacccgtcgcctatctgagtataagaggaagaaagtatggtctagttatcattgatgatttttcccgcttcactagagtgttctttatgcaggataaggctgaaacccaagggaccctcaagcgcttgctcaggagagctcaaaatgagtttgagctcaaggtgaacaagataaggagcgacaactggtcct

SEQ ID NO: 28754 - DNA, 399 bp, Zea mays
  unsure (1)..(399): unsure at all n locations
agcttggatgaggagacancatcatcatcatctgatctatcatctaagaccccattcaactacgtaggctttgccatctttcttcttgttgcagaacactctttgtccttcttatcattatcatctttgtccttcctcttcttgttagggcaatacatggcaatgtgaccgggtctcccacactcaaaacatttctcatcattgaaagcatttcttcttgaggtttggactcttctaggatgacctctcttcatcttcaagaattttgtgaatttccttacaaatagagccatatctccatcactgtcactttaattttattcatcattactatcttctttttcaattggcttacaaacttcagctttgagagcaattgatacaatctttactttcttt

SEQ ID NO: 28755 - DNA, 431 bp, Zea mays
  unsure (1)..(431): unsure at all n locations
tctataggctgttattgtctctattgacaattgttggcttcttgtggtgagaagagncgaccacgggaaatagggggagtctttgaaatctttgatcaatctcttctggaatgactctctatatgcttcaacatgtgtgtttgacttagagatagagatttgagtctgatttgcaaaaacaaaccaagtggtggcataagatgatccatatatgccaaaattgaataaaactcanagtcagttcttatttgaagtgattttgcacttgctctaggtgctttatgttgtgttggcataaatcaccaaaaacggggagatttgatgggaaatgtgcctttgggccatttctaagtattttggtgaatgagtgcaaacacaagggcttaaatgtgaaaatatgctcatggatgaacaaagtgcaaatcacaagt

SEQ ID NO: 28756 - DNA, 372 bp, Zea mays
ggatcttaagtcaccgcggctgcagctactcctcttggaagggccgttcatcatcgccaaagtattgaagcccgggacatacaagctggtcaacgaccaaggcgaggtctacagcaacgcttggaacatcgaacagctacgtcacttttacccttaaatgtttcaagtcgatcatgtatctcggctcctttacatgtataaataaagtctaaccgtcaagggaagattagccttgcctcggcaaagaccgaccctccctcgggggctagaagggggaaccccctctgcgcaaaattttcctcggaaaagttttctaccaaaacgactttcatgccttttgactatatcgataacagaatcctaaaaacgaac

SEQ ID NO: 28757 - DNA, 453 bp, Zea mays
acttgatacacggattgaacatcgccatatctctgggcgttatgagattgatggtatacggagattctctggtagtcatcagccagataaacaaggaatgggattggtcaagtgattcaatgggaaaatactgcgctgccgtcccaaagctggaaaataaattcgagggtctggaatttcatcatatagaaagagatcggaacacggcagccgatgtactgttcaagctcggatccggtcgaactcaagtcccacccggggtcttcgtgcaagatattcttcagccgagtatctcaatagatcaaacagaagagtgcaacatcatagatcaacctgagttagactttgatgactggagacgatcgattattaagtatataaagaatgaagaagaaccagatgacatgaacttcggcgagcgcattgccaggcagtcagctcactatacactca

SEQ ID NO: 28758 - DNA, 308 bp, Zea mays
agcttgtgaacagtacaagttcatgagggaaaaagcagcttcggctgatcagccgaagcccatgctgctgtgtgaggatatagcagagcagaaggtgctattgggctcgcaattatctgaagatcaagagaaaaccttgataaggtttttattcaacaataaagatgtttttgcatggtcagccaatgatctatgtggagtgaatcgggatgttattgaacattcgctcaatattgacccatccttcagaccccgcaagcagaggcttcggaaaatgtctgatgacaaggccgaaggggctcgcaacg

SEQ ID NO: 28759 - DNA, 394 bp, Zea mays
  unsure (1)..(394): unsure at all n locations
tgcacctatgtacattggtccattcttggtgcttgagcattgttgtccactggcgtaccgactacaactacctgatacattgtctgctgcgcctaatgtgtttcacgtgtcccaattgaagaagtgtctttagggtcctgatcgaaccgttgaagtaacagatgttgccttgaaccggatttgacatattctgaacaccctattctagtcttggataaaaaggacaggggtacctgaagaagaaccctccaggtttataagatacaatggaaccagcatttcaaagatgaggctacatgggaaactcaagactttntatataagaatttcccaagctttctaacctcttgttaattgtaaagcctgtataactgtgtaattaagaaatgacccc

SEQ ID NO: 28760 - DNA, 335 bp, Zea mays
actctagagtgcagctggacgcctgcaagctcttaactcgcatgtcttatttccagattgtacctaaaggctacagacaatgcattccaagccttaagtttcagaaactggcagaagtaactcgcacaatgctcaccggtcccctttatgatattgtgttataacaggtccttttcattttctacatacatcattgatgtgcatgggttctataactgcgggtataacaaccaatccattctgaaaacctttcttcgtggcacgcagaatcagccgatacccatacagggagacctcgcccaattagaacagaaacccaatgtatccctgatctt

SEQ ID NO: 28761 - DNA, 436 bp, Zea mays
  unsure (1)..(436): unsure at all n locations
tcagctccatctatgctatggattgtctttgagtcagtccaaatgccttctggccttctggcagcttcctgacttccatgtataacgatgggtccttgatccgaaggtatcttcatgcaaagataggcaggatgaagaattgcttncaaagcattgagggtgccacgaccgataattgcattgtaagggtattccatgtcaacaatgtcaaacacaacttgctcagttctagtgttggtgatgaaccctaaggttactgacatggngatcttgccaatgctacaatctgtctccctccgaagccacagagaggatgtgtagcatcatgaatcttatcttctggctcttgcatttgtctgaaggccttagcaaatatgatatcagctgcactgcctgtgcaaccaagacattgtggaccatatatcctttgattaca

SEQ ID NO: 28762 - DNA, 453 bp, Zea mays
  unsure (1)..(453): unsure at all n locations
agcttcttggcctcagctcccaccgccaccaccactaaaacccacttattcccgaagccagcagccagaagggcgccaacattcccaacaacaacgtgacttcagggaggagtccgaagctcgtacagtcaatagcactgtactaaaatcaaagcacatatactaagcaatatcctgcttctgaaatacttttatcttctacgccattttgcttttgaataaggaacaaataatgaaaatttagttntaatttcttggaatgattntgcttctatcagaatgaaatatatcttcttcacagatttacgaagctcaaaagtcgttcataagggaatgcagagcccaaaattgtgaagctacaaaaaagtcgttcctaagggagcgcaatgtaagttntctgctcaaaagtcattccaaaggggaatgcagagccanatactgctgaaatataag

SEQ ID NO: 28763 - DNA, 451 bp, Zea mays
tctttgcttgatgttccagcatccattaagtcttctattgctcatagacctgtttgattgagctagaccgcactgaataaccaagaacacctcgaattgtctttggttttcaccgccgtcgtgagcagacgaactctatgccggatttgtgcaattgatggagggattagggtcgccaggggtaggaataggtgtcgaccgagctagggcgtcagtcgttgagcatcccggccggtacaagatcgcaggagggcgtgctcaccgccgttcgccgtcggggacatgggtttgcgaagaaatagaagtgagaggggttttacacaaatgtctgagagacgcatgaatagtgtcatgacctctttccgggtttttcaaatcgtcggggttctctgtgcaaaaccgctagcgcgggcgcgcgcgccagtgtgttcttcccgtggtgggctgctcg

SEQ ID NO: 28764 - DNA, 278 bp, Zea mays
agcttctaatgtctcggcgaaatactcgctcatctatgatagctgagtgacaaagtcatactgttcctattcctcactgcatacgatgcggaaacctaaaatgtaacgactgatgagcgtaacgagtgagatatctttcgttaccagttgcgagatctctcggctcttcacagaccttactgctgccgtgccaactgcattaaagaagccaccatcggcgaacgctttgacgaagtcctttcccgcaaacactattgatgtacgacagcttatcctta

SEQ ID NO: 28765 - DNA, 317 bp, Zea mays
agcttataataagagaatgatgtttagctctaccatatgtaacaatagaaggtgagttatgccaacatggagagtgctctccactgctcacgtgttgatccagagctgaatgttgagaattgacgaatgaagtacatgcacgattgtatggatctcacattggatctagacctttactggggaaagtcttcagacaaggattctatttggccaaggcagattccgatgcagcggatctgtgtcataaatgtgaaaattggcgaatatactcaagagaccagaaacaactcttcgacgttaacccaactgatacaacc

SEQ ID NO: 28766 - DNA, 372 bp, Zea mays
  unsure (1)..(372): unsure at all n locations
tctagtggaggaataatatatttttatttacttatttttatccacaaaactcttattttcttctcttttctaaattctacaattccttttagattgtaaattccactttgaactttagtatatttcttgccacattattattttattttgtcacaacgtgcacacaaaagaaaatcctagcatgatgcatgatttatttgagtgttcttttgttaattatttatctgggcaagtggggtgtccacatgaaatgatggattgacataacacacataaataagggaatataatttctccttttagattnttcttacaaagtgggtattacaccagctaatntggatttttctagttagaccatcgaagtcgaga

SEQ ID NO: 28767 - DNA, 106 bp, Zea mays
tgggctacgctttggctagatcagctattttccttgtgggagcgggactcaacgatttggtatgttctaacacaacatatagcacattcgccatacttctcctctt

SEQ ID NO: 28768 - DNA, 222 bp, Zea mays
ctgaccatcaagaagctaacgagccactgaacttcgatatccaccctacacatgtgtagattaagctgtatgaactcttgtgtgaagaacattgctaattgtaaacgcttagctgtatgaaaacgtgtagtttagcctaaagggggaacatcatatcagaggggggctgttaagacgcatactaaattatttcctatcgaccccaacgattcttatctgaga

SEQ ID NO: 28769 - DNA, 320 bp, Zea mays
agcttgaatatatcttcacccactcagaattgaatatgatacaaaggtgatggctcgagctgatcaaggattatgaattataaatccattatcacccatgaaaagcgaatgtagtagcagatgcgctcagtcgcaaggtttcctgtcattgtctaacagtgaggacttctgacattacattatgccaggagatggagaaattgaacctgggaatgattcaacatgggacttcaaaccatttgaagctggagtcagtcatcctacaaagaataattgacgcacaaaaagatgatgagggtatgaagcacatacctgagaag

SEQ ID NO: 28770 - DNA, 433 bp, Zea mays
  unsure (1)..(433): unsure at all n locations
aaacaaaaattcttgatatctttgctgtcaaaccgcttgccgttggccactgttagctcggaccgtacttcgaagcggcaaacaatggtttgccagaagaatttttgggcagtctttgatgttattggagaaacagccctcgcttcgatccatttggtgaagtattcgacggctaccaaggcgaacttgaggttcttcttgagcgggggcaggggcccgacaatgttcaggccccaacgctggagaggccatgtatgggcaatcagctttgtatactgcgaggggctgcctgaccgaggagaaaactttangcaggcttcgcaagaccttgtgacccgatttgcggcgcagatcatagcgggccaagtaaacccttggcggatcaccttggcagctagggccctttgccctgcgtgcgaaccgcacgtgccac

SEQ ID NO: 28771 - DNA, 411 bp, Zea mays
  unsure (1)..(411): unsure at all n locations
agcttgcacccaggtacattggtccattcctggtacttgagcaatgtggaccagtggcataccgactccaactacccaaaaccttgtctgctgtgcataatgtgttccatgtgtcacaattgaagaagtgtcttcgggttcccgatcgaaccattgaagtaacggatgttgtccttgaaccagacttgacatactctgagcaccctattcgagtcttggatcaaaaggacagggttacccggagaaaaactctcaagttttataagatacagtggaaccagcattctgaagatgaggctacaagggaaactcaagattttctagaaaagagattcccgggctttctagcctcatgtaatttataaagtgtatatagttattgcaatanaggaatgaacccccacaccaccc

SEQ ID NO: 28772 - DNA, 426 bp, Zea mays
  unsure (1)..(426): unsure at all n locations
ccagagaacttagcatcttgataggtaaggattcggtcattacctttaaaatttcttctacttcagcagcagaaggcatcgaaggagcttcctcttctatctcagctatcttcagctctggagttgcaatttttctcttcttcgaggttgccaccttcagctcaggactggntttcctctttttcagagttttttcatcttcttttaccatcctagcagcctatctactcaaaacactaacaactctcttcctttttgccccttcggcacccttgttgagacgctcgtaatcaggatattcaaaattcagagcgtccattacgcggtttaaccttcgttttggtcaagtaccgaaggccgcagtcattagttgatcctctnntttggtgtaatttcctagcacttcattacacactgtttcaatca

SEQ ID NO: 28773 - DNA, 274 bp, Zea mays
agctcggacagtatattgcgatggttcttgttgaaccttccgagcaagagcagctgcgggtctagtcgcaccctcaaaagtcaaaacatgattcaccaccaaactggatatcagctgcacacataatattgctgaggaccaaccacttatactggggctttggaaactaagggccatgggaataaaaagggccatcttaaagactaattctcaagtcatagctggccatgtggataaaagcagcagtgcacgagaacccaagcttgaaaaatat

SEQ ID NO: 28774 - DNA, 432 bp, Zea mays
  unsure (1)..(432): unsure at all n locations
tgccaatacctgtcgaagcaacagcacatgccagcgcagcttctgcagaccataccagtaacttggcctttcgcatgctggggactggatattattggacctttcaagaaagctcaaggatgatatacccatgtgttggtggcaattgacaaattcactaaatggatagagtttcagcctattgcttctttaacctctgctaaagccgtggaattcatacaaagcataatatttagattcgggataccaaacagtattatcactgacttgggatccaacttcaccagctcagaattctttgacttctgcgagcaaaagagcattcagatcaagtatgcattcgtagcacatccaagagccaacggacaggttgagcgggctaatggaatgatattagaggcactcangaaaaggggtcttcattagaatgaa

SEQ ID NO: 28775 - DNA, 325 bp, Zea mays
tgtgatgccagatccagcccatgtgagtgctagcaattgagcaagagtcttattcatctctatcaaaatctaccaaggatagctgacccttctacactctcttaaacgctatggaatcatgacattgttctaaagacagggactccaatatcacgaaaaagacagtgagggcccaattgacatagttgagaaacagaaagcgagttgttatctatagaatctacaagaaacacattggaaatggaatggtcaggacatataacaattttaccagtacctttgaccaaaccttgaataaaagcgccgatgtgacacatcggtgggg

SEQ ID NO: 28776 - DNA, 369 bp, Zea mays
agcttatgaagattcttcatccctttatggtaaagtcagtgatgccatagccatcccatattggttttagcgattaagcaagtctcaagtatagttttatcattcgaaaaaatctactagatagagctttccctttaacactcccttacaagcaattgaatcatcacttcttataaaaatggtgacactaacatcagtaaaacaaacaattgtaacccatttggcataattgagagacaaatagtagattgtaattaagtgaagtggactggggcacgtgtgggacggaatagtcaggagaaataacaattttacctagaccttttaccttccattgattcccatcaccgaatgtgattgaatcctatg

SEQ ID NO: 28777 - DNA, 442 bp, Zea mays
ttagctgattcagggttccttgttggaccatcctcaggtttatcttttccatctcttgacataaagtgttgtcagaggtcttcgccatatgacagtggcaggaaaccttaccgctcagtgcatctgccacaacattggctttacctgggtgataatggatttccagttcatagtccttaataagctcaagccatcgtctttgtctcatattcaattctgactgggtgaagatatacttcaaacttttatgatctgcatagatatgacaaatatttcccagcagatagtgacgcctaaatttcagggcatgaaccacagcatctagcttcagatcatgagttgggtaatgcttctcatgtcggcgcaactgccttgaagcatatgcaattactcggccatctcgcattaatacacaggcgagtccactgcctgatgcttcaca

SEQ ID NO: 28778 - DNA, 452 bp, Zea mays
  unsure (1)..(452): unsure at all n locations
agctnttcatataaggaccctagaatatgtggcaaaacaaaaccacaaaaggaagccgcgggcgcgcaagacttggtcgtcgaattcggcggagcattcacgaccatgtcatgcgcccacacccttcgccccaacctacccacctgacccaacacaatgagatgatcgagagagcgcgtgtgttcttccttctataactcacctaacacatgcaagaccatagagacgattcaagtatttgattcgagttccctccacctcaactagtaaggtggaactaaatgtttccacactcctctaaatgtttccatgcacctatccataaatgggcctttgagatttttaggaataattctaaaattaaagtgggctaggcctaataatttcaacaccccaccaaatctcaaagtcccatcatgactttgcctcaacccattattgtttaatataat

SEQ ID NO: 28779 - DNA, 410 bp, Zea mays
ggtccttataccgcaaccagttaatgcgattttccttgggtggctcggctaccattaaattttcagagctggcccaaccaatgatgtcatgatctgcatctatatcactaaaaatgaaaaatagagaactaagttaggtcaatgggtgctccaacattttgctcataaaaaatataaagggaatgaaggatatatgatactgggaaagatattacaacagaacaaccaaagtatgccaacacatttctttgctctgataggacacaagacaaatatttcagtagaacttattcagcttagatgtatcaagaacaactttcaatgagattactaaaggtatatttgcagcacaatagatggtgtttcataatgttcaggagaaccatgagacacattcattctcaagatta

SEQ ID NO: 28780 - DNA, 357 bp, Zea mays
agcttctaaagggagaacatgtgatatgtctaaccaatgttcatttcgaaaaagatagaccttgtgcagcttgtcaagcagggaaacaggtgggaggagcgcatcacagcaagaatgtgatgaccacttcaagacccctggagctgctgcatgtggatctcttcggacccgtcgcctatctaagcatagggggaagtaagtatggtctagttattgttgatgacttttcccgcttcacttgggtgttctttttgcaggataagtctgaaacccaagggaccctcaagcgcttcctcaggagggctcaaaatgagtttgagcttcaagtgaaaaagataaggagcgacaaccggtccg

SEQ ID NO: 28781 - DNA, 339 bp, Zea mays
  unsure (1)..(339): unsure at all n locations
agcttagaagcactntcttcttttatttcacccgacatgatctttcctcacgcggttaagcgttagaacgaggattatgctctgataccaattgaaagttgcctaaagggggggtgaataggcaagttaaaaactttttcaacaaacaactagaagcaaactgggtaaaactgaattgatctctaaattcacccagttaactttggaaatgagatgttctaaatgatccacaaggttcaaagtagtagatctgagaatggcacttctcaaaatccacacaccaaaaagatataaacaaatcttccacgccatggtgagagaacgaagaacacaaaccaa

SEQ ID NO: 28782 - DNA, 362 bp, Zea mays
taagttacggaactagaaataataatagatatagatatgataagagaagaaacagaatatgaatatgtgctctaggaaaaatagtaataataatatataaataaatatatcatcttatactggtatattaactgtgcacttgacctatgtgtaaaactcactaacaaacttatattaaaatgggtaactttgaaatggagaaaggaatgcaaaatataaaagaaaataaaaggagaaacttacccactaacctgtgccgaaacccctcctacagcccactatcgatgtccctttccccctagtgggcccacgctacctccttttgtttatacagtgacacttatacgcaggtcccactagtc

SEQ ID NO: 28783 - DNA, 243 bp, Zea mays
atcccctatgcgtctcgtcagtggcgaaacatgaattgagactccccactcatgaattataaactggcaacccgttgtgcatgcacttaagatatggagacatttcattatgggtactaagagcccagtatacaccgatcattagaagttgaagtacataatcactcagaacgattctcacccttagcaacccttgttggtggagcttattaaagataacgatttggaaattactatcacccg

SEQ ID NO: 28784 - DNA, 313 bp, Zea mays
  unsure (1)..(313): unsure at all n locations
gcttggaagcatccagtttttgaaaagatcaaaattaactggtcctcanaatgcaatgaagccttcaagcaactgaaggtgttattaaccaatgctccggtattagctcaactggacattgaaaagccttttgatgtgtattgtgatgcatcacgcagtgagttaagttgtgtcttgatgcaagagggccgatttatagcatatgcctcaagacagttgcgccgacatgaggaacattatccaactcatgacctacaattaactgttgtggttcatgccgctgaaatatggacgtattatctgctggggaata

SEQ ID NO: 28785 - DNA, 268 bp, Zea mays
tcatgaaggcagggcttcgggttcccttgagttaagttttagttgaagttctgaagactcttgagatttaccttcatcagatgacccctgaagctatcattagaatggggattttcatttgggtcatgaggagcctgggactatagccgagtgcaaaatgcttctacaacatgcatgagctatcctatgagacgaaggctactggaaaagaacaatatcataataactccggctggtatggcttctttcctcactctgatgtgagcta

SEQ ID NO: 28786 - DNA, 291 bp, Zea mays
acgcgcgtagaccctaataccctcaaccccgacgccgagagactgggtcagagaacgtggacgatggaagcaaaagggctggaggtggggtcgtataccgcggcggcgaggaaaaaaggaaccagcggagggtgacgatgatgtggttcttgttgccacggagggcgaccaattggcggggagagaaaaacgaataacagggtggtgggaggcagaaacaccgacgcatgcgtttcgttctgccgaatccaataaaaaatcgcggggtcgagaagctgtttccacgcgtcg

SEQ ID NO: 28787 - DNA, 433 bp, Zea mays
  unsure (1)..(433): unsure at all n locations
ttatcacccttgcatattgcccctaattttctatcaactatcttcctatcctttctacaaatagcaaaggaagcatttaaagcatgataaattgtagagggaccattcataacttttctaggaacatgaacaatattcttcctaggtatatctctaccatgcatataggaagaacgggaagcatacatagcataagagtcataggcatgtgaatcaaaagtattacaactcctatgagactgtcttttatcattgtacataaaagcatggttctttttagtactacttgccataggggccttccctttctacttggcggagatgggagccttatggcttgttaaagtcttggcttccctcttgaaaccaagcccatccttaattgangggtgtctaccaatcgtgtaggcatccctagcaaactttaatttat

SEQ ID NO: 28788 - DNA, 409 bp, Zea mays
  unsure (1)..(409): unsure at all n locations
agcttcaacagaatgacagcaaacgtccttcattcttatatggcagaaatgtgctaacatatgttgatgatatcatagtaaaaagcacgaagcacgaaaatcacattgtcgatctacaggaaacatntgctaactttaggcaagctggcctgaagttgaatccagaaaaatgtgtcttcagagtaaagaagggcaaattccttggttgtctagtttcaacaaaagggatcgaagctaatccaaacaaaattgaagccattctttggatggagccaccaagcacaaaaagggggctcagcggctgacaggaagattggcatctttgaatcgatttatatctagatcagcagagaagaaattaccattctttgaagtgctgaagtcggccgaagtctttcaatggggatca

SEQ ID NO: 28789 - DNA, 426 bp, Zea mays
  unsure (1)..(426): unsure at all n locations
nggcggaaggacagctgtcggagatgtcgagtccttgctgacgtcctcttgcttccgtaagggggtgagagccgccgtcgtcatagagcgtgcgaggcgccatcattgcttgtctggcggagcgagctatatgggacaccggtcttgtttcccgtagcctgagtcagcttggggcagggtaatgatggcaccccctgttgacgtggtcggtctgtgccctaagttgggcgatgtggaggctcctccgaggtcgaggtcgagtctgtcttccgaggccgaggtcgagtccgagcccctgggtcgggcgaggcagagaccgtcggctgaggccagggctgagtccgagccctgtggtcgggcgaagcggagttcgtcgtcttctggggctgagcccgagtccgagccctgngtcgggcggagcggagt

SEQ ID NO: 28790 - DNA, 423 bp, Zea mays
  unsure (1)..(423): unsure at all n locations
agcttctaaagggagagcacattttatgacttaccaatgttcattttgagaaaggagggatttgtagtgcatgtcaagcaagaatacaggttggagtccatcatccacacaagaacattatgatgactgacaggccgcttgagctactccacatggacctatttggcccgaacgcttatattagcatcgacgggagtaagtactgtctagttattgcggatgattattctcgcttcacttgggtattctttatgtaggaaaaatgtcaaacccagtaaactttaaagagattcttaagacgggctcaaaatgagttcggattgacaatcaaacacataagatgtgacaatgtgacggattttaagattctcaaatcaacgatttcttgatgacggggcatnaaccataattttcttttcctac

SEQ ID NO: 28791 - DNA, 428 bp, Zea mays
tctaagggagaacacattttgggactacaaaatgttcactttgagaaagatagggtttgtagcgcatgtcaagcaggaaagcaagttggctcccatcatcctcacaagaacatcatgacgatcgacatgccgtttgagctactccacatggatttattcggcccgatcgcttacataagcattggcgggagtaagtattgtcttgtattgtggatgattattctcgcttcacttgggtattctttttgcaggaaaaatctcaaacccaagagaccttaaagggattcttgagacgagctcaaaatgagttcggattaaggatcaaaaagataagaagcgacaacgggacggagttcaagaactcacatatagaaggctttattgaggatgaatgaatcaagcatgagttctcttctccctacacacct

SEQ ID NO: 28792 - DNA, 414 bp, Zea mays
atgcatgcaactgtgcaagctgatgatgcttcatattgcttaacagaactggcagaacggctaatcgtcattgttttgcatgtgaaagcctgctactccagggaggcgaatgagaagagcaaagaatgaacataagggttttatcagatcagatgaataagcaagctttcagtttgaggacagaaacagttccgtctcaactctcaacttcctttgtgctggccaaaaactgaattgcattgcagcacagcgccctgcaaatacacctgccaaaatgtgtgcatagcgcattttgggccatcggccacttctgtcggtctacccaaagctactaaatgctatatacaatgccctttgctactcgagaaagcaatgctttgttttttaattttccctaacaactccgggtttcta

SEQ ID NO: 28793 - DNA, 407 bp, Zea mays
  unsure (1)..(407): unsure at all n locations
agcttggtgccaatggagaagaataaatccttgaagtcttggctgtcaaactgcttgccgttgtcaactgtgagttcggacggtactccgaagcggcaaacaatgttttgccagaagaatttctgtgcagtctttgatgttattgtggaaacagccctcgcctcgatccatttggtaaaatattccatagcgacgaaggtgaacttgaggttcccctgagccgtgggcaggggcccgacgatgtccatgccccaacgctggagaggccatgtgtgggcgatcagttttgtgaattgcgaggggctgcctgatcgaggagaaaacttctagcaggcttcacaggatcttgtgnacccgattgcggtgcagatgattgcgggccagtataaacctttgcggatcacctt

SEQ ID NO: 28794 - DNA, 472 bp, Zea mays
  unsure (1)..(472): unsure at all n locations
acctataaaactcagctgacaaaagggtatattgtggtttgatgaacgactggccgtaccaatcaagagctccagaccaaaattttggatgaagctcaccaatccaaactatcgattcaccccggaagcaacaaaatatactgtgatttgtaatcaaagttttggtggacaaagatgaagaaagagattgcatcgtacgttgcgagatgtgataactgttgcagagtcaaggccatccacatgaagccagctgacctattgcagtcattatctatacctaaatggaaatgggaggagatcagtgtggattttattactggacttcctattactcaaacggggcaatgattcaatatgggtgattgtggatcgactcaccaattcaactcattntctgccttgtcaaacaacatatcgaccaccgaagtaagcgaacatttatatcatagaaatggttcgactacatggaatt

SEQ ID NO: 28795 - DNA, 365 bp, Zea mays
agcttatatatttatctctttacatacccttatatggcatgtaattgtattgtcatcttccatcccatcgccagcattattattatttaattctccttcctggtacaaataatatgttactatgcataatatatgttacaaatagtataacatttaaacaactgagatattattaccttgtcttcctcagcatcactaacattacatgactcattacattcaatatctggctctaatcgacatagaacgccatcgagcttatccaacacattcatcgccttgtcgtaccctgcttttgacatacatgcctggcgaactattttcatttgttttgttaacaacatcttttgtccgtatgatttaat

SEQ ID NO: 28796 - DNA, 444 bp, Zea mays
  unsure (1)..(444): unsure at all n locations
aaaactaagcttgtatgctggtctggagagaggaggaacagggattgtttttttttaaagtgagagaaaatagatctatatataagtaacaggtaattgcttatagatgagctgaaagaaaatggtaaatacgatacaaccaggacagatcaggtccatagctgagggtcagctggcggccttcatggtgccaaaaattgggtctctcaagtataccttaagtatattacttagttatttaatttatcatacaatggtcgtgtggttcactcaacagtctcatgctaagcagtccagcctctgctatcttcctcatgtaacataagttagcagcaactgttggcctgctcacgtaagccagcttctaagttaggacttagaacacataattctagtcacggtgctggcaccacgtntgcaaaggactggacatgactacaaacg

SEQ ID NO: 28797 - DNA, 328 bp, Zea mays
agcttcagcgagattcttcaggcttagggtataaaaaaagaatccgagtgttccaacacccgagtgaggtggcggatagatgtgcagtgaagttgggatgatctggacagtgtgacccagctgatggccgatatctagaagaaacggatattttgcacgagtttatcaaacggatgtagcgtgcatatatttaccgaatttagtagtatggcactggtaatttcaaaaaaaaaaaaaaaactgatgttgatgatatatagctgttggtgtatcgtctaagcccaagtggatgttaagttagttcgtgccattggatggaccatgctac

SEQ ID NO: 28798 - DNA, 432 bp, Zea mays
tgcaagtccagcatctgaaaggtgtggattgaattctgtttccagcaaaatgtttgacgacttgaaattcttatggatgatggatggagaacatatttcatgaaggtacctacgagttatattttagttcaaagttataaggaactacacatttcataaggaaaaatgttatagtatatatcaagtaatgaacaagctcaataatcattgaagcatattcttcaatcactcagtgtaatattttgacaatggtcagtgcatattcacagaagtagaaaagagcagaaaatatgcccaaacagaagcctatgtttggttttattatctaaaaatataatacgcaaagatgctaccagctcatatatgaatagcaagttatgtcaaaagtaaaaagggcagacccagtgcccgaatgctatgaagggataaccg

SEQ ID NO: 28799 - DNA, 384 bp, Zea mays
  unsure (1)..(384): unsure at all n locations
agcttatctcaacctgataggaattcttatccganaggggttatcctaaaggggtttccttgagtcttatggaagaatatgttagttttgttgatactacttatgcttcttattgtattatatggtgataatgcaaaatcagtgcttccgttgatatgaatcatttagtatcttctgtgtttatcctgtaatagatattcatgtggttctggtgctttaaaattgttttaatttggtatcttaatggtgaaaagtggtaggttgatatttctgtggtatatctattcaattggtgtttaactctgattctgtgcatctatgtgtcatacgcatcacggtttaattaatgacaccatgcatcccacaagttctaaaggataataa

SEQ ID NO: 28800 - DNA, 379 bp, Zea mays
gagctccttgaagatcttgttcctatatgcatctaggctacctatcatttgtctggtgcggacaaattcccaaatactcttgtaatacacacagaacaaaatttctttcgaatagatcactggcaagacaggcatcagtcatgctccatgagattatcaaatatgtgcaagtcattgcaacgacaaggtgaggtagcgtcagtgcatctgcatctgacatgttttggagtatatgtggcatcttgttactatataaccagaattctaatacaatctggagcttgcagtccttgtcaatggaaggtcattccgaatgtgacgtggttgctgctgtcaaatgaataataactttggcatgggagaaaagaaatcatgctgc

SEQ ID NO: 28801 - DNA, 387 bp, Zea mays
cccacttgaactatctttctttttcaaagcgacgccataggcgtggccatcttagaaaatacttcaataaatctccgattatagccagctaattctaaaaaacttcgaacctcattaactgtagagggtatgctccacaccactatctccttgactttggccaaatccactgatattcctccattataaatgatatgtgcaagaaatggtaccgtctatccaaaactcgcacttgctgaacttggcatatacctggttatctcgcagcttctgtagaaccaaccttagacgatcctcatgatcactatcactcttggaataaataagaatatcgtcgatgaataccacgacaaatctgtcaaatagtccataaacaccttgttcatc

SEQ ID NO: 28802 - DNA, 300 bp, Zea mays
gaagagagagaactaaaatgtttactagaaggccaaaggcgaagcacaccttggaaaggagtgggattcagatagctcttcctccgactccgacgacaaaggacttgccgccactgtcttcaacaaataagctctcttccgcaacgagcatcacacttgcctcatggcaaaggaaaagaaggtaatcactcgtaatgctaatacctatgagtcttcccgtgatgatgaatctagtgacgatgagaatgaatactcttgcttattcaccggattggatagaactaacatgcttataataat

SEQ ID NO: 28803 - DNA, 349 bp, Zea mays
  unsure (1)..(349): unsure at all n locations
ttgggcaaatctttgtcttgtaatgattgcttatttagngcgtaccggatattacctggtttactttgtatggaccctcccagcttgacgatcatttcccaaactttcggtctttgtttcttagaggcaggatggtcttccacaccaggtcccctacctgaaatgacttaactttgaccttcttgttgcaggccttggctaccatgatcctgtcctttatctatttctcctaaggctgtcattctcttgtcggttacttcattaatattgtccatcattgaattataataactcaccgacagttagatcatttatgcttggcgaacctgacaacatttaaacttatttt

SEQ ID NO: 28804 - DNA, 416 bp, Zea mays
  unsure (1)..(416): unsure at all n locations
tcgtaaaaataatccccgaagctatgcctcttatatcaatattgnntctccctgtaacttggcatgatttgccctttctcaaagcattttccgaagatcgataacatgcccccttcttgtgccacatgcagcatgatgtatgatgattatgctatgcaaaatgatgtgatgatgttatgttatgcaaaatgatattttgtgccgaagatacgcacattcctgcaatggagcacaatcttttgtatcaatactgactttttcattataagcctcccttaggagcttcttcgccttttacttcagcggaatcagcgtttatttttcgctgtaagttctgcatccccttaggaacgtctttggaacttcttcgccttttactttcggcggtatcagcgctgacttttcgctgaagttct

SEQ ID NO: 28805 - DNA, 413 bp, Zea mays
  unsure (1)..(413): unsure at all n locations
agctntgaggaagacccgtagaattcttgtgagcaatgcangtggattctccctctacatttcttattgtacccaaataatacattcaataagatttacttttggatatgtgcataatttgatgggtttttcttaaataggattaactagaaataccaaccttattccttgattaacctgngtttaatattatgcttagtaactacgctattgctcaattttatcactatggtgtcactttttaatataatattgttccgaagatgaaatttatactattgttgttaatccgatgattaaacaagagtattntgtattaaacctaacatggagtgaccacccaggaaaatagtgcaaccatgagtgctatcatggctctggctttggtaaatagctttatagacttagtgctt

SEQ ID NO: 28806 - DNA, 430 bp, Zea mays
tgccatatttcacgcaagaagtatagtttcagttagtgagacatgtcttttctagcagttttttaggctccttggtcgtcgaggagcgagcaagcaacgcttcattgctggcctgaattatagtttctgtaaacacggtgcactcaaccacgtaaactcaaaaaatgggaggtagaagtctggaaaggtgctaactgaccaacctgctgaaaggcacaagtgacctgctgaagactcccgcaacagtaacctacaaaagaatgtagcatacattacaacaagcaactggtaatagtttgtgatgagctcatgtataaaaaagagaataaaaaagacagtttcagaatcgctggtgttgtttagtggcacgcacgcttcattccgtcatttgctaacacacacttgatccattcaccaaaaatattcagca

SEQ ID NO: 28807 - DNA, 423 bp, Zea mays
acgacgatgccacaaccagcccatgctagtcttagcaattaagcatgcatctagaccggtctcctcttttgcaaaatcaactaaataaagtttgtcgtctagtacacccttataagctaatgaaccatcacttcttctaaagacagacacatttgcattagtgaataagcaattatatcccatattacaaagttgactaacagacaacaagttatacccgagcgacttcactaaaaacacattataaatgtagtgctcggatgaaatagcaatctttcctaaacctttaaccttgccttgattcccgtcaccgaatatgattgaaccttgggaatctttgttctcgacgtatgaggtgaacaatttcttcttccccgtcatgtggtttgtgcattaactggacgataatccacgcttgagccg

SEQ ID NO: 28808 - DNA, 435 bp, Zea mays
ttatcacatggacgtgaagagtgccttcctcaatggaccaatcaaggaataggtctacgttgagcaacctcccggctgtgaagatagtgagtaccctaaccatgtctataaactctctaaggcgctttatgggctcaagcaagccccaagagcatggtatgaatgccttagagatttccttatcactaatggcttcaaagtcggaaaagtcgatcctacactctttaccaaaacacttgaaaatgatttgtttgtatgccaaatttatattgatgatattatatttgggtctactaacgagtctacatgtgaagagtttagtaggatcatgactcaaaaattcgagatgtcaatgatgggggagttgaagtatttctcaggatttcaaagaaaacaactccaagagggcacctttctaagccaaacaaagtatac

SEQ ID NO: 28809 - DNA, 380 bp, Zea mays
  unsure (1)..(380): unsure at all n locations
agctntaccaaatggacgtgaaatgttctttcctcaatggaccaatcaaggaggaggtctatgttgagcaacctcccggctttgaagatagtgagtaccctaaccatgtttataaactctctaagacgctttatgggctcaagcaagccccaagagcatggtatgaatgcctaagagattttcttattgctaatggcttcaaagtcggaaaagccgatcctactctctttactaaaacacttgcaaatgatttgtttgtatgccaaatttatgttgatgatatcatatctgggtctactaatgaatctacatgtgaagagtttagtaggatcatgactcaaaaattcgagatgtctatgatgggggagttgaagtatttc

SEQ ID NO: 28810 - DNA, 465 bp, Zea mays
  unsure (1)..(465): unsure at all n locations
actaagcttctncacgcgtagcttctgaactggatcattcttctcccagaccacttcttttcatatcgcgtacagcttcattccaaggccgatagtccctgtgaatgtattatacttggaaaacatgttagtcatatttttgaggaccttctaaagatgaaggcccccaacagcggctagccaagcaaccaaggttttaaatagccggctaatagcgactatttagccggctatagcctttcatgaggtctagagctaagagatgcactatttagcgctaatcaaaattagccgctaatagccttatttaacccgctaaatacgtaacattaactcgatttagctgctaaacatgcaatcttttttactggccgaacctttgaaacattgaggcccaaaaacaaattgtgggcaggccctttaacttaatgttngttaagtagtggttaaattacttttacatgt

SEQ ID NO: 28811 - DNA, 415 bp, Zea mays
agctggtgaaggttcttcatcccttcatgagctaaacggcgatgccacagccagcccatgctagtcttagcaattaagcatgcatctagaccggcctcctcttttgcaaaatcaactaaatagagtttgccgtctaatacacccttaaaagctaatgaaccatcacttcttctaaagatagacacatctacatttgtgaataagcagttatatcccatattacaaagctgactcacagacaacaagttatatccaagcgactcaactaaaaacacattggaaatggagtgctcggatgaaatagctatttttcctaaccctttcacattgccttgattaccgtcaccgaatatgattgagtcttgggaatctttgttcttgacgtaggaggtgaacatcttcttctccccatcat

SEQ ID NO: 28812 - DNA, 393 bp, Zea mays
  unsure (1)..(393): unsure at all n locations
tcngctagatggcggataaaggaaccgacttaaaggggataaggctatctagtcctcacaaaattgtgtataagttaataataaatgtaaagggcatgaatgtaatttctcacaagctgtgtcctgtgcctataaatagaagatcagtaccccccgtactgttcacgctgatttgccatttgcttttgtgtcacgctcgtacctttattttctgtcaagccgaaggtatcaaacgttattcaatattgtccttatattaacttacaatgatatactgaggaatatatatgataatggtattgttcacattgtttcttatgctttacatgtcccaatcgctgttaatacttatacatatatctatgttgagatgatgaaagtatgttcttcatg

SEQ ID NO: 28813 - DNA, 353 bp, Zea mays
agcctctgacgaaattctcagtgtattgtctgacttctggccttcgtcagcgcccgcggagatgtgtcactccttgagaaagttggttgcgaacatgcaaacgctattattcaacccagaaatatctggtctcagccaatgacataaaaacccttacacaaactgtgcatgaatggaaatttattccacatctggtgaaaggtggccagaaatacctgcctagctttcaaaaattgagaggaccctctgctgctttaagaaggcaaaagagtaaaccgcttccaacctgaaaaatataggggcctttgcggatttactttcaaatgtgaaccctttttttggggagccaattt

SEQ ID NO: 28814 - DNA, 405 bp, Zea mays
  unsure (1)..(405): unsure at all n locations
tccacanaaacatgatatgcagtgggtgatattgctggggaaaatataccatatatgacaaggaaagtgtaccaaatcagtatgctgccccagatgacaaaatgttgtatccaggtgaagtagctgatgtagagagcaagctggcagttcacagtccacactacacaagtgtacatggtcaccccaaggatattaaacccagcaacgcgaccatcctgtcggacagcctgaaccagaatatcgttgagggaaccaaagtaaataattattgaacagcacatcccatttaacatccaactgagtatttcggaccaactgaagaatacattattaacgccatcttgatgttatgaacggacctatgatatgaaagggaacaaaagctgtgatttataaaaagaaaaa

SEQ ID NO: 28815 - DNA, 287 bp, Zea mays
ggaccttaaatctcagcttcactccgaagcaccagctgttgaagcacaccagctttctaagctgcaccttcagaggcttcagctgccgaagctgccaccaccgaagatattcttgttgaacgcacaattgcgtattttgatcagatactgctcgacatggccgtagaagaaactgctgcagccactaaagagactatggctccctagcctgccaggatgaaggaaataactgactgcacttcagtacatgaacattttacctcttaaaacttaattggacattagct

SEQ ID NO: 28816 - DNA, 354 bp, Zea mays
  unsure (1)..(354): unsure at all n locations
acctgcggcatgcaagctgtacgaagagggaccttctgttatttatacaaacagcttcatccgaggatcgcttctctctataagaccttcggcgacgaagcatggtcccaacagtagcccctttcgcggagctagatcgttttttgtaacgagcttgatccgtgaaaaaagtttcttaagcttcagagcgccgaaggtctcaaanaacaccttccctgagctcgttgtcgagaaacgattcaatttccctgcgcatggcggccccaccgtgcagaattactgatcagtctttgcggcccaccgtacaacgagtgcgagcgggtgtccgcctggtgttaaacttttggcgcttcg

SEQ ID NO: 28817 - DNA, 329 bp, Zea mays
cttagaggttctgaaaatattctcaatgtatttttaccaacttacccccgaagcaatcataaagatgaatatcttcgtgtgggccgcgagaagccaccgtctggaacccgatgcgaagaagttttgcaacatacaccaattgttatactaaacaaaaccctgtggtaaggagcagtatcatcataattttggctgctacagtgtcttctctcggactgggtcaagttgacccgtgctaaccgttttgaagagatggtccgacgactggatgacagaatggttttatttgaagaatgacctgaaacacgggaggatattaaagtatatta

SEQ ID NO: 28818 - DNA, 435 bp, Zea mays
  unsure (1)..(435): unsure at all n locations
tctcgctcacgtggtaccacctttcttctatgacatacatctgcacatttacctgtgcctggttgtaggacaaacactaattgtcataccataccagactcgtccataccagtggacacggaatattcgaataggtttagactctgcgcagaggggtacactttacccactaatccggctctgcgatctcatggccaatgagacctgaatccgaaactctttccttccttgtacgtccgaaccttaacggttataccggaaggagtcacgccaccggcatgtccaaaccggacaaaacattccccctccttatcctcctggtgctaccccagcctttataaccctgggttggaccgttcagttaagatgagtggctgnccaacaagctcgagtggttgactttttagagacatgtatgaaagatgataaccggcc

SEQ ID NO: 28819 - DNA, 295 bp, Zea mays
agctgggatttaaacttgtgttattcaaataaggagaacagcacacagaccagaatagaacacctgttcaccaggcccatcttcacttctctctcctcggcccacctctatttcatccggccaacccactctcgcccgcgccctctccatcatatcactggcatgtgggccccgttgccactccttatccgcagcgcgctctcatgttcttgagattgaccgatggggcccatctgtcatcacttcgtgctgcccgtcaacagaggacgcaagatccacgacgagcttcttccac

SEQ ID NO: 28820 - DNA, 299 bp, Zea mays
gacctaaaactaactgaaggtaaatcacctaccttttattttcacacgcgcagagggagagagttctcttcccgaatcctcggattaaacgaccttctttcttaagccaccattcgtcggacgatttattctcaagttccatctcttacatttggcacggccgctaaacctacactcttttttttttccctcggaccttgtgagcccaaacaggattaaaattaaagctcattacccgataactcattgccgtgcaaagtgaactaatgactttttggatattccaaatctggcaagct

SEQ ID NO: 28821 - DNA, 391 bp, Zea mays
agcttcggtattacagcatgtccttttatgatggatcgaaccgacttaaagatagaatgaccttttagtccataagggtatgagtcaatgttgtaaacttttatgaggggcatgattgtaattcctataaatagtgaacagtattcctttactgttcacgcattcctgtaattgcaaacgcttcactcgggaattattattgtcaaggcaaaggtataaatatacctaaacattatgttcaagcatcttagattcatataataagatatatgaataatgtcacttatttccgatatatttatctttaatggttcacattgtacatcaccttgtattatctttgtaagcttaattacaaaggtgaaacccttcgaatattctgctcatgggc

SEQ ID NO: 28822 - DNA, 434 bp, Zea mays
tctacagggagagcacattatgggactaacttatgtttattttgagaaagacaggggttgtagcgcatgtcaagcaggaaagcaagttggtgttcatcatccacacaagaacatcatgacgaccgacaggccgcttgagttactccacatggacctattcggcccgattgcttacataagcatcggcgggagtaagtattgtcttgttattgtggatgattattctcgcttcacttgggtgttctttttgcaggaaaaatctcagacccaagagactttaaagggattcttgagacgggctcacaatgagttcgacttaaggatcatgaagaatagaagcgacaacgagacggagttcaagaactcacatatagaaggctttcttgatgaggagggcataaagcatgagttctcttcttcctacacaccacaac

SEQ ID NO: 28823 - DNA, 335 bp, Zea mays
agcttcttgcgtcaggcttcagttcttgctcctcgcggcccacacgaagatatttagccttataattgcctcgggagtaagttgatgaagatagacttccaagattttcaacacctctacgacgaagctgctcaaggggaatcgcaatccagctttcaaaaagcttcggtacaccacaacttcattttcttcagggtgtggacaagttttttccccttcgtccgccctcacaatggacagatcccggaaataccttcctctcatattaacaagatgattctctttgatagttgatttaccataaactgaatggcttggtcgccaggggcgatctt

SEQ ID NO: 28824 - DNA, 421 bp, Zea mays
  unsure (1)..(421): unsure at all n locations
tgcacacatagctcatttaaatacctttgattatatctcttttatatgctatgactaatgtgttttcaagtttatttcaaacgaagtcataggtatattgaaagggaattggagtcttcggcgaagacaaaggcttccactccgtaactcatgcttcgccatcactccgagcaactctctattccttggggagaaatgagcatcaaagaaaaggacttcatccttgggggagagagtaaaagctcaaaagcaaaaggaccggacttcatctttggtataatcttaactcgttacttatgaccaaaggggaagaaattacttcgagggctctaatgattccgtttntggcgattcatgccaaatagggggagaaatgagcccaaagcaaaaggaacgcaccaccaccaccaaattcaaaaac

SEQ ID NO: 28825 - DNA, 360 bp, Zea mays
  unsure (1)..(360): unsure at all n locations
agcttaatgccctctaaatattgtctaattttgntaaaggcaaagctcccatggttcagtatagngaaggctacattttatatcctgctaactatcctgagcacaaaattagaataattcatgctaggaaacctcacactatttctcatcatgcatttatgtataaaaatgaggcttctagttctaggcattctatacatgttaaaatggccaaaaagaaaactcctgctgcatcaaatgagcataacattttatttgagacttttgatgcatcatatgtgcttactaaccaattangcaaaggaattgctatatatgttgggggcaaacacaagagctccaagactttgtgttgggacc

SEQ ID NO: 28826 - DNA, 411 bp, Zea mays
tacttcgcgcattatcacatttttattttgacgaagcattcgtcgaagattgacttcatattcgattcttgtgccggtaatgccatgtgatgtatgatgttatgttatgcaaaatgatgtgatgatatgatgcaaaatgatgaggatgccgaagacacacacccacacgcccacactggaatacacaagctcagcatccccttaggaacgacttttgagcttcttcaccttctatttcgatgatataagttctgcatccccttatgaatgtcttttgaacttcttcgccttctatttcggtggtataagttctgcatccccttaggaatgacttttgaacttctttaccttatatttcgacgggatttggctctgcattccctttggaacgacttttgagcagaaaactta

SEQ ID NO: 28827 - DNA, 441 bp, Zea mays
  unsure (1)..(441): unsure at all n locations
agcttgcatatgtagnccatccagcctatgttgtacttgctggactatttaagatcgtaacgcacataccagtagtgtcaataatatgagagataccaacagttgttaatgccttggtgatctctttggcggcagcatcaaactcttgattcttgaagaggggaacacggtgcacttgataggagccacatcaacaaattttggatgtgatttgtcctctaggtccacgaaatgcccaatctctatcaatgtgaattcactcactcggagaagaccttgacgtggcaagatctgattaacaagttccagacatagtgagtacattaaaaaaagggaatatcaaagcaactattgtgtagccaataacttgcttttagaagcagactattgctatttgcttactctacacgcaagtacaaatgtactatcaaatatcacact

SEQ ID NO: 28828 - DNA, 479 bp, Zea mays
  unsure (1)..(479): unsure at all n locations
cgtcactatagaatacgtgagcttataattaggaaagcagataatacanaatactttgcagagagcaacataattcaagttgcctgtgcaagaccatcaccgagatgccacctgtaatgtgcacttcgctactgaaatcttaaaatattataggatgtgtgtttctggtaccttgttgtatggagaatggaacacaacataatctgcatcaaaaattgaaaactgctttccctcatgcttttcgtacctgaagtatgggaaagtggattcagattcagtcagctcactcaacttggctaatgtgctaaaacaaagaggtataacttactttntacaaaatacattgtagcangagtccaatgccatgaagtagcatgtctgtgatagcttcccatcaaccacctacacacattgcatgacataaattactttccttaaatttcaagttatttcatatgtttttgtgtgcagacacatgt

SEQ ID NO: 28829 - DNA, 423 bp, Zea mays
ttgatgatgggctacccatatcattgttatccatgttctcaccactctccccttcaggcttgattcgcctaacacacatcattgatgcctataaaatgtggttgatgtaattgcgttgataatcattccaacctcccctcccccttcattgaagcttgacactcgatgtagccaaacatacaaaaaataacacatggaactggacatgatttgatcactttaacacatccctctaaatgatcatctttgttcatgccacaaggagatttcatatattaacaaatatatacttcatgcatcatatagtctccattacaattatatcttccattacatgatatgtatgttcaataacctggcaaatcacccttaaagaaaatttcctctaattatttatattacattcaacataaatttcatata

SEQ ID NO: 28830 - DNA, 455 bp, Zea mays
  unsure (1)..(455): unsure at all n locations
tctccgccagtctgagcagttcgaacaagagatacatgatctcaatgcttaacttgaagccgaagctcagcaaaattcggatttgagaaaactactgacaaatcttcaagaaaaatgcctagaatttagcaacaagtgcattcagcgactaagaaagattnttcattcagttggagctagcagcgaaaaatttaccccctcagctgaagacctaccacaaaccttcgaacacattgagggggaaattgacgagctcgacgaagtcatagctgggcatggtgacttctgtgcctgggtggcttctcgagggactgctgctgcatttctgaaagccggctgcgaacatggaaaggttgtcaacaggcccaatttcaccttatcttcatcaattctggatgatatgcccgacctcgcccgaagtatctccaatagaattataanaatggtatggacaa

SEQ ID NO: 28831 - DNA, 386 bp, Zea mays
  unsure (1)..(386): unsure at all n locations
ttaagacacctgcggctgcagcttcacacaatccacactcttggttttgtgtttcgctctgcggcctgaaccactctaattctcgcngctcctgattcattgtcatctaccaatatgaaaacgcttaaccccctcctcatttatgattaaggcgggtgcctccgcccccggccggagaatcccttttcgcatttggtgcgccaggagggggctaggcattaagtttttgcttgttttcttcctcagcatcatggtgcaaatcgttgagcaccgcgccgagacttcaacggattttctggtggaggaagaagctgtttctttcacgccataagttcccaaccacccaatgccatgcacttgtgttgtgcacgctgcacggcagcata

SEQ ID NO: 28832 - DNA, 278 bp, Zea mays
attaccagaatgaagccgtgcgcgactttattcctcatgtgacccgatactgggtctcacatgctaactatggagagtacaactgcgggcactgcacggcggctaccggggaccgtggagcaccgaatgcaaaagcggagatgcctggacgcaaactttgaatcgatggtgacagttgtattttgggggactggggcgcccgcatgccgtgtgctatcgttcacccttgaaagtttaaacgcgattcggatagtctgctactcagagcttatgacact

SEQ ID NO: 28833 - DNA, 400 bp, Zea mays
gcactacagccctagaagagaacgtcacggacttgccgattgccccgaggaataaacaaatgacgacattctgcacctcctccaaagatctctaccacgcctccacaaaacgttacatccaaggtaatgatcaaaccacacttcacaataagaggcgcatagaatgctttgaaaagtggcacttgattaaggcacgcccctatactaatggctagattagtaacaaggatgacacacttaagaccaaaagctctaagaagggacacttgcttagacctacgtcccgtgtaaacaaaaaggcggacggttagaacagataatgtgtacacaccatgtggctggcaacaacgcacgaaagataaaaacttcacaactgaaaagcgcctatgctacacatgcc

SEQ ID NO: 28834 - DNA, 386 bp, Zea mays
  unsure (1)..(386): unsure at all n locations
tgttctaaccgcgctaccggagcataagtgtaccgcaacccnaccttcgactagtgagtatccattggccacaatcaggctttgttccttgtcaccacaccatgctcatcttgcttgttgcggaagacccacttgggtcctaccacattctgattacgacgtggaactaaatgccatacctcattccttgtgaaattgttgagctcctcttgcatcgccaccacccaaaccgaatactgaagtgcctcctctaccttgtgtggctcaatagaggaaacaaaagagtaatgttcacaataatgagctacacgagatccagtagttacccccttttaataatcgcgagatggtgtcacggagagactcattgattgcttgtgactctt

SEQ ID NO: 28835 - DNA, 445 bp, Zea mays
taagctgataggaagagccaggctattcacttatattatattccaacactccctctcatgtcgagcctctattgggtctcagacatggaatatgagcgagcaacaattatttatttaattgcgcgctaactgggattcgaactcgtgacctctgtctctgataccataatagagtggacgcactaaccaattaaacctaaaagattaagctgatgagagaaggtaatcaatccacttatacacttcaacaaaaggctttattgatgtttgaaatgtgaaaattgcactttttgagaagttcgtgcatacaaatataaatttcgagttgtattatctaaaaagatcagcattcatataaaatggattattgcaacttcaatttcaagcgcgcataattgtggtggcatctaaaaagtaacttaacagtgggaaacaatccaaaaga

SEQ ID NO: 28836 - DNA, 224 bp, Zea mays
aacagttcccgccccccgaacggggccactcgcgtggcgaaggatcgcaaacgccaacccctgcaggggggcaccgcggcaaaaatgagacatcccgcaacagctaggaagggtatcgccctcgcaatccaccataaaaaattcacgacaacctgacaaaaaagcaaacggaaggcaccgcggggctgtacaccgagaccgaaaaaacccccaaaacacaaaac

SEQ ID NO: 28837 - DNA, 422 bp, Zea mays
aaaatctcagctttgtgatctgggagaattgttctggtttcatctaatgagctccaatctttaaaggatgctctacggcggcatagtttcaaattatgcctttgaaaaatcttttcatggttctcacatgcgttgaacataagctatccattttccttcttgcattagcacacatctcaagttcacaagtgtgatgcattgcattacaccttcaaatccctatggatgtctggcattaccaatattgcgggcactcgtcaaactttatctgagttctttaaaacaatcttaccagcttcatccacttgactctttactttttccaacgcagaagtacatggttactaactggaaaacccttcttaaattttttagtatctgccattcaaaaaacttccgtctttacgcacctttgttgctcc

SEQ ID NO: 28838 - DNA, 315 bp, Zea mays
agcttgactaagacaattctatcttcttgacttcttacaaccaacacgccgttcttagacaattatcaataaaaactcatactccatttttatttgtaggtgtcactatgtaccaaagcttgaagccgatattggccacctctttcgccatctaacccttccattttgtctcttagacacataaaatatttacatgcctgctagttgctgactcaattaatttctttaacttatctataagtgtacttacattccaactaactaaacagattatagttggttcgactaacttccttaactccggcgttgatgtag

SEQ ID NO: 28839 - DNA, 176 bp, Zea mays
cattggcctgagcataatatgaagaagaatccagcgatttaattctatatgattcagcaaactcaggtaccctctttgacataaaagaaatcccctggtctgtggcaaagactacgaatggccaatctatgaataatacacttagttataaaccacattgcccctctatgtgtcat

SEQ ID NO: 28840 - DNA, 309 bp, Zea mays
  unsure (1)..(309): unsure at all n locations
agcttaaatattaaaacataacatttaatcgcatttataccttcgtcttgacagaaggcaatgatccaagtgtcgtgtgcaagtgattacaagattgcgtgaacagtacggnggtactgttcatctatttataggcacagggcgcagcctgtgtgaatttacatttatgccctttacaatcgattacagtcatgacacaaactatcatgggtttattggtcatttcatctttaagtaggttcactccttcatcttgagacatgtcactatgccgaagttttataggtgatagcttcaacactacttttg

SEQ ID NO: 28841 - DNA, 122 bp, Zea mays
gaaaatctatatgggtcaagcaaaaatgtatgttctggacactgagtcattgatatggtgctaatcatatttggctaagtgtcagggaggactcatctaggtcaagttccctagaaattaat

SEQ ID NO: 28842 - DNA, 297 bp, Zea mays
  unsure (1)..(297): unsure at all n locations
aatgcacaaatcctcccnctttgacatcatacaccacaaccatattcaagccagaacatatgatgatgtccagggacaactaggcattaagcaggtaatatgcaacacactaacattactcccccatacacattaaacatatgcaacacaggcactggaggagaattaagatacaaatacgcacaaggtcaataccttcttttgtacctttaccattgttatggtgtactttccatctaagtaggtgtgggggacagatattcctcgggtccactggaaggataaaaagacctcacc

SEQ ID NO: 28843 - DNA, 353 bp, Zea mays
tgtgaagaatcttcatcccaacatgggcttatctgcgatgctagagccaacccatattagtcttagcacataagcaagtatcgagttcagctttattaaaatcaactaagtatagctgaccctctaatactcccttaaatgctactgaatcatcactttttctaaagacagtaacacatatattcgtaaaaagacagttgtaacccattttgcatatttgagaaacagaaagccaaatgtaatctatagaatctacaaaaaaacattggaaatagaatggtcaggtgatatagcaattttaccaagttccttgaccacacctttgattccatcttcgaatgaataactctttg

SEQ ID NO: 28844 - DNA, 411 bp, Zea mays
  unsure (1)..(411): unsure at all n locations
agcttctcctggaccagcgctgcacttaccgctgagtgcgaagctgccacatataataacaaaggagcccctggcattggtggagtcaatgttgttagatctattaaatactggtttagctcttcaaaagccttctgctggattggtccccattgaaagacttcggctgatttcagcacttcgaagaatggtaagtttctctctgctgatctggatatgaatctattgagagatgccaatcttcctgtcaatctttgagcccccttctttgtagttggtggctccatccgaagtatagcttcaattntacttggattagcttcaattccctttgttgaaaccaagcatccaagataatttcccttctttaccccgaagacgcatttttctggatttaattttaaaccggct

SEQ ID NO: 28845 - DNA, 455 bp, Zea mays
tcacaaaaaacttggagttgggggcctagattttaattttttatggagccggagatgattgaacaggaggtgtttggttggaaggagttatattgaagctagattttttggagtggagcattcccaaacactaccttaatagagatccatcagctccaaatccaattaaatccacctagatgtaccacgaatcaactttatcgtggatatagattttgttcaaacatttgatatagatctgtaggaaacgggtgacacctaagaggggggggtgaattaggacttctaaaactttctctaaactaggccacaattaaatccctagagcaaaacctatgcaaatagacaaactagaatgagcaactaggttttgtctaagtggtgctatctctaccgcaaaggctaaagttcaatctacactagataagtatgaatacacgattgaaacttaaatg

SEQ ID NO: 28846 - DNA, 425 bp, Zea mays
  unsure (1)..(425): unsure at all n locations
agcttgacaatgaggagatggcgctcgcctattagagcttccgccaaatcctcaagcaaaggagagggaaagactacaagatccgctccaagaaagtttgctacaagtgtggtaagcccggtcactttattgcaaaatgtccattatcaagtgacagtgacagggataacgacaagaagggcaagaggagagaaaagaagaggtactactaaataaagggcggcgatgcccatgtttgttgggaatgggattccgacgaaagctcaagcgactccttcaacgacgaggacgccgccaacatcgtcgtcaccaaaggacttctctttctcaacgtctgccacaagtgcctcatggcanaggactgcataaggcaaaaagtaaaaataagaacctccactaaatacgaaacctctattgatgaaaat

SEQ ID NO: 28847 - DNA, 456 bp, Zea mays
  unsure (1)..(456): unsure at all n locations
tggaaatttaatattntaaataaaactttggtccataacataattcaatatttaaatgattacaaattcgaagatgaatatgaaaagaattccgtttgtggttctttatattaaaaaatggttttattttatctgaaaaccaatacccaatacacccttaattattggggctactgtgtttctgtctttggattgaagtcagggttgtgtcgtcaaaaactgaggccatgtgcaaaactattgaatagaagacccttctcattaattgcttgaaaaaaagaattataacaataaaaatattataatgtattacatagaaatagaatttatcaaaaaattacctattcaactcttggttgataaattttacttgaacaactttgcacaacataacaattctcagtcaacatataacagtgagtaagaacaacatttaataaatacaagataattaat

SEQ ID NO: 28848 - DNA, 464 bp, Zea mays
tgtggacccgtggcatataaatagatgttatctcctaaaatggctgtcatccacagcgtgttccatgtatctcagctgaatagaagtgtgtttgattgccgaccgagatcatagcagaaccagaattggagatagagccagatctatcgtaccaagagtacccttccaagattctggattgcaaagaaagatcaactcgggctaaatcgatcaagatgtacaaggtccagtggagtaatcactcagaggaagaagcttcctgggagactgaggaattcttgcgatccaacattcccgattgcctacgtaagggaattggtacgtaatcacacccaacccctccttctgcccttagaatctaaatttcagaagtattatctttaatcagaatgacgagattatgacactaaactttatacgactgtcttctgaagttgcacagaaaatgacattccaagagcact

SEQ ID NO: 28849 - DNA, 359 bp, Zea mays
agcttctataagtagaacaccgtgttttgttttactaacgtgcaattccaaaaagatagaccttgtgcagcttgtcaagcacgttaacaagtgggaggagcgccttacagcaagaatgtgatgaccacctctagacccctggagctgcttgctatggacctcttctgacccgtcgcctatctgagcataggaggaagtaagtatgggctagttattggtgatgacttcttccccttcacttgggtgttctttttcaggataagtctgaaacccaagggaccctcaagcgcttcctcatgagagctcaaaatgagtttgagctcaacgtgaagaagattaagagcgacaccgggtccgag

SEQ ID NO: 28850 - DNA, 271 bp, Zea mays
tgcgtttctctgtctgacatatcatctttggcacaccatgaagacatacgactcgagacatattcaattttgccaatactgcactggtatagttggtcttgacaggtatgaagtgggttgacttggtctagcggcccactactacccaaaaggaatcgtgtccgctttagtgcgaagcattccgactatgtaatccataccaatctcattccatttccactgagggaactgcaacggttgcaacacatcaacttggtctctggtgctctgg

SEQ ID NO: 28851 - DNA, 342 bp, Zea mays
  unsure (1)..(342): unsure at all n locations
aagcttaacaattattacgttgcactatgaagggattgaaggctatcnatctttggtaagagccgcataatgcggcgataacctttgagtttagatcaagagccagcaatgccagttgcactacgctagggatttccaaacacaatccatcacgtgtgtttgtggactggtcaaaacaggtatctgctcgatatagacgagttggtccgctctatttgaggaagaggatttctaaacacgggtcccatctataatacatcattctttaactgcaactgaagttgcaactgcctgggcctcgcttaatgatgaattcgggctacttgataacaatacgccttc

SEQ ID NO: 28852 - DNA, 166 bp, Zea mays
tcattttgttgctagcctcagaaaaaatataacgcaccctggacaagtccccatgtcgaagcccataaaatgatacaatccataatccacctctggccagaacaatgggagagattgctatatggctcgttggaaggtattaaaaatcataatcatgataattcat

SEQ ID NO: 28853 - DNA, 348 bp, Zea mays
  unsure (1)..(348): unsure at all n locations
acttctataaacaagctaagaaaaaaggatggtcataaatattntaatagatgcttcattactttgattgaaaggcaattcttcttgcatagttaaggatgagagcattgtcactcaatttcaaaagtcgaaggataggaaggatgtcttggagatatgtagctttctatgctatttaatggtgttatctacatatgtaagatatttacacgagccacttgattatgttaagaattgaataataccatcttatgacattatttgttgtgcgagttatgacttaggttactaaatgtgtaatgagtaatgttcattatatgctatgaaactacttctatgtgatattat

SEQ ID NO: 28854 - DNA, 455 bp, Zea mays
ggatctctaaacgactgcagcatgcagcttctcgactaatctgggatatggcctcatgaacgggtgaaagtacgcgtaagcggcaagggcgaccgagtcgagggattcccacgcctctgggatacggatacctcactcgtcccttccgcgagaagcaactcttgctcacacaaacaatcctgttaccgacagagtccagatgctcgaaacaagaggaaaaaagacgcagcttctcaagcacggcgagggtgtgttttctggcctcggcggccgcagaaggcacacgctacaagacgatctgatcctgcaggctcgggtcttcacgctgaagggagccgtatcaccctcggcattgacgacgtcttcaactaagttcgacccagcctctgacggcgacgcggtccaaggaccactccgggaattccgcccgagcaagctgttcgccgggtaccctt

SEQ ID NO: 28855 - DNA, 350 bp, Zea mays
ctggccacagcggtcgtgctcgggcattgatggtgagtggtgcaaaactctcccgagttggagtttctgctcggggaatgaagcggagtgaggggtggactgctgcgcaccaagggcacttataggtgccctctggcatggctgggcgcatgcgtgggggataggagccgaccacgcacatcgcgcgcagatggcaaccagagcgcggccgagtgcttgagcacatgatctaacacgtggaggtgtgtttctgcccttgttcataacatctgttgggcgacctaaacgtgcatatcttggctaggatcctgtgtatcgtctctataccgtgccaagtgtacctatacacg

SEQ ID NO: 28856 - DNA, 292 bp, Zea mays
gactaacgtacaattcgaaaaagacagaccttgtgcagcttcgtatgcacgtaaacaagtgggaggctctcatcacacctaaaatgtgatgacaacatcaatacccctgcagctgctacatatggacctcttcggacccgtcgcctatctaagcataggaggaagtaagtctggcttaattattgttgatgactcttcccccttcacttgggtgttctttttgcaagataagtatgaaacccaacggaccctcaagcgctttctaagagagctcaaaatgagtttgagctcc

SEQ ID NO: 28857 - DNA, 317 bp, Zea mays
ttctctaatcgctctgtactgatgagcgttctttctgatctcccacacaagaccattcagcttcttacatttagaggaaaggggaataacgggtttgcccacttttaactaactttattgacatagtatgtcaatcaaactggacgggacacccacactctggggaccatcttatccatactcaaccaaacgtccgtgttatgacaaccctaatgacaggatttgcaaaatgccggtctaactaaaactaattagaccgaacttacgctagactgagcttccaggatattatcattccgttagaactaaatcaactt

SEQ ID NO: 28858 - DNA, 369 bp, Zea mays
  unsure (1)..(369): unsure at all n locations
ccgcgaacctctaagncgacctcgccgcacgcaagcttgcaaagaatattgtggtctttgctgttggctccctctatcatcactgtgagtggaggtatgaatagacctgacatgcctcgtatgaaatatttctccgaaggccctagtcattctagagaacctaaatgcctcctcccttctttggcggaagacattggtcagcccggatgtacttcgccattttctggagcagcttcttcaaagttgtggcggcttcctggcaaaatattgcgctgaaaggccctgtaaaagccccttaataatgggctcaatgacaattacattgggcactgttggcgcttgtgccctcaacacaaaaaccttctgaca

SEQ ID NO: 28859 - DNA, 361 bp, Zea mays
tgtaaaagttgagattgcctccacttcatctttctgtgcttatgttgatcctaaggcaataaatcttgccatgagaatcacccaatggatgtttctcaaaatgaacgaagatgatcgcacagaactaaattgaagaagaaaatgatctttggtgaccaaaccacgaatccacctctgtacaatgttcgtctttcacatccacttctcatatgtgctttgtcgcctatgggagtgacaattaaagcgacagtgaggatgaagaggatcaacaaagtgattttggagatgacgattatcttcaacaattcttcgcttatctaaacaagatacatccgatgagcttgctccaactcatgaaaag

SEQ ID NO: 28860 - DNA, 211 bp, Zea mays
attgcttcgatagatgccacaggaaatggagtacggttccgatatgcaaagttgcaacaaccaaaagtttcatgtagcccatcctttctggtcttcgttaggatgagtagctcgtgtcctcaggaaaaaactatccgaaatggctacactgctagggttttgagagcccacatataaacactaaacctaacaatagttgttagaatttgtt

SEQ ID NO: 28861 - DNA, 226 bp, Zea mays
ttttatataagagattataaaccttctatttgtgagaaaaaagacaaaaaataatattcggataactattcattttattccatataacgaacttccacacgcttcttaattcttacgcattaacgggtagttgtggtgtggccttaaggcgcccggtatataccctggcctaaattctcgctgccaaaaggtaacttctggtcagccattaaattatcaccctggt

SEQ ID NO: 28862 - DNA, 329 bp, Zea mays
tgtgcgtctcaaggtacctaacctttgcctcatggaggacttctctgacgtagtagactggcttctggatggttcagacccctgtggttggtcccgaaccctcaaactcttgacctttcatcaccattgtggtggtcggaccaccaccttcttctatgggaactttttgtctcccctgtgggtgttgtgccattctttcgatgaccaacaccatgctcaccacctttgtagccgctgcaatgtataagtacaacggctcccctggctctggagctaccaccattggtagggacacaaagtgctgcttcaactcttgaaaagctcgtttt

SEQ ID NO: 28863 - DNA, 427 bp, Zea mays
  unsure (1)..(427): unsure at all n locations
gcttcagcaaccttcaaaatatgcttcgggttatcaaccttcggcaccaccatcctgcagacaaacaatggtataaggtaaaaggtaattacaagaataaaggcaagcaacaggtacaagttctgtaccggtttaagcaagttccaggcttcgtccctagccaactctcgtccacccttagcccaaatctgggttataaatctgtttccgacgcttcgggcttcgctaggaatatcaattaaatttgacggcgacaaaccaaaggttggtatgtttattgtcttcgcatgcgtgcaaccggccttcatgaatgcggctgctgtgccgtgagaaactagcaaggcacagaaatcaccatgcccagttatcacttcatcaagtgcgtcaacttcattntcaatatgtttgaaggtatttggatgtattc

SEQ ID NO: 28864 - DNA, 462 bp, Zea mays
  unsure (1)..(462): unsure at all n locations
tggtaccaatatgagggcaaaaaacgacccttggttngcggagtatttgctgcgtgtaggcggtggaactgaggacacaaatactgacggcgacatccgtcttcctgacgaggtatgtgtgccttacagtgggagtgacaacgatcttgacaacctaatagacttcgttntcccaaatctcaacaaaaatatgtctgattcgacctacatcacttcaagggcgatactgtcaacacggaacgaatgggtggatatgataaatgttaagatgattgatcgttttcaaggggagcatatggtgtaccatagtttcgatagcgccatggatgatccccataactactacccacccgagttcctaaacacactgacgcctaatgggctgccaccacatgttttgaagctcaagattggatgccctgttatattgcttcggaatatanaccctgcgaatggactttg

SEQ ID NO: 28865 - DNA, 294 bp, Zea mays
caatcaaggaagagggttatgttgagcaacctcccggcttgaagaaatgaataccctaaccatgattataagctctctaaggcgctttatgggctcaagcaagccccaagagcatggtatgaatgccttagaaattcccttattgctaatggcttcatagtccgaaaggacgatcctacgctatgtaccaaaacactcgagaatgatgtgtttgtatgccaaatatatgctgatgataatatattagggtctaccaacgaatcttcacgcgaagaggttagtatgatcatgaca

SEQ ID NO: 28866 - DNA, 440 bp, Zea mays
tgtggaacgtgtagaactcatcccttctaccccagaatcaagtcctgctatgccaatcgaagctagcacagacctggccgaagagccaaaattagagaaggtagcagatcagttgaagatgttgagcccacgagctacaataagactgctgaagccatcaagtgtttccacaatgactccaggaaaaaggagaatggcaagcgtgctatacgctgttttggaatctgtaaagacatcagctcctggctctaccgaagctcccagcgaacaaattaaggatgcaagggaagttgttgttgtgagtgcggctaacgctcctgccgaagctggacctttggaattgcaccaataacaatggtggaagagagtgctcctgagaaatctatatctcctgctcctgaagtacctcataaagagctggcaatcattatttgacatgc

SEQ ID NO: 28867 - DNA, 364 bp, Zea mays
tctccaaatcttgagggaaactgtgaacctccatcagtttctatcttctttgggactccatgtagacacacaatccgagccatatataactctgctagctgagaacctttataagaagtcttgacaggaataaagtgagccactttattcaatctatccacaatcacccatatagcatcatattctttctgggtgcggggcaatccaggaatgaaatccataccaatctctttccattttcactcgggtatcttcagtgggtgcagcattccaactggcctctggtgttcggccttaactctttgacacacatcgcacataaccacatgtgtagccgcatctctcttcaatccataccactagt

SEQ ID NO: 28868 - DNA, 412 bp, Zea mays
  unsure (1)..(412): unsure at all n locations
agcattaagctctttgactataataccacttcatctagcactaacaaagatactttcatgcatgagtgagatgatgagaggctttactatgtatgaagcanggntcatgcatggacatgctttctcttacatctatacaagatatgcaaacaatgtatataataggaagacttagtccatgtgtgaatgaatggaagtaattttacctttttgtaccttcacatagagacacttatttcattgtgctttgtactttgtgttagatgcttaagacctatacttaagacactatatggaaatatttttgccaagagaaagctctacaactagtgatcctttttcaaattattgttcgcatatatcatatggatcacacattgcataatgtttcatgaaatttacttttaactta

SEQ ID NO: 28869 - DNA, 391 bp, Zea mays
agtgggatttcattagggaattctgaaattcagaattctgaatttcagaccttgagccaaagatcaagcgtgttcaccttgatccctaactcgaatcctaatggccccgttgacaaaaatgtgcataactaacctctctgtcttgtgccagaagatgacatcgggacgcgtgccttggacacgtcaaaccagagatcttccccctgtgtgcggcagtgagacaaaccagatttctcccctctctatctcttaatccagtcagccaaacctgctagccttcacacacaaacaacaaaggaacctgagaggaagagatctctcaacgggatcatggccataatctcaaagatatggggccaatccacgcttgaactcgacctctctctgcgct

SEQ ID NO: 28870 - DNA, 334 bp, Zea mays
  unsure (1)..(334): unsure at all n locations
agcttcggctnttaaaaacagttttttagcgctttcgaagatgtctgaagctgctaagaaggctgctgctgagatgaagctgagtcttgatgaagagaagaacctatggtttcttatagcgatgtcgaagtccaacacagaaaagattaccaaggaaattctggaggggctgtctgaagatactggtgacagtgaaagttattatatggacagcggtggcgaagactccgaagatcgcccctggcgaccaagccattcagtttatggtaaatcaactatcaaagagaatcatcttgttaatatgagaggaaggtatttccgggatctgtccatt

SEQ ID NO: 28871 - DNA, 382 bp, Zea mays
  unsure (1)..(382): unsure at all n locations
ggtngaaacaaagagacataatgtggttgatatggtttatttgcttctcaaattggtatttgctnttggccggcagcgacagcaagtggttgaagggcattttctgcaatgagtttagtgaagactaaattgagaaacaagatgtgtgatagtctttttgatgattgtctcgttacatacatcgagagggatattttcttcgaagtgaatgaagaagatataattgagacatttatggcgttgaggaagcgcacgccagataaggagtattattgaaatctgtattgttaatgtatgcaactctcatacttaattggtgaatgccaaattntatatacatatatcgaaatggttaccacaattactaataaatatatgtata

SEQ ID NO: 28872 - DNA, 324 bp, Zea mays
  unsure (1)..(324): unsure at all n locations
agctacggcgcgcaggcacaatgtgtgtccgaccttaagatgaanagacttcggggtcctcaatagatttccataaaccgttaacaaatgtcatggacatgaatgtaattttacgtgggctgcgtcccgcgtttataaatagatgaacagtactcccgtactgttcacgcggacttggcattgtgcttttggcattacgctcgtacttttcaccttctcttacgaccgaaagtacatttgtaatttggaatcatttctgtttttccatgtcaataaaataaaaatgattctattgggatgcttatattatatttcatgctttat

SEQ ID NO: 28873 - DNA, 283 bp, Zea mays
gttcaagagaccttcaaagtgaagcaagaaggatgactgactggatctacagcagacttcagaatatttctttcttctttcatagtaccaattagaccaggtcattgataaactatactgctttgtgttgtaccatttatttatggaccgcaagaggccaaccatgtatataatttattttaagcgtcgactgaaaaattatagtcaaccttcttggaattatactaaaaaagaacgtatttaataacaaactgcttcagtaagccatgcatacggtagctgt

SEQ ID NO: 28874 - DNA, 378 bp, Zea mays
atccttaagacgaccgcagcatgcagctcgagacactttaactatcttcattggaaactggtagagactagagctagttgtgttcccaatatatatttaacaacttgctaattaaacctgagtttagtgagcatttgtttagagaactaatggtgactacagtgatttccggccacttgtgtttgttcaaattatgaaacataatatctcatcaatataatgaaagtctgaaagacaatatgttcatttttaccgatggtattggctagaatactacttcacacatgaggatttgtgaatttattaggctattgtcacttatagctacacaactacctatttattcacaacaccgtatcacatctcgctactatattt

SEQ ID NO: 28875 - DNA, 317 bp, Zea mays
tctgcttcgtttgcacccacttaacgtcatgtctaaatgatggagatcaacttagacgaaatgcggatgtggtggaaatcctgatgaagaccagattcccgcatgttcatggagcatgcgacaggaagtcaccagagacgaatctggatcatgagtgagtagcgcttctcgatctctgctgtttccagaccggcttaacaaaacgctgtatagctaacaaaaaaatccaagaaatataccgatcttgttccttttcagtcgtattatttggctcggggacctgaacttaccgatagctctttcttatcgctcagtga

SEQ ID NO: 28876 - DNA, 324 bp, Zea mays
agctatggccccacctttatgctttcatactcccctgaagtgggcccgggggccactgtctgtaccctataaacagggtaccccctactgctgtataaaagcaccgtacccacgcgactacctttaatcgcgtggtaaaaaagctgtatgtgggaacaagccatgacttcgccaagccttgagcgactactttgggccaacaacaacaccgaccacaccacctgggtaggtgcagtacccgcgcgtgtccatagagctggacactctaaggcattaccagcggggccagacccccatgcggaggtgcccgacccctggatatac

SEQ ID NO: 28877 - DNA, 283 bp, Zea mays
aagaaataagtgaatggtcgaacactatgctagagaaaaatgttgaggagcttcgtgaatccaacgaaaggtgtttcgagaaatccttggattgcataaaaaaattgaaaaccagctttgccagagtaggtgcttattcttctgaagagaattttattcgaggcgaccccaacggtgttattgattggataagcggggaagccgaagcttttgaagagatcctcagcgatcgcaaggacatttgtgctttcactggcactcgagggattgcgacaattctgga

SEQ ID NO: 28878 - DNA, 275 bp, Zea mays
  unsure (1)..(275): unsure at all n locations
gagctctggaaaaagatcatattctgcttacactggtagataaagcgagaaanaacgaagctgcttcaaaggcccatgccgaagctcaaaaactcgaaataagagatcttcataaacagctggcccgatccgacgaggatcgctctcttgatgaaaccagacgagaacttattgaattcatggtgagcaaattggaatcaagagttaaggagcttcgcacatctcaagggaaatattatgtgaaacctgtaaaatgtgttaataanaataaattc

SEQ ID NO: 28879 - DNA, 364 bp, Zea mays
ctgaaccattatgactttagccattattttctccccctttggcatcaagcaccaatatgggatcaatcttggacctcataccccattgcctcaccacaatcttcaaataagaagataattagcagcaggagtataaaacatgaacattggaaaagttactcaattcattggaatgcaacggaagacttacatggtccaagtccaccttttcccttccaattctccttggagactaaaacaaccaaacttaatgtcatggatagtcttacaggagcaaggtgtagcacagcttctcctcgatatgtgcatcacttgcaaaaagacttgtgacgtcaacgtatgtattacaattagacaccacaat

SEQ ID NO: 28880 - DNA, 341 bp, Zea mays
agcttttcccaatggtgtcccccttatgtccctctgccttgaaaaagctaatgactttctcgtgtagagtccaattctgatcaataaaacttattgtgtaagaaaccttatgatgtgtaagaaactaaaaatgcatgcatgcatggcgttatatatattggtactccttatttctttaacatgtgtgcactcatggatcgaacacgtatgaagaatgagttctaactaaatcttctaatcttctcttaataggaaggataatgatgtgcaagagcaagacaaaccaaaccaagcgacagtcaattattactatcatatcacattaccggaaatcaactttt

SEQ ID NO: 28881 - DNA, 448 bp, Zea mays
  unsure (1)..(448): unsure at all n locations
ggctgcagcttctaagggagagcacattttatgactaacaaatgttcattttgagaaagataggatttgtagcgcatgccaagcaggaaagcaagttgggtcccatcatccacacaagaacatcatgacaagtgacaggccactagagctcctacacatggatttattcggcccgatcgcttacataagcatcggcgggagtaagtaatgtctagttattgtggatgattattctcgcttcacttgggtgttctttttgcaggaaaaatctcatacccaagagaccttaaagggattcttgagacgggctcaaaatgagttcggcttaaggatcaagaaaattagaagcgacaacgggacggagttcaagaactctcannatgaaggcttccttgaggagganggcatcaagcatgagttctcttcttcctacacaccacaacaaaat

SEQ ID NO: 28882 - DNA, 462 bp, Zea mays
  unsure (1)..(462): unsure at all n locations
tataaatgaacataggagtnttgcaaanaaatactaagaaataattgtatttaaaacaaacatgcctagtttgagtaaaaaatacgcggttcttatttttagacatgccacatagtcgtgaaagaccattttcttaggtcggcaaactttaatctggaagatgattctcagatcaggtcaagaaaacactatattcacgttacccaaaagtgcataccattgtccgcaagaaacatgcaatagttgtggaagtatttagcacaagtccactaaatatctcatttaaaaaagctttgttaggtaataaactatagtaacaacacaatcttgtagcacatattgtgggtgttaacttacaaagtggtagagacacaataactcgaacataaaataagttgggttatatatagcgaagttcttatgctgtgttctagtcaataatacaatggtattaatgtcata

SEQ ID NO: 28883 - DNA, 403 bp, Zea mays
acctctaagtacaccagaggcatgccagctattaaccagagacctgtgtgtcttacttgtctcaaagtaacactatgacatatgccctgattatactcatgttcaactgatggtgagtgatgtttaataaagtacttgtactcagtacactatgaataaatgttgtaatccgacatcacataatgaatggttactttttaattggatgaagtgtcatgactgctagcaaaaactggagtgcagtcagcaccccatgctatcaactaccaaatgtcatgaaacatctaaaaaatacgtaccactaattatttatcgtccaatatatagatgtctactctaattttcctagttacaataaaatgaaaattctttcatatgaagagaaaaaatatggccttccttt

SEQ ID NO: 28884 - DNA, 443 bp, Zea mays
  unsure (1)..(443): unsure at all n locations
acagcgttctgcgatggatcctcgggattcttcggctcttgagaggctgcnagactagtaccaccttctaaagtctgaacatgttatgcagcgaggcttgtctttacttcgacaaataatattgctgaatacgaagcacttccgttgtgtctttggaagttaatggcaatgggaataagaagggacatgctgaaaactgattctcaagtaatttctagccatataaacacaagtagcatggcaagagaccctaagcttgaaaaatatatggatacaggttgaaggttagaggcttctttcgaaggtttttctgtttagaatattctgagaggagaaaatgagcatgcagatctgttagccaaatcaacgcacaggggctccctctaccttcgaaagtatgttntgaaacaataaaagcaccttctgtagacttatggaagagc

SEQ ID NO: 28885 - DNA, 322 bp, Zea mays
  unsure (1)..(322): unsure at all n locations
agcttctaagggagaacacgtgatatgtttgactttcttgcaattccgaaaagaaagaccttgtgcagcttgtccagcangtaaactagcgggaagagcacatcacagccagaatgtgatgaccacttcaagacctctggagctgctgcatatggacctctttngacccgtcgcctatctgagcataggaggaagtaagtatggtctaattattgttgatgacttttcccgcttcacttgggtgttctttttgcatgataagtctgaaacccaagggaccctccagcgctctctaaggagagctcaaaatgagtttgagctc

SEQ ID NO: 28886 - DNA, 393 bp, Zea mays
  unsure (1)..(393): unsure at all n locations
tgactcctttcgccttgagacaccggaatgtcacttcaaggtcggagaggaggtcggaagccttccttgtcttgactacgatgtcatcgacgtaggccttgactgtgcgaccgatgtgttcgccgaacacatggttcatgcaccgctggtacgtcgcgcccgcattcctcataccgaacggcatggtgacatagcagtacatgccgaacggcgtgatgaaagaagtcgcgagctggtcggactctttcatccagatctggtgataccctgagtaggcatcgaggaaggacagggtttcgcacccagcggtggaatccacgatttggtcgatgcgaggcagagggtanggaaccttcggacatgctntgttgagaccagtgtagtctacacaca

SEQ ID NO: 28887 - DNA, 453 bp, Zea mays
gcttgcttttgaaataaaatgtatgtttatgtaattcgcttccgcatttcttcatctccgatgttctgtaatgtctacaagatgggtgaaacgttccttggtaggtaaggaaagataccgaacttgtcaagtagttcaggggcacctacagggttgtctgatgtctgtgagacaaagacaattgtaggtgggcctaattacttgggaggttccgtcacagctggtatcggagcgtagcccttctttgcagatattatgaggcatcttcaaaaggatttttaagagtcttacctaaaaattctcttctcttcttacctaagtattctgaagaagtctatcttatagaccagataggaagagtgcaacatatataaggttgaatcgactaaggttgattctgtaattatacatgcatcatgcctagaaacatactaataacattttccccttaaa

SEQ ID NO: 28888 - DNA, 436 bp, Zea mays
  unsure (1)..(436): unsure at all n locations
ttaaagggggaacacattntaagattaacctatgttcattttgagaaagacaggatttgtagcgcatgccaagccgggaagcaagttggcactcatcatccacacaagaacatcatgacaactgacaggccactggagctcctacacatggatctattcggcccgattgcttacataagcatcggcgggaagaagtactgtctagttattgtggatgattattctcgcttcacttgggtattctttttgcaggaaaaatctcaaacccaagagactttaaagggattcttgagacgggctcaaaatgagttcggcttgaggatcaagaaaataagaagcgacaacgggacggagttcaagaactcacaaattgaaagctttcttgaggagganggcatcaagcatgagttctcctctcctacacccacaacaaatg

SEQ ID NO: 28889 - DNA, 323 bp, Zea mays
  unsure (1)..(323): unsure at all n locations
ttacttgattgtcctacaaggaaccacaacctacttactctatttgtgataaatgcaaaaattttcttatgaatgaatatatttgtcgtgatggatcacacatccattgtgagaatgaagtattaataaatagagtggatgctctaacccatgatctatanaaggcatatggtggaaaggctaaattggatttcatattgggaaagcaacggtgctcacttaatcatgagggtcttggatatgttcccaagaaaggaaagaatgcttttgtcaagcaaaagacattgtttggtaaagaatgtgacaaagtgtgtcacaagtgt

SEQ ID NO: 28890 - DNA, 395 bp, Zea mays
  unsure (1)..(395): unsure at all n locations
ttccagattgtatttaaacttccaaatcggatatgatatgtatccgngggggcaaaaacgaaccagagatgttnttggtgatggtggatttcgtggtgaccaaaacgtggtagaactcaaaactctaaaggaataaactaagaccagcaactcgacacaaccgatgcaaccaaaaactcaacaagccctaactaagtagtactagtaaatgctcaatggtttataggattgcggtaaaactaatctactattttttggctttttctggactataggagataagaaaacagcgaagaaaagtaaatctctcaccgataaaccttgctctgattaccaactgatgtgcacccgttgggtgattgcccgatctttcgatgagagggtgtggaataact

SEQ ID NO: 28891 - DNA, 317 bp, Zea mays
agcttctatagggagagcacattttatgatttacaaatgttcattttgagaaaaacaggatttgtatcgcatgccatgcagggaagcaagttggaatccatcattcacacaagaacattatgacgaccgaaaggccgcttgagctactccacatggatctattcggcccgattgcttacataagcatcggcgggagtaagtattgtcttgaaataatggatgattattctcgcttcacttggggattcttcttacaggaaaaatctcagacccataagaccttataaggattcttgagacgggctcaaaaagatttc

SEQ ID NO: 28892 - DNA, 450 bp, Zea mays
tctaaagggagaacacgcgatatgactaacttatgttcaattcgaaaaagatagaccttgtgcagcttgtcaagcacggaaacaggtgggaggctctcatcacaccaaaaatgtgatgacgacatcaagacccttggagatgctgcatatggacctttttggacccgtcgcctatctgagtataggaggaaagaagtatggtctagtaattgttgatgacttttcccgcttcacttgggtgttctttttgcaggataagtctgaaacccaagggaccctcaagcgcttcctcaggagagctcaaaatgagtttgagctcaaggtgaagaagataaggagtgacaacgggtccgagttcaagaaccttcaagtggaagagtttcttgaggaggaaaggatcaagcatgagttctctgctccctacacaccacaggcaaatggtgtggtaga

SEQ ID NO: 28893 - DNA, 364 bp, Zea mays
  unsure (1)..(364): unsure at all n locations
atcttaagtcacctgcngcatgctagcttgctatcaaggatattctgttaataatattcctcgagggcaaaatgaacatgctgatttgttagccacgtctgcagcacaggggctgccgctaccttcggatgtattcttcgaaacaataaaggcaccttcagtggagttacttgaaagagcagttcttactatttcttctgtgtacagggaagattggagaactgaaataatttcttaccttcagggcaacttcctatcagatgacgaagcttataataaaagaatagaggcaagagctcctccgtctatcattatagaaggggagttatacaagcatggagtttgtgccccgctgctcaagtgc

SEQ ID NO: 28894 - DNA, 260 bp, Zea mays
gtcccaccttataagctagaccacacttaaataggaataaaacgtttgttcctttgatctaatccgacgaggccactaacaggatcaagtaccacgtactcactcgaaggtgaggcgccgagcaaatactatatagcataaaaacatacattaaggaggaattacattatttcaacatcatccgagtgttaacaaagccacgatctttgttcaaatgcagcagaatcaactaacgatatataacagaaagatggggaagc

SEQ ID NO: 28895 - DNA, 401 bp, Zea mays
gtatccataaagtttagtgatttttggagttattaatcaattcctaagattccaggagtataggttttgggtattttaaatactccaaaattccttatttgaactaaaaatcatgaaactattgttataaaatagtatagaattttaggaacctagcaaaattggtcttgcattcttagcgtgttctacaatcttctagaaattctctaatcctggcaaaaaaagaaaaaggaaaaacatgaatagtactgggccgaaattggcccaatacaacccatgcacaggcgaaaacacgtgcgcttgcgccctcgttgacaactttgcacagaagacctttgcgatgtgaataacttaaaaaggggtcgcggcactattcctgtgttgtactaacagctacaaaa

SEQ ID NO: 28896 - DNA, 318 bp, Zea mays
gccttcctcaatggaccaatcaaggaagaggtctatgttgagcaacctcccggctttgaagatagtgagtatcctaaccatgtgtataaactctctaaagcgctttatgggctcaagccagccccaagagcatggtatgaatgcctaagagactttcttatcactaatggcttcaaagtcggaaaggccgatcctactctatttactaaaacatttaacaatgatttgttgtatgccaaatttatgttgataatataatatttgggtctactaacgaatctacatgtgaggaatttagtaggatcatgacacaaaaat

SEQ ID NO: 28897 - DNA, 436 bp, Zea mays
  unsure (1)..(436): unsure at all n locations
tctaaagggagaacacgtgatatgtttgacttagtacaattcgaaaaagatagaccttgtgcagcttgtcaagcacgtaaacaggtgggaggagcgcatcacatcaagaatgtgatgaccacttcaagacctctggagctgctgcatatggacctcttcggacccgtcgcctatctaagcataggaggaagtaagtatggtctaattatcgttgatgacttttcccgcttcacttgggtgttctttttgcaggataagtctgaaacccaagggaccctcaagcgcttcctcacgagagctcaaaatgagtttgagctcaaggtgaagaagataaggagcgacaatgggtccgagttcaagaaccttcaagtggaggagttccttgaggangaagggatcaagcacgagttctccgctcctacacaccacagcaaaa

SEQ ID NO: 28898 - DNA, 222 bp, Zea mays
agcttccgagccacatctgctatctctcgatcattgaacgaagccatcagcttagaacgtggaagcgagttccacagatgcgggcgccaatgattgggacctgttctcaaattatatgagtcaagaacatggcagcataaaagttgaatgtaaacgatcgtcagccacacaaccaaagtacgcagaggatagaggaccttggacaaaagatgatggcacaac

SEQ ID NO: 28899 - DNA, 358 bp, Zea mays
tggataggccggaacgcgaacattattaattgttttaagatcactgagctatgcgcagacaagcttctgcatgattacgcattaggggaaccgacctacacatgaagagcctgccttgacctcgcagaattactattgagctattgataaatgtgaaggacatttatgtgatgatacacgggctgcgttccatgcctatcaatagatgaacagtactcccgtactgattacgctgacttgtcattcgctatactcataacgcctgtacctttacttttcgtctatccgaaggtacatttataatatgtgattatcaagttgagaatgcacaacttaaataagttgctgataatatctg

SEQ ID NO: 28900 - DNA, 225 bp, Zea mays
ctcaactcttatatcaagccatcaatctggcgttggctgttcttttaagattgacccaccgaagaatcgagctgttatatctctaactctatattcatctctagcaggaatttgtgttgtagggaataaggattaacctttgtggggatgaagcaaaaggcctacaactaagggatattccaacgatgagagtgtgccctttcaattgtgtaacaccagcattaa

SEQ ID NO: 28901 - DNA, 358 bp, Zea mays
gcttcgggtctcttgccttgcttcttttattcacatggcccgaaataacttgcgaatcagttttaaggattgcccttcttattcccattgcctttagcttccaaagccccaaaagaagagctttgtactcggcaatgttatttgtacaactgaagtctaactttgttgcataacatgttctgactttaaaaggtgcaactaggatagcagctgcttctgcaccgaaggtcccccaagatccatcgcaaaataccgtccaagcttccgcatcttttgttgcttcttcatcctgagcctctggcgtccaatcagtgctaatgcctgagattgaattgaggatttgtgcatgtaatcaatg

SEQ ID NO: 28902 - DNA, 441 bp, Zea mays
  unsure (1)..(441): unsure at all n locations
tctgaaaatcgatgcacattcgttacttgccattggccttttttaccataacagtgttagccagccattctgggtacttcacttctctgataactcctgcactgaagagtcttttgacttcgttgcgagcaccttcggccttatcatctgacatcttccgaagcctttgctttctgggtctgaaggatggatcgacattgagtgagtgctcgataacatctctattaactccgcagagatcattggctgaccatgcaaaaacatccttgttattgaacaaaaaccttatcaaggttttctcctgctcttcggataactgagagcctaacagcaccttctgctctgctatgtcctcacataagagcatangcttcggctggtctgctgaagctgctttctcccttctgaattgtactggtcacaagcttcagctccatcgat

SEQ ID NO: 28903 - DNA, 377 bp, Zea mays
tgcaagcttatgaagattcttcatcctcacgtgggctagtcggcgatgtcatagccaacccatgttagtcttagcaattaagcaagtgtcgagttcagctctattaaaatcaactaagtatagctgaccctctaacactcccataaatgctactgaatcatcatttcttctaaagatagtaacacctatatccgtaaaaaaaatagatgtaacccattttacataattgagaaacagaaagcaagttgtaatctaaagaatctacaagaaaaacattggaaatagaatggtcaggagatatagcaattttacccaatcctttgaccaaaccttgatttccatccctgaatgaaataactctttagggatcatggttt

SEQ ID NO: 28904 - DNA, 417 bp, Zea mays
ttctaaaaggatagaccttgtgcagcatgtcaagcaggtaaacaagtgggaagagtgcatcacagcaagaatgtgatgaccacttcaagacccctggagctgctgcatatggacctcttcggacccatcgcctatctgagcataggagggagtaagtatggtctagttattgttgatgacttttcccgcttcacttgggtgttctttatgcaggataagtctgaaacccaagggaccctcaagcgcttcctcatgagagctcacaatgagattgagctcaaggtgaagaagataaggagcgacaacgggtccgagatcaagaaccttcaagtggaggagtttcttgaggaggaagggatcaagcacgagttctccgcttcctacacaccacagcaaaatggtgtggtagagaggaag

SEQ ID NO: 28905 - DNA, 373 bp, Zea mays
tttgaactcttgcgcttggattgcttctattctctctcattcttcttgtgacaaactcaattgtaacccgagcaagagacaccaatttttgtggtggtcccttccggaacttcgtgttccgttcgattgaaaaaaaaactcactcggtctaaatgaccgtttgagagaaggaaagggttgaaagagaccctgtctttgagaccacctcaacggggaggaggtttggcagaaccgaacccccgaaaaacacatcatcgagtctcgctccctatgtgctcacgaaatgattcgccccctctctctcggactcaggtatatttccaacgcaaacccggcttgtatttggcctaagcttataaatttcatatccccc

SEQ ID NO: 28906 - DNA, 377 bp, Zea mays
  unsure (1)..(377): unsure at all n locations
gaaaaaggaaactatgctgcctgtattaaggcgagttttactctctcatttagcactcatcctaaaataagcctacatgaaaaaaataccaaaacgttaaatataatacacacggaaagataagacatactcagggtccatgtaaccagctgtgccagctggagtgactgatatgtgagtttgtgtatcgctcagatatgtcttggaaagtccaaaatctgctattttagcttgcagattttgacccagcagaatgttgttggtcttcacatcacggcggactattggcanactgcaacccttgtgcagataaatcaggcctttatatatcacaggagaatcctaataagaagagaataacagttaatgatcatatg

SEQ ID NO: 28907 - DNA, 402 bp, Zea mays
agcttctgatgctcggccttatttcgtttgtcagtgtcgcaccgggccacatactgggctatctctttcttcattcctctccaccaatatctggttttgaggtctaggtacatcttggtggtccctaagtggatagaataggctgagttgtgagcttcgcaaacaagacttctcctgcctccccttttggtacacacaatttttgaactaaaggactccttcctcatttgtcctaaagtccggaagtggttccttgcgagcctatttcataagacctgctgtctcagtgtccaggcgttgagccttgcatatgaggtcttctagcattggcttgacttctatgctgccattgtctcccaaacatgcattcagctgagctaattctttcttccatcttctaag

SEQ ID NO: 28908 - DNA, 378 bp, Zea mays
  unsure (1)..(378): unsure at all n locations
tgtccgggatgcatccagcttgccaaagagaaagctccttgtattatatttattgatgagatagatgccatcggcaccaaacgttntgataggtatgccttttatgacattattagctcttgcatggntctattcctgctttggctgatgatactctttatgagatgaaaatgtgaatcagttgcacaagaccacagaaagtagaacacttttttatgtttcaatttagtggaaaccaatcattcttattacgaagaagcttatctgatgtatgctccataattttgttctcttggtacagtgaagttcgtggtgatagagaagttcagcgaacaatgttggaattactgaatcaactggatggattcagcagtgatg

SEQ ID NO: 28909 - DNA, 320 bp, Zea mays
agcttggtgccaatggagaatctttaattcttgtatatctggctggcaaaatgcttgccattgtcaactgtgagctcgaacgggactccgaagtggcaaacaatgttttgccaagaaaatttctgggcagtcttcaatgttatcgtggatacagcccttccctcgatccatttggttaaaaactcgacggcgaccaatgtgaacttgaggttcccctgtgccgtgggtaggggcccgacaatgttcaagcccccatcgctgaaaaggccatgtgccggcgattagctttgtgaattgcgaaaggcttcccgagcgtggag

SEQ ID NO: 28910 - DNA, 254 bp, Zea mays
  unsure (1)..(254): unsure at all n locations
cacagccacaatatttcttacntgcaggctctacttaacaaggaaagtggcttgtaagcaaaacgaacgagctatctgatcacaaaagaaaatatcttggatagtctagaaggagcacccgtcatcacaacaactcccacggttctcagtatctctctggaaatcagagagccaataataattatcatatgccacggtcaggacaacaaagccaaagaagcaaccaaccacaaaatcaaaggactaatcaacaa

SEQ ID NO: 28911 - DNA, 397 bp, Zea mays
ttagtccataaacgtctgagtcaatgttgtaaactttcataacggacatacttgtaatctctcacaggctgcgccctgtgcctataaatagtgaacagtattcttttactgttcacgcattcctgtatctgcaatcgcatcattcggaaaccaatctttgccaaagcagaggtataactgtattcaataattaaatatactgagtaaatgcaatatggctcgtttatgattcgtttacctttgatactctatactttatgtgattttatacaatctattaaactacagttacgaagatttaaccttcgtaatcgtattgtcactaaccttcgtccaaggtccattaatccccaaaggaataatgcctcgttggacgaaggacattaacatttaacac

SEQ ID NO: 28912 - DNA, 262 bp, Zea mays
cggactaacacgagcagcactggagtttttccaggcaacggagccgcagccgctgtctacaaacagcttaacgctctttgcaaaactaaaagttgcgtaacacctaactagaccatccatttaaacgaccttacttgaaagacaaatcaatacatatgacacgaagtaaattcagactactaacactaaaaaggcatgaatgaatctgcaaacttactgctggtcatacaattatgactggaactattgcgagaggaattct

SEQ ID NO: 28913 - DNA, 452 bp, Zea mays
tctaaggagaacacattgtaggactaacatatggttcatttgagaaagacaggatttgtagcgcatgccaagcaggaaagcaagttggtgcccatcatccacacaagaacatcatgacgaccgacatgccgcttgagctactccacatggatctattcggcccgattgcttacataagcatcagcgggagtaagtattgtcttgtaatagtggatgattattcccgcttcacttgggtattctttttgcaggaaaaatctcagacccaagagaccttaaagggattcttgagacgggctcaaaatgagttcggcttaaggatcaagaaaattagaagcgacaacgggacggagttcaagaactctcaaatcgaaggctttcttgaggaggagggcatcaagcatgagttctcttctccctacactccacaacaaaatggtgtagtggagagg

SEQ ID NO: 28914 - DNA, 406 bp, Zea mays
agcttaaagatttgcgataacttagaggacctttgaattatcaaaaattcttcgaaacaacaaaaagtcgttctaaggaacgcaaagtaagtttgccgaagtcacaaaaagccgttccaaagggagcgcagtgtaagttttctgctccaaagtcgttccaaagggaatgcagagcttacagcgaaaagtcaatgctgataccgcctaagtaaaaggcgaagcgcgaaaattcaacgcgaataccgctgaaagtaaaaggcgaagaagctcctaagggaggcttacagcgaaaaataaacgctgattccgctgaagtaaaaggcgaagaagcttctaaaggaggcttatagtaaaaagataacgctgattcaaaaagaatattgtgtttatcgcaagaatgtgtgtg

SEQ ID NO: 28915 - DNA, 419 bp, Zea mays
  unsure (1)..(419): unsure at all n locations
ntatctntaagccgaagcatccgccgatgttatgatgatgatgaccctatgtatgtctaaatgaatgtttatgaatgcaaatgtatgatgtaatgtgtcgtgcaaatgaatgtccaaactcacgcatacgaagccacaaccatagccttcattcccttgggaataatcgaagtatctttgccgtttattttttggcttcatcgcttattttttggtgtatcatcgctgacttttcgctgtaagttctgcatccccttaagaacgtcttttgaacttcttcgccttctatttcggcggtattgcgttgacttttcgcgcttcgccttatatttcagcggtatcagcgttgacttttcgctgtaagctctgcattccctttggaacgacttttgagcagaaaacttacgctgcgctccctt

SEQ ID NO: 28916 - DNA, 287 bp, Zea mays
aaggcgctccctcccagagagtgtcaaacaggcgcaaagcgaagaggccaacactcgtgaagcccatctgaaccctggagatggagtacgataataagctaaagaagctctgcccccccaagaaaattcgaaagaagacacaaaatcaagggagccacactgagcggaagaaagaagcccctcccacactaactccctccaagataaagaacttgtccgacgacgaagacatggccctagctagccttgacgaccctctcaaggaatgtaaggaccccttacaaaaa

SEQ ID NO: 28917 - DNA, 383 bp, Zea mays
  unsure (1)..(383): unsure at all n locations
tgctgcctaacgtcttaattangttgtcttcagcagcgtcccctaaattntatcccttaaagaaatattcctcatcacttacaacacattttaaaaggttatgtcctctaaatctttcacatctctagcagtgttctctaaatttcgtcctctatatctcatcttttattttttgcaaccatattatcagattgatgccatttattttccttttgtcatgaagtagcaaataaaagattctcactctgtttaaatgatcgcattttaatcagcaacaacatggcgggagggagcatgtagaccaatcagcgagcgagcgtccaggcggtattggatagcgaacgcgccacaattagcggacacgctgcccactctatattcta

SEQ ID NO: 28918 - DNA, 379 bp, Zea mays
agcttatgaatattctttatttcaacatgggctagtcggtgatgccagagccagaccatgttagtcttagcaattatgcaagtgtcgagttcagctttatcaaaattcactaagtatagctgaccctgtaacactcccttaaatgctattgaatcatcacttcttctaaagacagtgacacctacatcagtgaataaacagttgcagctcattttgcataattgagatacagaaagcaaattgtaatctaatgaatctacaagagagacattggaaatggaatggtcaggagatatagcaattttacccaaacccttgaccaaacctttggttccatccccgaatgtgatagctcgttggggatcccggtttttctcgt

SEQ ID NO: 28919 - DNA, 447 bp, Zea mays
tgctaagtcataagaatactctcattatattctcaatggacacaacgtgaagagcccagatttagtttttgatgtgcgggtctgtggctcaccgtaccaactacataaagaaggtgttctctacgcttctgtggattgttgcaccggatcacttgcacagagagggcataattcaaagcatgtgtggcttcatcgaaccaatctgatggtgcaccagaccacttatacataacgattggttttgaagaactcgagcacatggcgcattggactagtacgatgcgcataatacttgttcgattcaacgactattttccactccaacgattatgtcaatggttagctgatgtaactgcacacgtggcacagtctggtggggcaccggaccggtctggtgacacctaactatgcaaacttttcattgatttcacatactatcataagccg

SEQ ID NO: 28920 - DNA, 387 bp, Zea mays
  unsure (1)..(387): unsure at all n locations
agcttcngttgcaagcatgataggcattttatgcaatgaaatgcttcgatgtgtacaaaaagaagggaaggtgtttttcgcctttggctcaaaaagttatactcatgggtgtcgtccacagctaaacaattcacacgtggatagaaaagttaaattatattacaaggtatggacaaatatatacaattttgagttaattctcaattacaatcttttgcaaaaataatgcaaatagatcctaagctctatacacgaagtcataaaaggaagcttcagcccaacaatcttcggaatgtgcttcggcttactaacctttggcaccgccatcctgaagacaaataacggtataaagtaaatgcgatggtgataaagaaatatcaagacaaa

SEQ ID NO: 28921 - DNA, 436 bp, Zea mays
gcagcttaccgaagctacaataagtcgttcctaaagagcgcaacgtaagtttgccgaagctacaaaaagcagttcctaagagagcgcagtgtaagttttctgctcaaaagtcgttccaaatggaatgcagagccaaataccgccgaaatataaggccaagcgcgaaacgtcaacgcgaataccaccgaaatagaaggcgaagaagtttaaaagacgttcctaaggggatgcaaaacttacaccgaataataagcggtgaagccgaaaaataagcggcaaagagattttgatcgtccctaaggggacaaagagattgtatttagcgtgggtgtgtcttcggcataacatcattctttgcatcatatcatcgcatcatatcgcataacatacatcatacatatatcacatcaaaacacgaattggaaatgagtcgatc

SEQ ID NO: 28922 - DNA, 415 bp, Zea mays
gcttcttgcgtcaggcttcataccttggcttctcgcggcccacacgaagatatttagccttataattgcctcgggagtaagttgatgaaaatagacttcgaagattttcaacacctccacgacaaagctgctcaaggggaatcgcagtccagctttcaaaaagcttcggtacaccacaacttcattttcttcagggtgtggacaagttttttccccttcgtccgccctcacaatggacagatcccggaaataccttcctctcatattagcaagatgattctctttgatagttgatttaccataaactgaatggcttggtcgccaggggcgatcttcggagtcttcgccaccgctgtccatatcataactttcactgtcaccagtatcttcagacagccccttcagaattttcttg

SEQ ID NO: 28923 - DNA, 406 bp, Zea mays
  unsure (1)..(406): unsure at all n locations
tcgtttcaaacatgaacataggcgttatatgcaatgaaatgcttcgatgtgtatgaaaagaagggaaggtgtttttcgcctttggctcaaaagttacacatgggtttcgtccacaacaaagcaattcgcacgtggactgaaaggtaaaattatattacaaggtatggatcaatatatacagtattgagttcaactctcgattacaattttttgaaaaaataacgcaaatagatcctaagctctatgcaggaagtcataaagggaagcctcagcccagcaaccttcggaatgcgcttcggattactaaccttcggcgccgccatcctgcagacaaacaacggtataagttaaaagcaatggtaatgaagaanaatcaaggaanacaacaggtataaaatttgtactg

SEQ ID NO: 28924 - DNA, 394 bp, Zea mays
  unsure (1)..(394): unsure at all n locations
tatgacngttcttaacccaacatgtgctatttggttatgcctaagccagcccatactagtcttagccattaagcatgcatctagatcgacattctctttcaaaaaatcaactaaatagagcttgccgcctaatgcactatcggtaccttggatcaggggtaccctcttctacagcatgaaggcgccgcacctgtgcagcacctcaaggcacacggtgaatggcacccaaccctaccacatgggcaggtccaatgatgccacatggcaaggaagggaagtatattccaggtgttcaacgttgggtctggaccccctcagagggatgccggacccctatgtgtacaagtctggagcccccaagaagacacaacgggccccttaggagtattcaagt

SEQ ID NO: 28925 - DNA, 350 bp, Zea mays
agcttgtctcacactggttaatatggtttgagcatatccaatgggaaccttcagaggcaccaatgtgtaatgggatcctatggcgcgatagttatagaaagagatacaggagaagggggaagttgacctaccaagagataggggctatttggtttgacttttttctgacgagcttttctgagaatctggttgtgggaagaatctagttgcgggaagaatctgagtatcgtgtggattatgtggggagaaaaaatgaaggaatcataatgttatgatctaaaagtgacggattcctactatcacgacatttcaactgattctatgtccacattgattttgaacggttttta

SEQ ID NO: 28926 - DNA, 472 bp, Zea mays
aggacacataaaactcagctgaaggatttttacggctcacgctcgttactataaacgatctagcgccgcgaaaggggctactgttgggcccatgcttcgttgcgccaaaggtcttgcgtgaagaagcagcttccgctgaaatcgtccccaggaaatggccgaaggttcctttttatagagcttcggcgttgcaaaccgacataaagatagaatgacctttttatccatagaggtctaagataatgttgtaaacttttgtaaagggcataattgtaattcgtcacaggctgcgtcctgtgtctataaatagatgaacagtacccccgtactgttcacgcggacttggcatttgcttttgcgtcacgcttgtactatttaccttctctcaggaccgaaggtacatttgtaatttgaaatcatttctatatttccatggttaataaatacaaatgattctatgatgatgcttata

SEQ ID NO: 28927 - DNA, 323 bp, Zea mays
gctgcagcttgggcaaatacttagctattgaggttcagtggatttcaagtaatgccaaaagccttctatgtttgtaaagaaaaagcaacacaactcaattttccttgttttactccaaaacttaatttcccaagttgggcgtttaccttaagtatatttctaggctttcaaatttccttgtttttaaataaaggatccaattttttgtctaaccaaatatataattttctagtgaactaactaatattaactacacaataggagctcctggcctggtaattacctcctattcttacttaaccaagtataaaatggaaccttct

SEQ ID NO: 28928 - DNA, 378 bp, Zea mays
agctttggaagtagaagagccttcagtgcattgtatgcagggttggtatctgggtacaggatatcatcgccactgagaccacaaagcttgaattgaatgaacagcatgcgaactttttgcaaactgtagccttgccgcaacaccatgtgcttcacatgtgctaatctcttctgatggccaatctgagtgaaacagcagggggagcacatgcctggcacattcttaatcagatataagacctggatttcatctaatgttctatcatagttcggtcagcattcctttgcacagttattctacaggcaacatagatagcacgcggggtccctgccatgaaaattcccccctgagcagagccttttgagagtcatatgaaac

SEQ ID NO: 28929 - DNA, 442 bp, Zea mays
gacctatgaaactcaagcttcctagattaaacataaccctgcacatacttattatttctttatttataatatttatattgtatacacattttcttttctttctccacttctaaattctagattatcttttatattttaaattccactttgggactttaatatatttttttgtcacactatttttatattgtcaccaaatgcacacaaaataatatccagcatgatgcataatttagtggtatatatttttattaactgtttttaaagatggtgttcacatgaaatcacaattatagataaccaccatatatgaaggaataaaatttctctttttagacttttcttacaaagtgggtattacagcatgtgtgacgctcgttggggaaaagggatgaacttgtgaatgcggtggcggcgagtccttcatgtcggagtcggatga

SEQ ID NO: 28930 - DNA, 410 bp, Zea mays
agcttcatgtagttgttgcctttaatgagaagcgaactgggtgcctctgtctaatactattttctttggaacgccatgcatgcacataatcccagacatgtattattctgctaacactgcacttttataggtggtcttaaccgatatgaaatgggccacctttgtcaaacggaccagtactacccagatggagtcataaccagcacgagtgtggggcagaccgactataaagtccatcccgatctcatcccatttccactaaggaatatgcaacagctgcaacaaacctgtgggtctctaatgttctgccttgatcctctaacaactgttgcatgtagcaacaaactctgctatctcccttttcatactgtaccaccagatatctttctttacgtcttggacatcttctg

SEQ ID NO: 28931 - DNA, 410 bp, Zea mays
  unsure (1)..(410): unsure at all n locations
tcttttcaagagcagcttcttgatcttttattttgctttctaaaccctcaattatgacttcatgttttttatcttcaagatcttgttgcattctcaaagctttattcaacagcatactctgtgcacaaagcaaccttcgttagaaaacaccttcgttgttaaaaacaataaaaagttgaagaaaagttttttaccttgaaattggaatagaataaactaccgacgatgtgctgtcgtcggtagcggctaatgtctgtctcaagcttcgggaaaccaatactctntgatagagtaccaataaccttcgctccggtttgatctcggacgcaacctaacttttcatcgtcaataccaccgaagagcagtgcccctggttgatacccgcaggatatggcgtattctctcaactc

SEQ ID NO: 28932 - DNA, 402 bp, Zea mays
  unsure (1)..(402): unsure at all n locations
agctntatcaaatggacgtgattagctccttcctcaatggaccaatcaaggaggaggtctatgttgagcaacctcccggctttgaagatagtgagtaccctaaccatgtctataaactctctaaggcgctttatgggctcaagcaagccccaagagcatggtatgaatgtctaagagattttcttatcgctaatggcttcaaagtcggaaaagccgatcctactctctttacaaaaacacttgcaaatgatttgtttgtatgccaaatttatgttgatgatatcatatttgggtctactaacgagtctacatgtgaagagtttagtaggatcatgactcaaaaattcgagatgtctatgatgagggagttgaagtacttcttatgatttcaagtgaagcaac

SEQ ID NO: 28933 - DNA, 421 bp, Zea mays
tagataatgcaccagccggtcctaatcatattcttgtatgcctatacatacctattgcctcgtatctgtatactaatctcgctaaacgcactagccccgattttggtttctgaacggttgtatgctattttatttggttgtacatatattgcatgaaataaaaaaaatactagtacaaggttaagaccacgttttgtattttatgtggttatatataccctgaaagaccttattttatttttagtatatcttacagttttttattccaaatacactaaaagcatttgatatgtattaatcgtgcactaataaagtttggtaaccgatacaagcatccaaggagtccggctccagagaaatgttgttcaaatagcgtgtacatgcacggtacatactaccggacacaaccactttgtcgagc

SEQ ID NO: 28934 - DNA, 358 bp, Zea mays
agctttcaccggctatttccattgcacgtacgtgcgccccgggaattcctgggatctccgaagctgccggcagcagccgggagagtctctccgagactacatccggcgattctcgaagcagcgcaccgagctgcccaacatcaccgactcggatgtcatcggcgcgttcctcgccggcaccacctgccgcgacctagtgagcaagttgggtcgcaagacccccaccagggcgagcgagctgatggacatcgccaccaagtttgcctccggccaggaggcagtcaaggcaatcttctgaaaggacaagcagccccagggccgcccatcggaagatgctcccgaggcgtctactcagcgc

SEQ ID NO: 28935 - DNA, 434 bp, Zea mays
ctatgaaactcagctgtataaagtaactagctcatacctgtttgttgcacttgccttctggaaagataatgtcgcaggctatctccactatcttatactgcataggtactaagatatttgacatttgcagaaacgagttttttttctagagtagtcttctagctgcataagagtatgttgacattgtgctaacttaggctgatatttgcttgcattgttctgtccatactgccttaatactggatattatggctgcataatggtattttcggattgactcattgatgcataatggtattatccgaaatcatactaccttaatacagaggaatggcataatgatatttgcttgtgggatatgctttgagccagtcccgtctgatgattcaatatgctctttcttagggttggatctcctcatggtttcttttaat

SEQ ID NO: 28936 - DNA, 383 bp, Zea mays
  unsure (1)..(383): unsure at all n locations
tctcaggacactataaaactttactattaaagccagcactcttacgacttacctatgntcatattgagaaagacacgatctgtatcgcatgccacacaagaaaacaagtttgtgcccatcattcacacaataacatcatgacgatcgacaggccactataactcctacacatggacctcatccaaccgaatgctttcataagcatccgcgggagtaagtactggctagtcatatgggaggaatatttctcgcttcacttggggtattctttatacacgaaaaatcttaaacctcaaagaacttaaagggaatttttggacgggctccaaatgagttctgcttaacgattcacaaaaaaagaatccaccaccggttgggctcaa

SEQ ID NO: 28937 - DNA, 379 bp, Zea mays
agcttctaaagggagagcacattttaggattaaccaatgctcattttgagaaagacagggtatgtatcgcatgccacgcacgaaagccagttggagtccatcatccacacaagaacatcatgacgaccgacaggccgctggagctactccacatggatctattcggcccgattgcttacataagcatcggtgggagtaagtattgtcttgtaatagtggatgattattctcgcttcacttgggtgttctttttgcaggaaaaatctcaaacccaagaaaccttaaagggattcttgagacgagctcaaaacgagttcggcttaaggatcaagaaaattataagcgacaacgggacggagttcaagaactctcacatcga

SEQ ID NO: 28938 - DNA, 446 bp, Zea mays
tcgcttcttccccgcgatagcctctgaccacgccgcgccctggattcttcccggcgtgacccgtactggacatggccggcgaggactactcaagctaacggtcggagagtctctacggacctaaggcgacctaagaacggccctcaatttcgaacggtgctccaagaaattgctctgcccacgctcaaggcggaaaccggggcgtcgagctcacgttcccgtacaaccatggccggactgagcaaacggacgccaccgagagcatcacaagcatgcataggcacgaaaacagtatacgaattggatggcgactcaccagaacgagctggccacgggagggctagttttcacggtgcggcggatggaattgggggaaacttggaattataactcgtcggtgaaccactgggagcaatactggacgtcgaggtacttgactaccatac

SEQ ID NO: 28939 - DNA, 373 bp, Zea mays
  unsure (1)..(373): unsure at all n locations
agcttctaaagggagaacacattntaggactaacaaatgttcattttgagaaagacagggtttgtatcgcatgccaagcacgaaagcaagttggtgcccatcatccacacaagaacatcatgacgaccgacaggccgcttgagctactccacatggatctattcggcccgattgcttacataagcatcggcgggagtaagtattgtcttgtaatagtggattattattctcgcttcacttgggtgttctttttgcaggaaaaaatctcaaacccaagaaaccttaaagggattctttagacgagctcaaaacgagttcggcttaaggatcaagaaaattagaagcgacaacgggacggaattcaaaaactctc

SEQ ID NO: 28940 - DNA, 366 bp, Zea mays
tgcaagcttctaaagggagaacacattttatgattaacaaatggtcattttgagaaagacaagatttggagcgcatgccacgcacggaagcaagttggagcccatcatccacacaagaacattatgacgaccgacaggccacttgagctactccacatggatctattcggcccgattgcttacataagcatcggtgggaagaagtattgtcttgtgatagaggatgattattctcgcttcacttgggtattctttttacaggaaaaatctcaaacccaagagaccttaaagggattcttaagacgggctcaaaatgagttcggcttaaggatcaagaaaattagaagcgacaacgggacggagttc

SEQ ID NO: 28941 - DNA, 448 bp, Zea mays
ttatatacctctgcaaaattatttatgcttgctgcatagatatatttgtgtctgaaaagctgaggctctgtatgacattgtaatggcttctccttggcacctgttggtttctattttgaaatgacctagagttttttttcatttgatgtttcaatgcagattgaaatgtggggagttcctattgttgctcattggacatgtttttgtgaaggaaaactctcccatacatgaacaaatgaaaaatctgtttggtgagcagtgcgcatcacttatatgggcagcaagccggttcggctccaccttggatgcagagcaaaggcagacgaccttgcaaatacaagcaatgagagttgtcgaatccttggaaccctactatgactggtgcattcatcttgtgtacttacgggtgatgacaaattgatgtctctaatctgagctgcatgcttca

SEQ ID NO: 28942 - DNA, 419 bp, Zea mays
  unsure (1)..(419): unsure at all n locations
caagctnatggactagtcgatattttatggtatgaaatgaatgacgagcactgcgatactgatccaatgtgggttctacaaaagttaaaagataggcaatgcggggaatactcgtaaattatctcaaacctaaattcggggttcaagctatagaaacaagaaatacttcatgatgatgaaccatccagtcaagaacgacctaaaccaacccatcttatatatacatacgacatgccaacgggtaaacaacttattagaaaatgcaagaacaacccaataccaaactgctagaaaaatcggccgcccttaaaggatgtcctcaacagccagaaacatggctacggggtatgtgcgactcgtccacaacatgagctcaaacaaaaaaaaaattttcgaacatccatgatcggcaccaaaga

SEQ ID NO: 28943 - DNA, 314 bp, Zea mays
tatgaagagtcttctcccgacatgggctagtttgtcttgcgagaaccaacccatgttggtcttagcaattaatgacctgcgcgttcagctctaacaaacactgccaggtctcattgacccactaacactccgatatatgctattgaaacattagttcttctaaagacagcgacacctatgttatcgataacacaggtatggcccatatgccatatatcgtgaaaagagaagctaaattgtaattccgctgaggcgactcccaataacaactggagaagaatggtcaggagatataactattctaccaagacctt

SEQ ID NO: 28944 - DNA, 217 bp, Zea mays
tgtcaaacaaacatgctccttcgatgaaaagaaaggcaatatggccccatttgtatcctgatggcacctggcgctaacacaactgagtgtaaggcgactgggttcacatcctttccgtcctctatacggagcggtggccatgaccccgcaaaaaataaagcatgtgtccccgcgaactgttcctgtcattcgtcctcgacgtggacgagccaacttt

SEQ ID NO: 28945 - DNA, 321 bp, Zea mays
catgatcaacggatcaagagggagaaaatgaagaactattagaacgtcaagggcgaggcacatcttggaaggagtgggattcacattgctcttcgtccgacttcgacaatgaaggactcgccgcctccgccttcaacacattaatccctctttcccaacgagcgtcacacatgccttatggcaagggagaagaacgtatgtactcgaaactctacttatgcttctttcagtgaggacgaatctagtgatgacgatgaaatatattactctaccttgctcaagggattggatagaaataaaattgatacaatcaatgaattg

SEQ ID NO: 28946 - DNA, 363 bp, Zea mays
cgactgcaagctgcaagctttaaagggagaacacattttgggactaaccaatgttcattttgagaaagacagggtttgcatcgcatgtcaagcacggaaacatgttggtgtcaatcatccacacaagaacatcatgacgaccgacaggccgcttgagctacaccacatggatctattcagcctgattgcctaataaacattcgcgggagctagttattgtcattgaaatgcgggatgattattctcctccacttggggtgcccttttgcaggaaaaatcacaaacccaaaaaaccttacagggattcttgaaacaggctcaaatgtaataggctcaacgaccaaaaatttacacaggactccc

SEQ ID NO: 28947 - DNA, 361 bp, Zea mays
gatcaagggaacaagagggaaaagaagaactataagaaggcaaagggcgaggcgcatctaagcaaggagtgggattcaaattgctcctcttccgactccgacaatgaaggacttgccgccaccgtcttcaacaagtcattcctcttccccaacgagcgtcacacatgccttatggcaagggagaagaaggtatgtacttcaaactctacttatgcttcttcaatgaggaccaatctaatgatgaggatgaaataaattatttatgtttatataagggcctagatagaaccaaggtacataaaatttatgaatctgatgatgccttgaatgataagaatatgcttttaaaaaagcaagagga

SEQ ID NO: 28948 - DNA, 157 bp, Zea mays
tgtaaaggccgtggcccccgcccatataaaagagaacaatatccccctactgttcacgctgacatggaaattactttttgcggcacgcttgtaatggcatcccttctcgactaaaaggacacttggaattcaataacattttcgcctatgcttgata

SEQ ID NO: 28949 - DNA, 425 bp, Zea mays
cctgcagcatgcaagacttgaaaactttatctttttttttattcaaccaaatttagtcaaaccaattttgtcaaattttaaataaagcacactactcagaaaaaatacataaccccctaagcgttgtagaagaatttagagtttcaaattaaatagtgttctggccaaaagttaaatataagagagaaaaaatagttacactgttacactaaggttaagaaaaatcagagaagtacttaatcactccataatatatttaaaaatagtaaaaccctcagtacaccaaattaaggtaggatttgcctttttaatcactattagcctaaagttaaagaaaatagataaggtagtctaaaataagaaccagtgggcaaccacatttatgctagctcacttatttagaataggtcactggaatattttat

SEQ ID NO: 28950 - DNA, 296 bp, Zea mays
aaaagtctaagtgccatgtgtgtggctaatcacaagaacctcgcgagccttataatgctgatgacgcgaggaatttggcatctctagaacttgttccaactgaactgtgcgagatgaatggaattttgaccaaaggcggtaaatgatactttctcacttttatagatgactccactagatattgctctgtgtatctcttagaaacaaactatgaagcgttcaaatattttaagagctatacagtctaagttgagaaccagcttgagaggaaaataaaacgttctatgtccgatcga

SEQ ID NO: 28951 - DNA, 406 bp, Zea mays
agctttagaggtgtgttgtttatatatttatctcaaacatggtcatcgcgcgcacatgcagtatctactttgccttcctactgctccttgacccacgggcaaaggaaatatcttgctgaggtcggatttttatgggatctggccgctcgcgtgtcgtgcaatttcttgccatgtagtaggagtgactgcctcatttccttcctcgtatgcatcaaggagttgtgcgggtaatgcttttgtattttcaatctgatccgtgtaaaccattgtgatcgatgatgcctttattccgatttctcagcttatgaaataatcatatatatatgctcatacttactggagtagtagtagtacggtgctctcgtcttgcgttgtcaaacttcattattagttgataatatccgca

SEQ ID NO: 28952 - DNA, 404 bp, Zea mays
agcttatctaatgcatatgtttgttttttgaccacatctgttatttgtttgatcattgaataacttcaattaacacttatgtctcttagtgccacatattctatcaatcaacatctatcttggtatgcactaagttaaaaggagaattcatgatacatctatgcaatttatgatccatttgatatatgctgacaatgactccaaaaaaggatcactagttatagaactctctcttgtgcaaaatattttcatatattgtcttgagtataggtcttaagcgactaagactaaggacaaagcccaatgaagagagcgtttctatgtgaaggtacaaaagggtaaaacaacttcctttcattttaacttgtacctaaaactttctttttcatactctctttgcatat

SEQ ID NO: 28953 - DNA, 450 bp, Zea mays
  unsure (1)..(450): unsure at all n locations
ntatttgagtgcacgacatttcgagaaatgatcttctcattccactgcatactaagtcttcgagtagagtaagaatttaagttttaaattgataagttctattcgcctattcaccccccctctaggcgacatccagatcctgttcccgggtcaaagggaactttcaaactcgtcgctctcgggaattcatcgtcgacgtacggctataattcaccggactgttcggtgtgcaccggactgtccggtgagccaacggtcgtgaaggccaacggtcggccgcgcgatctgcgcgggacacgtggccgagccaacgactataagggggcaccggtctgtccggtgtgcaccggacatgttcggtgcgccaacggctcttatgctgcaacggtcgactgcgccatttatggaaggaaatccggcaccggatagtgttcggtgtgcaccggactg

SEQ ID NO: 28954 - DNA, 404 bp, Zea mays
cagctttggaaaacccatacatttatctatctcccggctaacggatatttctttgctgtcccggagacaatatacgaaatcatttttgttagtgccattaaacactaaggctcctttcagataatttagttcttgggcataatatctagcttccaggatttcttcttcggataatttttccccgaagcatgtcgaaaaatgtaatcaatatcctcaactaggtcttcggggataagagattatgttcttttaccatgttttgccctgctaccatgcccgtatctgaagtttgttgatcaactttatcttcaagcgcgacaacctatgtctcaatgggtgttgaaggcccatctttcggttcttcttgactttggcagttcacattttcttaaagggctaggctc

SEQ ID NO: 28955 - DNA, 401 bp, Zea mays
tctataggacaacatgtgataggctttactatcttgccattcgaaaaagatagaccttgtgcagcttgtcaagcaggtaaacaagtgggaggagcgcatcactgcaagaatgtgatgaccacttcaagacccctggagttgctgcatatggacctcttcggacctgtcgcctacctaagcataggagggagtaagtatggtttagttattgatgatgacttttcccgcttcacttgggtgttctttttgcaggataagtatgaaacccaagggaccctcaagcgctttctcaggagagctcaaaatgagtttgagcctcaggtgaagaagaaaaggagcgacaacgggtccgagttcaagaacccttcagtggatgagtttcttgaggaggaagggatcaa

SEQ ID NO: 28956 - DNA, 413 bp, Zea mays
aagcgactcagcatgcagctagaatatcttcattttacatgggctaatcggcggtgccagagccaacccatgttagacttatcaattaagcatgtgtcgagttcagctctatcaaaatctactaagtatagctgaccctctagcacacccttatatgctattgaatcatcactttttctaaagacagtgacaccaacattagtaaagagacaggtgtagcccattttgcataattgagatacggaaagcaaattgtaatctaatgaatcaacaagaaaaacattggaaatggaatggtcaggggatatagctattttacccaaacctttgaccaaaccttgatatccatccccgaatgtgatagcttgttggggatcctggttttctcgatgaagaaaacattttttttccct

SEQ ID NO: 28957 - DNA, 288 bp, Zea mays
aaattctttagcctagattggtgtcatctttgtggtgaatcaagaattacagatgtcccgttatgtgcaacgtgcggtgcttagtgagccttatggatgcaactagacctcactgacaccaaaggagagatcataacgagggcttggagagtaagaataagaattacgaagcttctctagagaagaaagacgttttgcttcaagcaacatagggttcgctagaagaaattcaagctgaaaatgctagactaaacgaggagcttctccacagtctaacagtcttataag

SEQ ID NO: 28958 - DNA, 399 bp, Zea mays
agctatcttgcgcgtagcttttgaactggttcgacctctctcccgaccatgcttttcataatgtgaacagcttcattccgagtccgaagaatcctatacatatattacacttgggaaacattgttaattatgtatttgaggaccttctgaagacaaaagcccccaactgtagccactcgcagtattaatttgttaagataacaaattcaaactgcgacatggaccaaagccctaaaccgaatggctgaaaaaacacctttcctttgctagaatagcaattaacaatgacagatggggcccttactttgtacgcgctgggcgcataaataacaactcacaccaactgcctctgatacaacgtttgtgcctttgcattattttttcacttaaaacccttgt

SEQ ID NO: 28959 - DNA, 423 bp, Zea mays
ctcttcagctttagctcttactctgtagcgttcgctagattttcaagccttttgagcttcggttaagaaacgtgtttataccatgtctagggaaaaaatgtctgagaatgagaagcttgctgaagagacgaagttgtttgaggagaaaaacgctgtgaatccttatattgctggatttgttgagtcgatggcaaagacaaacacagtgaagatcactaaagagatactggaaggtttatctgaagatactggtgacagcgatagctatgatgtggaaagtggggatgacgattcctaagatcggccctggcgaccaagccattctgtcttcggaaaatcaaccattaacttgagtcattttgagaacatgagaggatggtactttcatgacatgtctattgtgacggttgccggataccacac

SEQ ID NO: 28960 - DNA, 370 bp, Zea mays
agctttgctcagcagcatactctgcacacaaacaaccttcgttagaaaacatctccattactaaaaaaagtcagagaaaagttgtttaccttgaacttggaataaaacaaactaccgacgatgtgctatcgtcggtagcggctgatatctgtttcgagcttcaggaaaccgatactctttgatagagtaccgataaccttcgcaccagtttgatcccgcacgcagcctaacctttcgtcatcgatgccaccgaagagaagcgctcccggccgatatccgcaagatatagcatattcttttagctcttctttttcggccttcgtcagctcttgaccaactaagttttgaaagtggaaagcttcatcttccg

SEQ ID NO: 28961 - DNA, 450 bp, Zea mays
tgaggctgatataacggctaccgacggcattatatcgtcgacattctcttttactccaatttcaaggtaaaattcttttgcctagatttgtgttatctttgtgatgaatcaaaattttctgatgtccgcttatttccaaagtatgttgctaagtaaagcattaaggatgcaacaagacctcgaggacaagaaaaatgaaatcataacgagggcttggagagtaagattaagaattacgaagcttctctagagaagaaagacttcctgcttcaagcaacagagggttcgcttgaagaaattcaagctgaaaatgctagattaagcgaggagcttctccaaagtcaaacagccttaaaagaacaattagagagcttcgaacaagggaagaaagaactgcaagcaaaatatgaagtcaaagctgataaaaatacaaagctgcagaaatctttg

SEQ ID NO: 28962 - DNA, 415 bp, Zea mays
agcttctacccgcttgccccattgatcggttaagcatgtttgaatagctctctggtaagtcgctccagcgttcatgaagccaattggcatggaggtatagcagaaagctccaaacgggggtaatgaatgcagttttttcctcatcttcttttgccaggctgatttgatggtatccagagtagcagtccaggaaggacaacatagaacatccagcggtcgaatctaccacctgatctattctaggaagtccgaagggatccttcggacagtgtttgttgagatctgtttagtcgacgcacatgcgccaatccactttactctttttgagcagaagaacaggattcgctaaccactcaggatgcagtacttctctaatgaaccctgctgcgactaaacgagctagctcgtcgcgaat

SEQ ID NO: 28963 - DNA, 413 bp, Zea mays
tgtgaaggttcttatccacacgtgtgctatattgttatgccacagccagtccatgcaagtcttagcaattaagcatgcatctagaccggcctcctcttttgcaaaatcaactacataaagtttgccatctagtacacccttaaaagctagtgaaccgtcacaccttctaaaggcagacacatctatgtttgtgaataaacagttatatctcatattgcataattgactaacagatagtaaattatatccaagagactcaactaaaaacacattagaaatagagtgctcatttgagattgcaattttacctaacccttttaccttgccttgattcccatcaccgaatattattgaatcttgggaatccttgtttttgacgtaggaggtgaacatcttcttctcccccgtcatat

SEQ ID NO: 28964 - DNA, 437 bp, Zea mays
tgtccatatcaatcgataatccttcggatatatatcacaaaaggcaaaacattgctgcatgtcaattggtaggtcattataactaagcttgagtataggcataattccagtcttatcgtcgcatattgtgcttggttgtaacacagcctcccattcttccttagtggtcttgtcacgcagtacagacccaattgcttttgctgccaatggagaccccacacatctctcaacgattcgatcaaccaactcaactaaatcatctggcttgctcctctgcaatccgaatgctcttgtttctataatttcttgtatgtattccttgcccaagattgccacttcatggtaatgatttgtccatgagctgtcaactacagcacccataaactcggctacttgtttttcacgtgttgtcactaatacggcgccatagacatctt

SEQ ID NO: 28965 - DNA, 415 bp, Zea mays
agcttaaacatgttgggcttatttagttttagcagcccagcagtgagcgaattcgcccgcgcgcacgtgtgcccgcgatgactttgcaaaaacgcccttaccggttcaaaattagagtggggggccttggcgctattcacatgtctcactgacatctacaagaacacccccgggcttatatcctttctcaagtcgaagtccacgacggtgaaccacgtagggacgaactccagcgagcatgtatcggatgattcacgtgatgactagtgttctactttggcagagatcatatccaagacctaacgagggtttcccctcacacaatttcatcaatgggacattgaatcgatcggtccatggaaacagcgcggacactctaatggggatcgcgttccccggaattaaaggggactca

SEQ ID NO: 28966 - DNA, 441 bp, Zea mays
tttccttgtcgtatcaaccttgacatagaaccactctgatttccagcctgttgcccacttgcttcggtagctaattacagggaactttgtagttttctgataggcaaagttatagcaaccaaaattatcgtgcaatccatcttttctagcctttggttgataatgcagctcgtgaacccggcagaagctgtccgcaaatggttccactgcttggcttcggagtgcccaaatataaacaataagcctaacgatagcgttaggggtcagctgatgaaaatagataccgaacctcttcagcacctctccaatgatcccatgtatggggaatcttaatccagcctttaaaaagctcttgaaaatacaaattcatctttctctgggtttggggtagtctcttctcccccgaagcgcaaaagcttcttctgaattttcagtgaaaag

SEQ ID NO: 28967 - DNA, 284 bp, Zea mays
  unsure (1)..(284): unsure at all n locations
gatgccacagccagcccatgctagtcttaacaataaacatgcatctagaccgggctcttcttttgcaaaatcaactaagtagagcttgcagtctaatacacnccttaaagagctagtgaaccatcacttcttctaaagacagacacatctaccttttgtaatagacaggtatatcccatatgacataattgactaacagacagcaaattatattcaagactcttcactagaaacacattagagatagaatgctcattggaaaatgaaatttaactaaccctttt

SEQ ID NO: 28968 - DNA, 449 bp, Zea mays
  unsure (1)..(449): unsure at all n locations
aactcagcttgtttttatagggctgccccttgggtagtctctcatacgccttccagaactagaccacctacattaattagagacaatcatgtctttatagacaacagttaatgatctttagtcagatttagtctgtagaactaaacatggtattgtagggtctaaatttcaaacatgatctttcccaagtaaattttagtaagctacatcatttattatttatcaagatgtcaattctttttcaatacatcattccaatagtcataactataacatatatcattacgtacaacattttaatgttttttgagatggatatctgtcaaaccatctacttatgtcactagtcctattctttgttggtgatatatcggtaaggagcattcacacacctaatgtattacataggaaanaatatttttgaatatggatattttttgttttacaaa

SEQ ID NO: 28969 - DNA, 411 bp, Zea mays
  unsure (1)..(411): unsure at all n locations
aaccgggaactctacagcggactgcagcatgcgagcacactcgggtttttacatttttgaacactcctttgagggcgaatttcatccgtgatcatnnncaatacgctcaatttgaaccaaacacgagttacctttacaaaacatatacgatacctcctgcaggcaaggtatagttttgacaatatagcaggctaaaataacaatgccgaagtatcaccatgacaccacagagattagagtatagatgccttgtataacaatattgcactgagcaaaaccccttatttaccacaccggatagcaccgctgaggaattaatgttgcaataagaagaaaacaatgtcgagatggtccttcatgcatcttactatccaagtcaggatcaaactgttacttttgcaaaaagttgga

SEQ ID NO: 28970 - DNA, 387 bp, Zea mays
tctactctagtacttactcctatatagctagaatgactacaacctacgtaatgttatcatcgattgccttatatggtcttctttgccatgaaatggatgcgaatatagttttctcaatggagagcttgatgaggaaatctacatggatcgtctttaacgatttgcaatacctatactagagaggaaggtgcgtaagttattaaagttttgtatgggctgaacttagcaccacagtacaggtatgagaaatttgataatactttgtgtcaataatatataacatgggtactcaaaccaagcttctaaaatatgaagacttgtacaggtgggtccatgggctcagccgaaagtctatagactctacaatctataacataagaaggcata

SEQ ID NO: 28971 - DNA, 375 bp, Zea mays
  unsure (1)..(375): unsure at all n locations
atcccacgctactaatgactagtagagtacacatctatgcaataacattactttacaagaactacatttggactatgatgccaacataaataaactaaatttgtatcccatgctactaattctgggtcttacattgctgcattggaaactgaatttaacaataaaaaatttagactcatgactatcatgccaacataaataaaatgtccctcaggagtgaggctactcaatatacaggagtttaatatcatgctcccaacaggattcatgtaactnttgtctttagcaattgcatacacactagattcatgtgtgcaattgaaacagtatactgaatgctacatctacatgcctacagcagatttttgtgccttt

SEQ ID NO: 28972 - DNA, 422 bp, Zea mays
gacctatgaaactcagcttatagatcgaactggttaccacgtttacttattgcaggacagagagcttctgtaatatgtagctgaacctcaagcccaagtggattattctgttctgtccgctggaccgtgatctgacgttcaaagcaaagtgtgagccaagaaaccaagaaacccaggaaaagggaagttcagcaaaaatgaacaagttaataagttacacaacatgttataaaaataaaactcaaaccactaacattagcctctccagatattccttccaaaaatctttcaccaccaaaaaacattcgttttgcaccatcaaaagcattcattttgcaccaaaacacattcgttttgcaccatcaaaagcgtatatgttcagaaattccaaaggatacgaggagatcatttcctgccttttg

SEQ ID NO: 28973 - DNA, 333 bp, Zea mays
  unsure (1)..(333): unsure at all n locations
agctttgagattggattcgaccatgatctagcaattgcttaactatgggtgctatagcaagattgtagctggatcatanggctacaactttgatacagagagatggtcgaaccactacatgaatttgggaacaaatctccctgcaaattgctctgtcaggctgactgaataaaaatctgatggtacagtaaacaaagatcttctgttcagcccccctcgctgacggtggcctttgcgcccggattcgcgccggccgtcgagattcgtgcctcgggcgagtggattacgctcaacggtaaaaagatcttgtcgcggatgaacacaagacactgt

SEQ ID NO: 28974 - DNA, 358 bp, Zea mays
taggacctattaaactcagcttgtcaagagagttcccttgccttgatatattcgctagtagatgcagcagcttcatcagagctcatgagtctactagattgttactcaggctaccaccaaatctgtatgaagaaggaagatgagccgaaaactagcttcataacccccagtggcacatattgctatctttggatgcttgaggggctcaaaaatgctagaggaagcttcagcagaatgataaccagagtccttcattctcaaataggcagaaatgtgttgacttatgtcgatgatatcatagtttaaagcacgaagcaagaaaatcacattgctgatttgcaagagacatttgccaact

SEQ ID NO: 28975 - DNA, 407 bp, Zea mays
agcttctaaagggagaacacgtgtattgtttgactaacgtgcaattcgaaaaagatagaccttgtgcagcttgtcaagcaggtaaacaagtgggattagcacatcacagcaagaatgtgatgaccacttcaagacctctggagctgatgcatatggacctcttcggacccgtcgcctatctgagcatatgaggaagtaagtatggtctagttattgttgatgacttttcccgcttcacttgggtgttctttttgcaggataagtctgaaacccaagggactctcaagcgcttcctaaggagagctcaaaatgagtttgaactcaaagtgaagaagataagaagcgacaatgggtccgagttcaagaaccttcaagtggaggagtttcttgatgaggaggggatcaag

SEQ ID NO: 28976 - DNA, 437 bp, Zea mays
gacctatgaaactcagcttactaggtggttatggcatagaagactcggtcatgttgggatgaagcaactcaatcggttaaccaagcatgacttagttcgaggcttaaaagatgtgaagtttgaaaagaacaaattgtgtagctcttgtcaagccggtaagcaagtggcaaatactcatccaaataaaagtcaaatgtccactcatcgacctttggaattacttcacatggatttatttgggcccacatcttttgtaagtattggtggtaattcttattgtcttgtgattgtggatgactattcaagatttacttgggtttattttctacgagacaaatccaatgtgtttgaaacattcaagtcatttgctatattggctcaaaatcaatttgatttcacatcaaaaggttaaaaggatatgggtcggattcaaaatg

SEQ ID NO: 28977 - DNA, 374 bp, Zea mays
  unsure (1)..(374): unsure at all n locations
agcttactcctccctgtgaagggccgttcatcatcgccaagattttgaagcccgggacatacaagctggccaacgatcaaggcgaggtctataacaacgcttggaacatccaacaactacgtcgcttctacccttaagatgtttcaaatcgttcatatacctcgttctctttacatacataaataaagtctaaccatcaaggaagggtcagccttgcctcggcaaagcccgacccttcctcgggggctagaaggggggaaccccctctgcgtcaaaatcttcctcggaaaaattttctaccaagaaagattttctaccgaaacgacnttcgtgccttctcgactatatcgataacagaatcctacaaatggggc

SEQ ID NO: 28978 - DNA, 404 bp, Zea mays
tgtcaatcctgtcaaagcaacagcacatgctatcacagcagctacagaccataccagtaacttggcctttcgcatgctggggattggatatgatcggacctttcaagaaagctcaaggaggttacacccacgtattggtggcgattaacaaattcactaaatggatagagttcaagcccattgcttctttaacctctgctaaggccatggaattcatacaggatataatattcagattcgggataccaaacagcatcatcactgacttaggatccaacttcaccagctcagaattctttgacttctgcgagcaaaaaagcattcagatcaaatacgcatctgtggcgcatccaagagccaacgggcaggttgagcgagccaacggaatgatattggaggcactc

SEQ ID NO: 28979 - DNA, 293 bp, Zea mays
atcatgatcattccagtatcacggagcaccattcttgattgtgaccttcagatctaattgctaagcgagctatgaaatgatcatgtggtgtaaacaagccgacggactaacttattcatgcatgcaccgatattcatgaacttttgagcaatcaccacccatcacacccagattttacggtcggatgcagttcaattggagaacattaacttaagatgcgaatatagcttgcaaaaaatcttattttctctattcaacttgttataaataacacaccaggaacacagtgatca

SEQ ID NO: 28980 - DNA, 292 bp, Zea mays
ggacctataaaactcagcttaccgctggacagaacatggttcttttgtccaatggagagcctgtgaccttcccgtttgaatatgagcacatcctacgacaatcactctcttaggagactaatggtctataccaatacgcggcagcgtgagctcaaagggttaaggatcatcctgcaactggtggatgcacagactgaaaaatagaatctacgctatatgctaaacgccatgacattgattaatctgaacgccgtatcatgcattgctaaaccaaagtgggtgttactaacaa

SEQ ID NO: 28981 - DNA, 375 bp, Zea mays
  unsure (1)..(375): unsure at all n locations
agcttgtgaagatgcttcatcccaacatgggctagtcggtgatgccagagccaacccatatttggcttagcaattaagaaagtatcgagttcagctctattaaaatcaactaagtatagctgaccctctaatactcccttaaatgctattgaatcatcactttttctataaatagtaacacctatatccgtgaaaagacagttgtaacccattttgcataattaagatacagaaagcaaattgtaatctaaagaatctacaagaaaaacatttgaaatagaatggtcaggtgatatagcaattntaccaagtcattcgaccaaaccttgaattccatccccgaatgtgatagctctctggggagcttcgtttttc

SEQ ID NO: 28982 - DNA, 371 bp, Zea mays
tgcttcgcctcagtataccatcctgtgtccttcggagttgtggaacgcgcaaatggcaaaattttcacagctgtcaagaagatgctcctcgacaataaaaagggaaagtgggccgatttgttacctgaagtggtctgggcactaaacacgactgagtgcagggcgactgggttcacccctttccgccttctatatggatcggaggccatgaccccgcatgaaataaaacatgggtccccacggacagtctcgtcagctgtccccgacgtggacgagcccacttcgaaggatctcatcgatggagaccgcgttcttcccctacaggctctaaataaatactaagcccaaacaaaagcatggcgtgaccacgc

SEQ ID NO: 28983 - DNA, 358 bp, Zea mays
ttaagttttcctgggcttactaatatatacttcaagtattgtggaacaccattttccaattttacattcaatatattattcaataactatctaaaactatataatatgcactggacaaagtaaatcactaacttaatcatacatgcaccccaatgcatgaactttttaccagtcaccaaacatcacacccagattctactgtacaaaattgaattcatttggagcacaataactacagatccaaaaataacaagcaaataaatcttcttttctctaattaaacttgtttaattaacacacccagaaaacagtgaacaacatataaagtttattattttcttagatggagtataccaca

SEQ ID NO: 28984 - DNA, 414 bp, Zea mays
  unsure (1)..(414): unsure at all n locations
tctcctgacaagtctgcacttaccgctgattgctatactgccacatataataacaaaggagcccctggcgttggtggacttaatgttgttagatctatcaaatattgcttcagctcttcgaaggctttctgctggattggtccccattgaaagacttcggctgacttcagcacttcgaagaatggtaagtttctctctgctgatctggatatgaatctgttgagagatgccagccttcctgtcaatctttgagcccccttttttgtacttggtggttccattcgaagtatagcttcgatattgcttggattagcctcaattccctttgttgaaactaggcaaccaagaaatttccccttctttactccgaagacacattnttctggattcagctttaaaccagcttgtctaaaa

SEQ ID NO: 28985 - DNA, 445 bp, Zea mays
acttcttcacatgtgccaccgccatctcgatattgttttcaatgcattcccctattagatgcgtcacgctcttcattagcctctcattatcttctttgagcttttgatatgaatgatcatatgttcctgcaaattctatctcaaaggaagatttgcttgtctacaaacaacatgcattatcacatggtaatgtagtatcaatttgaatacatgtgcacgagtgaggttgttgggattttaagttctctatcacaacctcttgagcgatgtgtaatatgatatgatcatctctaagaatctcatgagagcataggagcatatcatattaatttgaaaagctagattttcaatttttagcgtttctacttggtccttaagcaagggattcctatttactaatttatcgatacaatgtaaagacgtatcttgctcattgacatatttc

SEQ ID NO: 28986 - DNA, 208 bp, Zea mays
cttgggaggtatatttttttataaaaaacaaggagaaataagggccacaaactgtagccaaggactttactagacccgtgccaagctcaacatgatgaagactaaaaaggcttatgacataccctcctaataataatggaagattatgaatagtacacggacataaacgacctaatcagggtgcaacccggcctaagatagataacaa

SEQ ID NO: 28987 - DNA, 396 bp, Zea mays
acggatggcccatgaaataatgtgaaagagcgaaaaggatattcatgacgctcgataagcaacaaaagcggatgagaaagctgcggaacttgaaagacggataggtattacttaatagcttttaactgtgttgtttatttttgcgacttcgagctaatttataccttctaccacagctgaactttctcctcccccagagccattcgacccactggccgacccagagacatatatggcaatagaaattattaatatgaccgaagctattgtagacaaagttgtcaccaaattactaaccgaagctacataaaaagtcttgaaggaagaaggatagctattttgtacaaacatttctagaataataatgtaacatttgctgaactatgtttataatat

SEQ ID NO: 28988 - DNA, 273 bp, Zea mays
acctcgctgacataataaaccgacttctgtaagggccggacccctacggttggccccaggtcctcaaaggcttgggtggtcggaccaccaccttctcctaggggaaactcctgactccccttgggaaggtgcaccatccctttgacaaccagcaccatgctcactgcctctgtagccggtgcaatatataagtacagcggctcccctggctctggaactaccaatattggtagggacacatggggctgcttcaactcttggaaggctcactct

SEQ ID NO: 28989 - DNA, 401 bp, Zea mays
tctccaaaatattaaaattttttgaaccagttgaatatcaaattcattcggatgcaaaaacatgatcacatcatcagcatataaggacactctgtgttgcaaaggtctagaagccaatggatgcagcagattttctagatcagcttttgaaattaaccaacctaacacgttcatgacaagtatgaacagcataagtgagagggggtctccctgtcttaagccctttttgagcttgaatttttcgccagcaacaccattaagcagtacttgtgtggacgaggtagatagcagtccacacagaacattcatccaaatctgcccaaaccccagtttttgatgaacttctaggaggaaaggccaggaaactgagtcaaagctttaaaatgttagtttaaaggatc

SEQ ID NO: 28990 - DNA, 400 bp, Zea mays
tgaagccatggtacgagcatacgctaataatatgctaattgactcaagcctagctacgggtgcataggtttcaccaaaatccaaaccttcgacttgagagtaccccttggccacaagtcgagctttgttccttgtcaccacaccatgctcgtcttgcttgttgcggaagacccacttggttcctacaacattctgattaggacgtggaactaaatgccatacctcgttcctagtgaagatgttgagctcctcttgcattgccatctcccaatccgaatcttgtagtgcttcctctaccctgtgtggctcaatagaggaaacaaaaagaataatgctcacaaaaatgtgcaacacgagatcgagtggttacccccttatgaatgtccccgaggatggtgtc

SEQ ID NO: 28991 - DNA, 406 bp, Zea mays
agctttatcaaatggacgtgtatggtcctatcaaggaagaggcctatgttgagcaacctcccggctttgaagataatgagtaccataaccatgtgtataagctctcaaaggtgctctgtgggctcaagcaagccccaagagcatcgtatgaatgcctacgagattaccttatcactaatggcttcaaagtcggaaagccgattctactctcttcattaaaactattgcaaaagacttatttatatgccaaatctatgttgatgataatatatttgggtctactaacaagtcatcttgtgaagagtttagtaagataatgatacataaattccagatgcctatgatgggggagttgaagtatctcattggttatcaaatcaagcaactccaagagggcaccttcatc

SEQ ID NO: 28992 - DNA, 404 bp, Zea mays
cttgaatcacttttgtacccctgtgataccagaaaccctaattggaaccctggaaaaccctaaaaccaaaccctagggacttatgtgcaaaaatgatgaacctttggactaaagtgtaaaaactactatgttttgacatataaagtcatttggttcacaaatatgtgaatttacaagccaaaccctaagttttggacttaaatgcaaaatggacctcatttgagttctataccaagtctgaaatttaatgttaaaggctccactttgtggctttgtaactatcaaattatagggtttttgccctacgtcaccacatcaatattgtagcccaactatatgagtacaactttgctaaaaggtgtgagcacagttgttaaaaaaattatggagataatcaagcctga

SEQ ID NO: 28993 - DNA, 397 bp, Zea mays
  unsure (1)..(397): unsure at all n locations
agcntcattataattttattgttcatcaattacggcagcagcactaggagatccatagcaatctagatgttcaattgcactacgatcatgaagatgatatccctggtgatttggtaatgcatcaacaaactatgacccatcaacaatctgtagatcactagaaacaacggcaggctcatcattgttagtacaaacatcaacaacaggttcgccatcaagactggccgtgggactagtgcgaggacgacgaatgtaggttttggtaactggtgcgttagaagcaaagtgtgaagtgggcattgaggtagaaagacttgtaatgggaatgagaacattagttgaggatggtggagacgatggtgtagtggaagatgaagacccaaatgaaggagcatgg

SEQ ID NO: 28994 - DNA, 428 bp, Zea mays
  unsure (1)..(428): unsure at all n locations
tctaaaggacaacacgtgataggtctatcttatgtgtatttcgaaaaagatagaccttatgcagcttgtcaagcatgcaaacaggtgggaagctctcatcacaccaaaaatgtgatgaccacatcaagacctttggagatgcttcatatggacctcttcggacccgtcgcctatctaagtataggaggaagtaagtatggtcttgttatagtcgatgatttttcccgcttcacttgggtattctttttgcaggataaatctgaaacccaagggaccctcaagcgcttcctaaggagagctcanaatgagtttgagctcaaggtgaaaaagataacgagcaacaaccggttcgagttcagaaacttcagtggaagagtaccttgaggaggagggataagcacgatncttcgctcctacacaccaaacaa

SEQ ID NO: 28995 - DNA, 410 bp, Zea mays
  unsure (1)..(410): unsure at all n locations
aggaactatnaaactcagcttataaagagaatagaagcacgagctcgttcttatgtcataatagaaggggagttatataagcgcggggtctgatccccattgctcaagtgcttatccagatccgaaggtatataattaatgaaggacatacatgcaggtctgtgtggatctcacattggatctaggcccttgcttgggaaagtttttcgccaagggttttattggccaaaggcagctccggatgcagcggatttagttcaaaagtgcgaacgttgtcaaaaatgtgcatgagatcaaaaacaaccttcgtctttaactcaattaatacaacccacttggtcgttgcaaaggtggggtctggatttgctaggtccattaccaccagcacaggggaacttaagatatgtggt

SEQ ID NO: 28996 - DNA, 304 bp, Zea mays
acggtgtcattgttggttcttggaactgatgcgacgaccaggctgaaactgtgtgcccgcgatatcccatccctcaatgtaacactcatttgcttctttttggagccgagcaatcttgtgatgttcctttttggaatacctgacaattcatcagctgacagcgcatctgctattagttgtatcttggggagaccacttgccttttataccggaaaacaaaatccggctcttctgttatggagatacactttccgttcgtactgatctggcgacaaggaaatccataatacctcgcaacaacaac

SEQ ID NO: 28997 - DNA, 262 bp, Zea mays
gtcatgacaatacacattaactcatgctatcaatctacgatgatctacatatccaagattgtcccaccgatacgttcaaatattatatctaaaactcatatcatctcggggaagatattgatgctgtaggaattaaagaattatcatgtgcggaaggaccaaggcctacaacatggaggaaagtcaaaggatggtaacaattatgttcttaagagcaattaatcttagaattatcatgagtctcgagcacacacaaaaaaat

SEQ ID NO: 28998 - DNA, 341 bp, Zea mays
agctttgccggccttatggattggttctttctccagtgtctcagcacgagcagcgtcagaagaatacccaacttacatattcagcatggcacttatctctgcgtcacttggattcaaaggcacctcaaaatgaacccgcctctcgtcgtcaggaatttctccgagtgcggcaaccaaaacactaactttttcgggagaaggtcgcactctaaggcccaaaccgctatcaccagcaggaggattcgacaccaaactactaaaggcctgggaaggaagtagatttcacgccgagtatgcaacaagaacgcttatggtagacacacttgctttgagcatcatct

SEQ ID NO: 28999 - DNA, 367 bp, Zea mays
agctatgccgttgtgctacttttaccagaataagaaaacaccccatgtgagtggagagatggcgagagtatcgtgcaccctccgtggcaagaggctggacgggggtgtatttgtgctctcggttggcgcgaacctaatctggtcctaaaaaccccgagggcgaagggacatatgcaagggctaagagatacacatgtcgcgcgattgctgatcctcaactgactataattgagtccgatcgacggaacttcgtggacatgaagacttggtcactgccctacacgtaccattctagtgaataagaaagggtaataagaaatacgctcgtatatgtcaagggcctgaactatgggagaaagaactctag

SEQ ID NO: 29000 - DNA, 183 bp, Zea mays
aacttcagccctgatactttaattattcagctaatggcacaccattccaccctcatggtagcactgtctttccaggcggacatcaacaaacaggatcttactgagaggcactcaaaaaatagccttagtccccttaaggccacaagatccatcattataatcaacaggcgaaacagcggatca

SEQ ID NO: 29001 - DNA, 344 bp, Zea mays
  unsure (1)..(344): unsure at all n locations
agctntcttggcacaaaagatttgtctcagaggggtcgggttcctgcccttctttcggagctacaaattccggaggatcggatccctctttcgctaacaagcacatataagaaccatacatcaatcatggggacttagtggggtgtgccaattcttatgccttattatttttgtgccctataaattatttaaactatttttggtgcataaaatatcagcatataaatatatatatgaaaatggagaaaagaaatgggaaaagaaaaagaganagagtttctagctagctgggccggggggtgtttttggcccaaccgggcgcgagcgcgcgcgaccgcgtgggc

SEQ ID NO: 29002 - DNA, 391 bp, Zea mays
tcttccgccgaggggtttcgtatcgtcaacatagaaagcagcttcggcttacgccaaagttttaacatgttcgcaccatgctttctccaaaatagttgcaactcctcttgcgccagagaaggcacagacgtccccgcggtcactcaaaatttcctcaaaagcttcggcttcgctgctgatccactcaattgggccctcaggatcgcctcttatgaagttgtcctagcttgaatatgcgccaacgttggcaaagctagttttatctttttcacgcagtccatagattttgcaaagcatctttccttggatatgcgaagtccttcaacgtttttctctaaatgatttgtccactattcgctaattcctcgtttagcttctacgactgcgcact

SEQ ID NO: 29003 - DNA, 402 bp, Zea mays
agcttgagaaaggaaaaactgttcttgtgtttagctcaataagaagaatgttcccaaagctataaatgaagaaatcaacatgaacgaggaaaaaggtaaaaattcaattagtcatgttgtttgtactaatcatctctccatgtccttcaagcacaaaaagggaagaggaaaaaggaggtgtttcaaatgcaaggagataggccacctcatcgcatcctgtccgtacaaagacaaagatgaagggacaagaagttgctttggatgcaacaataaggaccacattatcacttcatgtccggtcatgaagaatcaaggatgtgcatcctccaagatgaccctcaccaaagaaaatgacgaacatcaagcgtcatgtcaggttgagcgacgcttctgctacaaatg

SEQ ID NO: 29004 - DNA, 430 bp, Zea mays
cagcatgccagctagtccctaacaaagcattttaatgatctttctcccaaaatatgaacccatcaaaacaattcgcttaattcctataaccacaatgaacaaacaccaatggctcgcatggcacactggaaaacacaacctgataaacaaaatgaggtaaaagaagaacaaggcagaaatgtttggcacaattaaggctgttgcttggaccaaaatatttttacaacaaactaaacaaacaaaaaaccttgttagagcgatgcaacttcaaaacagaattagcccccagaaacgatttccttaaaacctcaaactccatattgggtattggaatccaacatccaaggccgtagttaccaatagaaattaaaaaaaatgaaaaacaataaacaaaatttcaaaaacatgcgaaaccaaacccaataaaaag

SEQ ID NO: 29005 - DNA, 439 bp, Zea mays
  unsure (1)..(439): unsure at all n locations
tgatatgaagctatgttgtgcttganaaagtcattncaatttattaactcacgctatcaatcttcaatgatctaaatacccaagattgacccaaagttattttgaattattatatctaaaactcatatcatctcgaggaagatattgatgttgtaggaaataacgaattaatcctatgccgtaaagtcaaggcctacaacatggaggaaagccaaaggatggtaacaattatgcttttaagtgcaagtatcttaaattattatttcttatgtgtcttgtgtagtcacataaaaaaagaaagcacttcaaatgtttttaacattatgtcaccattctttgaagaaattcctctcatatggcagattgtatatttatcatttctatattatagcaatctacatgctttaattgttggaagaatatcatggggtgctttaca

SEQ ID NO: 29006 - DNA, 374 bp, Zea mays
acaaatggcattttgagaaagacaggatttgtagcgcaagccacgcggggaaacaaggtggagtccatcatccacacaagaacatcatgacgaccgacaggccgcttgagctactccacatggatctattcggcccgagtgcttacataagcatcggcgggagtaagaattgtcttgttattgtggatgattattctcgctacactcgggaattctttttacaggaaaaatctcagacccaagagaccttaaaaggattcttgagactggctcaaaatgagtttggcttaaggatcacgacaataagaagcgaccacgggacggagttcaagaactctcgaatcgaagctttcttgaggaggaaggcatcaagc

SEQ ID NO: 29007 - DNA, 425 bp, Zea mays
  unsure (1)..(425): unsure at all n locations
tttaaggacaacacgtgataggctttacttactntgcattcgaaaaagatagaccttgtgcagcttgtcaagcatgtaaacaagtgggaggagcgcatcacagctagaatgtgatgaccacatcaagacctctagaactgctacatatggacctcttcggacccgtcgcctatctaagcataggaggaagtaagtatggtctagttattgttgatgacttttcccgcttcacttgggtgttctttttgcaggataagtcggaaactcaaaagaccctcaaacgcttcctaagaagagctcaaaatgagtttgagctcaaggtgaagaagatataaagtgacaaagggtccgagttcaagaaccttcaagtggaggagtaccttgaggaggaagggatcaagcacgagttctccgttccctacaca

SEQ ID NO: 29008 - DNA, 371 bp, Zea mays
  unsure (1)..(371): unsure at all n locations
aagatagtccttgatcatacatgcctacatacgcatccaatccttaattaacctgggtggagcatcacctattcctagcccaaatcttgagttaagtacttccacccttaagattgctttgtgttccttaggatgaatagagcattatggagaactttgcagtaagatcccaccatgctcctgatgaaaatattcttgcaggtagaggccatcctttctcaggataacccctgagctaagcattattgcaaaagaaaacctctatcgacaagatctaagctgggctaagcattnttgtaacaatatttgatacttccgaagaagtatctataataagaatggatatcaaggtaggcaatgcatccaataat

SEQ ID NO: 29009 - DNA, 448 bp, Zea mays
  unsure (1)..(448): unsure at all n locations
tcggcgtgcagcagaaaaggggaaccgacttaaatatgataagccaaattagacctcgaagaattactatagagttattgataaaagtaaagggcattattaattttacacgggctgtgtcccgtgcctataaatagatgaacagtactcccgtactgttcacgctgacttggcatttgcattaaaatcacgcttgtacccttactttccttcaagccgaaggtacatttgtaatttgttgttgtttatataagtaagataaatagaaataaattaataataatgttcaaagtaatcatgttattttatgtgttttgtgtataaatctctcttatcttttattatgaatgggaaggtatgtccttcacaaccttcgtcttgaaatcattatatccgaagggaaataatgttccaaaggacgaanggctttgatatttaaacatttatg

SEQ ID NO: 29010 - DNA, 426 bp, Zea mays
cccgggatccttagagcacctgccgcatgcagcttggagcgtttttggttgtctacttggggtagacaccctcttcttctcctccgttgccttgaatgcaaccggttgagcttccgatgtggtggcatcatcaagctcgttgatcttcctcgagccttcgatcatgcactcaaaacttacaaaattcccgataacttcctcgggggtcattttagtatatctaggattaccacgaattaattgaactcgagtagggttaaggaaaataagtgatcttagaataaccttaaccacctcgtggtcatcccactttacgctctcgaggttgcgcgcttggttcaccaaggtcttgagccgattgtacatgtgttgtggctcctcccctttgcgaagccggaaccgaccgagctccccctcaatcatttt

SEQ ID NO: 29011 - DNA, 420 bp, Zea mays
tggccaccggcagaggaccgacgatcggatatggtgaagaaatgcgatctgagggtgcgctggcaagcctacggcggtctccggtgagggcacgattgccgcttaacccaagcgcgccaccgaggtaacttttgccacgatacccagtcactttaccacggccaacgacgaccggtcacgccgcgatggcgttcttatcgccggcggagatgtcctgatccataacgcgatagtaactgatgacgatgaacagtgcctctgatccaatacacaacttgactgacagaccaacttagagcccatttttctctcaattttccatagtgacacaggttaagctctgcagcaaacttgtaaagtatggtacccactacaaacttgctatggcaatcataggtatatttacacaggatcatgctc

SEQ ID NO: 29012 - DNA, 264 bp, Zea mays
ctacatagttccctgaagaacgaccccaactctgcaattgctccatatacatccttcctcaccagtccatctaggccaacggctatgattctctgtatgagtatgtggcaagaatgtgtattcagttttccaaccacctttgaaccatcttcacttatgtatcttgctaggctatccgcaaatccatcaagaaacttgatacctttgaggaacttgcaaaactcgactttctgatccttccccaacacatattggagcacgtgg

SEQ ID NO: 29013 - DNA, 360 bp, Zea mays
  unsure (1)..(360): unsure at all n locations
agctcgttgttggaattggccgattcgttgtcaanctaactcaaatagtgggagaacgaaaacagtttgatgcatgctaacacagtgtattaaaacaacaatgtttttttcgtccccaacaatggtgttgtacgagggtatttataagtaaccaggggacggttccacctttgtcaatacagttatgcccctagatacctacattattcctagaatattcacctccctaggggtatcgcgggtcattacaacgtgattaagtacttccacagacggacacaccatcaacttttgccacatagtggcttacaagtgggaccctgcagcacaaggtagttttacagggcccccccttacaat

SEQ ID NO: 29014 - DNA, 225 bp, Zea mays
tgtgccatacgtgattgtccctggccagagtataatagtaccatgtctgggccacacttcagactgccatgacaaaggacatcgccatgactgcggtattgcccccgtacgaagatatagttgcttcttagcttatcaggaactacttcggatctgagtgcccatcatacatggggagctgaggtgggcttgatgttgggggccctttggtagcctgctggtctg

SEQ ID NO: 29015 - DNA, 383 bp, Zea mays
agcttttatgacccacttctttaaaggaaagaaaactccgctctacgcaagggtactgagttcgctagagtaagtctcccggatttgtcgagcagctttcttttccacgctgataattttctagccaccttatcaaggattgaaaactccgctctacgcaagggccgccaaatcagaggtaatctaaggtattttcacggtaaggatttgattgcacacgggaaaggctgcgtaatattctctagttggaagaggtcacaacatatggggtatactgcacatttgcttagattgacagttaaaccagaggcttcactaaaagcagtaagaatctgagttttttttttaacaagcaggcaggagttctgtcttatatattgata

SEQ ID NO: 29016 - DNA, 334 bp, Zea mays
tccgagagagggtttcgccttgaagtgggccgtccgagttagcctccttcgcgtgccttgggaaggccctgcgcatccccttttatagatacaaggggatggtccagctgtacatatgggggtgtagctatgtgctaacgtggccggcggagaagtgcttgagccctgtagaagcgtagctggcggtgcggccctgggtcctgctgacgcatgcagggaaccatcattacctgttgccggagtaatctagatgtgacaccggtcttgttccttcgtagcctgaggcggctagctaggggtagggtaatgatgtatcccctgtagcgtaatcggt

SEQ ID NO: 29017 - DNA, 409 bp, Zea mays
agcttgagctacagtcatgcatccagaatgcggaggagaagatcctatgtgaacatccatggaagtgtgagagggagaaccaactcggacaccctcgggggttgggtcatagctcgcgctacccatccgagtcggatcatccccggcgacaccctcgggggctgggtaagcgctagcgccatccttgagggtcgagctctctgtaacgaccacctctaaggctaaaggaccttcaccctcttccatgggagcagaacaatccagactagcctcttgacccttaagattgcgctctaaggtcgatgaggcacgggacgctgctcgagataaatccaacccggcatcaggcacatcagcgcaaacatccatcattccaccatctgtcggcctaacaacagatcttctgggg

SEQ ID NO: 29018 - DNA, 456 bp, Zea mays
ggacctataaaactaagcttccttgtcgcatcaaccttgacatagaatcactcagatttccagcctgctgcccatttgcttcggtagctaattacaggaaactttgtagttttccgataggcgaagttataacaaccgaaattgtcgtgcaatccatcctttctagccttcgtttgataatgcaactcgtgaacccggcaaaagctgtccgcaaatggttccactgcttggcttcggagtgcccagatataaacaataagtctaacaatagcgttgggggtcaactggtgaaaataaataccgaacctcttcagtacctctgcaataatcccatgtagtgggaaccttaatccagcttttagaaagcttttgaaaataacaatttcatccttctcccgctttggggtagtctcttctccccgaagcgcaatagcttcttctgattttcagtaaaaa

SEQ ID NO: 29019 - DNA, 391 bp, Zea mays
gacctgtgtcgtttattgttctaatggaaaggatatagagggaccaggagccgatttctgtttcgcagcaattatttctgctactaagcgtaacccacagaacttttggtattgtctggatcatgccttctgtcttttccttattcctgaagaaatttgtcatattttcttaaatcttgcacatatggatcagttaagtttgctctgcattaaaaaaagactaaaaaatttaacagatcctttttagcctttaaagcgatttaaggatcctcttgttctagattctctttaattataaaattatattcaagaaattccttatactcttagtttctatcagtgtctccttgcactcctttgagcataacaactttaatcctcagattttcat

SEQ ID NO: 29020 - DNA, 395 bp, Zea mays
  unsure (1)..(395): unsure at all n locations
tcacaaagaggaacttccgccattntatacgaacagcttccgccgaagactgcttctccctgtaagaccttcggcgacgaagcataggcccaacagtagcccctttcgcggtgctagatcgtttttcgtaacgagcttgatccgtgaaaaaagtctcttaagcttcggagcgccgaaggtctaaaaaacaccttccctgagctcgttgtcgagaaacgattcaatctcccagcgcgtagcggccccaccttgcagagttactgttcggtctctgcggtccaccacgcagcgagtgcgagcgggtgtccgcctagtgtaaaaattctggcgcttcgccttcttacctgcagcactatataaacagacgagtaggtgtgaagttaccacaacattca

SEQ ID NO: 29021 - DNA, 176 bp, Zea mays
cggggaacaacatggagacgaggaatcactacatgaaagcctatggcgatgcgcatctacgcattgagagagatgccgattgctcctcctccgactccgacaatgacggactatgacgtctcgtctgcaacaaatcggccctcttacacaacgagcgtcacacgagaatcatggct

SEQ ID NO: 29022 - DNA, 401 bp, Zea mays
  unsure (1)..(401): unsure at all n locations
tctcagcttaccgatggactgaagagtgccttcctcaatggaccaattaatgaagaggtctatgttgagcaaccttccggctgtgaagatagtgagtaccctaaccacgtatacaaactctctaaggcgctatatgggcttaagcaagctccacgagcatggtatgaatgcctaagagattttcttattgcaaatggtatcaaagtcggaaaggccgatcctacactctttaccaaaacacttgaaaatgatttgttcgtatgccaaatatatgttgatgatattagtattgggtctactaacgaatctacatgtgaagagtntagtaggatcatgacacagaaattccagatgtctatgatgggggagttgaagtatttcttacgatttcaagtgaagca

SEQ ID NO: 29023 - DNA, 333 bp, Zea mays
ctatttgctacaatgcctacgagcgccaactgaaaagagaaaggatacaatttgatatactctgttggccttctaccaattatttggtttggagtcaaattccctttctgctattttcctattaaaatataaaaacaactattgtcggcgttccgagaccggggggtccctgggccgacaagtgaaatgtcgccgcgtgccccaccccatatgggtcggcgcgagacggagcacgaaggggggaaccaccgagggagacaggcaagaggggaaacccgcgggcttcttgttgttctgcgcccgggtcgggtgcccttgcagtacggggttaca

SEQ ID NO: 29024 - DNA, 411 bp, Zea mays
tctcccaatggtctcttactattagactatttattatatactttcaagtggagctttttgctaaaatggtaattacggtactttaaactctttttagttttttggcttatggaatcgaccattctacccctgcttaatctactggaggaacacttctattgggttcgtggttctccgatcgctttattcactcgaatgaaccagtttaaagaacttgcaacagaccggccgatgcttgatgttttgccctctgtaccctgctttagaacatttgtgcaatacctatgatgttcagttcagtatgttgatgcttctgcttcagagcgtgcatatatgtgtataaagaacaccaactgaattttaaagatcgtcactaaagagcaaatgatacctaattgacctctttagtga

SEQ ID NO: 29025 - DNA, 365 bp, Zea mays
cacccattccatggatatgatcaatgtatagattatatttctctacaggtgtgtaccacatccttcgatcaacgatatgagggagttgccaattgcactcttgatgcttgtaaaagtgccatcaaatcgagagttttatacgattgggacatagccgagatacgctaaggttgaggccaggcggaacctcctctactaaaggacgaatacgaatatttcctttgcggaggatattcactgctacggaacctcagcatagatctattattgaaagaaagaacttcgaactcttccacttactcctggttgggttgcttctgttttcagttgaacattcttcttttctctgaatttcaatcaacgag

SEQ ID NO: 29026 - DNA, 390 bp, Zea mays
  unsure (1)..(390): unsure at all n locations
agctttaatcatttatatatgtttagtgacatagagttatattgtttcaattgatcccctataaaccctttgagggaccacatattanataaaagtatacatactattaaattgtctcttttattatgacactactaaataattcactttcataaaaatgttcctgttttctacttccctgtttcaattcataatttgtttgactttttacctcaagtttgacatgctcgtctttttaaaaaagtttataattattgcgacacaagggtgatttgtcccttgtgttttgggttgtgcgaacacaaagttgacttgtcccttgtgttttgggttgatgatgagtgattgtcaacgggaacactctggatagtcagtggataactagattgg

SEQ ID NO: 29027 - DNA, 387 bp, Zea mays
gatctcaatgccaaacttgaagccgaagctcagcaaaattcggatttgagaaaattattgacaaatcttcaagaaaaatgcctagaatttagcagcaagggcattcagcgactaaaaaagatttttcattccgttggagctagcagcgaaaaatttaccccctcagctgaagacctaccacaaaccttcgaacacattgagggggaaattgacgagctcgacgaagtcatagctgggcatggtgatttctgtgcctgtgtagcttctcgagggactgctgagccttcatgaaggctggctgtgaacatggaaaagttgtaacagacccccttctgctatctcataatcctgatgaatgctgacttgccgagtatttccacgattata

SEQ ID NO: 29028 - DNA, 382 bp, Zea mays
agcttgtgaaggttcttcatcttcacatgtgctaagcggcgatgccacagccatcccatgctagtcttagctattaagcatgcatctagaccggcttcttcttttgcaaaatcaactaaataaagtttgccgtctaatacacccttaaaagctagtgaaccatcacttcttctagagacagacacatctatattagtaaatagacagttgtaacccatattgcacaattgactaaccgatagcaaattatatccaagagactctactaaaaacacattagagatagagtgctcattagaaattgcaattttacctaacccttttaccttgccttgattcccattaccaaatacaattgaatcttgggaaaccttattcttga

SEQ ID NO: 29029 - DNA, 457 bp, Zea mays
tggacattttattgctaactcgcctgatcattgatagttattcattaaaaggggaacacaagggagaagaagaatcactacaagagagccaacggcgaggcgcatctatgcaaggagtgggattcggattgctcctcctccgactccgacaatgagggactcgccgtcaccgccttcaacaaatcggccctcttcctcaacgagcgtcacacgtgtctcatggctaaggagaagaaagtaagtactcgaaactctacttatgcttcttctagtgataatgattctagtgacgatgatgaaatagactattccagtgtatttaaaggtctagatagaattacgattggcacaattaatgaattaattgatgcattgaatgagaaggataatctcttatagacacaagatgatctattgtatgacgagcatgataaatttttataagctcaaaaatctc

SEQ ID NO: 29030 - DNA, 440 bp, Zea mays
ttatagaacaacacgcttcagctgtcttctttctgaacaataaagatcatactaaggcatcttctggagctttcatgcaagctgaaggtgccatacacatcaaatacacatttaatcgcagaaagcgcaagggtatgtctattaacagcacccctcaacgtgctgttcctgaaaagagcagtgacctgtgtagtccaactaacaagcaaaagcttcatccagatcatgtggaactgaatcatctgatatattctccacaaggcgacagtcttctagtccaggttgccgaacaggtatgccatttttccatattctttacattactgctatgtacgcacttgatagttaacacctatcaggtgataacatattcatattaaccatttttgttattatgcaacttcatttgttgtcagagcatatgtgatgacaagtttgat

SEQ ID NO: 29031 - DNA, 373 bp, Zea mays
agcttcgtactcaacaatgttttttgtgcaactgaaatcaagtcctgttgcataacaagttataactttggaaggtgcaaccaacacagcagctgctttggctccgaagggtccccaagatccatcgcaaaatactggccaaacttcagcatctttattcgtttcttcttcctgagcccctggcgtccagtcagcaatgaagtctgccaatgcttgagattgaatcgaagatctatgcacataatcaatacaagaattcattgagctccgcagcccatttttcaacccttccaagagcttctctatttctcataatatccttcaaccggtgtgaagaaagaacaactatattgtatgcccgaaaatagtgtcg

SEQ ID NO: 29032 - DNA, 445 bp, Zea mays
tgaactatgaaactaagcttattcgactgggtcgtttacggaccgatctaatatgttaaattagctcgtgataaaattgaaacaaaccgatacgagccgagcgaccaagaagcacgaatattttgttcggcactagttctacatatacgctctgcacgcatagggcacaacgaccgtatttttgtattttaactcttttgttgaaaaatgttcacgtttagacctctggatgacttaatctcgtttttagaccctttgctcggcgccacagggtaacacgactcgacgctatagattatggtgacgaagtgcgtcctccgctgacgacgacaggctgacgtggcgccaactcgacgccatgaatcatggcatcgaggccccatcaatatatttcaataaaaagggttaaaataaaacatcggacacaacgacacatataagtatt

SEQ ID NO: 29033 - DNA, 443 bp, Zea mays
  unsure (1)..(443): unsure at all n locations
tgtttgaatggtacaaattcatttatgatgttatgtaaacaacttaaacgtgtgaggacatggttttacatggttaattaattattcacttccgtttaggtgcttcttgtcttcttgtgctgttctccttaaatgtacgttgggtgtgcttggtgagtgatgaaacagacagtttctgcccaccttttttttgggttgagcaaacaaggttgtaaagccgatgattgtatacaaatgagcaaactataaataccacacagttaggtgagaccaaaagtatctgtaacaattcaaatgcttctcctgagacttagttcanatttaaagtctccagcagatgcgaagaaattaaaacatactaaaaaattagaatgaaacaaacattgagcttacctctttctaaagaatccgataaaataaggcaggaagacattccaatgagc

SEQ ID NO: 29034 - DNA, 372 bp, Zea mays
attggcagcttcaaacttcatggtttgacaaatttatcttacaacaaacagtccatgtgttggtttttaaaaaaaaaactaaaatagatgtgctcaaaacttattgtcttggttgccctatctgggaatctgctgatgaagcatacttgatgttcccctggtcaagtgggcgagcaatggtggccaataaaaatgctagtctacttaaaaaaatgacatatgttgattcgtctgattccaagatacatttcacagacagacaaaagaatgtgttctgcacaatgtataagaccgattctactaattctatataattaagtctggtgcagttacaaccataaagatatgttatggcttctgagtgagcacatg

SEQ ID NO: 29035 - DNA, 114 bp, Zea mays
cttttgacttggtgtttattttaccttggggatgacctctgacgtaaactcatgcatggaaagttaatagggatataccttgacatactatatttgtgcctaacataaggaatt

SEQ ID NO: 29036 - DNA, 407 bp, Zea mays
  unsure (1)..(407): unsure at all n locations
cagcttgaagcgatggtnagttttatatgcttgtaatatgcgaattgactcgagcctagctacgggtgcataagtttcatcaaaatccaaaccttcgacttgtgaataacccttggccacaagtcgggctttgttccttgtcaccacaccatgctcatcttgcttgttgtggaatactcatttggtacctacaacattttgattaggacgtggaactaaatgccatacatcattcctcgtgaagttgttgagttcctcttgcatagccagcacccaatccgaatctcttagtgcatcctccaccctgtatggctcaatagaggacacaaaggagtaatgctcacaaaaatgggcaactcgagatctagtaattacccccttatgaatgtcaccgaaaatggagttga

SEQ ID NO: 29037 - DNA, 326 bp, Zea mays
actcagcttggcaccaaggcttgatttgcacttcgggagtttctgcaattatcttcggagtagtgcttggagactttattgtctccaatacatccagtacattaaccatcctttttcttttgggggtcattgctggacccttttggctttttggtacttcaacttttgctgaaggacttaaaatttcagatgtccttgtttctttagccttcggttcttctatttgctccatttccggcattatgaccgactcttcaatattcgacaggggagtccgctccttggcttcagtggccgaagaggtttcaccgacaaacttgggcact

SEQ ID NO: 29038 - DNA, 331 bp, Zea mays
tttttacactcaaggcataacaaatacttcagcaccatactggacatatgagttatctctaaatcggtctaaactctctctttcccattctcgttaaagcaaagccattggaatggcgaaccacaaaccctcacctcatatacaaattatttattttaataacaaaaccatgacagttgacacgctagataaggtactcacatattgagtttatttacgatggatcctgtcatttttgtgatgccttcctccatagatcgagggccaccttctggactatggacttcatcaccgtggaggatgaatacctatgtttcatcattccccccct

SEQ ID NO: 29039 - DNA, 382 bp, Zea mays
tcgcatctctgaataactcggctgcatcgttcttcttcgtctgccaatagaatcctgacctgaagacctttccgactagtgttctggatgctgcatgtactccacactgccctgcatggacttcctccagaagttgctttccggtggacgggagaacgcacttcatgaggacgcctgacgcgcccctcctgtacaatacctccccaatgagtgtatagtgagctgattgtctggcaatgcgctctgccgagttcttgtcatctggttcttcttcattccttatatacttaataatcggccgtctccagtcatcagagtctgaatcgggttgatctatgatgttgcattcttctgtttgatccatggagatactcggctggag

SEQ ID NO: 29040 - DNA, 401 bp, Zea mays
gcttctaaactcttcatcacttagccttctcacaagaaagcgaagccagaggaagcagccaagatggcagagtaggacactaccgccgaagactttcccaagccaacggatgcctcgaaaaaacttaacggcatgcgcaagttcatctacggagggctttccctcatcatcacattcatcatcactatcatcactagaggatgggatactcgttttacctcttatcataaggcatttgtacgagtccttggaggatcatctttccttgaagagtcatcccaagtcttgacacttgtgagtgccttgcatttgctcgtctttgtgggtttggccatattggacaagtgtccctgaagtgcccttctcccacaagcgaaacatggctcttttttgattttcct

SEQ ID NO: 29041 - DNA, 424 bp, Zea mays
  unsure (1)..(424): unsure at all n locations
tgttcttcgctcctctgacgcgtcttccttgttttctactcgaccacaatgggtaccgatgtcatgacttcaccactcaatgtctcatgatctcccgtcgtgttatcttcgatgagacggatttccccttctcgaattcctcttagtcctttgctaactcccttcccgagctggacttccttcttaattatggcctcgtggctccctctggtcaaccaccttttgttttttcacctgcaagttcccccatgtcgctcccgtttgtggcactagtgcctctcttggcttttgtgcccatggactctntccaggctaccctaacgcccttagttggtccgtgtgccctaccgcacctttgtcggcttgctggcggctccagtcccatatgcggctccagtggccccaccttcgcccttgacttttt

SEQ ID NO: 29042 - DNA, 394 bp, Zea mays
  unsure (1)..(394): unsure at all n locations
ccgcacgcaagcttctatatggagaacactttatatgntngactaacgcgcatttcgaaaaagatagacactgtgcagcttgtcaagcacgtaaacacaggggaggagcgcatctcagcaagaatgtgatgaccacttctagacccctggagctgctgcatatggacctcttttgacccgccgcctatctgagcatatgagggagtaagtatggtttagttattgttgatgactttttccgcttcacttgggtattctttttgcaggataagactgatacccacaggaccctctagcgctttctcacgagagctcaaaatgagtttgagctctaagtgaagaaaataaagagcgacaacgggtccgagttaaaaaactttaagagaggagattc

SEQ ID NO: 29043 - DNA, 298 bp, Zea mays
tagctattatgagaaggtagacaatctacttatacacttcaacaccccactcacctgcacccagagagaaaggcagaaacgtggaaataaatatgtggatgcacaaattaagcctctaccaggattcaaactcgagacctctggctttggtaccatattaaaatggatgcactaactaagttaacccaaaagaataagctattagaaggtaggaatctacttatacacttcaacaaggacgtgaggaacacggacatccccaatggcaatgcactcacagacgaagtgaagatcgatc

SEQ ID NO: 29044 - DNA, 348 bp, Zea mays
agcttcacgagcttttgtgtattcttaccgagtgactaacgcgggctggaaatggctggagggagctggccaccgtggccgaggctcgggcggaggagaactccccgcaattggaggtcttgctccgggcgtgaggcggagtgaagggcaaaccgttccgcacccggggtacttataggccccctccggcaaagctgggcgcaggcgcggcggacagaagcccaccatgcacggtgcgggcgcaaagggcagccagtgctcggccgagcgcttgagcacgcgaacgaacacgtggaagtgtgattcttcccgagatcaaagcccgtgggcgaccacaacgtgcatatc

SEQ ID NO: 29045 - DNA, 451 bp, Zea mays
  unsure (1)..(451): unsure at all n locations
taaagattgcgataacaaggaggactcttctattatcaaanattcttcgaagcaacaaaaagtcgttctaaggaacgcatagtaagtttgctgaagttacaaaaagccgttccaaagggagcgcagtgtaagttttctgctccaaagtcgttccaaagggaatgcagagcttacagcgaaaaataaacgctgataccgcctaagtaaaaggcgaagcgcgaaaagtcaacgcgattaccgctgaaagtaaaaggcgaagaagctcctaagggaggcttacagcgaaaaataaacgctgattccgctgaagtaaaaggcgaagaagctcctaacggaggcttacagcgaatagtcaacgctgatttaaaaaaattatgtgttttattacagggatgtgcgtgtatcttcggaataaataccattntacatagcataacatcatcacatcatt

SEQ ID NO: 29046 - DNA, 408 bp, Zea mays
  unsure (1)..(408): unsure at all n locations
agcttaagaatttaaatgttggtttatatgctcagntagaaaaagtgagtattgctagttcatctgtagggcatgttgttgtctgcaatagatgtaaagattttgatattgatgcttgcaataaacatgcctctatcattcttaatttgaataatgatgttgcaagtcttaatgtcaacttaagacttcaaggataattatgagaaattaaaatttgctagggatgcctacaccattggtagacacccctctattaagggtggacttggtttccaaaaggaaaccaagaacttaacagccaaaagacctccactgtcaacaaggagaaagggaaggctcctttggctagtagctcttcaaagaatcatgcttatctttatgctcatgataataaaatttctagtattg

SEQ ID NO: 29047 - DNA, 418 bp, Zea mays
tggaaaaactggtatgaatcggcggtaatattcagccagtccaaggaaactttggacttgatgtacagtggttgggggtttccactccaaaatatccttgactttgctgggatccaccacaatccccttggcagataatacatgtccccgaaattggatctcctccagccagaatgcgcacttactgaacttagcatataactggtgttcccttaagcgcgttaatacaatccgcaaatgccgagcatgctcctcttcattcttggagtatattaagatatcatcaatgaataccaccataaatttgtccaactcacgcataaataccgagttcatcagatatgtgaagtgggcacgagcatttgtcagtccgaaagacataaccagatattcaaataatccatcccgcgtggtgaat

SEQ ID NO: 29048 - DNA, 303 bp, Zea mays
  unsure (1)..(303): unsure at all n locations
gcttgcacaccattctctgtgttcggagttgacgaaccacatggactgggttgcatgcactgtctcggtcataatgcccgtaaagaaaacattcttgatgttcatttggtggaaccccatggaccgtgaaaatgcgggcgggcctgtcgtttgctgctgtgcccgccgtggcaactgcttgccaacgctgggacaaggggaggggatggccggactgngcaaccattgctggctggaggggctggctggcggggatagggacccccgtgggaggggagaaacatgactgctatgggagggaga

SEQ ID NO: 29049 - DNA, 416 bp, Zea mays
  unsure (1)..(416): unsure at all n locations
tggacttgttgattctatagataattgatatttattagcctccattnttcacttgatgccatgaccatcacccaatgttgataagctatttattcgaagttgattgcatgtggattaccacatatacctatttggttatcctgacctttcttaggatatattggatctagtacatattatcattatttagctgatatttgcttactaatggctagcagagtggagagtacaaggtggtgttcagatccgcaactaattaattggttaataggtggaggacaatagagttgctcttagctcccattagttgatattatctagattcatgtacataataagataatggggaattgaaaacaatctaaagtttactcccatctattatggtagacctatttatatccagagaagctaaa

SEQ ID NO: 29050 - DNA, 277 bp, Zea mays
catgcaagcttaaccgtatgggtcttttcctctccgggcggatggaacagggacttgagagccatctactctatgtgttaccgaggcatagattctatgcgagagcgggagagcgatcaaatctttatagtcgatatgaactgggttgccaacacgactcggattgatgggtgcatgtgttaatgtatgcaaagaaaccttttggagcacgtcaacacctttctgatcgggtataagtcaagtggcatgctaggcgaaaccttgaaccagatcgtat

SEQ ID NO: 29051 - DNA, 381 bp, Zea mays
acatcaagggtcactatataaggacgtgacttacaaccaatgaggtaacagctacagttatgtggtgtaagtcataaggctcaagaccaagctctaagaaggagatcaaggtcactataaggagaacaagtgtcaaaaccagaactggaagcagcccaaaagagctaagttcatcttgatcttcagtttgggttggtcctatgtttggaaatgttctatgtgacctttgcaggatgttggagctaagaaatgtcaatccagatcaagtcaagccgacttgatgatttatgagtcaaacatcaaagctcaagcatgtgaaatgttatggatgtaataataagtgaaggaatgttctagacttggacattggtttagtgcact

SEQ ID NO: 29052 - DNA, 279 bp, Zea mays
agcttcagcccaacagcagagttcttttcggccgcctgcgccgaggggcagaggcgccacgggcttctggggaaggtttggagaccacccaacaaaaatatattgcctattctatggtgaaaacaagggccgtactaccaagatgtgccatgttaccatccccaagcagaaggaaataacgcaagcagcagcgcaacagagtcaaccgaagcaggtcatgcatactgcttcgtatcactcaccttatattccagagtatgtaggcaatcaccctgcagc

SEQ ID NO: 29053 - DNA, 406 bp, Zea mays
tagtaggatgtgtattagcaacttgctttctagcttgacatgcactgcatggcttgtctttttcaaacaccacatcctttaatcctctaaccatatctttctttaataccttcttgagtgtgctcatcccaacatgtgcaagcctcctatgccagagccatccaagtgaagctttggtgaagaagcaagttcttaagtctgcatcttctgaagtgaaatccactaagtagaggttgttgtacctaaaacctttgaacaccattgattcatcatccatctttgttacaataacctctgttggagtgaataagcattgaagtccaagatcacagagttgacccactgataataaattgaagctcaaaggtgcaactaagagaacatttgatattgatagatcatttga

SEQ ID NO: 29054 - DNA, 395 bp, Zea mays
cagctgtcgatgaggtccgctttgtcttcaactgtggcgattgtttgtgcgctggactcctccacgctaatatcgaagtgctcctcgagactcatcacaatctcaacctgtgacacaattggaaagacctttagtaaaatcttgaagcaaaaaatatctaaaagagcaagcctttctagagttgttctaagttaaaaattttattttgactgaattctatagaaaaaagacatattagtgacacaaaattagtatagttagatacaacatgaaatttgttttcataataagcttttttgttgtcattgatgttagtacctttttatataaaattggtcaaacactcaaacttaagaaagctattagaaatctagaagtcagactgactgacaatg

SEQ ID NO: 29055 - DNA, 347 bp, Zea mays
tttcaatccttattggttcttattaaatatatttcaatggttataactggcccaagtcatgattttaaatttttcatactcttttcttgaatttttgctcatagggctcaattaaggtttttgttggggttgcacattttaccttttgaaaaatccatttgttttgaatatgatacttttaagtatatgcttggtgtatcatttattctcaagtgaatttgatgttcatgctcaagttggttcacataagatgatggttcttgggttagcatcttgagagaaaccctaggtgacactggggtgtcacagccttccccccttaaaggaatctcgtcccgagattcggg

SEQ ID NO: 29056 - DNA, 376 bp, Zea mays
cagcttctcttggatggcttttgtatatgaggcttgcacatgttgggatgagcacactcaaaaagggttttaagaaagatatgggtagaagattaaaggatgtggtatttgaaaaagacaagccatgcagtgcatgtcaagctgaaaaacacgttgctaatacacatcccactaaagctttcatgtcaacatcaaggccactggaactacttcatatggatttatttggacctacaaattatgtcagtgccggtggcaacctctactgtctagtgattgttgatgacttctaagatacacttgggtgttctttctccatgacaaatctgaagttgcatctatattcaagaagtttgcccagaaagctcaaaatgaa

SEQ ID NO: 29057 - DNA, 442 bp, Zea mays
tctgtctttgtcttaccgtaagggcctctgtcaccacactatgtcaataaatggaaaagttgaacctgggaatggtacaacatggaactttgacacaattaaagcttgagtcagttcttctacagagaattattgatgcccaaagaaccgacaagggtatgaagtacattcatgagaaaatagaagcccataaagctaattgcttcagaaaagatgaccaaggaataatatggtttaatgatctcatagttgtgcctaaagatgctgatgtccgctaaaaaattttagatgaagctcatcttagtcgatattccattcatcctggaagtactaagatgtatcaagacttaaagcaacactattggtggacaaagatgaaaattgagaatgcacgttatgtggcaagatgtgacacctgtagacgtgtaaggcagtgcacatg

SEQ ID NO: 29058 - DNA, 384 bp, Zea mays
agcttgaagctgacattagcagctatcgacgacaacatattgtcggcagcttattctattctaattttaaggtaaagttttttcctcaactttttaatcttttgtgatgaagcaaagatttctgatgaaggctatttggcacagagtatgctgctaagcaaagccctgagaatgcaacaagacctcgaagataagaagaatgaggtcataatcgagggcttggaaaataaaatcaaagatcatgaaacttctctagaaaagaaagactttcttcttcggacaatggagggttcattagtagaagcccaagccgaagttgctagattaaacgatgaactcctccgaaaatcaaaaaacttcgagcaagaaaggaaaagttttgat

SEQ ID NO: 29059 - DNA, 387 bp, Zea mays
  unsure (1)..(387): unsure at all n locations
gctagctggtctacaacgcataacggagtctggactggtttgcaatgcttcatggcagcgcgacgaagaatatcacgggcatgtntgtgctgagtgagtgtcgtacccccggaattggaagccactttaatgccgagaaaaaaatgaagagggccaagatccttgactggaaaagtcactgaaagctgctgcatgagaagctgagtgatggacggtgaacagctaacaataattatatcatcaacataaaccaataaatacatgataactgcgccttgatgaaaggtgaagagagaagtgttagcaaccgaaggaacaaaaccaagctggcagagacgatcactaagacgagagttccatgcacgaggagactgtttaagcccatat

SEQ ID NO: 29060 - DNA, 390 bp, Zea mays
  unsure (1)..(390): unsure at all n locations
atgcaagcngatgacaaaactacactccatacatgggcttgtcggctgtgcgcgagccaaccgcagttattcttatcaactaagcaagtgtcgagttcagctctatacaaaatctagcaacgttagctgaccctctaacactcccttgaatgctattgaatcatcacttcttctaaggacagtggcaccttcatcaatatatagacagctgttccccatttgacatagctgctaaacggaaagcaaattgtgatctaaagaatctacaagataaacattggaaatattctggtcaagtgatatagcaatcctacccaatgctttgaccaaaccttgatttccatccccgaatgtgatatctcattggggatcttgatttttctcataaga

SEQ ID NO: 29061 - DNA, 384 bp, Zea mays
cgcttctaatctttcagaaatgggataaatattaccgtagcgagagtagtcatgtatgaaagttatgaacaagttgaactcatctactgtcctaactggaaaaggaacacaaatatatgtatgaataatttctaacactctcgtactgcgcttagcatttttcttaatccgcttcacaaatttacccataatgcaatctctgcattgctctaagtctgtgaagtctaagtgatggagaatctgttccttaacaaggcgctttattctcccctcgaaatatggcccaaacgatagtgccataatttcgacgaggtttctccatcacttcgttttttcctgccactgctggttggattgtttctgatgtatctaagacattaacaa

SEQ ID NO: 29062 - DNA, 392 bp, Zea mays
atctaagaaaccaccaccgaagcgagtgaataagcttaactctgggctcaacgtgacaagtcatagttgtaagcctctagtacctaaagtcctacttactatgcgactattgtttcttaagatatgcatgagggactgcgcttatgggagtttcaaaactaaatcagtcatgaaaccactagtgcaaaggcgagaagcaaatctcatcatttgcctgatttctctacaaagtatctagcctatgggagaaacatttggcaaagtatgagaaaacaggtgagggtgtcaatcctgtcccacaagtgttgtggggtgatataaggtggattggtggactgagactaatggaagattgaaaagtcgaatgtctctgtctgggtaccggcagtcgg

SEQ ID NO: 29063 - DNA, 373 bp, Zea mays
agcttataacacagataagtatagaagtgctgatataaaatctagtaaggcagagagtcatgatataacagagctcacatacgcaagggtttatgccgaggttctgcctatcctgaaatgctagcctattcctcgttggagttagccacacctgggcttggagtctatttcaactccttcctccggttgctcagatctgtcaatatgacagatagagcctttcactattgagtgggggtacaacagaaccgtgaatgcttacaaacttcttggcagcaccccggcagagtaacgatacgctcaagaccttgctctagctctttgcagcactattcctctttgtaaacgcttatagctgtgccttctacacaaa

SEQ ID NO: 29064 - DNA, 325 bp, Zea mays
aacatatatactcaacttggctcacaaacatgtgaagattatgataccttatgattgcttatgacatatttatagcctgaaggcgttctaattctaatgatgttaaaaaagaactctatcttactacttttaggctgttgtaccttatcttactaaatacacaaccacttaggtctgaaaaattcccaagcaagggccgatatttcattttttcgaaccgatccatgcagcccattctacgctacaaactaatattgtccttgttaaattctggtgacaacacatgcctacctgctttcgggaatgataatttctacacaaccat

SEQ ID NO: 29065 - DNA, 397 bp, Zea mays
tctagagcgtaccgcctgcgtgccaactcatactactttctttcatgatctcgaagtatgctggcaaatctatctagtgtaatgggatattgtatgaaaatgccaaggcgaggaacatgagttatcatacaccattgtgtcgcgttactccattacacattttttacgattgcatttctaccataagaccttcatcctccatattaacacattaaagaagtgttaagatcaacatgaaagttcacattcctaacttgtgttgccttgattctcaacacctttacgggattgaaatcaagtacccaacattggctcccaccttcagtgattccatgacaacatcagcatacaccatgtcaccgaataaagcaacgacaactggctccattattgcacc

SEQ ID NO: 29066 - DNA, 375 bp, Zea mays
agcttgaagccatggtaagtagcatatgcaagtaatatgcgaattgactcaagcctagctacgggtgcataggtttcaccgaaatccaaaccttcgacttgtgaatatcccttggccacaagtcgggctttgttccttgtcaccacaccatgctcatcttgcttgttgcggaaaacccacttggttcctacaacattttggttaggatgttgaacaagatgccatacctcattcctcgtgaagttgttgagttcctcttgcattgccaacacccaatccaaatcccttaatgcatcttctaccctgtatggctcaatagaagacacaaaagagtaatgttcacaaaaatgaacaacacgagaatgagtagttacc

SEQ ID NO: 29067 - DNA, 375 bp, Zea mays
  unsure (1)..(375): unsure at all n locations
agcttagactctanttggatcttgttggataattggttgttggtggctaacaattagctagcaaataattagctagaacaattagccaggatatgtttggagtctcgactaataaatattatttttctctttatacgatctattagcatccataagtaaggtcaaatggctaatgggcaaacagtttgcgagccctccagctaacaattagccaatttattagtcagcctgtttggtgaccagtgtgctaaaattagccagtaaaccgtttgcctcatgaatccaaatttgcccttattataaggatgaccatataaagggatacaaagttctcaaacatctttaattaacacaagcctaaaagtaaagagtcat

SEQ ID NO: 29068 - DNA, 265 bp, Zea mays
  unsure (1)..(265): unsure at all n locations
tattatatgaatactccgcanatagcatacatagtttccatttcggtgagaaatccatagcacatgcctccgacaaatcttgaagatatgagtcactctctcagactgtacactggattgaagatgatatgccgcactcgggagtaccttagtactcatagatttatgaagatcgttccagaatttgagaacaaattgtggaccacgatccgacactatagtcattggaacaccatgcaaactgagaatacgggcgaggtacaac

SEQ ID NO: 29069 - DNA, 377 bp, Zea mays
agcttacatcgagaaggtccttaatcgactcagacggagacactacaccgagactctcttctcgtgcaagtcacccgcccagtctcagctttatcatttcgaatctaaagtttggtacctagcagaggtacatcttttccgatgttgaacccatcatggccatgatggatccaccatcaagttttgtttttgaaaacatcccacccactttgaagcatcatcttttgtgaaaacaaaacattttgttttctagagccaagctaagcataagaaaagcctttttgtaaatcagggattaaggagaagtaatcaaattccaaggaaggaaatgcagcaactggtttaacacacaactcctttcacctaatgcatcaagt

SEQ ID NO: 29070 - DNA, 321 bp, Zea mays
gcagcctgcaagctttagtgactaaagagtgatttttttgttcatttgagctctagcgcgtggatcagactcttttctttcacactctttcttgagatcatactcacttgttattgaggccagagacacccattgtgtggtgtgccctccgggaagccttgattcccaagtgatttgagaagagaatctcactctgtcctagggaccgtttgagagagggaaagggttgaaagagatccggactttgtgaccacctcatcggggagtaggtttgggagaaccgaaccttggtaaaaaaaatccttgtgacacactccttat

SEQ ID NO: 29071 - DNA, 361 bp, Zea mays
  unsure (1)..(361): unsure at all n locations
agcttgcacaaacacaccttaaatatattggtcacgggcaaagatttgttaatataccagcattcaaaatgcctattggcattacaaaaacatggaatcagaaatttctttattaaagaacatccaaacaataatgactgcactggtagaaacttatcacggagctctatctttcacattttcttgaaaagacaaacacaccaaagataatatatttaaagcggaaaacgaatattctntgacacaatgatctgcgacatggactcgaaccttgtttgctgcaattatcaacgttcaagagagtgggaaactgtggtgaattatttgaaggagatgctaaagaaaccttatcaaaggctct

SEQ ID NO: 29072 - DNA, 383 bp, Zea mays
agcttataacaggaggatagaggcaagagctcgaccatatgtcaccacaaccttctatgccttctgtgacattaacattacatcacaaacaatagtatttttgtcataccttacatgttggtgacgtgattgtgacgaaaatcacatcgtcacagaaggtgcgtgttaaatggtgtactatgacgaataacaaaaaaacgtcataatagtttatgacgcaaactacaaacgtcactaattctatgacactcgaattcgtcactaattatgtctaaatacgtcacaattcatgtagtcgtgccttgccacgtgactgattacgtggcgagatgacatggcagttgatgtggcaggtgatgtggcgaaaatgttgtgacgatttc

SEQ ID NO: 29073 - DNA, 449 bp, Zea mays
  unsure (1)..(449): unsure at all n locations
ctaagctagtcaactaagtggtagtccatttggtttccactgatattcttttaatgtcttagtgagaatntatcaagatttctagttgaacttattggagcgaggtttatctctcctctcttcctttctatctcatttatgcctttaagggtgggttgaactacaagttaacttaataaatttcgacaaattctgtaaaaattacagtggcttcttactggtgtataattctttgtctcaagatttgnggcttaaaaagtaaggggttctatctatagaaaattatcaaatattatggcagagggggtgttttgaactacaactcctttttaacagagggttattccctgagacatatttttgctggcatctagatgttataacatgaccttgtaccaatgtgtagccattaatacgcattagttattttgctatgattctctaaaatt

SEQ ID NO: 29074 - DNA, 386 bp, Zea mays
agcttataagtttctgtgtgagaagtggtcacccaatttccgttgatgaagcaccataagaacaatcaaggaaggaatccatgtgggagttcacaagataaaggtttgtgtgttggcatctatgctccttcaataagcaagctgccaagcgaaagccagaagcctgaagatgatccttgagtagccaaaatcagcgtttgcaatcagcagccggatgctccgcaagggccagactttgttgaagtttcatctcctcgaagagttgcaaagtgaagatatgtagctgaagtaaagctatacccataacccttctaagccgaatctcgaggacgagaatccttttaagtggggtagatctgtagcatcccacaaattcaaatcctgaa

SEQ ID NO: 29075 - DNA, 481 bp, Zea mays
  unsure (1)..(481): unsure at all n locations
tgcacaaattctctcttcttttcatcnaacaccanaaccatattcaagcaagaatatatgatgatgttaatggacagcacggtattaatcaaggaaaatgcaacacactaatattacttccccttacacattaaacatatgcaacacaagcattggaggaaaattaagatacaaatacgccaaatgtcaatacctcctgttgacctttaccatgttatggtgtactttccatctaagtaggcggagttccttttgccatcaatttaggatttccatctcgaaagtattatctctatggagctccttcacacttgtgcctgatcatttatcctaaccttttcttgttgctaagacaccaaacttataacatgttatagtattatggcacacgatgaagcttctattctagtgattaccaagagataccaattgaagcacactaccaaggctactaatgaaagtcatcattgtcatactcatg

SEQ ID NO: 29076 - DNA, 383 bp, Zea mays
agcttggtccaaaatgttaattattaagaaacaatccatgcatatcttgtaagtatttatattggctcaatttcaagcaacctttgcacttacataatgcaaactagttcaattatgcactttttttgctttggtttgtgttggcatcaatcaccaaaaagggggagattgaaagggaattaggcttacacctagtccctaattaattttggtggttgaattgcccaacacaaatattagactaactagtttgctctagtgtataagttatacaggtgccaaaggttcacacttagccaataaaagaccaagtattgggttcaaataaaggagcaagggtcaaccgaatgcacctctggtctggcgcaccggactgtccggtg

SEQ ID NO: 29077 - DNA, 501 bp, Zea mays
  unsure (1)..(501): unsure at all n locations
acacttagatactcagctagtaaaatctggaatgaatcgacggtaataaccagctagcccaatgaaacttcggacttgatgtacagtggttgggggtttccactccaaaatatccttgactttgctggaatccaccgcaatccccttggcagataatacattgtccagaaattgaatttcttccagccagaacgcgcatttactgaacttggcatataactgatgttctctcaagcgcgttaatacaatctgcaagtgctgagcatgctcctcttcatccttggagtatattaaaatatcgtcgatgaagaccaccacaaacttgtccaactcgggcataaataccgagttcatcagatatgtgaagtgtgtaggagcattcgtcagtccgaaagacataaccaaatattcaaatagtccataccgcgtggtgaatgcggtctttggatattctcgncctgaacggattgatgatacccgactgagtcatcttgagaatcc

SEQ ID NO: 29078 - DNA, 380 bp, Zea mays
cagcttactgattgcaataggtgcattattgtggctgtatgctcttgcattgcaacctcgcaacgattttatgccacacgagtagcggtttctatgactgatagcatgctcagtaccactgctacattccccaaaatcaactaaccttggtctatagctattaaacgcaacagtgttcttgtacaagcaatatcatttgagtatggctcgcaggggctttgtgttgatctcagaggtcactcagattgtaattggtatgatgcaaaatactgcttatctgcatatggatacacatggtgccatttttgggttgcacataataagttgactgcattttcaccttccattatgatatgttgcttcctttacttatatcttta

SEQ ID NO: 29079 - DNA, 399 bp, Zea mays
tgtgtattcctgagagatcccaacacaccaataaagcatgtgtctgtatatatccaattaatatgcacatgttgaatgtctaacaattcatctgaaaaataatcccaatgtatgtcattcatgacatgcattatgtactgttcagccatcttcccaacactattggcaattactacctaaacaaattgcctattaaaatcatgaaaccaaatctagttaccgaaaaatgttgcaccaaacatagagcgttcagaagttattgcgatggcacttatactatataggagtgtgagtgcatcatgcaatagagctgacataatatctgcatagtactctgatatctcaatgtaaaaaaaagatataacctctttcacttgctttccaatgcacatattgaga

SEQ ID NO: 29080 - DNA, 380 bp, Zea mays
agcttggaggcatcgacaagcgtgtgatcgagaggttctaataataagccgctgaaattatcactactcttgaggccatttttcttgagctcatgatatgtgtataaacccaactaaaaacttcatatagaaaggattgttgttaatattcaacatataattcgagaacataatatattgcccactactatctaaatgcacaatatataaatggatgcaatccatatattaataagatgatatccacataaacatattgttcatgcgcaaacatataaattacatatctaggtaccccaacctgatcatattgcattctagacgcaacgttctgcacaaaatacatgtaaataaaagattacttggcttatgtctacttt

SEQ ID NO: 29081 - DNA, 441 bp, Zea mays
ctaccatgacgaggcatgtgaccagttaaaaagtcctcgatcagcaagcctacatcgagacggtccttaatcgactcagacggagacactacaccgagactctcttcccgtgcaagttactcgtccggtgttaactttatcacttaaaactccaaaagttggtacctggtagaggtacatcttttccgatgttgaacccatcatggccatgatggatccaccatcaaattttatttttgaaaacatcccatcctatgtgaagcatcaccttttgttttaaaaacaaaacatttgtttttctaaagcaagactaagcatctggaaaccttttaataaaaagggtaatcaagagatgctaaacaattcctaggaaggaaatgcagcagttggttaacactcaactctatcaccaatgcatcttcaagtgaaaagagttaaaac

SEQ ID NO: 29082 - DNA, 375 bp, Zea mays
agcatggtacctttacttgataacctttcgtcgaaggtagtcgagagcaatagtgcaactctcgtcttcagcattcttttgcgcccttaaggcgttgctaagtattaaaccctatatgaaaagaatgaatgggttaatataagaacaaaagaacaatttaaaattcataaacttccaaatatacaatttttgtaccttcaaactgatatatgcaaagctatccgcaagatcgtccttcgtcatggcgcagaggccagcttcaagctacgggaaccccatacttctggccatctcccggcagacagataattctttgttctctgggaggcaatataataagtcatcttcgtctgtgccattaaacactaaagcccc

SEQ ID NO: 29083 - DNA, 361 bp, Zea mays
  unsure (1)..(361): unsure at all n locations
ntggcattgcagaccgacttatagatagaatgtatctttatttcttaacgctgagacatagtgtcagtccacaataaggggcatgctgtgaattcctcacaggctgcggtctgtgcctaataatagagaacatgattccgtaactggtcacgcattctggcatatgcaatcgcatctattggaatacaaccttcgtcaaagcataagtatcattgtatttaatgatcctatatattagggaatataaaatgatgcatcagcgatacattcatgcattttatacctgttattctacattactctataatggttattgaaagtctatcacgaaggttcaacctcgtaacaatactctcatcaa

SEQ ID NO: 29084 - DNA, 351 bp, Zea mays
agcttcagcttaacacataggcgattgttgagaataaaacccacctaaaaaggaaaagattgcttagtcctcgacagcttaccttttggctaatagtaaatgtcagggacataaatgttatattgcccatgctgcgtgctgagcctattaatacatgattattaaccacctattgttcacgcagactggtaattattctcacggaaatcccgcttttttaccttctgtcaagacgattgtacaaatgtaacattaatattactgatgtttgatctatgtgtatatattcagaatacaacttatttaacgacctacaaagaggatttatattcctttgcgattcataatgtt

SEQ ID NO: 29085 - DNA, 331 bp, Zea mays
ggccaagccctctgacccgaccggacttcaccgtaggctctatatcaacctcaccggactacggtcttgcgccagcgcgcgtggaccgagctatccagggagactgcgaccgacatctatcactcatggatattttagcatcccgtggacctccctgacctagttaattgaactacctcgccgtgaccaggccggactcctctgcggcgacgaacattcccgcctgcgcgcgtggaccgaccgactcacggctatctcgacggcgtcctcacaccgttgtgatccccgcgacctccccttcgtcctcgaccacttaaccggaacagactct

SEQ ID NO: 29086 - DNA, 379 bp, Zea mays
agcttaacaattttttatggtaatcaatgaatacagttggtaaatctaggaaatccttaattaggtaaatcccaccaaattatgcagtatatccaaaaagtaaacattattatatgcactaattgggtacaaatagaatatgcagagggagaatccacttgccttgctcaaaagtgtcatgcggttcgtcctcaaacaaattcgaatcctctaccacacaatcagcttctaataacgtcgtacgttgccatacaaagagaaaacatacaccaataaataaacatacaccaacacggggtaatcattcaccattacattcacattaacacatcgcacttatcacacacataaatacgtcttagcgcgtaaacgcttatta

SEQ ID NO: 29087 - DNA, 401 bp, Zea mays
  unsure (1)..(401): unsure at all n locations
tatagtagtggtcactagcgcttgaaaataaatattggacattcagaattgtgtagcagctttgactactggtgacgttgatctttatactattgtagatngtcattgatgtaaatgttattagtggcactttaaggcgactaatgatcgatatatgtcataagatttgtcttttctttacaagtgaggagtttgcgtgaagtactaacttatgatctttgatgagtaccttatcttgcaagatagcatactcatgtagaaataccgttgtttgtcaatcttaacaaatttcattcaggaactagggcatgctaatgttcaaaagagttgtcagcaattcatgacacctggtatatatatatcttcttttgtagagggatagtgtggtctgcttagcagta

SEQ ID NO: 29088 - DNA, 377 bp, Zea mays
agcttgcacacatagctcatttgaatacctttgatcatatctcttttatatgctatgactaatgtgtattcaagctcatttcaaaccaagtcatatgtatattgaaagggaattggagtcttcggcgaagacaaaggctttcactccgtaactcatacttcgccaccactccgagcaactctctcttctttgggggagaaatgagcatcaaggaaaaggacttcatccttgggggagagagtaaaagctcaaacgcaaaaagacttcgtctttggtataatcttaactcacttatttatgaccaaaggggaagattgcacttctagggctctaatgattccgtttttggcgatttatgccaaaaagggggagaaatg

SEQ ID NO: 29089 - DNA, 241 bp, Zea mays
  unsure (1)..(241): unsure at all n locations
ntacagaacacttagagaggttagaaagagatgaatatagctctattgctataaccaagcaacaagagcgacatnttacacatgaatcactctctctcaagtcactaatcactaaggatcacttgtctcaattatggaacttggagagattgaaaactttgattgcgtcttggaatggatagctagctcttgtattgaatgtgaaagattgtagtgctagggtgtggtgaatggaagtgga

SEQ ID NO: 29090 - DNA, 369 bp, Zea mays
agcttctccgcttgtatgttctaaccgttcttaagtctcccgttgctcgtatacccgcttgattgagctatatcaccctaaatcactaaaaacgcctcaatttcccctcaagtttcgccgtcttcatggacataaaggcaccaggctagaattgtgcaattgatgaccggattacagtcgccaggggtagaaataagtgtcaagcaagtttggacattagtcattgcgtatcccggctggtatatactcattggagggcgcactcatcgtcgttcatcgtcggggacctgggtttgcgaagaaatagaagtaggaggggttttacgcaaatgtcattgaaacacatgaatattgccacgaccacttttc

SEQ ID NO: 29091 - DNA, 376 bp, Zea mays
  unsure (1)..(376): unsure at all n locations
cttagttttgaagctntggctctgacaatagttttttagcttcttctaagatgtctgaagataagaagactgctgctgagacgatactgagcctcaacgaagagaataatttgtggtgtcttatagcgatgtcgaagaccaacacagaaaaaatcaccaatgagattctggaaggtttgtttgagcatactggtgacagtgacagctatgatgtggacagtggtggtgaagactccgaagatcgttccttgcgaccaagccattcagtttatcggtaatcaactatcaaagaatatcatcttgtcaatttgagaagaaggtatttccgggacttgtccattgtgatggcggacgaacgggaaaaaacttgcccaca

SEQ ID NO: 29092 - DNA, 318 bp, Zea mays
ctacatattctgggatgtaaggcgaatgatatcaagcactgtgcatgacctgcttccgctgagcctgttgtgctgcagcttcagctattaccttttgcttctggatggtaacatggcacatcctggtggtatggcccttgttctcaccacagaataatcaaaaaattcttcttggttgatctccaaatcttccgccgaagcccctggcgcctctgcctcttggagctggtggtccgaaggagccttgctgttgcccccaagcctgggaggagcactgtggcctttgctgctggcttcccctattatcattttgagtag

SEQ ID NO: 29093 - DNA, 359 bp, Zea mays
tcgcacctctgactaactcagctgcgtcacctatctctgatggccaatataatcctgacctgaagaccttgccgactagcagtttggatgctgcatgtattccacattgcccggcgtggaccttatctataagtctcttcccagtagatgagagaatgcgactcatgaggacgcctgatgcaccctctctatataatgtctccccaacgagtgcgtattgagcttgactgctatcgatgcgctcggctgcatattagtcatctagtacctcttcattctttatatatctgatgatcaggcttctccagtcatcagatactgatactgggtgaatcacgatatacactcctctacctgat

SEQ ID NO: 29094 - DNA, 371 bp, Zea mays
agctttacttatttgattttgcaatagaagaggccggtctaaatgcatgcttaattgctaagactagcatgggctggctatggcatcgccgcttaacacatgtggggatgaagaaccttcacaagcttctaaagggagaacacgtgatagtgtttgactaacgtacaattccaaaaagatataaccggtgcaacttgtcaagcacgtaaacaggtgggaggagcgcatcacaacaagaatgtgatgaccactttcagacccctggagctgctgcatatggacctcttcggacccgtcgcctatctgagcatagggggaagtaagtatggtctagttattgttgatgactttttccgcttcacttgggtgtt

SEQ ID NO: 29095 - DNA, 448 bp, Zea mays
  unsure (1)..(448): unsure at all n locations
cgaattgtctgtggatgtaggtgaactacaatactgtggtgatccatngngttattgatagtggatgcacacaacatatgacatgcaacccactgatgttcacctcacttgatgagaatgttgatggacaagataaaatcacatttggagacaattcataaggataagtgcaaggacttggcaaggtggccatctcaaatgatttatcaatatcaaatgttctcttagttgcaccttcgagcttcaatttattatcagtgtgtcaactctgtgatcttggacttatatgcttattcactccaacagaggttattgtacaaagatggatgatgaatcaatggttttctagggatctatataccacaacctctacttagtggatttacttcagaagatgcagacttaagaacttgcctctcaccaagcttacttggatggtcttgcatag

SEQ ID NO: 29096 - DNA, 369 bp, Zea mays
agctttatcaaacggacgcgaaaagtgctttcctcaacggaccaatcaacgaagaggtctatgttgagcaacctcctgactttgaagatagtaactaccctaaccatggctactcgctctctaatgcgctttatgggctcaagcaatccccaagagcatggtatgaatgccttacagatttccttattgctaatggcttcaaaatcgcaggccgagcctacactctttactaaaactctcgaaaatgacttggctgaatgccaaatatatgttgatgatactatatctgggtctactaacgagctacttgttaacagttgactctgatcatcacacataaatctctagatggcctttatgggggagttg

SEQ ID NO: 29097 - DNA, 476 bp, Zea mays
  unsure (1)..(476): unsure at all n locations
actcaagcttaagaagaccatactctnttgatagagtattgataaccttctctcctgtttgatctcggaggcagcctaacctttcatcgtcaacactgccgaagagtagtgcccctggttgatacccgcacgatatggcgtattctctcaactcttctttctcagccttcgtcgattctttcccaattaagttttgaaagttaaaatcttcttcttctaaagcaggttcggctattcctttctccttctcaagcactgtagctgtggtttcttcgacggctgcagcagcttcttctgcggccatgctcagaagtatcttatcaatgttagaaagcgtgatttctagatntgcatcttcggtcgattcagcttcggcagttgcagcttcagtatgtgcaccttctgtagctgcagtgttctcaacagctggtgcccttgaagccgaagctggtcgtggtgtctcttctatagcttct

SEQ ID NO: 29098 - DNA, 382 bp, Zea mays
  unsure (1)..(382): unsure at all n locations
agcttagtagcactttcggttcttatttctcccgttttgatcttntcctcacgcggttaagcgttataacaaggattaagctccgatatcaattgaaagttgcctagaggggggtgaataggcaagtggaaacttttacaacaaaaactagaaacgaactgggtaaaaccggttcaaccggtgtcaaaaccggttcaaccggtttgcacgagctcaactaaagaatgaaatataacactgaattgattctcaaatccacctagttaactttggaaatgagatgttctagttgatccacagggctcaaatgtttatatctgagaagggcactctttataatccacaaaatatgattttaacaaatcttccactaaatggggag

SEQ ID NO: 29099 - DNA, 402 bp, Zea mays
catacttttataatcactaagaagtgattcaatgtttaactacatcacacaacacacgttttcgaaatctgttctgactgtggacagaacacagcaaccaggtcgtaaaattcataactctgataccgtcagacctatagttatgaatatttaacacacgcaagataagaaaagcctctaaaacattcttataatcgacatgggctgattctaacattaacttaagcaaacaatgcagcttctgaaatctgtacagaaagtggacagattctagtactgaatttgtataagcctaactcttaactgcaaacctatggctgcagatttaaccaaggagatatagagtatctacaacttcttgtaccaccatactattcaaaatacttagcaccatgcattctg

SEQ ID NO: 29100 - DNA, 382 bp, Zea mays
agcttgcaggcgtcgatggggactctactcagtgtttagtcttctttcgtctcctccgatgccttgaatgcaacgggttgtgcttcgggtgcggaggaggacgcgccttgctcgatgatcttcttggagcctttgatcatcaattcaaagctcacaaatttgcctatcgcttcctcgggagacattagcttatatattggatcaccacaaattaattgaacttgagtagggttaagaaatacgagtgatctaagaataaccttgaccatctcatggtcatcgcatttggtactcccgaggttgcgcacttggttcaccaaggtcttgagccggatgtacatcgcttgtggctcctccccttggtgaagcatgaaatgaccga

SEQ ID NO: 29101 - DNA, 439 bp, Zea mays
  unsure (1)..(439): unsure at all n locations
tagttaactactaaactatatatattagtatatntagattatataaacttatttnttagattaactaaactttggtatgactagaacctcaggtatgaatccaagaattagcacacggcgttaattcagcatttggttgaatccaagccaagagtgaacgtgtcgtactcgtacgtgcatacccaccaacaagcggaaggaagcatatcatgcatccggtcactgtcgtaagaccagaccgtcaatggctcatctgcagctacgtgcttggacgtaagcgcaaatgatccggccggccggcaagcatgcatctcacttgccagaagccagaaggtcaatcaatcatcactcacccgtttgtatgttctccgcactgcccgttgcaggccacaggcatggcgccgcgctcggtgagcctgctgcttctgctgacgctcgt

SEQ ID NO: 29102 - DNA, 379 bp, Zea mays
agcttatgaagattcttcatcccaacatgagctattctgtggtgccagagccaacccatgttagtcttagcaattaagcaagtgtcgagttcagctctatcaaaatctactaagtatagctgaccctctaacactcccttaaatgctactgaatcatcacttcttctaaagacagtaacacctatatccgtaaaaagacagttgtggcccattttgcataattgagaaacagaaagctaattgtaatctaaagaatctacaagaaaaacattggaaatagaatggtcagaagatatagcgattttacccaatcctttgaccaaaccttgattcccattcccgaatgtgatcgctctttggggatcttggtttttctcat

SEQ ID NO: 29103 - DNA, 400 bp, Zea mays
  unsure (1)..(400): unsure at all n locations
nttccttgtcgtcatcaaccttgacatagaaccactctgatttccagtctgctgcccacttgcttcggtagctaattacagggaactntgtagttttccgataggcaaagttatagcaaccaaaattatcgtgcaatccatcttttctagcctttgtttgataatgcagctcgtgaacccggcagaagctgtccgcaaatggttccactgcttggcttctgagtgcccagatataaacaataagcctaacgatagcgttaggggtcagctgatgaaaatagataccgaacctcttcagcacctctccaatgatcccatgtagggggaatcttaatccagcctttaaaaagctcttgagaataacaatttcatctttctccgatattggggtagtctcttc

SEQ ID NO: 29104 - DNA, 395 bp, Zea mays
agacctgcagcaagcaagctgattgccagcctgcacggactgtatatatcttctttgagaccactacatacaatatacttgccaacagaattaatcgcaaggacttacattatagagcaaccttcccctgaaagagtgcatacaagtttcgaatactcgtcggacacattcactttgattttgatattaagaggggcaaattatctataatccgagctttggcacatataaggtaaatgatatcaattgaagtatggaggatatcacatgtgaaatatgtcatataccaataccaattggaatatcatttacttagaatgtttaataagctatgtgccgtacttaactaatctttttaaaccatgtaggcttgctcaagaatatgaatcgaaagc

SEQ ID NO: 29105 - DNA, 375 bp, Zea mays
agcttttgattatattttacgacatgcttctgggaaagagttgactgcaaaagaaaagcaagaggctcagctttatgcccaaaaactgaaatatccaaagggggcgttgatatttaacgacagcggagaagaagacttcttgtattgtctccctgacagcaaggagatttctgtctgtcgggagatgagcaagagcttcggattcccaacattagaagacgggctgtcggtgttgtcaaaaaacgagctggccgacagcttggcatacaacagcttaaaggtgcaaaaatgaggtctttgtattatttcttgaaaccaaaatttttcatttgcttaaacttattgacacacacacatttttttttgcagggcctt

SEQ ID NO: 29106 - DNA, 373 bp, Zea mays
agatcaatccacaactctatccagagtaatgacagatgataccagcttcataggccacaacatagctcataatcctcataggcacatcaaagctctctcaggcctgaaagtctcctatagggggggtgaatagggcgaatctgaaattaaacaacttaatcacaactacaacccgggttagggttagaaataatattagtccctagagagaaggcgcacaacataatcgaagcgaataaaagtgtgacacacggatttgtttatcaatgattgatcttgcaacctactcccgttgatgggccacataaccggtcttttcaccctttccttctaaacgcccctggccggtgacttttttttatatattgacaca

SEQ ID NO: 29107 - DNA, 334 bp, Zea mays
ccttatcatcattttgaggagagttgtgaattgatctgacctgcctcggatagaatctctcttcgaagctcttgggtatttcagaaaacctgaaagcctgctcccttctttggcgataatcattgtcggcacgaatatactcagtcatcttctggaacagcttctccatagtttgaagaggctttcttgcaaagtactgagctgaatgtccaggccgaagtccctagatcatggcctcaatgacaatttcgatgggcacccgtggtgcctgcgcccttcaacgcgagaacctcctgacatacgcctgaaagtattcttcgtgatcctgagtgca

SEQ ID NO: 29108 - DNA, 365 bp, Zea mays
agcttgcaggcatggtataattttttgttcaaaccataatacacgttttagtccccggtggaccgtaaggctattttggcctcccgtgacacatgttttttcgtcgaatagcgatttcgtgcctcccgaccgccacccattatttgaccatagagactggtaaggttgttttggcctcccgtgagctatagcacacgttttcatggccgagcgaccatttttatgtccgcgttcctccacacgtgtttttctccccggagcaccttaaagcggttcttggcctcccgcgagctatatcacacatttccgtggccaaacagccaattttaagtatccgacctgccaccttcgttttaaaccgggga

SEQ ID NO: 29109 - DNA, 453 bp, Zea mays
  unsure (1)..(453): unsure at all n locations
ctactatggttnggagactcanacttcatttactattgtttgtacactanaaccgcttagtgtcggtgtttaaagttagggtttagggattggatttggggtctaggttaaatgtcgtaacggcctctccggtctaaaacgtatgtggcaggtcggatacatgaaattggctctttggccacggaaacgtgtgctacagctcgtgggaggccaaggaccactttaaggtgctcttgggaccacaaagcgggtgagggaacacgtacttaataatggtcgctcgaccatgataacgtgtgctatatcctactggaggccataaacagccttagcagtatcagtggccaaatcatgggtggcagacgggaggcatgatattcgctgttgacgatgaaaacatgtgtcaccggagtccaaaaatagccttaccggactccggggaccataacgtgt

SEQ ID NO: 29110 - DNA, 366 bp, Zea mays
agtcttgcacgcatgtgtattaattttttgttcaaaccatagtacacgtttaagtccccggcggaccgtaaggctattttggcctccctgacacatgttttgtcgtcgaatagcgattttggccttccgaccgccacccattatttgaccataaagactggtaaggtggtttttggcctcccgtgagctataacacacgatttcatggacgagcgaccatttttatgtctgtgttactccacacgtgtttttctccccggagcaccttaaagcggttcttggcctccctcgagctatattacacatttccgtgggcaaacagccaattttatgtatccgacctgccaccttcgtttataacgggga

SEQ ID NO: 29111 - DNA, 481 bp, Zea mays
  unsure (1)..(481): unsure at all n locations
tactatggtttggagactcanacttcagtttactatggtttggacactaaaacctcttattgtcggtgttaaggttagggtttatggattggattcggggtctacgttaccatataaacatgtgctatagctcacttgtggcaaaaaatgtcgtaacggcctctccgatcttaaacgtaagtggcaagtcggatacatgaaattggctcttatgccacagaaacttgtgctacagctctggggatgccaacgaccactttatagtgctctggggaccataaagcgggtggtggaacacgtacttaatatggtcggtctaccatgaaaacaggtgccatatcctaccggaagccgtaaaccagcttaacagtctcaatggtccaatactggttgctgacgggaagcatgagatcatcgtttgacgatataacatgtgtcaccggagggcaaaataaccttactgcctctgggacacaacgtg

SEQ ID NO: 29112 - DNA, 455 bp, Zea mays
  unsure (1)..(455): unsure at all n locations
tgtggaacttgcacaagattatgtttatgacttcacagaatatgattgtatagttcttagagaccaactgtgtacattcattaccgaatgaagagaagattcaagcttcctatcatgtngcgatcttggtaatcttgctatgaagatggttaagacagatagacatactgtattcccattgggttatcgtctaattgaattggctttgattntgcctgttgcactgcaactgtggaaagagcattttcagccatgataatcatcacgacagatttgcgaaataagatgggtgatgaatggatgccattgtatgagttgctatatcgagagggatatttntgcaagtattgaagatcgtctaattatatagcattatctagccatgataacaccaatggagcatatccaaagacacgtagagtggtccattagttgagtttgcttcttgatactat

SEQ ID NO: 29113 - DNA, 246 bp, Zea mays
gagggagaaaaaaaggggggaaaagaaagaaagaagaggagaggaaaagaggggaagggaagaaaagagaaaagaggagagagacagaggggagaaggagagaggagaaggacgaaacgaaaagaggaagaagggagagagagaaggaaagggaagagaaaagaagaggaggaaaaaagagaaaggaaagaagagaaaaagagggaaagaagagaaaaaaagggggagaaaagagagggaaaaaag

SEQ ID NO: 29114 - DNA, 308 bp, Zea mays
agaaaggggggaagaaaacaaataaggatactgagctgaactaacaaggggaaagggagaagggggggtggttttttggaaagaagggaatgaaagggaaaaagggggaaagaggagaggagagggggaaaagagggagaaatgggggaaatagggggagaagggggaaaagggagggaagaaggggaaaagggggaaaatgagggaaagggagagaaggggagaaaagagaaaggaggaagaagaggaggggaacgggaagagtggggaagaaggaggagaagagggagataaaggggaaatgaaag

SEQ ID NO: 29115 - DNA, 336 bp, Zea mays
cagcctcacaatgcttacaacgggctcttctcgtcatccttcttaaagaatagcatgcacctggtgggacacacgttgatcttctcatatgtcatcccaagaccagccaacatcttctatgcgaagtacatattctttggcaacttatgatcctccgggagaacctcgcccataagttggacgatgccgttgtaagcactgtttgaaatgttgtgcttcgactttatcgccattagtcttgtgagagccccaagaactgacatctgagtgtgctcgtgccagctctcttcttccgcggcgagtagccggaataattcttgatcatcgcgtggaagc

SEQ ID NO: 29116 - DNA, 432 bp, Zea mays
  unsure (1)..(432): unsure at all n locations
ctactcctccttgtgaagggcctntcatcatcgccaagattttgaagcccgggacatacaagttggccaacgatcaaggcaaggtctacagcaatgcttggaacatccaacagctacgtcgctgttacccttataaatgtttcaagtcattcatgtatctcgcttttctttacatgcgcaaataaagtctaaccgtcaaggaaggatcagccttgcctcggtaaaggccgaccctccctcggnggctagaaggngggaactccctctgcgtcaaaattttcctcgggaaagtcttttactagaacgtctttcgtgcttttcgacggcgtcgataacagaatcctaacgacgagcgagagagaccttgaacggcattgccgaccgagccgaaggaactcctacgcctccggatattgatacctcactcatcac

SEQ ID NO: 29117 - DNA, 393 bp, Zea mays
cagcctgcaagcttatccctaagggtcataggtattttatattgttaacaagagctctagctgatatacttctcataattcaatgagctcattgggtaaatacgaacgcaacaagaggcgaatatccattatacaaatatagagaattgtaccatttatcattttttagtaatgtgaaaattaataaatagcagaaaatagtgcatcattttttgtgattacctactattatatcatagagactatattttgataatgaaccttgtgtcattcaaaatagtagcaggaattttgtcgcctatgaatggtaatccaatatcaagattcaccttgataccaaaattgacatcaatatttttaatgctatacattattgactcatgtaggacgtga

SEQ ID NO: 29118 - DNA, 451 bp, Zea mays
  unsure (1)..(451): unsure at all n locations
tcngctccatctatattgaggattgcttatgagtctgtcctatttccttcaacctatctggcagcttcctgacttccatgaatagcaataggcccttgatccaaaggtatcttgatgcatagatatactggatgaagaattgcttcgaatgcattgagtgttccacgaccaatgattgcattgtatgggtattccatgtcaacaatatcaaacacaacttgttcagttcttgtattgtggacaaatccgaacgtcactcgcattgtgatcttgccaagtgctacaatctgccttcctccgaaaccacaaagagggtgtgtagcatcatggtttttatcctctggctcttgatctgtctgaagccttacaaatatgatatccgctcactgctgtataaccaaatattgtggacttaaatnccttgatgacacaaatataccatagcatcatt

SEQ ID NO: 29119 - DNA, 383 bp, Zea mays
  unsure (1)..(383): unsure at all n locations
agcttgaacccggctattccatatattaatagactttctctcactgggagnggagagatggcgagagtggcacgtaccctcctggcaaaggatcgcctaaaaggggtggtgtgctctcgggtggcgtggacctgttcatgtaatggaggatccgtgggaacgattgacatatgcaagggttaagtgctacatatgtcgtgtggttagagatcctcaactgagtaaatcgattctgatcgccgttatatccccggagagtggagacttgatcgctgccctgcaacctacgtcaggatgtaaacattatgaataaaaatgatgtcgtattgatgagaaggtgaaattagactaagtgcaaccagagtctattaatatttaatctt

SEQ ID NO: 29120 - DNA, 417 bp, Zea mays
  unsure (1)..(417): unsure at all n locations
tggcagttccgctataatctactactaccgcccncatggatgtccggggtgcagtttctctctcgctcgctctcgtctcgtctcctccaaaagctcgtattattagctctccctagctctctctctctctctctcacgaccaagctctcgccatggccaaaagcacatgcaagctatgctcccgccgcttcgtcagcccccgcgccctcgccggccacatgcgcgcccactccatggcctccgcaaagtcgcagatctcatcggcctcgtcggcttcgacatccatcacggctagcggcatcgacgccgacaagaagcgcggtcccgtccggtggcacgcgctgcgggagaatcccaagcgccgctgccgcctcgacgactcggatcgcgagagcgagacgacggactactactctt

SEQ ID NO: 29121 - DNA, 381 bp, Zea mays
  unsure (1)..(381): unsure at all n locations
agcttctaaagggagaacacatttgttgattaacttttgttcancncgagaaagacaggatttgtagcgcatgtcaggcggggaaacaagttggagctcatcatccacacaagaacatcatgacgaccgacaggccactggagctcctacacatggatctattcggcccgattgcttacataagcatcggcgggagtaagtactgcctagttattgtggatgattattctcgcttcacttgggtattctctttacaggaaaaatctcaaacccaagagaccttgaagggattcttgagacgggctcaaaatgagttcggcttaaggatcaaaataattataagcgacaacgggacggagttcaagaactcacaaattgaag

SEQ ID NO: 29122 - DNA, 505 bp, Zea mays
  unsure (1)..(505): unsure at all n locations
tgtgcttctggatacctctgagaaaataccagtgtgacaatgtttnattatatctctatcacttatgagcttctacagttggattgtgctaccttagttatgtgaatagggttagacctacgttcataattctttgcagtatagaaatagtaaaaattagtcaaagccataaatatatactccctctatttctttttagttgtcactagatagtgcagaattgaactatctagcgataattaaaaagaaacagagggagtatatatcatagattagagataatagaatgcctaattcgttccctcttagacatcatcattctctacagccagcaagaacatccaactcatgttggaattctaatttgagtcaagttcgagccattctcgaaatctatgaccactgaccagtctacactaaaatagacgtccaatacatatatgggactatgtttcatgattacatacatatagagagctattcatcactactaatgatatattgc

SEQ ID NO: 29123 - DNA, 378 bp, Zea mays
  unsure (1)..(378): unsure at all n locations
agctttaccctgtggtctggactataagttggttactgtaggtgtgccatatgcaggttgaccattttcagcatttgcgtaatgaggactctagggagaagccttctattgagaccctggccattcacctcggaagtgaataccggtctagctaacccgggcttgaagggaatcactactcatgggttaagatgcgccacctctgccgagcgtaaaactgatatatcagccgtgctcacggttatgagcagcctgnactcctcacatgataattgaacttgaagatgaaaataaatcgagattcgatgatctgccaatggtttgcttatgtggtttcacttaagtgtttttgatatactcttataccttttgttaatg

SEQ ID NO: 29124 - DNA, 458 bp, Zea mays
  unsure (1)..(458): unsure at all n locations
ctaagcttcttaccacgttntcgcagatatcttgaggaagctgagaatggcgtcttctctctaatagtacttggttcttggtcccaagcaatttcctttttgaccctacaacttgttgctcattcaaacattcgcttccttttgagcgacaggggttagcacatgatgatatattatctagatgtgtacttgtgcaagaatgaagttcacatgaatttaagtctgtaattacaacctcatgagccacttcaagcatgatatgtctatccaagagattatcatgataataagacaattaatcatgtttntcagttagagcaagtttatcatgacttaacaatcctactagtctctcaagcatggcattttccattttaagttgagtaacacaagataaagcatcatcattatctcgttgctcaattaaaattgaatcataccgttggaccaaatcatta

SEQ ID NO: 29125 - DNA, 372 bp, Zea mays
agctttacacaatcttatttggtactctaactagttagggctaggttttcccttctcacacccccaggccgccgaccacacgatgtctactgtgctgccccatgatgcttatccttcctctcggggggtggctcccttccccgcctactccttcctcccctgctcggacccccgacacaaacgcgtctgactctttttctccctggtcaccggcctcgccccttccgtcgctggatctgccccgtctgtccgcaccatcgctactcccccacatggcggcgcactcctttctcttcgtcgcggccacgcggattccctgactccattgcgcagccaaccctgacccttactatgtcgtgcctatgcagcttt

SEQ ID NO: 29126 - DNA, 456 bp, Zea mays
ctatcaaatggatggaagagtgccgtcctcaatgttccattctatgatgaggtctatgtcgagcaacctccctgttttgaatatagtgagtaccctaaccatgtttataaactctctaatgcgctgtatgggctcaagcaagctccaagagcatggtatgaatgcctaatagattttcttatcgctaatggcttcaaaatctgaaaagccgatgctactctctttacctaaacactcgcaaatgagttgtttgtttgccaaatttatgctgatgatatcaatattcgcgtctactaacgaatctacatgtgaagagtttattgtgatcatgactcacaaattcgagatgtctattaagtgggaagtgtatgtattcttatgatttaacggaaacaacttctagatggcaccttcactattcaaccaagtacctccagactactcacccgtttggga

SEQ ID NO: 29127 - DNA, 372 bp, Zea mays
agcttggaggcgtctataggaagcctacttgatgtatactccttcttctcttcttccgaccctttgaatgcgatgggttgcacctcgagtgtggaggcgacgccttgctccaagttgacaatgtgtttggagtctttgatcataatgtcagagctcacaaacttgccaattactttctcaggagacattattttgtatctaggatccccacgcattaattgaacttgagtaggattacgaaaaacatgggatcttacaataaccttgaccatttcatggtcatttcatttggtgctcccaaggttgcgcacttggttgatcatggtcttgagccggttgacatggcttgcggctcttctcgttgtcgatgac

SEQ ID NO: 29128 - DNA, 439 bp, Zea mays
  unsure (1)..(439): unsure at all n locations
tctataaggagaacgacatttaggattaacatatgttcattgtgagaaagacaggatttgtagcgcatgccaggcaggatagcaagttggagcccatcatccacacaagaacatcatgacgaccgacaggccgcttgagctactccacatggatctattcggcccgattgcttacataagcatcggcgggagtaagtattgtcttgtaatagtggatgattattctcgcttcacttgggtattctttgtgcaggaaaaatctcaaacccaagagaccttatagggattcttgagacgagctcaaaatgagttcggcttaaggatcaagaaaattagaagcgacaacgggacggagttcaagaactctcatatggaagggtttcttgaagaggagggcatcaagcatgaagtatcttctncctacacgccacaacaaaat

SEQ ID NO: 29129 - DNA, 343 bp, Zea mays
  unsure (1)..(343): unsure at all n locations
gcagcagcaagcgagngcngaattgggaacacttgtatgcacgacganacgggaaacaacgagggaagcagacactccgaagacccgaggcctatttaccatgcaaacaccccattggcgagccaaacatctaacacagctacacgatcaccatatgcatgaagcaaagctcaaacgcggccctcctatacaagagtaaaaccccccaagaaaacccccaaaagatcgcagcgctagcccctcaggagaagatagaggaaaatccacggatcgtcaaaaggatgccaaaaccgcccagcccccaaccacaaccggaacgaccatactccagcagcgggagaga

SEQ ID NO: 29130 - DNA, 452 bp, Zea mays
  unsure (1)..(452): unsure at all n locations
nttagtatagatgcgtggagcatgcaacctaatatggtatctgtgtcagagggcacgagttcgaatcctagctagcgtagttaaatacacaaattattgcatgtgacccaagacagacggctcgatgtgagaggagtgtngaaacataatataagtgaattgtctacctcctcctatcagcttaaacttttagtttgaattggttgatgcatgcaaacggaagatgatatccaaacaacgaaacacgtaaggttgcgtcattgaaacatgataaccatacacgtatataagccgaggcctgtgccagaccaaaacgtggtcgttgacctagagatgaataggtatggcaacgggtctaaaacccgcgggtatggagaatacaaactcgtacccgcgagattatgttaatcctatacctgacccgctacccgcgactggtagcgtatgtaccc

SEQ ID NO: 29131 - DNA, 375 bp, Zea mays
agcttcacttgacttgttttgagtattttttgtaggttcaaaagagacgcagcgtcgaggatatgtagacaggtacgttgattcctgacaagtcgctgagatatttcttgggctatacagtctacaagccaaaagcctccgctctgcaagaaaacagagtgagcggaaatcgtgctcgatttgatcacactaaagacggacgctggttcaatgtgtaatgttccgcgttggtgtcgagtagtaggcaggaaaagcaagtgcatattcatttggcaggcaacgagagtctgaaagctcctaatcccgagcctttaaagatgacgaagacgaatttaagactatgatgaagacgcgacgcgaatgcaaggagcagag

SEQ ID NO: 29132 - DNA, 320 bp, Zea mays
atgttgagcaacctcccgactttgaagatagtgagtatcctaaccacgtgtataaactctctaaagcgctctatgggctcaagcaagccccaagagcatggtatgaatgccttagagatttccttatcattaatggcttcaaagtcggaaaagccgatcctactttatttactaaaactcttaacaatgatttgtttgtatgccaaatatatgttgatgatattatatatgggtctacaaacgaatctacatgtgaagaatttagtatgatcatgatacaaaaattcgagatgtcgatgatgggggagttgaagtacttc

SEQ ID NO: 29133 - DNA, 367 bp, Zea mays
agcttaagagtcttttttcacggttcaagctcgttacgaaaaacgatctatcgccgcgaaaggggctactgttgggactatgcttcgtcgccgaaggtcttgtatgaagaagcagcttccgctgaagctgtccgcataagatgaccgaaggttcctcttcatgaagcttcggaattgcaaaccgacttaaaagtagaatgaccttttagtccataaatgtttgggtcgctgttgtaatcccttatgagggacataattgtaattcctcacaggctgcgtcccgtgcctataaatagtgaacagtactcctttactgttcacggattccggtatttgcaatcgccatttttcgggatccaatctttgc

SEQ ID NO: 29134 - DNA, 435 bp, Zea mays
tgcgcccacccatcagcataaattatcttatggcattagccgaatcatgccaagacgtctataaaaatagcctagacccctagaaattgggtttcggggcatgacggcggctacaactgcttgaggcgcgagcggtggctggacatcaacggcggctttatgtggcgcgagatgctagcggcggtgtgaggcacgagcggcggaccgaggcaacgtcagtgagcggcggccctaagtgacatcggcgagcagctctccaagacgcgagcgtcatggcggcctcaactgcacaaggcacgagcggcggcaaccgcccgacgccgagcggcgacgcgagtgtatacggcggccatggcccgatgccgagcggcgatggtgacggtgactgcccgtgacagcatctaaagacgatgaatctctctgatccggcgtgtc

SEQ ID NO: 29135 - DNA, 370 bp, Zea mays
agcttgcctattcttatcatagcatatgcatttacctacacagcagttgcagaccatccctataacatggctatttgcatgctgggggctggacatgatcggacccttcaagaaagctcaggaaggttatactcatgtgctgtgtgccattgacaaattcacaaaatggatagagtataagcctattgcctctttaacctcggccaaggcagtggaattcatacaagacataatattcaggttcgggataccaaatagcatcataactgacctaggatccaatttcaccatatctgaattctttgacttctgcgagcaacggagcatccagattaagtatgcatcagtagcgcatccaagagccaatggc

SEQ ID NO: 29136 - DNA, 429 bp, Zea mays
  unsure (1)..(429): unsure at all n locations
gcttganataactaataagcattccgggtctncattacccncacccnctcttgaaatgcacatggttacctttcttataatctntttccattgtgatgattcctatgttgccagaatgtttagttttcataaaggtaaatgttggaagttattgtcttattttcatgcacacacatcttgttatcgtccattcttctttgtttgtccagataattcaacacaatatggatagttgctcaaacacattcttccatgatattcacaggccccatccaactttttctgcaaatccccgcccactactatgcacggtcagttcactggtgcgttcctcaagactagtttattcgtttacccactgctacagtatacgccgtgttcatgtagcacaattcatatgatatatcgagttgttcacntacttatcta

SEQ ID NO: 29137 - DNA, 363 bp, Zea mays
agcttaataaagactacttaacgattctgctcaaagaggcctacaggaggatgattaaactgtgttaaaaacattccaataaattgtatgctgcttttattaaaaaaacaatcgtaaactatgtgattcattatttaatatatttctctgtgtagcgagaaagtgtcatacgtaccgttttagagccgaaggcgaaaaaacaccttcccttctttccacgctttataaagaaaaatccctttttcaccgaagtggaagtattaaactcgaaggtcttgccataggttctgtataaggaataccattgccgaagtgatagcattaaactccaaagtcttgctgtaagtcttgtttaatgaattc

SEQ ID NO: 29138 - DNA, 446 bp, Zea mays
  unsure (1)..(446): unsure at all n locations
tgttgacaagtgtagagctaataattgaggtataaaatactggctctagatagtcatatgcatttattagcagtagcggcatggatctaaatattntacaactggtgcgctgtgacgactgatgacaacataaaacccgtggttgcatgcacggagtatggaaggcactgtcgatctcttcttgaagtcagctgagtatttggactgtgcagttcatcatgtactcatacatataccacctcaaagacgccttattaattctgttttttactgcattagttcggagcaccgaacataggagttcaccgctgaagttcagtggtaacactgatgatgacaacatactcttttatgaaagccttgccacaagaagatgtcattctcatagttgagtacaagaataaatatctcttgtatcttattgtaaaatatgaaacatttgttct

SEQ ID NO: 29139 - DNA, 386 bp, Zea mays
agcttatgaagaatcttcattccaacttgggctagtcggcggtgccagagccaacccatgttagtcttagcaattaagcaagtgtcgagttcaactctatcaaaatctactaagtatagctgaccctctaacactcccttaaatgctattgaatcatcacttcttctaaagacagtgacacctacatcagtgaatagacagttgtagcccatttgacataattgggatacggaaagcaaattgtagtctaatgaatcaaccagaaaaacattggaaatagtatggtcaggtgatatatcaattttacccaatcctttgaccaaaccttgatttccatccccgaatgtgattgctcgttggggatcttggtttttctcatatgagga

SEQ ID NO: 29140 - DNA, 404 bp, Zea mays
  unsure (1)..(404): unsure at all n locations
cttcatccccacatgtgctaagcggcgatgccacagccagcccatgctattcttagcaattaagcatgcatctagaccggcctcctctnttgcaaaatcaactaaataaagtgtgccgtctagtacacccttaaaggctagtgaaccatcacatcttctaaagacagacacatctacatgtgtaaatagacaattatatcccattttgcataatggactaacagataacagattatatccaagcgactcaactaaaaacacattagatatagagtgctcagatgaaatagcatatttacctaacccttttaccttgccttggttcccatcaccgaatataattgaatcatggggatcctcattnttgacgtaggaggtgaacatcttcttctccccatcatatg

SEQ ID NO: 29141 - DNA, 380 bp, Zea mays
  unsure (1)..(380): unsure at all n locations
agcttgttggagctgngtcattgtttattgttagaattgtcacatagtagccctgtccaattatattatgccccacgcccaccttgcttgcgatttgtatgaaccctgttaatcagactacgtaatgagatgtggtagtttggtattatggtgacagtctgatcaagtatttgactatttngtgatttcatacattgttgagttagtttctttgtggcattttgactagccctaggtagatgtagctgtaccagactaatgaggatgaggttgcagtcaacctaattgtcctccaagagacaatagggaaatgggatgatctanagatgtagaaaattggtttctgttcatcatttgcccttgaagcccttgttctctgt

SEQ ID NO: 29142 - DNA, 376 bp, Zea mays
  unsure (1)..(376): unsure at all n locations
ggacccgnggacccgcgtcaccggaatagcacaatcgtgctcgccggagttcataaacccgccagcgcacgtggaccgggtaagcctctgcaccttttccaaatttgatgcgcgcatggcctctacatcaccccgtggagctcctcgtgcaccttaattgaactataccgccggggtttggccggaacaggagccgccgacgacccccgccgcctgtgctcgtgagcagggtagctccgaccaccttcgacgccgacccgcacaccgacgtgaccgtcgtgacctcccagacgtcactgaccaccccgccggagctctactgccgccgtaagcctcgccgccgtaatctatgccgcgggtactggttaagtcattc

SEQ ID NO: 29143 - DNA, 381 bp, Zea mays
agcttttgctgattttagcaacgattattcattagtgttacctttcctctaatctaattcatggttgactgttattgtaatatggactggacattaagacttgtgaacattaatacttatgtcgatctgtactcttttccttatagagggagcccctcactagggtgtaaggtttttaacgaggcagatcgaggaataaaatttagtttccctcaaatcttgttgtgttcacggatttagtaaatgatgatgacctgtagtgatccctagtgttcaaatcttattgtgtttactgatggcgtgtggtgtgtgggccaacatggcccgatggaagcccatcgtgctttagagccgtgctgggccttatttcaacccatctgg

SEQ ID NO: 29144 - DNA, 511 bp, Zea mays
  unsure (1)..(511): unsure at all n locations
ngcagcatatagtcacgtttgtgttctcagtatgtttattatcaaacgtgcacatctttatataatttaggaaacgaacaatagggtttaccaagcaaggaacctgctaatactaagctaagaccanagccgaatcagagggagagctagatagcaatggaaccggcttcattcaaggtccttgctaagcctaaagatcccagactcttagcaccagccattagccaacacaataattcatcaaggaagctcctctgaagtcttcccaaggggaatccccatcaaagaccaccctgttatgatgaagccataaacaccacgccccgatgtgttttcagtatttaccccattatttagtcagctaatgagcttcaacagaagcagcaccaaacaagccacatgtaagcattacacatctcttaatgcaatgacatgcatgtctgaaggagaatatcgcatcatttcttgacatagaagttttgagaatgcagactcatgtacacacattcat

SEQ ID NO: 29145 - DNA, 324 bp, Zea mays
  unsure (1)..(324): unsure at all n locations
agcngtatgctgccttgaaatccttttttgtttttgaaacatttggcaactcacttctatgatgtagaagggacactttattgtgtctttttttccttcaccgaacctgctaattacctaattatcaaacctaggcccatcaataaagatcaatattatgggctcccgaactgtggtgcttatgtcgacgtgcatgttaagaatagttaaccttgcatttctgtatacctcatttcggatgatagtgtggctcacctcgtttttatgtggtttgatgccaatgtcctcatacgacctatggtctaggaagatcaagcaaagtgc

SEQ ID NO: 29146 - DNA, 496 bp, Zea mays
  unsure (1)..(496): unsure at all n locations
tcttctcgttttaatgagcaacgccaatgcgagcgccttctgttagttgtgtttgttccggntttccaagtaagatacatggattaatccttggcgtaggtttatgataatgactcacaagttagatctatgggaaaaatattacggagaataaatgccacgcatgcaaaaaaaggaaattaagtggaaaacattattctaacaaaagaaattgcatgcaaggctcttctttaaatactactccatccatctaaaaatataattcaagaatcttagtgatacttatctactactccgcattctgcaagggtattaagcgggctgggggagagatgtaatagatgtttttcctatcatagatgtagacagaaacatacatgtggtgtagcgatagctactgctcacattggcctgagggggcgcgcgttcgaatccccttgcagccatagtgtttttattatttagctangcgttgactgtgcatggaatggaaatg

SEQ ID NO: 29147 - DNA, 377 bp, Zea mays
agcttgccaatatttatctaagcttttgtgtggggggtctgcttcgtagccgaaggtcctgtaagaagaaacaccttcggtagatcagcacaaaaataacgccgaagctaccttccaaggaacttctgcatgacaacatgccttgagacgaagggttgcaccgacttaaagatgaaaagacagattgacccatgatagtttgtgtcatggttgtaatcgattgtaaatggtataaatgtaatttcacacaggttgcgccctgtgcctataaatagatgaacagttcccccatactgttcacgctgacttgtacttgctcgtgcgtcacacttgtactttctccttctgtcaagccgaaggtacaaatgttattcttt

SEQ ID NO: 29148 - DNA, 491 bp, Zea mays
  unsure (1)..(491): unsure at all n locations
tcngcgtgacagcananagtgaaaccgacttatagatgatattgctatttacacctcgacagattactatagagttattatcaactgtaaagggcatgaatgtaattttgtatgggttgtgtcccgcgcctataaatatgtgaacagtactcccgtactggacacgctgacttggcatttgctatttgcgtcacgcttgtactatcatctcatccctgttaaaggtacacttgtaattcaatgatattcctgtttatacttagtaataataaataattgttaattgtctatattgtctttaacattcctttcatttcatccttcgtcaccgtatgatgaagttatggaaatacgtccttcataaccttcgtccagaaaccattatatcctaaaggatataatgcctcgaaggacgaatggctntaacgattaacattntctatgttgccttgtcttaactataacattngagaacaagtctcaacactata

SEQ ID NO: 29149 - DNA, 377 bp, Zea mays
  unsure (1)..(377): unsure at all n locations
agcttatcatggatatgactatctacatagggcaaangaaagcccagccataataaaatatgtttatcagtggagaaaagaaaaaccaagcctataactactttcaaactgaataagcatcaagcacatttcatgaatttggtgctttaacatttgttcaacacatttcccctactctaaacacgaataggccttccatgctatatgaaaacctatgaacaaactcgaaaaaacatttcatttaattcattctacgtaaactggagccatatcattgcttctatttgccataaagtaaatgcttttactcaatagcttatggctgatcaagccaaacattattcctataacttataaggcatacagagcttttatcc

SEQ ID NO: 29150 - DNA, 468 bp, Zea mays
  unsure (1)..(468): unsure at all n locations
tactcagcttgcttgctatntaattccttgatcgcatctatggcttgtctaacctanttgagataaccgccaataaagcgagtgataaagcttaactcgggtcaaacttgacaaatcttagtttttaagcttttagcacttaaattcttattttcatgcaattgttggttcttgaaatatgcatgaggtactgcacttagggggagtattcaaaactcaaatcactcttgaaaacccctagtgcaagcccaaatgcaaatttcaccatttgcctattttctctaaaaattatctagcctatggcaaaatattttgaaaagtatatgagggtgccaatacctgtcccaacaagtgttcttttgtgtgattataagttgggattaagtttggtaggagtagataganaattgataatttccaactccctctgtctggctacggacagtccgtgtgcacggacaccgactg

SEQ ID NO: 29151 - DNA, 296 bp, Zea mays
cgccgctgcagctatcctaagtgtatggtttttgacctcgggaaggacagatgaccagcgaagcgaaacatagctcttgcagatataagggtgatataggacaaggctccgagcatgaaaaagaggcatcaatgggtaatcgaaaaaacagccatgtggaaaagaagcaaaggctaaggggctaagaacataggatatgggccaataatgcctaaaaagaccgagtcaaatggatcttaaaggagaaagggaggtgatatcccggataaaccacaagtgaaggggcaaacccgaaa

SEQ ID NO: 29152 - DNA, 433 bp, Zea mays
tctgcagccgatgcgtgcagcagctgaaggatgtgtttcactctgttggagctagctcttgcaaatatacaccttcagctgataatctgcccagaacattataatatattgaatgcgaagttgatgcccttgacgaagttattggtgggcacgccgacttctgcgccctggtagcttctcggggtacagctactgcttttttgaaggctggctgcacgcatggaaacattgtgaacagaccaaacttcagcttgtcagcatcagatctgataaatatcccaagcctagctcgaagcattggaaatagattcatgacccagatttgggtaagtggcgggcgaataatggcaggtgacgaagctcgaagccatcttaagccggtaaggaacttatggttgttacttttaccttcttcctttgaaatagcaccttt

SEQ ID NO: 29153 - DNA, 399 bp, Zea mays
  unsure (1)..(399): unsure at all n locations
tcactgannaagaaaaaggagaatcttatacagtgctgggccgattccagcccaggcggcccaaacctagacagaaacgcgcgcgcgtccacgcccgcgttggagactttgcaaaaaggcccctgctgttctgaataacttgaaccaagttctctgcactattgtaatgagtcgctgatagtttttaaaaggacccctggtttctattccttcgcagactgagatccccgacgacggcgagcgcagaaccaggctccggcgagctagactggccggagggagccaagactggcacccccgagcggctgacaccgaattgtatctcccctgaacaattcccctaacttaatttcatggttggtaatctatcaagctctgtccacgcggaccacagacgat

SEQ ID NO: 29154 - DNA, 378 bp, Zea mays
caagcaacgcggctgcacaaggaaagacgactatggcgccctctacagggtgaccggagaggacgttatagatgttggaactcatacatacagaagggtgccgaccaaagagcacgacgagcaggggacgactgcaatgacccataacgcgtagggacgacattagcaaagatggggatgtcgacctaacgaaacacacgtctgaatactaaaaaaaagccaaaaaggtgcacaaagaaacagaaaatgagcgcggccagaaaattaaagcaccgcgaacagatcatgggggtgaatatatgagtcatgagccgagcaagcagctaaagaggagggggaatgagccacagctcacgccgccgggaacaccttagagga

SEQ ID NO: 29155 - DNA, 413 bp, Zea mays
  unsure (1)..(413): unsure at all n locations
cgctacatgccttcttctttttctccatactagaatactacccaacttanaatgaatgagggtagatctctcgaatcttgtggatgtgaactccttgaagtacctcataacaagggtgttacggagccttcttctgctgtggctgcttgagcaggctgcacagagatgactgacatatagttgattttgggacaaccttcttctcattttgtctatttttctttcactattcactgactctatctttctctttgntcttcccactggaggattctatcacagagtattaccatcacacagaggaggaaaccaaagactatcaaccatgtacaacaatcttcaacccagaatcaccaagcattgtgatcttatggacgaaggagtggaaaatggagttacttgctatttgggag

SEQ ID NO: 29156 - DNA, 367 bp, Zea mays
  unsure (1)..(367): unsure at all n locations
agctntaataatatgtatctggagatataatgatccaaatgaggagaaactagttttgttgtgtttgtcttgaagaatactacctatgaaaaatatgaactagggtgtttattactttttcatgtcctgttttaattaatttgtttaaatccagtaaacttgaaaattgtataactaaatattgggagatggtaaaaatatgattccaattttgttgagttggtcttgttgtgtaaaatctgaaaaaaatatatttgtggtagtaaatacggaaaatattgcttttgtggattaaagttgttatttgctgatttcttataaaaattagtgtggcaaaaatatgagatatctgactatgaatattttt

SEQ ID NO: 29157 - DNA, 345 bp, Zea mays
  unsure (1)..(345): unsure at all n locations
cggtgaagaatcgggtgccgtgaagatcgttaatgagctcgtcaacgatggggattgtgaatttgtccttcatggtgcgtctgttgagggtcctgttgttgatgcanaatcgccgggagccaccatgcttcttaaccagcaggatgggcatgcagaaagaagaagtgctctgccggatgaagccttggtggagcatggtgttgcactatgcctccagcttgttcttctacnngtgtangtatcaatatgggccgagggccactggaggtgtgcccagcaatatgtgaatgcggtggtcacaggcacggtgaaagagaagcccttatggctcggataagacatcat

SEQ ID NO: 29158 - DNA, 395 bp, Zea mays
  unsure (1)..(395): unsure at all n locations
ccggatccctagatcacctgtggcatgcaactgtatatatttcacactttattggctagncggcggcgccataacctacccatgttatttttagcaattaggcagatgttgagttcagctctatcaaaatctaccaagtatagctgaccctctaacactcccttgaatgctattgaatcatcactttcttctaaagacagtgacacctacttcagtgaaaagacagttggagcccatttgacataattgtgaaatggaaagcatattgtaatctaaagaatctacaagaaaaacattggaaatagaatggtcaggagatatagcttatttaccaagacctttgaccaaaccttgatttccatcctcgaatgtgataactcgatggggatccttgt

SEQ ID NO: 29159 - DNA, 493 bp, Zea mays
  unsure (1)..(493): unsure at all n locations
tacccctccctgggaagggccgttcatcattgccaagattttgaagcccggaacatacaagctggccaacgatcaaggcgaggtctacagcaacgcttggaacatccaacagctacgtcgcttctacccttaagatgtttcaagtcattcatatancctcgtttttctttacatacacgaataaagtccaaccgtcaaggaaggatcagccttacctcggcaaagcccgaccctccctcgggggctagaagggggaaccccctctgcgtcaaaattatcctcgaaaaagtcttttgccagaacgtctttcgcacttttcgactgcatcgatagcggggtcctaaaaacaacgagagtacatgtaagctgcatggtcgaccgagccgatggactcctacccctccgggataccgatacctcactcattaccttccgtcgataggaactcacactcggacaagcgatcctgctggcgaacatgttctaacgctcg

SEQ ID NO: 29160 - DNA, 385 bp, Zea mays
  unsure (1)..(385): unsure at all n locations
aacttctgcgtgatattcacaaaatgaaaccgacttatagatgaaaaggctctacagacctcgatagattacaatagaattattatcaaatgtaaagggcctgaatttaattttgcataggctgtgtcctgtgcctataaataagtgaacagtacccccgtactgttcacgctgatttggcattcactttngcgtcacacttgtaccttcatttccttcaagttaaaaggtacatttttgtagtttaacgattatttctgtttatacgtgataatagaacataattgtttatgctgttcattatattccttataattaatccttcgtcattatataatgtatccatgaaggtatgcccttcataaccttcgtccgaaaaccatta

SEQ ID NO: 29161 - DNA, 430 bp, Zea mays
  unsure (1)..(430): unsure at all n locations
ntctaagcttcggtttggaggatacattntcgccatttccgatagaaagatgtctcaagacaagaagaaagttgctgagacaaaactaaccgaagaggagaagctccttgacgagaagactgcaggatttgttgagtcaatagcanaaacaaatacagagaagattactaaagagatactataaggcttgtctgaagatactgatgatagcgacagctatgatgtggagagtggaggcgaagactctgaagatcgaccctggcgaccaagtcatgcagtcttcgggaaaacaactatcaaacagagtcatcttgataatatgagaggaaggtattttcgagatatgtctattgtgagggctgacatagacagggccgttcctgctcccgaagatnacgaagtngtgatattccgaagcttcaaagctgga

SEQ ID NO: 29162 - DNA, 356 bp, Zea mays
agcttggccagatcgcctcgccaacttaccgtatcatatgagcattcaatgcgaggatcgcctgacaccttatcctgacgcgtgttcctcagtcgacagggctgaagtaccgcagtcacttcgcctttccactgaccgacctgacaggaaaacagcgccacctgccccgctccgactactgcgccacctgccagggtgaggctaacaacagctaggtccagcctcaggcgcaacaggaaactctgcctcgcctgacctcagggctcagcctcggaaggtggtcttcgtctcgcccgaccccagggctcggcccccgcctcagccttggaaggtggtctccgtctctcccgacccga

SEQ ID NO: 29163 - DNA, 445 bp, Zea mays
  unsure (1)..(445): unsure at all n locations
agcggagaactcgcgcttgacgccttcttgctctagatattcctcaacttgcagattcttgaactcgagacccgtgccgctccttatcttttncaccnttatattaaattcgcttgaagccctccttagaaagcgctttagggtcccttgagtttctaatntatcctgcaaaaagaacacccaagtgaagcgggaaaaatcatcaacaattataagaccatacttacttcccccaatgctaaggtaggcaacgggtatgaagaggtccatgtgaagaagctccagtggtctcgatgttgtcatcacattcttgctatgatgagtgctttccacctgtttccctgcctgacatgctgcacaaagcctatctttctcgaaacatacattggttagtcctaacacatagtctccctttagagtttatgaaggttctcatccaacatgt

SEQ ID NO: 29164 - DNA, 380 bp, Zea mays
agctttctgactgagagagaagcttttatctaattctgttattgtagcttcaacttccaccaataagccttcggttgtctgaagctcgaagtctttcttttcaagagcagctgattggtcttttattttgctttccaaattctcaattataacctcgtgttttttaccttccagatcctgctgcatttacaaagctttgctcatcagcatactctgcacataaacaaccttcgttagaaaacatcttcgttattaaaaaaataaaagtcagagaaaagttgtttaccttgaaattggaataaaatatactaccgacgatgtgttgtcgtcagcagcggctgatttcttgttcgagctttgggaaactcgatctctttgat

SEQ ID NO: 29165 - DNA, 382 bp, Zea mays
agcttaatgccccttctaaaagattatctaattttttttagggcaacgctcccatgcctcaggataacgagggttacattttataccctggcggttatcctgagcacaaaattaggagaattcactctaggaagtctcactctagctctcatcatgcttttatttataagagtgagacatctagttctagacaatcaacccgtgctaaattgcctaagaagaaaactcctattgcatcaaatgaacctaacatttcatttaagacttttgatgcttcttatgtgttgactaacaaatcaggcaaagtagttgccaaatatgttgggggcaaacacaaggggtcaaagacttgtgttttggtacccaaggagcttgtttctaa

SEQ ID NO: 29166 - DNA, 473 bp, Zea mays
  unsure (1)..(473): unsure at all n locations
tgacgacgtaggttgtcgtcagtctcccgctaacgtcgagccacctcatggacatccgtagcaatgttccggcacatggagaagaatgccgcatacccgtgggccaagagggcactcatccctcggccacgacctcgaccacgaccacgaccacgtggcatgggagatccgcggccaggggaaggacgcgaggcaccggcagcagcagcagcatgaccagcagacagacccgcagatgtatgagcacgagagctggagggggctttcctgaggcgccctgctggattgttgggatcaatccaaaaaggggtatatgactgatgtcttgtacctttgtcaaatttaaactgggtcacaacctcaatcatcttcatgatatacagagcatgaagacaccccttcaatggaaagcaggcggcattgaatgattcctgccanatcatatcaaagacatttatactctctgagctgct

SEQ ID NO: 29167 - DNA, 452 bp, Zea mays
  unsure (1)..(452): unsure at all n locations
actaagctcatacccttgactgttacctttctcatagaaagtttaggtttcacttctaggaagaaccttcaagaaatcttctatagtatcctgccaatccaagaaaacttctgatcttggacacatcctatgggtgcttccaatccagtatctcacttatctttcctggggccactttaattccaccatcggtaacgatatgccctaagaaagcaactcccttatgccaaaatcacacttcaagaactctgagtacagttttttgtcacgaagctttttgatgactagccttagaagatcctcatgtgtttctttatctcggagagtatatcagtatgtccgcaatgaataccaccacaaactgatccagatatttcatgaatactttattcatcaagttcataaagtatgctggngcattattcagtgcatacgacatgaccgaaacttat

SEQ ID NO: 29168 - DNA, 352 bp, Zea mays
ctatatgtgctagacgacgaagccacaaccagcccatgtaagtcttaactattaagcatgaatctagagctgcattctggtttgaaaaatcaactaaacagagcttgttgtctaatacacccttaaaagctaatgaaccatcacttcttctaaagacagaaacatctacatttgtgaataaacaattataacccatgttacataattgactcatagacaataagttgtactcgagcgattcaactaaaaacacattggagatagaatgctcggatgtgatggctatctttcacaatcctttaaccttgccttggttcccatcttcaaagataatcgcatcttgggaatcctt

SEQ ID NO: 29169 - DNA, 358 bp, Zea mays
taatatttaggtgttttcaagattctccgtcggcagccttacgtgaataggacataatcataagaggggagatctatttgccatgagaagttattttgtgttaagccggtcttttaagagtcaccagaaaataactttatattttttattggcggcatcatctttagatccattcaaatattggttgtatctttatgtgtctaaataaaactaaagtttttgtctgagttgtagatgtgagagctccaaatgctccaaatgtgagactagtcatgttcaactatcaaactaatgactcgtagatcttactccaattatcgtagctacataaaagcttcggtcgacatagaactgaaaa

SEQ ID NO: 29170 - DNA, 428 bp, Zea mays
  unsure (1)..(428): unsure at all n locations
acaggatcacctatttcaccccctctaggtgctctcaattaccanaaagggggagattgtgaatcatctaagccccttagtgatgntttggtaattaatgacaactgtttgtggactaacggatcttggagaaataagaatgcatggttggaccacatataacaganaatcttggagaattataagcattggttgtggatcaagtgaaggcaaaggtataacatatgttttgtttttgccggtctccaggagtntagagaagttatttgaccagattagtaggctagatggtcgtactataaagaggggttaatgacatttgtctgtgtcaaacttagtgcctcatagagcatctagtggttgcatttgcatgaggactaaccacgctttcaatatcaagaattaaaaatcttttcaaagcatgtttg

SEQ ID NO: 29171 - DNA, 392 bp, Zea mays
gaggccagctgccagcatgcacgctacgctcactttcttctatgtctataaaccaccgccgccaggaaacaccggcggtaataaaaacaatagaagtagaaaaaagttgttacctcgaaattggaatagaataaactaccgacgatatgctgtcgtcgggagcggctaatatctgtttcaagcttcgggaaaccaatactctttgatagagtaccgaataccttcgctccggtctgatcccggacacagcccaacttttcggcatcgatgccaccgaagagaagtgctcccggccatatccgcaagaaatagcatattctttcagctcttctttttcagccttcggcagctcttgaccaactaaattttgaaagctaaaaatttcatcctcc

SEQ ID NO: 29172 - DNA, 379 bp, Zea mays
taacggtcgatacccaacggtcttggtgacgtggctggcgcaccggacatgtccggtgtgcaccggactgtccagtgcaccatacgacagtcagccccaccaaacggctagtttggtggtgctgactgtcgtatggtgcaccggactgtccggtgcacaccggacttgatcggtgcgctcgcctcgtcaccatggccgttggatgtcgaccgttgaagctctatgattcattagtgtaccctaagaatcttgccgtgatcatggtcacacttgttacttgacctgactatcttttaatctcgtgcttggattctttactcacataattttattcctacttagtttacgtgacattttttgttactttatatatttctta

SEQ ID NO: 29173 - DNA, 368 bp, Zea mays
agctttacaaacctacttgtcaatgtttgtattatatcaaagacttcatttatctgcttgtgaatggtgtcaccactgtgttgaaaccatttttgctaatcttgattagtagcattatgcgagatcatgtacattaacatgccaaactgttcttctacagtaacacctcgtgtgtcacgtaaaagatcctctgctctaagaaaagctactatcgctctgaaaatatttggctccatcctaaactcaactttgctccaaaattcatgcccttctagaacttccttaatctgcatatcgccggttagagaagaagtatggactgcccttttctctttttgcatggccgcgagaacagtcgggacaattac

SEQ ID NO: 29174 - DNA, 383 bp, Zea mays
  unsure (1)..(383): unsure at all n locations
taccgcattngaagcatgagccgctcaccttggctgtggtcttgctaggctgtcccttgcgacctttaagcaccgtcttgaatctttcgatgatgagagccatctcttcatcattaagtgcggccgcctcaatctgtgccaccttgctaggtagcgcctccttgctttgtgttgccttgagagcaaggtgttgcagctcgttgatcggaccattcaaggcgtcgtccacatacctacgctccttgatcatcattcgcccgctaacgaatttcccaagaacttcttcgggcgacatctcggtgtacctgggattntcacgaatattgttcaccaaatgaggatcaagaatggtaaatgaccttagcattatgcggacgacgtcg

SEQ ID NO: 29175 - DNA, 470 bp, Zea mays
  unsure (1)..(470): unsure at all n locations
tccccagcgcttacaggctcacaacgccaaatggcgaggacctggagcactcctggaacatcgacaaccttcgcanaatttntgtttgacccatttagggctgatttcgcccttgtaatttgccgtatacaatcttgtaccggcccgcactcttttcctcccggagggtgaggttnttaacgaggcggagccacgtaatatatgtgagaaaaatccctcgcacaaacatgtgtcgaataaagaccgcgacaacggtcttctgcattcgaccaattctaagtcaccgcgaggctaagcgctagccaccctcgcgtgcgacaaatccgcgcagaagttgcctaatggtgcagccggactaagcacaacaagtgcgaaaaaatccgatgtctatcgcgaagactatccgcgcagaagtcgtctaatggtgcagncggactaagcacaacaagtgcacaaaaattcgatgtcta

SEQ ID NO: 29176 - DNA, 351 bp, Zea mays
agcaaggctctagcaatgtatcttgttgccacgaaaagagtggcacgaggcaccttgtgatatggatatccagacaatacagtggcactatgctcctcaaaagaactcgatcggaattaatcgggtcgcgactacaccataggatgcgtgaagaagcataggtagcgtgcgtgctgcaacaacaagcatgagagtgcaaacttgctctaaattggaacgctaggaaggcgccccctttctatttattctaaaactaaaattgcttaaaaagcccaaacgaattgtgaagaaacatttacatagggaaacattaccactccaccgacaaggatacgaactcgacctgaacac

SEQ ID NO: 29177 - DNA, 405 bp, Zea mays
  unsure (1)..(405): unsure at all n locations
taccctctgcctcgcattgatcaaatcgtggattccactgctgggtgcgaaaccctgtctntcctctatgcctactcagggtatcatcaaatcatgatgaaagagttcgaccagctcgcgacttctttcatcacaccctttggcatgtactgctatgtcatcatgccgctcggtttgaggaatgcgggtgcgacgtaccagcggtgcatgaaccatgtgttctgcgaacacattggccgcacggtcgaggcctacagtcaatacatcgtattcaagacgaggaaggcctccgacctcctttccgaccttgatgtgacattccgatgtctcaaggcgaaaggcgtcaagctcaatcccgagaagtgtgtctttgactgcccgggcatgctcttgggttcatcgtct

SEQ ID NO: 29178 - DNA, 342 bp, Zea mays
accggtggagcgaatgtatagtagatccccaggtgtatcaaagtgtgagacctggcaaggataaggcagccactcgaacacgcgggagccttgcgaccaccggaagacccacgtggaaggggacgacatcaccaggattaccatggggggctacccaacaccgcagcgacaacacaatacaaatcggggtaatggggaccgatggacgaaagtggcgcattttcttcccgtgcacaccaccgataaggctcaaaagtatcaaaaaacgatactgaccggaccgggtgggtgcaaggattaccccggaccataggttgtgaccgagggacccaatttggtgcc

SEQ ID NO: 29179 - DNA, 361 bp, Zea mays
  unsure (1)..(361): unsure at all n locations
agcttattctagcanaaaaaaccattcacatgcgtccatggctgagttgatgttnttgtacaataaattntcagaaaatgtactaacatggtttgatgtttttggatatcagttatactttattttcccgagtgggactaccttaaaaaaaatcaaccacatgcttccatggctggtagtagcttcattttgctcacgtatacaacttacatttctaaacacacaacgttccttttcttcatattaacaaattatattaatctgtgagaatctattgattgtgttaccttcaatttatttaccgtattattttgagcataaaatacaatttaccatattaaataaatctaattcgaatatg

SEQ ID NO: 29180 - DNA, 389 bp, Zea mays
  unsure (1)..(389): unsure at all n locations
ctcagcttcgantctgaactaaagatgcctttcatactatcttatgatgaattggctgacagcttaccatataatagcataaaggtagaaaagtcaattttgtatttgaaaacgaattgtttcatttgcttacacttaatcctgtcctcctcttgcagggcttaatccttagcaatgcccttagagcacagaaaaacattgaagatgaagggtatacaatggctctgaacaaccttcgttcggaggtgattgaactaaggaacgaaggtcttgaaaaagacaagatattaatttcattggtaaacaaagtaaaagaagacgaagctagttccaaagctcaagctgaggtccaaaagaatgaaatcgaanaccttcggaaacaattagca

SEQ ID NO: 29181 - DNA, 430 bp, Zea mays
  unsure (1)..(430): unsure at all n locations
ctcacctgcagcatgcaagcttaacggcttaatccacagcgtgatgacttttgcttggcttcttacttccggtgtgcaccggactgtccgtgcgtcatctaacagacaacccactcactgtcaattggtggtttttnnntctttttattatttctatttttttttttcctctttcttcttttctttctttaaaccaatttctgtcttctttatttgtttttttctttttttaatttatctcttccctcatatatataattcttttttctctctttttcttttttttttttctcttttttttctttttcttttctttctattttttttttttttatatttttttaaatatgttatcttatttttttcttatactcttttttgttttttattctttttttctcttgtttctttcttttttatattttccttt

SEQ ID NO: 29182 - DNA, 382 bp, Zea mays
accttaaaactaagctcgatcttgacaactcgctgctcgtcttcgcctttgtctatagaatcctgacctgaaaaccttcccgactagtgttctggatgctgcatgtactccacattgccctgcatggacttcctccagaagttgcttcccggtggacgggagaacgcacttcatgaggacgcctgacgcgccccttctatacaataactccccaatgagcgtatagtgagctgattgcctagcaatgcgctctgccgagttcttgtcatctggttcttcttcattctttatatacttaataatcggccgtctccagtcatcagagtctgactcgggttgatctatgatgttgcactcttctggttgatcctatgagatactc

SEQ ID NO: 29183 - DNA, 369 bp, Zea mays
agcttctaaagggagaacacgtgataaggttgactatcgtgcaattcgaataagatagaccttgtgcagcttgtcaagcaagtaaacaagtgggaggagcgcatcacagcaagaatgtgatgaccacttcaagacccctggagctgctgcatatggacctcttcggacctgtcgcctatctgagcataggagggagtaagtatggtctagttattggtgatgacttttcccgcttcacttgggtgttctctttgcaagataagtctgaaacccaaaggaccctcaagcgctttctcaagagagctcacaatgagtttgagctcaaagtgaagaagataaagagcgacaacgggtccgagttcaagaacc

SEQ ID NO: 29184 - DNA, 197 bp, Zea mays
ccttgaaactaagcttggttgtcgtgtcctggccgtgcaatgcgactgacgttcatgcaccctcggcctccagtctgatgaatcctgcagggcgcagcgcagcattcgctcgtgcaaatgattgaacaagggcgagggtcccaggccctttgccgtggtccaaatcctgagtcctgatcctgaccccccccccctct

SEQ ID NO: 29185 - DNA, 428 bp, Zea mays
  unsure (1)..(428): unsure at all n locations
acctgcggcatgcaagcttagaaaagtctggtataaatctgcgataatatctatccagtccaatgaaacttcggacctgatgaacagtggtcggaggtttccactccanaatgtccttgaccttgctggggtctaccgcaatccctctggcagatagaacatgtcctagaaattgaatttcctccagccaaaacacgcacttgctgaacttagcatacagctgatgttccctcaagcgcgttaatacgatccgtaaatgttgggcgtgctcctcttcattcttggagtatatcaaaatgtcatcaatgaagaccaccacaaacttgtctagctcgagcatgaataccgagttcatcaaatatgtgaagtgggccggagcatttgttaacccaaaagacattaccagatattcaaacaactcatatcgc

SEQ ID NO: 29186 - DNA, 406 bp, Zea mays
  unsure (1)..(406): unsure at all n locations
aaatctcagctgattaaacaataaacctcgaccttccatttctcttttgtcagtacgcacgtttctgcgggttgtcctttttacctgccgggctatataaacagacgaattggtgaaaaattaccacaacattgattgctactgcatcattgcgccggtgaaatattttacttaagtccaagctctctgcttccgtcacttgctgtccaagctcggacaaatgtccaatagttgaatctagcttcgtctcacagactgattggctagagcaggtctactaccagagtacaaatgaagagaagagctgaagctctgagagacccctattcaanatgataaacgtctgggtagttgatgagaaccaaagagtatgtccgataagatgtgttgttccaactgacctcta

SEQ ID NO: 29187 - DNA, 502 bp, Zea mays
agcatgcagctgtgaatagaatatgtttactaagttatctctgttctataatttatgtcacaataaaataagttgaactatgatgatatacttgtaagtaacacttaaggaaatagtaatctattttcaaataaagttaatgtatgtcatagtttgtgttatactttgaattcattatccattatgtactattgagtctctataagaagtgtgccaatgtttgtacatgtttggtctgatgttcattagaactctccaattgtattgaatgcatgctcgctttatttagacaacgagcagtccgaggttcctgagtgtgttgttggagaccttcctgatcaacaacctagtgaaagcaagaatcctctgacctattatgtcgtacatactgtatgaatcattgttcggcatacttatgaaacctaagattgactagctatatttaccttaccttgttaccttttggtatcatggtagcatgttgtatcgcttacttaataat

SEQ ID NO: 29188 - DNA, 255 bp, Zea mays
acttgatctatctcagaaacttccaaaattggaagaaactgtgatcctctatccaaaatgatcttcttcaggactccgtgtagagacacaatccaagccatatatactctgccaattaagatcccttataagtactcttgactcgaatgaaatgagccaccttagtcaatctatccacaatcacccatataacatcatatcatttctgggtgcgaagcacatcattaatgaagtccataccaatatcttcccact

SEQ ID NO: 29189 - DNA, 232 bp, Zea mays
  unsure (1)..(232): unsure at all n locations
tagaccttgtgcagcttgtcaagcgcggaaacatgtgggatgagcgcatcacagcaagaatgtgatgaccacttcaagacccctggagctgctgcatatggacctcttcggacccgtcgcctatctaagcataggggagaagaagtatggtctagttattgttgatgacttttcccgcttcactagggtgttctttntgcaagataagtctgaaacccaaaggaccctcaag

SEQ ID NO: 29190 - DNA, 338 bp, Zea mays
  unsure (1)..(338): unsure at all n locations
gcatgcatctaaaccggcctcctcttttgcaaaatcaactaagtaaagtgtgacgnctaatacacccctaaaagctggtgaaccatcacttcttctaaagacagacacatctacatctgtgaatagacaattatatcccatattgcataattgactaacagataacaaattatatccaagagactcaactaataacacattagatatagagtgctcatctgatattgcaaanttgcctaagcctttcaccttgccttgattcccatcaccgaatatgattgaatcttgcggatccttgttcttgacgtaggagggaaacatcaatttcttccccgcat

SEQ ID NO: 29191 - DNA, 409 bp, Zea mays
  unsure (1)..(409): unsure at all n locations
agcttgagtncaatcatttgcattagataatngatgctcacaaggataatctgggtatgaagcacatacgaganaagataagggctggagtagccaaatgtttcaaagaagacgatcaaggtgtgatatggtttaaaaaccgcatagtagtgccaaagaacgaagaactccgccagcaaattcttgatgaagcacatcttagtcgttattctattcatcccggaagcactaagatgtaccaagacttanagcaacattactggtggacaaagatgaagatcgaaattgcacgctatgtggctaaatgtgacattngcagacgtgtcaaagccatacacatganaactgctggtccattacagtcgctaccaataccaacatggaaatgggaagacatcagtatggactt

SEQ ID NO: 29192 - DNA, 444 bp, Zea mays
  unsure (1)..(444): unsure at all n locations
ctatcaaatggacgtgaaaagtgcattcctcaatgtgtccttcaatgaagaggtttatattgagcaacctcccggctttgaagatagtgagtaccctaaccatgtttataaactctctaaggtgctttatgggctcaagcaagccccaagagcatggtatgaatgccttagagattttcttatcactaatggattcaaagtcggaaaggccgatcctacactctntaccaaaacacttgaaaatgatttggttgtatgccaaatttatgttgatgatattatatttgggtctactaacgaatctacatgtgaagagtttagtaggatcatgacacagaaattcgagatgtctatgatgggggagttgaagtatttcttgggatttcaagtgatgcaatctcaagagggcacctctcgtagccaaacaaagtatactcaagacat

SEQ ID NO: 29193 - DNA, 350 bp, Zea mays
  unsure (1)..(350): unsure at all n locations
taccacgacttcattttcttcgggagtatgcatagtcttctccccaatatccgccctcacaatagacatgtctcgacaataccttcctttcatggtatcaagatgactctacttaatgctcgatttgccgaagactgtgtgactcggtcaccacagtcgatcttcggagtcttcgcccccactttctacatcataactgtcactgtcaccagtatcttcagacaaaccctccacagtttctgtagtaatcttctttgtattagtcttcgacattgattgaagaaagcctagatgcatctcctcagaaagacttagcttcgaatcactaacaactnttttatcctcagaca

SEQ ID NO: 29194 - DNA, 330 bp, Zea mays
tctagttatcaagtcacacgctagctgagtatcatctacagatgtaaactctatccattcttgcaattatatatccaccacacagcggatgtaagttattacactcaagtggcccgaacctctctactttatgcttgtgcatatttgctagttagcactcaattacagaggtgccatgcctatctctctctctgataatctctggtgctcttggaccatggtgttgcatcctaatgacaacgtcacattacatcttttcttgtaaatattcgaactctgactaatatttagaaagttctatagtaatctaaaaactaaaacttatacatg

SEQ ID NO: 29195 - DNA, 343 bp, Zea mays
agctagactcaggtatccacacattaatccttaattcatttttcccgtctcatggacaaggcatccttcctggatccaagcccatagaccaacataattcccgttatcaagatgaatacaatcaattcctgacctcgcgcgagtgctaagaaaatcactcgacttctaccgagatcctgattagcaagcagctactcgacctagcatactagtattcatctcaaaaaggaatcctaagttcatgcaactagagggttcaagcaactcctacacttaagtgcacattacagtcctacaagcattaagtgtagtaaagtagcatataataatacggttatgcata

SEQ ID NO: 29196 - DNA, 453 bp, Zea mays
  unsure (1)..(453): unsure at all n locations
tcaaaagcacaaataggagataatcgctccagagccaactgcttcctgagtccaatccgaagaaaatctgaagaaaagcattaaaggaaaaacaaaagagtccattgtttgtcttcgtcctgcggatgaggctcacacttgctaatcgattaattaaatattatgttgtcgcattgtactagctatagcagatgcaagtgctacacaaataataatataaaaatatggctgtgtgcataggcaaatggccaaaagcccacaaatctgatccaagcgttgccaccttctcaggtggagcaaacaaagtaaactatatataggactaaataggacaacttcacctaatcaagcaattacttcgctttaaggctggatctacctangggcggagcatcgttggggtgaaagaaggtctcagtcctgtgctcatttctagcagtagaatctggattt

SEQ ID NO: 29197 - DNA, 271 bp, Zea mays
  unsure (1)..(271): unsure at all n locations
acagcgagagaaccctctctcacagcgtgaagatgacgcgctcgtgtgccgttcctcgaacggntngcgcacgtgcaacgactgctccgcgaaccgcacgctccgtcgcattaactccgcggcgggaaaggcggcgcctctggcaggggaagcgagcgactcttcgccttctcaataatgaccgtgtcaaaaaaaggtacgccacgtcatttcattcttaaatccttttccttctttcctctttctctctcttacaacaaggaccgggaaa

SEQ ID NO: 29198 - DNA, 369 bp, Zea mays
ctcatggctcaagataacgagggttacattttatatcctgctggttatcctgagcataagattaggataattcatgctaagaagtcttgttctgtttctcaccatgcatttatgtataagaatgagacatctagctctaggcattctacacatgttaaaatgcctaaaaagaaaactcctactacatcaaatgagcctaatgtttcatttaagacttttgatgcttcttatgtgcttactaataaatcaggcaaagtagttgcaaaatatgttgggggcaaacacaaaggctccaagacttgtgtttgggtacccaaggtgcttgtttctaatgtgaaaggacccaagaccgtttgggtacctaagaac

SEQ ID NO: 29199 - DNA, 454 bp, Zea mays
  unsure (1)..(454): unsure at all n locations
tctctaagtcacctgcggcatgcaagcttatgaagattcttcatccaacatgggctagtcggcggtgccagagccaacccatgttagtcttagcaattaagcatgtgttgagttcagctctatcaaaatctactaagtatagctgaccctctaacacacccttaaatgctattgaatcatcacttcttctaaagacagtgacacctacatcagtaaagagacagttgtagcccattntgcataattgagatacagaaagcaagttgtaatctaatgaatctacaagaaaaacatttgaaatagaatggtcaggtgatatagcaattttacccaaacctttgaccaaaccttgatttccatccccgaatgtgatagctcgttggggatcttggttnttctcataagaagagaacatcttcttctcccctgcatgtggttggtgacccactatcga

SEQ ID NO: 29200 - DNA, 489 bp, Zea mays
gacctataaaactcagctactcctccctggaagggtcgttgatcatcgccaagattttgatgcccggaacatacaagctggccaacgatcaaggcgaggtctacaacaacgcttggaacatccgacagctacgtcgcttttacccttaagatgttttcaagtcgttcatatacctcgttttctttacatacacaaataaagtctaaccgtcaaggaagggtcagccttgcctcagcaaagcccgacccttcttcgggggctagaaggggggaaccccctctgcgtcttcctcggaaaattttttaccaagaaagattttctaccaaaacgactttcgtgccttctcgactatatcgataacagaatcctgcaaacgggtaagagtgcgctaagcggcaaggtcgaccgagccaagggactcctacgcctccgggatacggatacctcactcatcaccttccgcgaaaagcaactctcgctcgggtaagc

SEQ ID NO: 29201 - DNA, 313 bp, Zea mays
  unsure (1)..(313): unsure at all n locations
agcttctagagggagaacatgtgatagggttgactatcgtgcaattcttataagatagaccttgtgcagcttgtcaagcaggtaaacaagtgggaggagcgcatcacagcaagaatgtgatgaccacttcaagacccctggagctgctgcatatggacctcttcggacccgtcgcctatctgagcataggaaggagtaagtatggtctagttattgttgatgacttttcccgcttcacttgggtgttctttntgcaagataagtctgaaacccaaaggaccctcaagcgctttctcaagagagctcataatga

SEQ ID NO: 29202 - DNA, 414 bp, Zea mays
  unsure (1)..(414): unsure at all n locations
ggtgaaggttcttcatccccacatgtgctaagcggcgatttcactttcagcccatgctagncttagctattaagcatgcatctagaccggcctcttcttttgcaaaatcaactaaataaagtttgccgtctagtacacccttaaaagctaatgaaccatcgcttcttctaaagacagacacatctatatttgtaaatagacaattatatcccatatgacataattgactcacagatagcagattgtatccaagactctctactaaaaatacattagagatagaatgctcattagaaatcgcaattntacctaaaccttttaccttgccttgattcccatcaccgaatacaattgaatcttgggaatcnttattcttgacgtaggaggtgaacatcttcttctctcccgtcatat

SEQ ID NO: 29203 - DNA, 402 bp, Zea mays
cacctgccgcatgcaagcttgccttcgcttgagtctatcatccgcagtccatctgagttgtggagcgtgccaatgggaaaatcttcacagccatcaagaagatgctcctcgacgagaaaaaaggcagatggaccgacttgttaccggaggcagtctgggcgctaaacacaaccgaatgcagggcgaccgggttcactcctttccgccttctatacggatcagaggcaatgactccgcaagaaataaaacatgggtcttcgcgcacagctccgtcagccacccctgacgtcgatgagccaacctccaaagatctcattgacagagaccgggtcttctccctgcaagccttgaacaaataccaagcccagaccaaagcatggcgcgaccgcgcagtcatcccaa

SEQ ID NO: 29204 - DNA, 472 bp, Zea mays
  unsure (1)..(472): unsure at all n locations
ctcagcttcggaatatcacaacttgcgttctcttcaggagcaggaacttgtcctgtctatgtcagcacctcacaatagacatatctcgaagataccttcctctcatattatcaagatgactctgttagatagttgtntacccgaagactgcatgacttggtcgccagggtcgatcttcagagtcatcgcctccactctccacatcatagctgtcgctatcatcaatatcttcagacaagccttctagcatctctttagaaatcatctctgaatatgttattgctattgactcaacaaatcctgcagtcttctcgtcaacgagcttctcctctacagttagggttgtctcagcaactttcttacttgcttgagacatcttttcttcggagatggcgaatatgtatccctccaacctgaacttagatagcttgaaaaactaagcaagcgttgatgagcaagagctatataattg

SEQ ID NO: 29205 - DNA, 457 bp, Zea mays
  unsure (1)..(457): unsure at all n locations
atagctntcagcccatttctggaggagaattataataaaataaaagcggagccattacttcaaataattaacgtgcgtgcatgcacttgagttttacttttgcgaaaagatgcactaaatttaaatgccgcactattatgactctgaagaaaactaaaaaaacaaaccttgtagcttgccgactaagaaaccttagcttttagccaatttttggaggaaaaaaagcgcagaaccattactgctacaaataatgtgcatgcacgtacttgagttttactttagaggccgtttggatatactcattttagaggaattataatctacttaatacttnagaaattaacatttncaccaactcttaaagtttaagtataaacctatatcaaattaatagggtgagggctaaaaaatggatttatgtatcaccagactatatttttattcttgaaaattataa

SEQ ID NO: 29206 - DNA, 481 bp, Zea mays
  unsure (1)..(481): unsure at all n locations
agatactcagctcacatgtctcgtatgattcanaatcaaacgaagttaaaagcccatcagaatgaagcttcttcatgcgattctcacttatatgacccaaacgacagtgccacatgtaggtaggacttaaatcattaggccgaggccttttagcactaatattacagataggtgcatcatcaagaattaaaatgaataacccattaataatggatgcaaaagccacaaacatgccattcttagagatcacacaaccattggtttcactcgcaaatgaataaccatccttcatcaaacatgaaggagacataatgttttgactcatactangaactagataacaattatttaactccaaaatatatcctgatgggaggtggagttgcatcgtcccgacggtcaacgcagcaactctggcattattgcctacccggaaatcaacttctcctctttcatgctttacttcttatcatcctgatcg

SEQ ID NO: 29207 - DNA, 425 bp, Zea mays
  unsure (1)..(425): unsure at all n locations
gcttaaggatattattcaactaaagtaagatgatattgataagaggccaaagtatgaaaacttcctctccttcagttgttttagtattctatccttagtgggatgtaccatagtataggttaatttccttgcaatataaaatgttcaacagtgcatataactctgagatcaactatatgtgtgcactagtttaaaggaatttaatctatccttttgggtttcaagaatgatgattcattctccatccacatataaggattatcatttgagaaaccctcccttgtttttctaatgctctcttttctaagtgtntcaataacagtccttccaagtgttttcaagatggatgtaanatctacggatataagagtcttggttgttcaatcatcgagttcaatcgatctcatatcaagtatgatcgaatc

SEQ ID NO: 29208 - DNA, 463 bp, Zea mays
  unsure (1)..(463): unsure at all n locations
acacctagtcagcgggcgacactgaatgaccctcatcttttttctttactttggtcaacttgattttctacgcctctttgtgtttcttagccaactcatccaccttcgacaaggaaaatataaggactcaatactagaagaataatgcaaaaataaatgaaaggtgaataaccaacttgttggggccttggtcttttaaaggtccttaaaaacacgtttaaccattggttgccaagtattataagagcttcggcactagaacaccttcgatgcaggacattagaggggcgacgaagctaactntgtcatagcgacacagggagacgatgcaaggaagagtcatcctgaatgctaaaagcanaagacaatgttgcccttgcattatttgtaaatcatgtgtgtagtcctcgtgggtgtaaatgtaatctcgtacgaagttgacgattctctataatagataata

SEQ ID NO: 29209 - DNA, 335 bp, Zea mays
  unsure (1)..(335): unsure at all n locations
tctgcagattatgtttccatttctttgtcaatttccaagacatctctcttggtagactttgaaagcccactctcagtctccgctagattnttggcagcttctgcctcagtttgtgtctctggaacttcagcagctatcttcgaagtagagcttgaagatttatcgttccagtacatctagcacgttaccattctttcctcttggggttgtcgaaggcttttgtgcctcgcattgcattggcactcaatcttgtgaagacaagattcgatgtcttgctttcacccttgtctttatttccatcccgatatggcggtctcatatcacagaatcgctct

SEQ ID NO: 29210 - DNA, 388 bp, Zea mays
  unsure (1)..(388): unsure at all n locations
ctctctagtatggaaaanatcgcacatggcacggcatgactcttcaataaaattcagccacctacccaaaggagccttatatgaagactcgtctttgaagtcaaaagctaatataacaagttcatctatacactccatctccttgggcactttccatccaatctgagctggatataaattataatcaagcacctcttgaactagatctagagatccaatcttcttaatgattgtactgaaggctttgaaacattcatcagcagcttcgctcatctcacacgttggcctctntaaagcaaagctcacgtccaaaggtctcctcagcatacccctaaaaatgctcgtgttggncaggagtcaacatcggcatacaactattgatttgcca

SEQ ID NO: 29211 - DNA, 408 bp, Zea mays
  unsure (1)..(408): unsure at all n locations
gagtcacctgcagcatgcagcatgctcactgattctgaatctaagatcatcttgctctatcttcgtgacaagaaagagcttcagcaaagataaaaatgttcaacttcgtcaaaacgcaaataattcaacatctaatggccagagtacgctcgacagctagagttactcgtgaaagagacgaagccgaagctgctgaaactgctccgatttccgaagttatgaggcggtggggattggttgtgactgaaagcgctgctgacgaagaatcacccgctgctgaaaccgagcatgcagatattgaagagggtgatgctaatgaaggggaagttgattatgatattattatgccatcgaagccccaccatctggattntgggaaatcaactgtgtctgaagctgatatgacta

SEQ ID NO: 29212 - DNA, 477 bp, Zea mays
  unsure (1)..(477): unsure at all n locations
tactacgagcaccgcggagcaagataacatattcctcatccatctgggaagagacacgcaacatcaaatgcactagtcgcgtgaaggtcctcgctggtccaaaacgccgacatcactaatacaaggtcaatacctcctaatctctcaaagtattcaaactttataatgatgcactatactgcctatcataactttagataatgttttatgttttgaaagagtggatgtattgtagaaacacttgttcttatatgtgacaataacgagtgtttgaatgcactagagttaatacttacttggctaaaaatagctagtggaattagctagctaacaaatactcctccgtcctaaaataatattcgtttaaggctgattttggaacatggaccactgaacgatctatggagagaaattctcttgntattcataattgaatcgcaagacaattctcccccaggatcctctcgtgatccctga

SEQ ID NO: 29213 - DNA, 368 bp, Zea mays
  unsure (1)..(368): unsure at all n locations
ctgcagcttgtagtaaagaaaataatgaacagtctctggccgaaatcagcccaagtcggcccaactacagcagaaatgcgcccgcgcgcgctcgaccacggcgactntgcacaaacgaccctggcgccatgaataaacacagaagaaacccccgcactattttggggagtcactgacagtttcagaaaagcccctgcgtttctattcttttacacgccgacaccctcgacagcggatggcgtcgtgcagagctccgacgagcacgcgcatcggacaaattgctcaaagactggcgcccttctttggccgaacncaaattcaagaatctagtgagcgttcccctccactaattccaataatggttactc

SEQ ID NO: 29214 - DNA, 402 bp, Zea mays
tctagatatgtcgaagtgacaaatgatgatggtgtatttgttgttacgaaggtcacagctaagcaacttcatcggttgctcatcattcctcggctttcaagggtgttcctcaacaaggaaatagctctgcatatgacgtggccaaagaatggtgtacgtctcgtcactgatccagacataatggtccatccgtcagacggtgatgcatgaaggcatttgacgagtttgatcccgaatttgcaaacgaccctatgagtgtacggcttggtctatcgacggacggattcacacctttcaatagcagtgcaagcccttactcgtgttggcctgtcttcattgtgccatataatcttcctcctgagttggtcaataaagaagagttcatgttccttgcactattca

SEQ ID NO: 29215 - DNA, 351 bp, Zea mays
  unsure (1)..(351): unsure at all n locations
acctgcagcatgcaagcttgcaatttaatcaaaacttggcagagcaagaatattncttatgacacanacaacacaatcagttgagatggcacatcaaatgctatcaatgcgagtccctatttatatgcccagcgcatcatagcttggtgggccatacatgccaatgtctttcgctattctagcgaaaggaaggtgttntcggaccttcagctaaaggccttcgttcacgtctcagtctgaatttcttcacaacacattaatactgcgaggggctactatagggggccttcgtcttctgaaggtcctaaacaacgtgactaatatgtttttcagtgtaacatatactgatac

SEQ ID NO: 29216 - DNA, 267 bp, Zea mays
  unsure (1)..(267): unsure at all n locations
acctacgaatacccatcgcttaattctgtggagaggacaagggtcagactacaaggatgtgccatgtcaccatgcacaaacaanaagaaatagcagaagctgcacctcagcagaaccagccgaaacaggacatgcctactgcttcgaatcactcaccctacataccagagtatgagagtaaccatcctgctacgtaagttgcttcggctaaacagtcgcaggcatactggacacaacctctacctccgacaccactgcatcctgcat

SEQ ID NO: 29217 - DNA, 294 bp, Zea mays
gctgcagcttaagacatatggtactatctttcaaagctttcaaactaagccggtcagagctcatgctctgttcaaatgcgcacaagatcacgaagaatacattcatgcatatgtacgaaggttcttgcgatagagggcacaagcgcctactgtgcccaatgagaatgtcattgaagccatgatcaagggtctttgtccaggacctactgcccaatatttcgccaggaagcctccacacactctggagaagctgcttcagaagatggatgagtacattcgagctgacaatgattt

SEQ ID NO: 29218 - DNA, 474 bp, Zea mays
  unsure (1)..(474): unsure at all n locations
agaagcaagntccagtgtattttgtatctgaggtccttagtgtctcaaagaaaaagtatacagagctggagaaggtattatatgccgttttaatggcatccaggaagcttcggcattattttcaggcatacaatatcattgttccttcttcgcagccgttgaaggatataatgagaaatagagaagctactggacggattgggaaatgggctgcagagctcaacgaattntacattgattatgtgcatagatcttcgatccagtctcaagcattggcagatttcattgccgactggacgccaggggctcatgatgaagaagcaaataaagatgccgaagtgtggacagtgttttgtgatggctcttgtggaatcttcggagcatgtgcagctgctgtgttggtncaccatccaaggtcaaaacttgttatgcagcaagacttgatttcagctgcacgaacaatattgctgagta

SEQ ID NO: 29219 - DNA, 280 bp, Zea mays
ttacatcatacacaagtgctgcgaagagacatttgtctaagccacaagtgctgaaacatcacacgtgctctaataactgtggaaagatgacgttgcccaataagagcttgtatgggtcatcttggattggagtggattgagatggtataacgtgtattgaagtgtaatataaacttactttcctgtcaatctctacaatacacttcaatccacttcaatcgcttttacccatacaaggcctagaaggaaagaaactcgtgttatcctctgaaattttttc

SEQ ID NO: 29220 - DNA, 328 bp, Zea mays
gatttaatttcccagcacgtagcggtcccaccttgcagagtttactggttgtccctgcggtccactgcgcaacgagcgcaagcgggtgtgcgcctggtgtaaaaactctggcgcttcgccttcttacctgcagcactatataaacagacgagtaggtgtgaagttaccacagcattcattgctatttgcactgtcttcctgccaaatattttaaccatcaccgaagcttgtctgttagaaccgaacgaagctgtcagttgaaacctgcttcggaggaagaaaaatttaaagttcacaagttcataattgatggccagagtccgctcta

SEQ ID NO: 29221 - DNA, 365 bp, Zea mays
  unsure (1)..(365): unsure at all n locations
gctctctgacccgacagaatttacttgagaccaagatcgtcctctccagacttcggccgcccgcttgcgcgcgtagaccgagaaatccgatgagtcgttcttcaattcctcgcacacacaccctgcttgatccctggtgaagctctctgacccatttgattggtcaattgtgccctggataggccggactcctcgccgccgacgagctccctcgcctgcgcacgtgggccggccgactcaaaccatccccaacggcgacgcgcagatcgccgtgaccctcaagacctcccctacaccctcnggcacctcaccggagtagtctcgtcgccggtaagcncctctgctctttctctccgcgcgggaac

SEQ ID NO: 29222 - DNA, 214 bp, Zea mays
acccatgttagtcttagcaattaagcatgtgtcgagttcagctctatcaaaatctactaagtatagctgaccctctaacacacccttaaatgctattgaatcatcacttcttctaaagacagtgacacctatatcagtgaatagacagttgtagcccattttgcataattgagatacagaaagcaatttgtatctaaagaatctacaagaaaaa

SEQ ID NO: 29223 - DNA, 376 bp, Zea mays
  unsure (1)..(376): unsure at all n locations
gcttctanagggagaacacnatttaagantaacatatgttcactttgagaaagatagggattgtagcgcatgccaagcaaggaagcaagttggtgttcatcatccacacaagaacatcatgacgactgataggccactagagctcctacacatggacctattcggcccaatagcttacataagcatcggcgggagtaagtactggctagttattgtggatgattattctcgcttcacttgggtattctttttgcaggaaaaatctcatacccaagaaaccttatagggattcttgagatgggctcaaaacgagttcggcttaaagatcaagaaaattataagcgacaacgggacggagttcaagaactctgaaatc

SEQ ID NO: 29224 - DNA, 425 bp, Zea mays
tttctgagatactaggggcttcggagggagaattcactctatgcatgtcagatcaatccacagctccagtcagaatgacgacaaaagaagccagcttcagaggacacagcacacctcacagtcttcaggacagcaacaaagttccttcaggccaccagctccaatgggcagaggcggcaggggctttggaggaagatatggggatcagcccagaaaaatttattgcttattctgtggtgaggacaaaggccacactacaaaaacctgccagatcactattctgaagcaaaaagagattgccgacgcagaagctcggcagaatcagccgaagcaagtcctacatactgcttcatgccactctccctacataccagaatatgtgggcaacaaacctgcagcttctattgcttcggcaagccactcac

SEQ ID NO: 29225 - DNA, 267 bp, Zea mays
caccgaacacaatgtcatgcgttccgggtaattgagcatggtcaagcatagagggttgagccgatgagtatcacgagcatgtatgggcgctaaaacatgattaagaagagcatgagcggacctaagatctgctggccactgagcgcggaagatttttgtttgccggagactgagaaggggaaaatggtgtcgcggcgggctctggtgaaattaggaggtgaggttggagctacacggtcgcaaagtgctatcgattcaccgtgcact

SEQ ID NO: 29226 - DNA, 468 bp, Zea mays
  unsure (1)..(468): unsure at all n locations
cacgagctngaaccgaggacccgcgccaccggaatatctaaatctttacaccggagttcaggaccccgccggcgcacgtggaccgggtaagtcactgcgccatttttcgattcaatgcacagatagcctctacattaccccgtgaagctaaccgtgccattggattggactagatcgccgtggtttggccggaatacctgccgccgacgagagcacctgcctgcgcacgtggaccagacgattccggccactcccgccgtcgagccatacaccgctgtgaccgccagaacctctcggagccaaccccgcccatcaccggacctctctcgccgccggtaagccgcgccgcccttttctttctcgcgggtactggttaaacctagggagggaccgcgtgggataagaagagaaagctatggggttttgcgcaatgtcagtgactccgatgaatagtagcgcgcgggtata

SEQ ID NO: 29227 - DNA, 142 bp, Zea mays
  unsure (1)..(142): unsure at all n locations
cacctgcngcatgcaagcttcaacggtcagaatccaacggcagtgatggcgtttcatgtggcactttactgtcctgtgtgcaccggactgtccggtgcgccatcgagcatacagcctcccaacgaccacttttggtggtttc

SEQ ID NO: 29228 - DNA, 455 bp, Zea mays
  unsure (1)..(455): unsure at all n locations
gcttgtacaatgttgcggaacccacaacgtttcacgcacatattatttacagttgtgtaatgaatcatacgattggntcacattcaaatatgatatgtcaatctctacttatctcgatgaagaaagcagtctacaacatcacgagggataggtatatacaccatacaaactctactcgcaaattctgttggaacatgtttatattactcttatttaaacaatgaaaatgtatgtccataacaacgtataggtacctaacttactactaatgaaaaggtaaggggtatgctgaccctctctggatctgcctttcctatcttcgacagatgcactcaacacttttggcaaaaccattccagcctggactctctatctcttcccgctcttgttcaatccaccacgctcgcatgccacgactttagcccctctcgccccgacctgctccgaacgatcat

SEQ ID NO: 29229 - DNA, 474 bp, Zea mays
  unsure (1)..(474): unsure at all n locations
gtcacctgcggcatgcaagcttcgaatggatggaggtaggatataatcacagactaatattgctcgtttcttatatattttcttatgttttcttcgaaatcggattagatattatcggtaccctaaaacagggtaccccttactaccgtgtgaaggcacggtgcccatgcgactatctctaatcgcgtggtaaactgcacccgacccaccacgtggacggctcccgggtcgccacgtggccagagaagacgatatactccatgatatcaacagtgggtccggacccatgggaaagtgtcggacccctgtacgtacggaccggacctcctggtaagggtcagaacctccacgggcgtgacccccttatgcaaggtccgggccactcacagcaaagtccccgattccgggacaaagaatacccangccttgatcanatcaggcggaggtccagagctgacacgtgtccggaccata

SEQ ID NO: 29230 - DNA, 425 bp, Zea mays
  unsure (1)..(425): unsure at all n locations
tgctcaggccttcttctttttctccatagcaagaacctttcttgtacactaccccacttaaaaagaaagagggtagaactcttgaatcttggggatttgaactccttgaagtacctcataacaaaggtgttacagggccttcttctgttgttgctgcttgagcangctgcggagaaatgactgacacagggttgattctgggacaaccttcttctcatcttctcttcactatcttcttttctcttctcacttttcactcttcactgcctctntctttctctttgctcttcccactcgaggattctatcaaagagtattaccatcatacagaggaagagaccgaagatgttgaaccatatacaacagtcttcaacccaagaatcaccaagcattgtgatcttatgggcgagggagtggaaaaatgg

SEQ ID NO: 29231 - DNA, 389 bp, Zea mays
  unsure (1)..(389): unsure at all n locations
agccacgtcatcccttttcctctctgccacgcgattntcatgcaatggtccacgagccggcctccgtttactccacaagacaggactgttctagacgaaaaccgtgtcactctcgctacctttcttatccatcctcttggtagtgggcccgagcgaagcccgccgcctcctaaccttactctacctccactacgacgtggcctgtgatagcatcccactggaaatggtggcggtcggctcccaggtgccccttctgatgtcgcgacgtcgcgcccctggcctcggctacatccactccatcttccgcacaagaaggccaaggccgaagacagtgcgtcctgagcccccgcccttgccagcgacgactgtaccttcgtcaagcgcgatcg

SEQ ID NO: 29232 - DNA, 494 bp, Zea mays
tgcatgcctgattaataatagttggaataaaggacattacattctgtatcatataaatgaaattaatctgcatcttgcatcgatatttttgtctagtatgttgcttgagaaattcaagttgtggaggatctagcaaattaccattatgtctgaatctaactaattcatatacaataaatattgaatgaaaactgaacaatatattaagatcaattaataaacttataaaccataaaccctttgtttcagactgaagaaatattatatatagctctgacccagcaggaacgcttacctcagtagattgttccagttgtatctggtcaaagaatggcatgatctagttctcagacttgtaatgataggaacttcaagcttgcgtgtctggtaagaatagttggaataaagacattgcagtctaaatctaataaataggaataacctgcatcctcgcatcgattttttcgtctggatgtcgtcgagagatcaactat

SEQ ID NO: 29233 - DNA, 402 bp, Zea mays
  unsure (1)..(402): unsure at all n locations
agctagaagccgaagctcagcatatctcggatntgttaatactactaacanatcttcaagaaaaatgccttgaattcagcaacaagtgtattcaacaactaaagaagattnttcactcagttggagccagcagcgaanaatttaccccctcagctgaagatctacaaaaaaccttctaacatattgagggggagaatgacgagctcgacgaagtcatagctgggcatggcgacttctgtgcctgagtggcttctcgaggaactgctgcagccttcatgaaagctggctgtgatcatgggaaaatngtcaataggccanattntactttgtcaccatcaatcctggatgacatccctgatctcgcccgaagcatctcgaatcgatttgtgaaatgatatggac

SEQ ID NO: 29234 - DNA, 462 bp, Zea mays
  unsure (1)..(462): unsure at all n locations
ntatcanatggacgtgaagagtgccttcctcaatgtgcttatctaggaagaggtctatgttgagcaacctcacggctttgaagatagtgagtaccctaatcatgtctataaactctcaaaggcgctttatgggctcaagcaagccctaagagcatggtatgaatgcataagagattttcttatcactagtggcttcaaattcggaaaagccgatcctactctctttactaaaactattgcaaaagatttgtttatatgccaaatttatgttgatgatatcatatntgggtctactaatgaatctacttgtgaaaagtttagtaggatcatgattcataaatttgagatgtctgtgatgggggagttgaagtatttcttaggatttcaagtcaagcaactccaagagggcaccttcataaccaaacaaagtacatacaatacatacttaccaagtttggaatg

SEQ ID NO: 29235 - DNA, 454 bp, Zea mays
  unsure (1)..(454): unsure at all n locations
agcttatacaagaggatagaggcaagagctcgttcatatgtcatgatataaagaggagtgtacaaacatggagttngtgctctgctgctcaaatgtttatccagaaccgaaggtatagagttaatgaaagaaatacatgcaggtctgtgtggatctcacatcggatctaggccgttacttggaaaaattctccgtcaaaggttttattggccgaaagcagcttcngatgcagcagaattggttcaaaagtgcgaaggttgtcagaaatgtgcaagagatcaaaaacaaccttcgttcttaacacagctcatacaacccacttggccattgcaaaagtggagccttgacttgttaagaccgttaccaccggcccaagggaacctgagatatgttgtagtagctgtggaatattttttctaatggattgaggcgaagccctttaccacaataactt

SEQ ID NO: 29236 - DNA, 412 bp, Zea mays
  unsure (1)..(412): unsure at all n locations
tgtctcaagagggtttgactctgttgttaaggtctggtgtattaacaatggtagttggaagctggagagtgctcttatctctgacatgcacacagattgtgtgagggatgtcgcctgngcaccagttttgggattgtccaagtcgaccattgccagtggttcacaagacgggaaggttgtcatctggaccaagggaaaggatggagacaagtgggagggaaagctcatgcgtgacttcggttcccctgtctggagagtgtcgtggtccttgactggcaacatattatgcatagctgctggcgagaacaacataaccctctggaaggaagggtcagatgggcagtgggaggaggcgatgaatgttgaaccatatgatgaccggcaaggtttctgaatttcttgtagatccatg

SEQ ID NO: 29237 - DNA, 420 bp, Zea mays
  unsure (1)..(420): unsure at all n locations
tgagtcacctgcagctgcagcatgagctgagataaatactcccctcttatgctgttactatcaagaacaagtatcctttgcctcgtattgatgttctctttgaccagctggtcggcgccaaagtattttccaagatagaccttcgctctgtgtggcagaaccacccgaattattccagcttaagtgcctaagtcacgcctcaagggccgtaacacacttaaatcggaataacccgtcagtccctcagatctagtctgatagagccacttaaccaggatcaaattccacaatctcactcgaaggtgagtcacagaagaaatacaataaaacacgaaacctcaaattaagtacggagttattacatanactcgagtttttggagtagcacatatagttcacaaataaagtgcagcggataat

SEQ ID NO: 29238 - DNA, 265 bp, Zea mays
ctccgagcttcgtctccagcctattctcgcccgccttttgccatatcatctttacaaatctgtaaaaatgcttcgggcgagatcaggaatgtcatccagaattgatggtgatagagtggaaatgggcctattgacaatctttccatgatcacagccagcttttatgaaagctgcagcagtgccccgagaagctacccatgcgcagaagtcaccgtgcccggctataacttcgtcaagctcatcaatttcaccctcaatatgttcg

SEQ ID NO: 29239 - DNA, 319 bp, Zea mays
  unsure (1)..(319): unsure at all n locations
tatattctgtatcctgcaaactatcccgaacataacattaagaaaatctatgctaagaaacctcataatgtgtctcaccatgcatgtatgtataaaaatgacgcttccagctctaagaataccgctcatgtcacatcgcctacaaagaanacttcttgctgcatcaaatgaacataatggttcttttaagacttctgatgcttcttatgtgcttactaacaaattatgcaaaatagttgccaaatatgttgggggcaaacacaaaagctccaagactttgtgttgggtacccaaggagcttgtttctaacgttaaaaga

SEQ ID NO: 29240 - DNA, 252 bp, Zea mays
  unsure (1)..(252): unsure at all n locations
aaactcacgctcgacgaagcnaggcatccctcccnagatgcatatattttctctttctctctaccacaggcaaggccgagaagtctcggagaatattgcattgcgacgagagatagcccgcattaacatatacattccgaataccaaatatggattgggaagaacggaaatgtgtttcttcaaataaaaactcattttttataagatatgcgacgaagggtactcaccctcatcaccttgggagtgggatga

SEQ ID NO: 29241 - DNA, 393 bp, Zea mays
  unsure (1)..(393): unsure at all n locations
agcttatagaatttctgagatgactatgtgcttcttaagaagaatccaccctaagcatgtcagatcaatccacagctccagtccgaatgatgacaacgaaagccagcttcagaggccacatcactcctcacaatcttcaagacagcagcaaagctccttcatgccaccagctccaaagggcagaggcagtaggggcattggaggaagatatagggatcaacccacanaaaattattgcttattctgtggtgaggacaaaggccacaccacaagaacgtgccagattactattctgaagcataaagagattgctgaagcagaagctcggtagaatcagccgaagcaggtcttacatactgcttcgtgccactcttcctacataccagaatatgt

SEQ ID NO: 29242 - DNA, 424 bp, Zea mays
  unsure (1)..(424): unsure at all n locations
atgcactgatttcacttacataaagaacagtagaatagatgtccattccatcaagcgtacaatgcgatagtcggtgtgccagctcaaaataatgatcagcttccaaataatcaactaattcaaaatatgccttaccaacctgcatagtcgaccaaaacaaaaataagccacaagcatttgcttaccaaaagtattgaatntacaaaactttctttacgttgatatatgtaatacctaatatataacaagacattacattttgtttaaactntaaagaactaaaatgtatgtggtaatgtntaagggagtcgtcacttgcaataacaaaggtttggtgcttgagtttaagttaacaaactgccaattccaaattgactcaaaaagcaaataaagtgccatagagactataatttagaacttctaa

SEQ ID NO: 29243 - DNA, 313 bp, Zea mays
  unsure (1)..(313): unsure at all n locations
catttgctcccctctaaaagaagtggagaatcagatgtgagttctgttatccattctgattataaccggaaataaaattggaccagcaagagacaggcgtgttcagatatttaagatgcattgtacatttggttgtattgtttgctcctgtcctagtgaatgcctatggttcattctaagttaccattctgtggtaattgtgttgtaaaaactatatgtatcanattatattagtactgtagctgtacactgttagttctttacggaagatttagtctcctggcctcctttnttgtaatataacagtcctatc

SEQ ID NO: 29244 - DNA, 413 bp, Zea mays
  unsure (1)..(413): unsure at all n locations
ggtgacggttctttatccncacatgtgctaagcggtgatgctcacaaccagcccatgctagtcttagcaattaagcatgcatctaggccggcttcctcttttgcaaaatcaactaaatagagtttgtcgtctaatacacccttaaaagctaatgaactatcacttcttctaaagacagacacatctacatttgtgaatagacaattatatcccatattacataattgacttacggataacaaattatatccaagcgactctactaagaatacattagaaatagagtgctcatttgagattgcaatcttgcctaagcctttaaccttgccttgattcccgtcaccgaatatgattgaatcttgngaatctttattcttgacgtaggaggtgaacatcttcttctccctcgtcat

SEQ ID NO: 29245 - DNA, 403 bp, Zea mays
gagatgtttatagcacaaaggagtatatggtgaaagatgattactttagataattaacatacatgattcattatccacaagtcacacagacatgaagtaaaatccttaacatttgttcttattactaaaaaggaatatgcactatttaactatttgatcaaacataggattttgcttcttcatattgaattttattaattatcacttaaaagcaagtcaatatgagaacatttatagcaaaggtatgaaatagattctaatggataagtgcatttatgagaatgtgattaaatgcacatcaagacaaatttagtcctccaaagaatctattcttcaagaaatgataattacagagaataacccattgagaggaactatattaaagagatgagttcccatacct

SEQ ID NO: 29246 - DNA, 332 bp, Zea mays
  unsure (1)..(332): unsure at all n locations
gaggagcacatcacagccagaatgggatgaccacttcaagacctctggacctgctgcatatggaccttctccgacccgtcgcctatctgagcatangagggagtaagtatggtcttagtattgttgatgacttttcccgctacacttgggcgttctttttgcacgataagtctgaaaccttagggaccctcaagtgcttccttatgagagctcaaaatgagtttgagctcatggaaagaagataaggagcgacaaccggtccgagtcaaaaaccttcaagtgaagaggtcttgaaatgaacggtcaagccgagtttccgctcctacacacac

SEQ ID NO: 29247 - DNA, 484 bp, Zea mays
  unsure (1)..(484): unsure at all n locations
agctngacatcaagcgcttgttcctcgattatcatattgttcttctcatccccagagcacacatgagttggacatccacagcagtggctcttgaacttttcataaccatatggtgtctgatcaaaaaggtaaagatgtgatgggacaaagtaagaacgacatgcatttggatgatgtggagatggcacgtgatagtataaatgagggggtggaagctcttgagggaatgggggtctgaaactgtagtaatcatgaagatatgcccggttgcagcaacaatggaactcagaaagatgtgagatatcatgatatggccaagttccacagtttggtggccgataataataagatgagtccattgcctgtggatgaccggatgggattcccatctggcangangatagtatgggtaaagaacatggtttctatagtgcgagtagtatggatccatgtggcgggtngctgatacatactangtattact

SEQ ID NO: 29248 - DNA, 481 bp, Zea mays
  unsure (1)..(481): unsure at all n locations
tcatactcagcaatgttatttgtgcaactgaaatcaagtcttgctgcgtagcaagttataactttggagggtgcgaccaacacagcggctactcctgccccgaaggttccccaagaaccatcgcagaatactgtccaaacttcggcatctttactcgcttcttcttcctgagcccctggcgtccagtcagcaatgaagtatgctaacgcttgggactgaatcgaagatctatgcacataatcaatgtagaactcattgagttccgcagcccattttccaacccttccagtagcttctctatttctcataatatccttcaatggntgtgaagaagggacaattatattgtatgcttgaaaatagtgccgaagcttcctggaagccatcaaaacagcatacagcaccttctccaattctgtataattntccttcgataaactaagaacttcggatacaaagtatattggggcttgcttttgac

SEQ ID NO: 29249 - DNA, 282 bp, Zea mays
ttggagaggattcgatcacttgtgtgtgtctagattagaatgctagagctctagtaagtagttggaaggtggaaaacttggatgacttgaatgtggggtagttgggggtatttataaccccaaccaccaaactagctgtttggtggaggctgctgttgcatggcgcaccggacagtccggtgcgccaccggacagtgttcggtgcgccagccatgtcacccggccgttaaggttcgaccgttggagctgtcttgtgggcttgcctggctgtgcagcggcaca

SEQ ID NO: 29250 - DNA, 504 bp, Zea mays
  unsure (1)..(504): unsure at all n locations
aaaactaagctttaccaatggacgtgaagagtgccttcctcaatggacctatctatggaagangtctatgtngagcaacctcccggctttgaagatagtgagtaccctaaccatgtctataaactctctaaggcgctttatgggctcaagcaagccccaagagcatggtatgaatgccttagggatttccttatcactaatggattcaaagtcggaaaggccgatcctactctattcactaaagctcttgaaaatgacttgtttgtatgccaaatctatgttgatgatattatatntgggtctactaacgagtctacttgtgaagaatttagtatgatcatgacacanaagttcgagatgtctatgatgggggagttgaagtatttcttacgttttcaagtgaaacaactccaagaaggcaccttcctaagccaaacgaagtacactcaagatattctaagcaagtttgggatgaaggatgccaaacccatcaagacacccatg

SEQ ID NO: 29251 - DNA, 483 bp, Zea mays
  unsure (1)..(483): unsure at all n locations
cacctgcggcatgcaagcttcttcttcattctgatgaanaccaagccctntgatcacttcatcattacgaatgttccaactccgagatgcttgcttcaacccataaatggatttctgaagtttgcatatctttccagcattgatcggatcgacaaaaccctcgggctgtatcatatacacgtcctcatctaggtttccattaaagaaagctgttttgacatccatctgccaaatctcataatcgaaatatgcggcaatagctagaatgatccgaatagatttaagcatcgctactggcgagaatgtctcgtcatagtcaactccttgaacttgtcaaaaccttttgaacaagtcgagccttatagatgtgaacatttccatccatgtctatcttcttcttatagaatccattgcattctataagtctaacaccatcaggcagggtcaaccaagttcaaactttgatttcttccatggaatcta

SEQ ID NO: 29252 - DNA, 318 bp, Zea mays
  unsure (1)..(318): unsure at all n locations
ttgggcacacagtctaagntcagttcaacttatcacccacttacttatggtctaacagagagaaccaatcagattctagaagatatgttgtgggtttgtgctttgcaagacaagatatgttgggacaagagattaccatatgcggaattctattacaacaacagctaccaagccagcctgaagatgtcactcgttgaagcgctttatgggaggaattgtagaacttcattgcattgggatcaacctggtgaaagatacgtgttcggtccacatattctgcttgaagccgaagagaacatcacaatggtccgagagaat

SEQ ID NO: 29253 - DNA, 322 bp, Zea mays
  unsure (1)..(322): unsure at all n locations
agcttctanagggagaacacgtgataagtctaaccaatgttcatttctaataagatagaccttgtgtagcttgtcaagcagggaaacaggtgggaagctctcatcacaccaaaaatgtgatgacaacatcaagacccctggagctgctacatatggacctcttcggacccgtcgcctatctgagcataagaggaagtaagtatggtctagttatcgttgatgacttttcccgcttcacttgggtgttctttntgcaagataagtctgaaacccaaaggaccctcaagcgcttcctcaagagagctcanaatgagtntgagct

SEQ ID NO: 29254 - DNA, 404 bp, Zea mays
  unsure (1)..(404): unsure at all n locations
tgacatcttaaataaaatntctgagatcaagtatatttaattcattcctcaacatgcaaaagcgggtcttatcaagtggcttagtgaaaatatccgctaattgatcttccgacctcactccttctaaaatgatatctcctttcgcaacatgatctctaaggaagtgatgacggatatcaatgtgcttggtgcgagagtgttgtacaggattattggcaattttaacaacactctcattgtcacacaacaaaggtaccttttctagaactacgccatagtctagaagagttgtttcatattaaaatttgtgtcaacaagccccacgacaatgtattccttcggcattgcaaggaacactatttgctttggatgccatgaaatagngactctgaagccctaagggg

SEQ ID NO: 29255 - DNA, 462 bp, Zea mays
  unsure (1)..(462): unsure at all n locations
ctgattcaagcttagctacnggtgcataggtttcatcgaaatccatatcttcgacttgtgaatatccctctgccacaagtcgggctttgtttcttgtcaccacaccatgctcatcttgcttgttgcggaatacccacttggtacctaaaacattttgattangacgtggaactaaatgtcatacctcattcctcgtgaagttgttgagctcttcttgcataaccaccacccaatccggatctcttagtgcatcctccaccttatatggctcaatagagaacacacaatagtaatgttcacacaaatgtgcaactcgaaatcagtggttacccccttatgatgtaccaagaatgaattnacggggtgatctctttgattgcttgtagaccctcggtgggcgaccttgacccttattttgacatcttcctgcttgacatctcatccccctgaccatgtcctctc

SEQ ID NO: 29256 - DNA, 350 bp, Zea mays
  unsure (1)..(350): unsure at all n locations
gccggctaatacacccttaaaagctagtgaaccatcacttcttctaaagacagacacatctacatttgtaaatagacagttatatcccatatgacataactgactaacagatagcaaattatatccaagactctctactaaaaatacattagagatagaatgctcattagaaatcgcaattttacctaacccttttaccttgccttgattcccatcaccgaatataattgaatcttgggaatccttattcttgacgtaggaggtgaacatcttcttctcccccgcatatggtttgtgatacgcttcaataatccagcttaacccncggatcataaacctgcagggcaatt

SEQ ID NO: 29257 - DNA, 343 bp, Zea mays
  unsure (1)..(343): unsure at all n locations
agcttagtagcaagctcgccgttattcaccttgcattatcaagctcgccgncagccaccttgcctcgcgccttggcgcgctgccgccatccncgtcgttccagtgtcgtaaggcacacgagctaaggcgcctctctctgtgtaccatatagcaagcagcaatgggtctcagtgttcttgaaaggtgctctcgcgttacagtcgtcgtgtgtaggcatgcgtgtgttntcgttgatatgtttattttcttcacgtatagctaggggttgtgggtttgagttcgagatggtaagatgttgtaatgtagacgatgaatatacgtatgctctgcgtgttgtgcagat

SEQ ID NO: 29258 - DNA, 469 bp, Zea mays
  unsure (1)..(469): unsure at all n locations
tatntataatatatattatctaatacaatattgttttttttatttattatactttttggaatatgtaaaagatagttctttttgaataatctaatgcttttaaaataaggggaatgaatttcgaaatttaaaaaaaaaatggacgatcggacctcctcatcctgcgttggattttaccatgccttgcttgtgaacctcctctcattgacatgacaagtgggtcccactagtactttctatcctccttcacctttctcctttcacgctaaaacgatgcagcctgngagctagttctcctgcgccgccgcctggagccatccgtccggccccttgcctacccgtcctctcgcctcccgcttcagcccgtgcgtggctaccgtgtccgaccgtcatcctccctccattaacgcactcacctgtcgtttcttaacagcggcaatctctgcagtcgtaaagccgtcgttaatgg

SEQ ID NO: 29259 - DNA, 268 bp, Zea mays
attcgaaaaagatagaccttgtgcagcttgtcatgcaagtaaacacgtgggaggagcgcatcacagcaagaatgtgatgaccacatcaagacccctcgagctgctacatatggacctcttcggacccgtcgcctatctaagcataggaggaagtaaatatggtttagttattggtgatgactcttcccgcttcacttgggtgttcttttagaagaaagtctgaacccaaggaccctaagcgcttcctaagagagctaaatgagttgac

SEQ ID NO: 29260 - DNA, 442 bp, Zea mays
  unsure (1)..(442): unsure at all n locations
ccggggaccctcgtcaccggaatagcccaatcgttctacctgagttcaagaacccgccggcgcacgtggaccgggtaagcccctgcaccattttccaattcgttgcgcgcatggcctctttgtcaccccgtgaagctcctcgtgcaccctaattggactatactgccgtggtttggccggagcaggagccgccgacgacccccgccgcctgtgctcgtgaccagggtagctccgaccacctccgacaccgacccgcacaccgacgtgaccgtcgcgacctcccggacgtcactgaccaccccgccggagctctactgccgccggtaagccccaccgccataatctatgccgcgggtactgtttaagccggtcagggagcgcgggttagaattcagttaagtccatggggctntgcgcaatgtcagtgacccacgccaatagt

SEQ ID NO: 29261 - DNA, 453 bp, Zea mays
  unsure (1)..(453): unsure at all n locations
agcttaccctgtcccattctcaatgcatgtggctatataatatagtccttgatcaacaggcctacatacgcatccaatccttaattgacccgggcggagcatcacctgttcctaacccaagtctcgatttaagtacttccatccttaagaatgttcctgttccttaggatgaaaagagcatcacagggaactttgcagtaagatcccaccattgctccaaatgaaaatattcttgcacgtagaagtcatcctttctcgagttaaattaaggacaacctctatccacaagatctaagcaaggcgtaagcattttgtaaatcatattttgatacttcacacaagtatctatataggtatggatatcagganagcaatgcatcaagggtttcaagttacttctatgaacctaatgcacatttcactagacttaagtgtgcgaaagtattaaaaaca

SEQ ID NO: 29262 - DNA, 347 bp, Zea mays
  unsure (1)..(347): unsure at all n locations
gctagccctcacgataaacatgtcccgaaagtaccttcctctcatgttctcaagttcactctggttaatggtcgattttccaaagacagtatggcttggccgccagggccgatattcagaatcttcatccccactttccacatcatagctatcgctgtcaccaatatcttcagacaaaccttccaggatctncttaagaatcttctctgtgtttggtttttgccatagactcaataaatctagcaatataaggattcacaactttcttttcttcaacaacttcgtctcttagctaccttcgtttccgcagttagcttcatctcctcagtcattttttccccagacat

SEQ ID NO: 29263 - DNA, 331 bp, Zea mays
  unsure (1)..(331): unsure at all n locations
tatatattcactcataaagaactcattctattacagagaagatggcttgaattgattaaggactatganttggaaatacaatatcaccccggaaaggcaaatgtagtagctgatgctttgagccgtaagggtcaagtgaacaacatcactactcatttgatgtcacaagaattgtgctgggaaatggaacgactcaaccttggattgctcaataatgtagaagcaacggtgatggaagttgaatctactttggaagaagagattcgtaaaggacaagaatctgatgagaaaattaaggaaattaaagctttgataagtttgggtaaagccc

SEQ ID NO: 29264 - DNA, 308 bp, Zea mays
gacgctgtgcctatggcccctcaaagtaaacatgtatcaaccactgactcattgccaaatatatggtgataccaacacttttgtgggcttagagttaaggcatgggataaaaagccatctgaaactgatctcagtcattttgcccgtaacaaagtgcaggcagagatcgagctgaaaatatctgatacagtcgaaggtgagctttttcatgtttctgcagatattcaagaggaaatgactgcaatttgtaccaatcgcggtagggctccttacttctagtattttgaacataagcccttggtgactat

SEQ ID NO: 29265 - DNA, 354 bp, Zea mays
  unsure (1)..(354): unsure at all n locations
agcttgtgagcaatacaagtacataagagagaaagctgcttttgtctatcagccgaagcccatgctcttatgcgatggcatagcagagtagaaggtgctattgggatctcaactatccgaagaaaaagagaanaccttgataaggtttctgtttaacaacaaagatgtttttgcatggtcagctaatgatctntgcggagtcaatagggatgttattgaacactcgctcaatgttgatccatccttcagacccagaaagcagaggcttcaaaagatgtctgatgacaaagccgaaagtgctcggaatgaagtgaaaagactcctcagcgctggagtcatcagagaaagtaaata

SEQ ID NO: 29266 - DNA, 429 bp, Zea mays
  unsure (1)..(429): unsure at all n locations
ngagccaacaaatatcgatttggtatgcaaacttgaaaaataatatttccaccaggtttcttcaatccgatgcaacatctacttgttcacctaccgtacgaagctaaagtaggaggtcctgtgcaatatagatggatgtatcacatcgaaaggacactaaagaagctacgtgcaatggttggtaataagagacgagttgaagggtgcatcactgaagaattcaaatacaaagagatagcatcgttcacgggcctgtactttgcagaggaacacaatgtncaatgcccatacgtgtggtatcatgtcgacgagccccctattagtgatattgaaattnttcaatggaggggcaaaatgtangacccatcacaacatactgtntcaccaacgacgaatggaagactgctntactctacatgtataacaaca

SEQ ID NO: 29267 - DNA, 307 bp, Zea mays
  unsure (1)..(307): unsure at all n locations
caaaacagagcttcattctgagctgctttctccattcttgtttccaactggtgttcctgtgctacctaaaatgaaaatatagtgattagtaattaaacaataagcaaggataaatccacaacatgacagactnttgcaacttatcatcagctagagctctctcaaacaagctgtgtattctattgacagatctagctttacccattcaaaggacaaggcaaagaacaatgtgattacaaaagggtcccttgtacattcaaataaaaaggcagtctcaatgggaagctatacaacaatgtatagcttc

SEQ ID NO: 29268 - DNA, 425 bp, Zea mays
  unsure (1)..(425): unsure at all n locations
tatgaagattcttcatcccaacatgggcttttctgcggtgtctgagccaacccatgttagtcttagcaattaagcaagtgtcgagttcagctctatcaaaatctaccaagtatagctgaccctctaacactcccttaaatgctattgaatcatcacttcttctaaagacagtgacacctacatcagtaaaaagacagttgtagcccatttgacataattgcgaaatggaaagcaaattgtaatctaaagaatctacaagaaaaacattggaaatagaatggtcaggagatatagcaattnttcccaatcctttgaccaaaccttgatttccatccccgaatgtgatagctcgttggggatcttggtttttctcataggaggagaacanntttcttctccctgtcatatgggttgtgcactcgcta

SEQ ID NO: 29269 - DNA, 261 bp, Zea mays
cttctacaaccagaacatgttatgcagcaaagcttgacttcactagtacaaataatattgctgaataccaagcacttctgttggggcttccaaaggtgaatgcaatgggaataagaaaggacacctttaaaactgactctaaagttatttctggtcatattgacaaaaagagcaacgccagagacccgatgctttgaaaatatttagacacagttcgaaagctcgaaacttcttttgaaggatgttctggtcaaaacattc

SEQ ID NO: 29270 - DNA, 439 bp, Zea mays
  unsure (1)..(439): unsure at all n locations
agcttacccatgatgaagcatgtgaccagttaaaatgtcctcgatcattatgcctacatcgagacgggccttaatcgactcagacggagacactacaccgagactttctcttctcgtgcaagtcacccgtccggtctcagctttatcatttaaaaccccaaagtttggtacctagcagaggtacatctttttcgatgttgaacacatcatgaccatgatggatccaccttcagttttatttttgaaaacatctcatccaatatgaagcatcatcttttgttntaaaaacaaaacatttgtttttctaaagcacgactaagcattagaaaaactcttttaataaaacaggtaatcaaggaatggtaaatagtttcaaagaaagaaatgcagcaataggtttaacacccaactnctatcacttaatgcatcattcaagtga

SEQ ID NO: 29271 - DNA, 486 bp, Zea mays
  unsure (1)..(486): unsure at all n locations
tgcactacccacttgagccggatcatccncggcagcactttcttgggctgggcatgtgtcagcaccatccgtgaggtccaagttctctgcagtagccacctctaaagttgacgggccctcagctacttccataggaccaggacgatccaagtcagtctcccgaccctcgagatcgcgctctaaggtcgacgaggcactggatgaccacaacccagcatcaggcacgtcagcgcaaacctccattacaccatcacccactggctccgataacaagtcctctgggaccatatcctcaagagtctgatcaaagttggccagggacagttcttgcagaccaatgagggcagacaaagcaggagagggaactccactactttcaccgctggcgatgaactgccgactggttctctgagtcaaaggaatttcattttcttcctccttatcatccacattggcaacacaagcaacacccccattgggatcagc

SEQ ID NO: 29272 - DNA, 428 bp, Zea mays
  unsure (1)..(428): unsure at all n locations
taccgngtcaaggttagccactctccgtatcatcaaatgttctgtgttgatanttntcaaccagactnttctgtcgcgccattntattgtttcggcttgatatttattgatattntccacagcctaaagtctggtcccttctatagtatcttttgctacgtgataatcagctntgtcttctgccgaagctgctgttcttattgaccccgctttagcttcttcgggagttatagctttgtcaccgaataataacttgaatggcgtaaaacctgttgatctcgatacggtcgtattgtggctcacaccactttaatcaactcatctggccactttcctctgggctgactaaagaatagcttcattattcctgtcattaaaatacccatttctctttcgacaagtccatttgactctggatgtctgactga

SEQ ID NO: 29273 - DNA, 470 bp, Zea mays
  unsure (1)..(470): unsure at all n locations
cgaagaaccttcgngccacctttgtgttatgaagccgaaagtatgcttgtaaacttatctgatataaaggaggatgatataaaaatgtcaagacatacgagatgagtttcacactttgttttatattgtcgatacaatctatactgttcaactcacatcccctctccgaagaccttcatcctctgtattaacactctggagaagtgttaaaataaagacggagggttacgtatttgatttgtgttgccttgatcttcgataacctaaggggattgaaaccaagtatatatatactaggtaattataaatcaatttaacactagaaaaaagaaataatactcacaattacatataccacggtaattaaacaccaaattaacaaagttcattacttattagttcattcaacacaggtataggctttgtttcgctgacaaatggttgctcgttcgagctaatgagctggatcg

SEQ ID NO: 29274 - DNA, 438 bp, Zea mays
  unsure (1)..(438): unsure at all n locations
agctggtagaagtatgtcaaaagagcactctcatacttgtgttggttcactgacagtgatcacgcacgtgatctggagaagaagaagagtacatcacgggtgttgttcttctatggtggcaatgcagtttcttggagttcacagaagcaaaaggtggtgtctttatcatcttgtgaatctgagtacatanctgcagctacaagagcctgtcagggagtgtggcttatcagattggtggcagacataacctgtagtgacgtgaagaagttcaagcctttcatcgacaacaggtctgccgaagagctgagtaagaatccactgtttcatgagagatcaaagcacatagataccaggtaccactacatcaaggaatgtgtggctgatggggtgctcgaggtgcaacatgtangcactgaagatcagctcgccgacatactg

SEQ ID NO: 29275 - DNA, 259 bp, Zea mays
ctcaagcttgcttctgacatggttcaacggcggattatagcaccatatcttgcgtatcttggcatagtcactatgtacggtcccttctctgctccatatcctacctttttgctctgagttccaagtcaagatatggtccgggtaaggagatagaggggggagatagtggctgtgtcagctatgtccaagccgagacaaatatggtgtcaagtccggtctagcgccctagcgtaagcgtcatctccctccacggtggtct

SEQ ID NO: 29276 - DNA, 399 bp, Zea mays
  unsure (1)..(399): unsure at all n locations
ctgcannctgggaccctcggcgtctgtcgtaccttttttttatcttcttttggaacctcgggccgaatcttcggcgtggtagcgtcgcaagactgctgaaccacctcgagtgtataaggctcttcccgagcctcctcagctggccagagaatcttctcactgagttggttgtttggtcgcgatgccttgccctcgggaccgattctaatctgtggttgaggccttgcccataataaaaaacgggagaaacccgggccggtcgggtctctcaactcaactccaggactctttatctcctgccaactgtgagcgtgatcctcgtttatcctgaaaatgcctacccccacgccgtttattgggactcacgccatccacgagggtgcttccagctagactttc

SEQ ID NO: 29277 - DNA, 405 bp, Zea mays
  unsure (1)..(405): unsure at all n locations
agctgacacaccatctgcatctacataacattttgagatcaatatatttatttcattcctcaacatgcaaaagcgggtcttatcaagtggcttagcgaaaatatccgctaattgatcttccgacctcactccttctaaaatgatatctccgttatcaacatgatctctaatgaagtgaagacggatatcaatgtgcttggtgcgagagtgttgtacagggttattagcaattgtaacagcactctcattatcacacaacagaggtaccttttctagaactacgccatagtctagaagagttagttcatatataaagattgtgtgcaacaagcacctgccggcatgtattccgcttctgcagttgacaaggcaacactactttgctntttggtatccatgatacta

SEQ ID NO: 29278 - DNA, 441 bp, Zea mays
tctaagcttcgtagttgacgccctaatggacttagcttcgtgggcatgggtttattcattacctttagaatttcctccacgtcgctggtataacgtggtgtgggggtcccctccccttcagatagttttcgctttggagttgatatttttctcttgacaattttcttcttttttggtggatgatcttcatccttgtataaagcttcggcctctctttttcttctctggccctcagcatccttgttcaactacgcatagtcaggatattcgatacccattgcatcgagcactcggttcagccttcgcttctgacgggtaccgaaggctgctgtcatcagttgatcttctttattcgaataatttccaagaatttcattacacatcacctcatctgtgtccagccactcttggcagggctttttataatatttcttcgaattg

SEQ ID NO: 29279 - DNA, 411 bp, Zea mays
  unsure (1)..(411): unsure at all n locations
agctntctgnatgaaccgcacctttattctgtnagttttctgatccncagagatctattatattgggtcagccacagcattcttaccgcgcgcgtacatacgtactcgtcggaggagatcgatatggcagcagaaccgaatgaagggcgcgagagcgaggaaaaaagctaactgcgaacgagaatngaagaacacaccaataagagactgattaagctaagtggctcaacgagctagaacacagttgttgagggaaggaacagcgcacagtgcgatggcactcatcantttgtttcatgcggcggtcagaggaattgaaggtgatagaagagcgagagagcacgacgaggagcagtcacggggttctttaataagcctcgtcggaagcgatgcacaggagttgtgtgtgag

SEQ ID NO: 29280 - DNA, 377 bp, Zea mays
  unsure (1)..(377): unsure at all n locations
gcttatgaagaatcttcatcctatcatgtgctatttgtcgatgccagagccagcccatgttagtcttagcaattaagcaagtgtcgagttcaactctatcaaaattcactaagtatagctgaccctctaacactcccttanatgctattgaatcatcacttcttctaaagacagtgacacctacatcagtgaataaacagttgtagcccattttgtataattgagaaacaaacagcaaattgtaatctaaagaatctacaagaaaaacattggaaatagaatggtcacgtggatatagcgatttacccaatcctttgaccaaaccttgattccatcctcgaatgtgatagctcgttggggatccttggttttctcat

SEQ ID NO: 29281 - DNA, 327 bp, Zea mays
  unsure (1)..(327): unsure at all n locations
aagaggtctatgtngaccaacctcccggcttagaagatagtgagtaccctaaccatgtctataaactctctaaggcgctntatgggctcaagcaagccccaagagcatggtatgaatgcctaagagatattcttatcgctaatggcttcaaagtcggaaaagccgatcctactctntttactaaaacacttgcaaatgatttgtttgtatgccaaatctatgttgatgatatcatatttgggtctactaacgaatctacatgtgaagagtntagtacgatcatgactcacanattccagatgtctatgatgggggagttgaagtatt

SEQ ID NO: 29282 - DNA, 324 bp, Zea mays
gctggaacatcatgttgtaccttgaacaccttacgatgtcgctcacaatctgggtgaagatcagcaatccagcaccactcgttgaggagagcttgcacagttgccaattcccaagcatgggctgggatgccagacacttcaatctcaacttgaaaaggcagagacaccgccgcatatgagttgagaattctgctccatctcataacatggattctttgtcaatctcatgaataacatcctgaaatatgtttggatgcgtataatccgaataggaaggattcttgataccaaatcaagctcgcgatagattaagggttattctat

SEQ ID NO: 29283 - DNA, 266 bp, Zea mays
  unsure (1)..(266): unsure at all n locations
agcttctaagggagaacacgttatatggttgactttcgttctattcgaaanagatagaccttgtgcagcttgtcaagcangtaaacaggtgggaggagcgcatcacagcaagaatgtgatgaccacatcaagacccctctagctgctacatatggacctcttctgactcgtcgcctatctaagcataggaggaagtaagtatgggttagttattgttgatgactcttccttgcttactagagtgttctttttgcaagataagtctg

SEQ ID NO: 29284 - DNA, 206 bp, Zea mays
cttctggggcacattcaccacaaccattctgccactaatgtggactgcgcctttatggcccacatctgtccaacacatacccgccggatgcgtgcctgtagaatttgcctttagtttgcgtgcacccggggtccataaaacacccaacttgtcccacttcaccatccggcttaaatctatgactgacatcctcatcgatgtctccc

SEQ ID NO: 29285 - DNA, 336 bp, Zea mays
  unsure (1)..(336): unsure at all n locations
agcttatgaagaatcttcattccaacatgggctagtctgcgatgctagagccaacccatattggtcttagcaattaaacaagtgttgagttcacctgtgttatcattaaaattaactaaatatagttgagcctctaacactcccttaaatgctattgaatcgtcactacttctataggcgagaatacctacatctgtaaatagacaattgtagcccattttgcataattgagaaacataaagcanattgtaatctatagaatcttccagaagaacattggaaatagaatggtcaggtgatatagaaattntacccacaccttggaccaatccttga

SEQ ID NO: 29286 - DNA, 448 bp, Zea mays
  unsure (1)..(448): unsure at all n locations
tgcattgcatgtttaaatttcttgtattgcatctatggcttgtctaacctagttgagataaccgccaacaaagcgagtgataaagcttaactcggatcaaacttgacaagtcttacttttaagctcttagcacttaaattcttacttcttatgcaattgttggttcttgaaatatgcatgaggtactgcacttanggggagtattcaaaactcaaatcactcatgaagacccctagtgcaaggccaaaatgcaaatntcaccatttgcctattttctcaaaaaaaaaattatctagcctatggcaaaatattttganattatgagaaaatatatgagggtgtcaatacctgtcccaacaagtgttattttgtgtgtttataagttgggatntggtttggttggatattatatagaaaaaatcaaaaattntcaaacttccctctgtct

SEQ ID NO: 29287 - DNA, 332 bp, Zea mays
  unsure (1)..(332): unsure at all n locations
agcatntngaagcccggaacatacaagctggccaacgatcgaggcaaagtctacagcaacgcttggaacatccaacagctacgtcgcttctatccttaaaatgtatcaagtcgttcatgtatctcgctttctttacatgcataaataaagtctaaccatcaaggaaggatcagccttgcctcggcaaagcccgaccctccctcggtggctagaaagagggaaccccctctgcgtcaaanatttcctcggaaaagttntctaccanaacgactttcgtgctnttcgactatatcgataacggaatccctaaaacaacgagaggaacacttaaa

SEQ ID NO: 29288 - DNA, 438 bp, Zea mays
tctaaagggagaacacgtgatacgcttatcttatgtgctattctaaaaagatagaccttgtgcagcttgtcaagcaggcaaacaggtgggaagctctcatcacaccaaaaatgtgatgaccacatcaagacctttggagatgcttcacatggacctcttcggacccgtcacctatctaagtataggaggaagtaagtatggtcttgttatagttgatgacttttcccgcttcacttgggtattctttttgcaggataaatctgaaacccaagggaccctcaagcgcttcctaaggagagctcaaaacgagtttgagctcaaggtgaaaaagataaggagcgacaatgggtccgagttcaagaaccttcaagtggaggagtaccttgaggaggaagggatcaagcacgagttctccgcttcctacacaccacagcaaaa

SEQ ID NO: 29289 - DNA, 269 bp, Zea mays
tgatcttgcccaaattcgcgaagaattgctcccaatcggagcttgaacaggggcagaggcaacgggaacacgtgttcgaccacagctgacaccaccggttcacgcccgttcgcgcaccgcgctcttccagtgcgcgcccgcgcacactcgccggtccacgaccagccgtgcaccgcgccgcgcctataaagcccttccaggcgcgccccacttcgtcccgctctcaccctcaccggccagccactttcccttagcttcggcgagcttat

SEQ ID NO: 29290 - DNA, 351 bp, Zea mays
  unsure (1)..(351): unsure at all n locations
ttgaaatccttaagggaaaatgcttgaaatggttacaacatgctttcattaatgcataaactgtcttgagcctcactcatatactatgacacaatgcacttcactttctctatgatatagacttgttctcattaacctaattatgtgcacttggcatttaaggccaaaatatgtattcctctcaaggcacatatttagggggagaaatctatattatatagaactatgaacatgcttaatngacatatctcttgatcatatctctntcattttggtacaaatgcatatatcctattattcccgtaccatgactacgactaatatgtntccaagtatattactatgctaagt

SEQ ID NO: 29291 - DNA, 534 bp, Zea mays
  unsure (1)..(534): unsure at all n locations
gtgatcctcttagtcacctgcggcatgcaagcttctaatggtaattaccagtttcggcccactggtgtaccttntcagcaaaggaatntcagtgcctttccatctgcacaaacacatccagttcaacctcactctcacatggcacacatgaatcccatgggccaacaagctgtaccacccacgctcaatccttatgctgtgcagtcatttccaaacagtcagagccattatccatccgaggaacattggcggatggcatctggtaacttcagcccagatggccagcataattggctagccggtggcggagcattaccttgctcagaaaggccatatgtgcaagatggtatgtgttctcccataagctgtttaagaagttatttgcatcaacgtttggactgacactaatagtaaaattctcatgtaggatattcaaggtcaaacattgacagatcttcaattaatcctatgaaccatcaacatactggtctgaatcattttgccgatggagcaccactaccaggtcttttgagt

SEQ ID NO: 29292 - DNA, 440 bp, Zea mays
  unsure (1)..(440): unsure at all n locations
ttcatgagaatatgaataccaaagtgaactntagtacagcttatcacccccagactgatggacaaactgaaaggactaatcaagtattggaagatatgttgagagcttgtgcccttcagcatggaggaagttgggataaaagtctaccatatgctgagttctcatataataatagctatcaggccagtctgaagatgtcaccttttgaagcgttatatgggaggaagtgcaggactcctctacattgggacaagactggaggaagacagttatttggacctaaacttattcaagaggcagaagaacaagtctgtataatcagggagaatttgtgggtagctcanaccagacaaaagagctacgcagataatagaagaagaccactggaatntgaagaaggagattatgtgtacctcaaggtgtcaccacttcgtggaatg

SEQ ID NO: 29293 - DNA, 475 bp, Zea mays
  unsure (1)..(475): unsure at all n locations
cacctgcngcatgcaagcttaaagacatgttggtcaccagttntcanatgtttcatacgaagtctattcactgctcaagccttgttccagtgcacacaagatcatgaggagtaccttcacgcatatgtccgaaagttcttgcgtctgagagcacaagcccctatagtgcccaatgaaatcgtcattgaagccatgatcaaaggcctttggcctgagcccacagctcaatacttctccaggaaacctctccagactctatagaagctgcttcataaaatggatgagtacatctgggctgataatgatttccgccaaagaaaggaagaagcctataagttttctgagatgactacgggctttggaagaagaatccaccctatgcatgtcagatcaatccacagcttcagtcagagtgacaacnaaagaagccagtttcagaggccacaacacagctcacagtcatcaagacagcaac

SEQ ID NO: 29294 - DNA, 388 bp, Zea mays
aagcaatttacctcgaaattggagcaaaagagatttccgatgatatgacgccaccggtagctgcgtatatcagcctcaagcttccgaaaaccgacaccttttagatagagtgccgattatatttcgcccgtcacgatcgcgaatacattctaaggctccttcagcaattccaccaaagagcatagctcctggctggtagccacaagatatcgcatactcatgtagctccttcttctcagcctcggacaattcttgacccaccaggttccgaatgtcaaagtctcatctttctgaagcagcatcagcaatctttttcatttgtcaggcactgcagccatgaccttctttgctactgcaactatctcatatgcagccatatccgaaagaa

SEQ ID NO: 29295 - DNA, 414 bp, Zea mays
  unsure (1)..(414): unsure at all n locations
atgcaagctgtaaagtaacatatttttagttaattattctatgaatgagatttgtatctatatattacaaagcatcaaagtgtgttttaaacatgcaaacacacgattattttattaagctggtttgtgttcatcctttactttaatgtaacatatgtaactaatatgagtgattgaaaaaaatactttagtgtgatatagtcttgttattatttatagttatgtgtatattcatgagcgaacacgttgataaaattntctagctccgcccctgtactctacttctctatnttgtagtgagatgagctatggttactccacctattcctgcttcattattggtattaagtggtcatcgattatgtatgaaagtatgacatagctaaatgagtataatttgttcaatataattat

SEQ ID NO: 29296 - DNA, 476 bp, Zea mays
  unsure (1)..(476): unsure at all n locations
tatagaccactcaagcttcggaggaaggttcagctcctagcccaagaggttgttctgtttattctgtatggaggataaaggacatacaacaaggatgtgccaagtcataatccagaagcaaaaagagataactgaagctgaagtaaagtagaatcagccgaagtaagtcctccataccgcttcgtgttattctccatacattcccgagtatgtgggcaaccaatagccgacaacatcagtcgcttcggcaagccactctcaagctgcatgggtcccattaccgccaccaccacctatggcaccagccctgacccacaatcagccgctagaagggcaccgccaaacacagcaacagcatgacgcgcgtgaagaatctgaagctcgcacagtcaacagcattgtgcctgagtcaagggcacattactgaagtcacacggggggctccattacaaaatntcatacctaatgtactaatt

SEQ ID NO: 29297 - DNA, 362 bp, Zea mays
  unsure (1)..(362): unsure at all n locations
catgcagcttatggttggaggtccatattctgaaaggatataattcggacatggtctatctctataccatgttcatgaataataaatcctaagaacttaccagctcacactccaaaagcacatttacgtgggttcatntttaaaccgtaccgacacattttatcaaagaatttgcgcaaatcagctataggagaactaaactcagccgattngactacaatatcatcgatgtaaacctccatagtgtttcccaacaactcgtataagatcaaatttatagccctctgaatagtagcgccacgtatttttagaccaaatgtcatgacaacccattcaaataaaccaatgaatcctggacatat

SEQ ID NO: 29298 - DNA, 318 bp, Zea mays
  unsure (1)..(318): unsure at all n locations
agctntactcaacagcatactctgcatacaaacaaccttcgttagagaacatctntgctgttaaaaacaataaagagttaagaaaagttgcttaccttgagatcggaatagaataagctaccgatgatgtgctgtcgtcagtagtatctaatgtccgtctcgagcttgaggaaaccaatactctntgatagagtaccaataaccttcgctctggtatgatcccggacgcatcccaacttttcgacatcgacgccaccgaagagaagtgcccccgactgatacccgcaagatatggcatattcttttagctcttctttt

SEQ ID NO: 29299 - DNA, 410 bp, Zea mays
  unsure (1)..(410): unsure at all n locations
ctcagcttaaggactgcttcgcaggagagcttccgaacgtgaagtcttgttctgtccacggagtcgctttatccgagcgcaagttacttatcgcagaaggtgatgagtgaggtatccgtatcccggaggcgtaggagtccctcggctcggtcagccttggctgcttacgtgtactccgtcgtttccaggatccgctttccgaagtagtcaagaagcacgaaagaaatcctgctaaaaagagaatccttttcgaggaaaaattcgacgcagagggggtctccccccttttagcccccgagggagggtcgtgctttgccgatgctacgccgacccttccttgacgactaaactntgcgtacgcgcgaggtatatgaacaacttgaaaacatcttaagggtagaagcgacgta

SEQ ID NO: 29300 - DNA, 357 bp, Zea mays
acttgatgaacagtggttgagggtctccactccacaatgtccttgactttgctggagtctaccacaatccctctggcagatagaacatgtcccacaaattgaatttcctccagccaaaacgcgcatttgctgaactaggcatacaactgatgattcctcatgcgcgttaacacagtccgtaaatgttgggcgtgctcctcttcattcttggaatatatcaaaatgtcatcaatgaagaccaccacaaacttgtctagctcgcgcatgaacaccgagttcatcaaatatgtgaagtgtgccggagcatttgttaacccgaaagacattaccagatattcaaaccacccataccgcgta

SEQ ID NO: 29301 - DNA, 456 bp, Zea mays
  unsure (1)..(456): unsure at all n locations
agcttagcaagtgcgagttctggttcagtgaagttctattcttgngtcacattataaactaagaaagagtggctatggatccaaagaaggtaacaactatcttggactggaaagcaccaaaagatgtctgaggaaccaagagtttcattggaatgaccggttattaccgacgtttcattgaaggtttctccaagattgctaggccaatgacaaccttgttggcaaagaaggttgagttcaagtggaccccagcatgccagaagtcctttgagatattgaaggagaagttgacaacgacaccaatactgattctgccagatgttcacaagccgttctcagtgtattgtgatgcttcgtataccggactgngatgtgtgttgatgtangaagggagagtantggcatactcatcccgacagttaaaagtcatgagaagactatctactctgatctgag

SEQ ID NO: 29302 - DNA, 497 bp, Zea mays
  unsure (1)..(497): unsure at all n locations
ggaccttaaatactcagctggaagagtgtgtggcctttgctggtggctttcttattatcagtttgagcagagttatggattgacctaacatgcctcgggtgaaatcttcctccgaagcccctggtcatttcagaaaacctgaatgcttcctcccttctttggcggaagtcattgtcagctcgaatgtactcgtccatcttctggagcagcttctccaacatttgtggtggcttcctggcaaagtactgcgctgatggtcccggccgaagccccttaatcatggcctcaatgacaatttcattgggcactgttggcgcttgtgctcttaggcgcagaaacctccggacatacgcctgaaggtactcttcatggtcctgggtacactggaagagagcctgagcggtgactggctntgtttgaaatccttganagctagttatcagcatatcccttcatttctgccaagaagtgattgtccctggccgaagagaagagta

SEQ ID NO: 29303 - DNA, 330 bp, Zea mays
  unsure (1)..(330): unsure at all n locations
actcttcgagttttttatgctgaagaccctgagcatctgtttggtgaaggcaagtgttctctgacccattatgtcccatttactttataatacactgtcccgcatactatgaacaacctaaagatttactagctntctatttaccttgtccttgatttaacctttgggttattatggttagcttcatgctattgctttactttaatcaatgaacatgatgtgaacacttatgatacgatgttgccattatgattatgatgttggactggtgatactttaaggggctcgagcggtttctcgagtgcctctccgtaaagacctgttcgttga

SEQ ID NO: 29304 - DNA, 284 bp, Zea mays
tttggaatcaaactcccgcaaatcaaattgagtgtctctatgcgtctatgctctcgatgggatctggttcttccctctccctctaagtctcttgccggaccttcattcaaatcactgagtgctcctatgttattctgcatcattgagtacaagtgcaaagacttctcttcctactgtccatcaaactctctcctctacctcaaattgggctagattgtttaatggagaattcagtggtgcaatcaccctgaacataaccctgctactacggcagcggtacaaca

SEQ ID NO: 29305 - DNA, 283 bp, Zea mays
  unsure (1)..(283): unsure at all n locations
agcttatgaagattcttcattcctacgtgggcaagtctgctgtgccagagccaacccaagttagtcttagcaaccaagcaagtgtcgagttcagctctatcanaatctaccaagtatagctgaccctctaacgctcccttgaatgctatagaatcgtcacttcttctaaagacagtaacacctatatcagtgaatagacagttgtagcccatttgacataattgtgaaacggaaagcaaattgtaatctaatgaatcaacaagaaaaacattggaaatggaat

SEQ ID NO: 29306 - DNA, 341 bp, Zea mays
caggagagcttccgaacgtgatgtcttgttctgtccacggagtcgctttatccgagcgcgagttacttatcgcagaaggtgatgagtgaggtatccgtatcccggaggcgtaagagtccctcggctcggtcagccttggctgcttacgtgtactccgtcgtttccaggatccgctttccgaagtagtcaagaagcacgaaagtaatcctgctaaaaagagatcctttttcgaggaaaaattcgacgcagagggggtctccccccttttagcccccgagggagggtcgggctttgccgatgctaagccgaccctctcttgacgactaaactttgcgttcgtg

SEQ ID NO: 29307 - DNA, 369 bp, Zea mays
  unsure (1)..(369): unsure at all n locations
ctcgacatctttaggttcacttatgtatcgcaacaaaacttcactttctgttattgggcctgtcgtgcccgctntgatgaccgcttcaaacatgacaaaagtttatgtcttttgggtgaatggtttgaactttcatggtacaaggaaaatatggggtttattcgcgcctatccgggtttcttcatggctggctttcgggggctgtgttggctcgcaatgcctcactttatttggagtntctgaattgacataccttcttcatatgttatgctagggcccctgtcgatgtatagttggtgtactcgagccctctagtgaaatgtctatgagtgtcaatggataatcattctcagagttntcatcggtcac

SEQ ID NO: 29308 - DNA, 354 bp, Zea mays
tcatgtccatgctctggccttttatcttaacgaaccataaaagatggttcgttacacttgttatcatcctctagatgttcgacttcaacatatttatcaaacgatgaataaatgtcatgacaacctttgacgtgaaatgaaactaaaaccaaaccgattttgaggcggcgaggaagcactgtggctctggcatccgtgagcgctctgccacagatcttggagaaggctctgaagccgtcgcgccgatggagaaaagtgtgggtggttgatgcggctaggaacccctgcagctctggtgttggcgagcgctcggccacataatttggagatggtgagaggcaatggagtcgatct

SEQ ID NO: 29309 - DNA, 83 bp, Zea mays
cctatctccagacatcgcatgaccactggagatagcatatgggaaatattatgggtcttgagaattcccgaattaaatttaag

SEQ ID NO: 29310 - DNA, 436 bp, Zea mays
  unsure (1)..(436): unsure at all n locations
agtcacctgccgcatgcaagcttgaagccatggtaagtagcataagctaattatatattatttgactcaagcctagctacaggagcataggtttcaccgaaatccaaaccttcgacttgggagtatcctttggccacaagtcgagctttgttccttgtcaccacaccatgctcgtcttgcttgttgcggaacacccatttggttcctacaacatnttgattaagacgtggaaccaaatgccatacctcattccttgtgaagttgttgagctcctcttgcatcgccaccacccaatccgaatcttgtagtgcttcctctaccctgtgtggctcaatagaggaaacaaaggagtaatgctcacaaaaatgtgcaacacgagatctagtagttacccccttatgaatgtcgccgaagatggtgtcgacagggtgatctc

SEQ ID NO: 29311 - DNA, 464 bp, Zea mays
  unsure (1)..(464): unsure at all n locations
acacattttgggactaaccaatgttcattttgagaaagacaggatttgtagcgcatgacaagcagggaagcaagtctgtgttcatcatccacacaagaacatcatgacgactgacaggccactcgagctcctccacatggacctattcggcccgatagcttacataagcatcggcaggagtaagtactggctagttattgtggatgattattctcgcttcacttgggtattctttntagaggaataatctcaaacccaagagactttgaaaggattcttgagacgggctcaaaatgagttcggcttgaggatcaagaaaataagaagcgacaatgggacggagttcaagaactcacaaatagaaggctntcttgagggggagggaatcaagcatgagttctcctctccctacacgccacaacaaaatggtgtagtggagaggaagaatagaactctattggata

SEQ ID NO: 29312 - DNA, 388 bp, Zea mays
  unsure (1)..(388): unsure at all n locations
gctgccatcaggaggagctnggaacgaagcgtttatgctccatgagctcagcacgaaaggcaagcttgagtgcttgaccccatcaaggagctcacatccgtagtggcaggggataatgctgtcggtgaaacaagtgggttagttgcacatgaaatgaggttttggctcactagcctcatgtgcaatatggcgaatcaattcactgtgattcccacatggagccaaatagccaatggaagaaaaggcatctgatggggatttgctagtttctcaaaagaatcagcggcaagaatctgtttcaaaagagcccttagtcgtggataggggtggaggtggccaccaaggcatggcacatgagtcctgactccttanggtttctttcacctaa

SEQ ID NO: 29313 - DNA, 459 bp, Zea mays
  unsure (1)..(459): unsure at all n locations
acactatannaatactcaacttgagacatgcctgtgtgtggnggactctantacattctggtatctgaatgtccgaactgaacgaaagaaattctacgatgctcaacaagcggccattcatggcgcatgagatgcctgatgcaccaagcagtgtcagtaaaatactgaccctgcacccttggatgaagggagaaaagcacacgggtcttttcacgtcaccatgacacgaaccgactgatcccgtcactggctcaggagcagcgtcacctccggccgctgtttttgccccaacccgtggaacggatggagctggtggtggtgcaactcctactcctccgcctccgcatccacttcccgcggtgcgacccgtgctgtcggctccgggctctgtatcagattcttcttgtcgccgtcgtcaccgtacttgtgcttccaccaccgctcctcgaactgcgagtg

SEQ ID NO: 29314 - DNA, 336 bp, Zea mays
  unsure (1)..(336): unsure at all n locations
gcttcngcatagcccattccttcatagntggaaatattttgtaagctatatactcctgcactaaatctctagtaccaatgtgctctgcgataatcctgaattcagccagcgcggtttgggttggaccttctggtgtcatattgcattggggtctggtctctccgaagatcagttcaagcggactctggaccagcttctccttgtcatcgtcaactttgacgtagaaccattccgatttccaacctgccggccacttgcttcggtagctgatcacaggaaattttgtagttttccggtaagcaaaattgtaacaaccaaaattctcatggtacccac

SEQ ID NO: 29315 - DNA, 402 bp, Zea mays
  unsure (1)..(402): unsure at all n locations
gcttatcgacctaagatggcaagccatgtcgatctctagtctctggctgtatgtatatngaaatgaggtgaagtaatgagaagcgaanatctttggttgatgattcaagtctctggcgagaccctatttatagacagagggtatgaggcagcatcttttgaatggtagacaaagagaatcctgccatttcatctcctcagtgttgtctctcaaagtttgagatctggcagcagcataaagaatctgtttccttcaccacgcggcgtgtgtttatcattctttttagtgtgccagctattctcccactctcccagtgatctatcacattgccatgctccaactaatggcggcnacaagaatcaacaagttagttactccactggacaatcttgatcttgacac

SEQ ID NO: 29316 - DNA, 203 bp, Zea mays
  unsure (1)..(203): unsure at all n locations
acacctcttacccccaagaaacactcttccctttcccctgatattaaccgacccttcttttcttctaccagatggaagactcctgggttattaagacatcctattgctcaggggaagaaagattccctcacctcttactgagttgcgcgctacgcatggngatccgtaagaagcccgatatgtctggacggataccaccaaat

SEQ ID NO: 29317 - DNA, 374 bp, Zea mays
  unsure (1)..(374): unsure at all n locations
tgcaagcttctcatgtgaggactcaaagggaaattctgaatctcagaccttgatccagagatcaagcgtgttcaccttgatccctaactcanatcctaatggccccattaactaacacgtgcctaactaacccctctgtcgcctgccaggagatggcattgggacacgtgcctcggacacgtcaaaccagagatcttctccttgtgtgcgacagtgagacaaaccagatttcttccctctctatctacctaatccagtcaaccaaacctgctagcctccacacataaacgacagagggacctgagaggaagagatctctcaacgggattatagccaaaatctcanagatttggagccaatccgcgcttgaactc

SEQ ID NO: 29318 - DNA, 501 bp, Zea mays
atggaagctcagaagtcatcaattgtgcatgaagttgtggtggtctccgaagatgttggagtcacttatgacttacttgatagtcctacaagtgaaccactacctactaactctatttgtgataaatgcaaaatttctcttatgaatgataatattgctcttgatgaatcacaaatcattgttgagaatgaagtgttagtagatagagtaaatgctctaactcatgatctagagaaggcatatggtggtaaggctaaattggatttcatattgtgaagtcaatgatgctcacttaaccgtgagggccttggatatgttcccaagaaaggaaagaatgattttataaagcaaaatatattgtttgtgaaagaatgtgacaaagtgtgccacaagtgtcacaagaagggacatattaagaaaaattgtcctacactcaagaatgtatcctccacctcgtttgagcatcgttatgctctttctcataatgcataaagcgttcat

SEQ ID NO: 29319 - DNA, 376 bp, Zea mays
  unsure (1)..(376): unsure at all n locations
ctttatatagatgaagagtttattaaatctacaaaacttagtaagagaaatattactaaaaggccctacaaaaaccccaaatcaattcactaagtgcagagcacactagagccctccattttctctctaagtccacaaaactacccgaatccaatgatcagaagtgttcacctttttaatggcgccaaaaccataaggtctaaatagcaaanaggagccaaattaccttatgagcaccctatacaaatttgaaccgaagccaagctctgtggacatgatttgacatccatcttgtctgcgggtgaatagtgcgacacactcgatttggcatgcgcatatcttgtgaactaaggcatatctcccattggactcacac

SEQ ID NO: 29320 - DNA, 448 bp, Zea mays
atgaagtggcacgcgatcttgcattcttaacctgatcaacactttcttgagcagccgatgtggtgctaaaccgcgcggtaacgagcaaccaaccatgaattgagccatcgaaagggtgagggaattgagcctgcggacaatcactggtctaatagcacttagatgacaaacttcaataccatatcataagttcaactctattgcagtggtttggatcattttctatatttgaaacggcccacagtcgaaccttagtcaggcgatactttaaagtatttatggttctaaagaatgtgtttttgatacagagcacgaatacatgcgtccaattatgcacataataaatacttgcgcatgtaaaaatagaatttacactattatctgtattacaataataaaagttatgacgagacatgatatgacacactatatcggcacggttatggat

SEQ ID NO: 29321 - DNA, 337 bp, Zea mays
  unsure (1)..(337): unsure at all n locations
agcttcaggtcaagaagtcgccttatatgccggcgcacctggtgctagagctntgatttctgctggtgatgctggagtggttcccaatgatgctctacatattgcttcggttggtgatccttcattaagtcaccaactgacttcccatgagttggggcttccttcattcttctccaatctccaggtaattnggctgttcctgatctgactatactccgggtgaaatgctgtccttgcactcatttgtttccaatgtcacgctctggttgatgagatggctggtcagctgagatcgcacggtgcctctgtcccggaaagagctttgtctctaacacat

SEQ ID NO: 29322 - DNA, 461 bp, Zea mays
  unsure (1)..(461): unsure at all n locations
tcgacagcgtcatcaatntcgaccttcngctntcggagactcgaagcgggaccatatggggcgcatgataacctccttgatgtcctccctcgctgtcaagtcgttcttcacataaaaccattcttccatccaagctccgggccatctcttccaaaatgttggcacagggtggcttgcattgggacgggcaataaatccataacaactgaagttgttgtggtcctgttctttacccatggccttcatctcatatagaagttcgtgcatgctgcagaagcatttcacgcttggctctaacccttggctccttactgcccagacgaaaacccccatccttattatggcttcggnggtgatctgatgaaggaagatttggtaagttntcagcacttcaactacaaacttactcaaagggaaccgaagtctagccttgaagatgctccggtagatcacaacttcat

SEQ ID NO: 29323 - DNA, 434 bp, Zea mays
  unsure (1)..(434): unsure at all n locations
ctccatctatattgtgtgatggctgtgtttctgtccagnntccttcggcttttctagcggctgtctgactcccatgaacaagcatgggcccttgttccgaaagtatctttatgcatagatatgctggatgaagtattgcttcgaaagcattaagtgtcccatgaccaatgattgcattgtaagggtattccatatcaacaatgtcaaacacaacctgttcagtccttgtattatggacgaagccgaaagtcactggcatcatgaatntgccgagtgctgcaatctgcctttcttcgaagccacaaagagggtgtgtagcatcatgaatcttgtcttctggctcttgcatcagtctgaacgccttancanatatgatattcattgcactggccaatatcaccagaacattgtggaccagaaatccctngatgaca

SEQ ID NO: 29324 - DNA, 457 bp, Zea mays
  unsure (1)..(457): unsure at all n locations
tataaaactcagctccaagggtgacatcttcaaactggtctaggaattattattatatgagaatccagcatatggtggactcttgtcccaactactaccatgctgaaccgcacaagctctcaacatatccttcagaacttgattagacctttcagactgaccatcagtccgagggtgatacgccaaactgaagtccaacttcgtatccatattctcatgaaaagctttccacaatctagaggtatactgtgatcctcgatcagacacgaacttctttggtactccgtgtaaacacacaatccaagctatacataactctaccaactgagaacctntataagtagtcctgatcgaatgaatgagccactctgtcagctatccacattccccatatggcacatacccttttgagtgcagggaacccaatatgaaaccatggaattcttccacttcatcg

SEQ ID NO: 29325 - DNA, 413 bp, Zea mays
  unsure (1)..(413): unsure at all n locations
actctgcttatctggtctgaaccacgagaaagaagntcttcaagcctgatatggtaaaggagaccgaacagaaagttcatcgaatagttcataatttgaaagaagctgaagctcggcagaagagttatgcagacaagcgacgacagcccttgcactntcaagttgaaggttatatctacctgaaagtttcaccaataaagggtgtatcacgtttcgggtaaaggggaagctagacctcatgcattgaccttgtcgatccttgaagaatggacaagggataccactcagtacccgaacttgccgtgacaaaaggttcacggctcagaaggcttcggtctgacaacatgaaaacgtgtgctaaacaactgaatatcaacatcatcagctgacaaagcaataccgagaacctagtt

SEQ ID NO: 29326 - DNA, 232 bp, Zea mays
cactgagttcaataatattctcatgtgaagctctgtctgtcaacaaccctcgcttcaactctgagcccattcctattttctgagccatactctcatgggctccatccatctgtgctatgtggatttctcatcggttgcgtctggtaatggcattatggctaacaacttatggtgccgcgacgaaaccgagagcctcctgtgggcgcgcacaccaagataacctgcttgcacg

SEQ ID NO: 29327 - DNA, 367 bp, Zea mays
  unsure (1)..(367): unsure at all n locations
agctntaacagttatgcagcanactgactgtacatatacttatcatacatgtatgtgaaaaactgcataactctgcgttgtgtaatgcataaaatggttagcttgtgaaccatgactgtacaaaaaatgactccgttngcagtatataactctgataatgtatataataatgtattggcatatattgatgactattgtatcataagtgtatggacaaacatgcataagactgtcaataattatatcgtanacttcggtcaagaaacatgcatacttcgagggtattgacataacaatattgtacaggaaacctgcagaatcaaatgcaagaaacacacattactttcanacacagttaggacaacat

SEQ ID NO: 29328 - DNA, 413 bp, Zea mays
gaaataattcgtaaaatcgttattatcgtcgcgtgtttcatgtcttatgacataatttatgcatatatttagagatgcaataatacaagttagcttttttagcttctagcatcaatttatggataatagttaaaaaatattagtagacacatattttatgcgaatagatcggacatgaaggtggccaaagaaatatcaaaaatattcttagaatgaatgtattcaatgtataccagaaaaacaaggacgtcaaagcagcgtagattgtacaatgctaatagaataataaggagcttacgatatgatgcctacaagacacatgtgaattagaaaactacaatgaagtggataccacaccacagctatgtctaatgaaagacaaggtgcacctattcattacagtctaaataaat

SEQ ID NO: 29329 - DNA, 345 bp, Zea mays
  unsure (1)..(345): unsure at all n locations
agcttatgaaggttctttattctcacatgtgccagatggtgatgctaaagccagcccatattaagcttagctattaagcatgcatctagatcggcattctctttcgaaaaaacaactaaatagagcttgacgtctaatacacctttaaaagctaatgaaccatcactccttctaaagacagatacatctatatgtgtgaataaacaattataacccatgttacataattgactcacagataacaaattatacccaagcgattcaactaanaacacattatagatagaatgctcggatgtgatggctatctttcccaatcctttgaccttgccttggttctcatct

SEQ ID NO: 29330 - DNA, 446 bp, Zea mays
attcgcaagctttttgacaaggaattaagcatacacctagctcctaatcgattatggtggttgaattgcccaacacacacaattgaactaactactttgctctagtctataaattatacaagtgccaaaggttcacacttaaccaataaaaagaccaagaaatgggttcaacaaaaagagcaagggataaccgaatgcagccctggtctggcgcaccggactgtccggtgtaccatcggacagtgtccggtgcaccatggaactcgacgcccaacttcgcaccttcgggaattttcagaggtgcttcgctataattcaccggacatgtctgatgcacaccggacagtgtccggtgctccagaagagagcgactctgaactcgccagcttcggatttcagctccgctataattcaccggacatgtccggtgcacaccggactgtctg

SEQ ID NO: 29331 - DNA, 247 bp, Zea mays
acatacaggcatcacttaaaacatagatactgcctacctctaagcacgacacctcttaaaagacccattcgaaaacagtgagcattacatggacaaacagtgacaagatcacaaaactggaaagggaggaaacattacagcctgacacctgatctccaagaaactgtggactggttctcaaagaaacttttcctgcaggtggaccgatagacactggcccagtaactaaaaatagttgttagaccac

SEQ ID NO: 29332 - DNA, 324 bp, Zea mays
tcagcttcatcggttcctgggatgcctgctgatgctcatggttctattagaagggccacaaacctcgttaatccatcacttttctcaccattgacgtcttcacagacaacaatggtgtgcactaattctgtagtagcaattgctccacctcaacatccttagactgctcagcagccgcaaagtgctcccttgcttcagccttttctattacctacggcttcaccatctccaccatatgggactccattacttcaacccgttccgccacctaatccatcgccatctcttgcgtctgcaccagtcttgagtccaacactgtctata

SEQ ID NO: 29333 - DNA, 407 bp, Zea mays
  unsure (1)..(407): unsure at all n locations
agcttatcaagtctactttcatatggatccggaattatttcatatctgttctgaggccgccgtaatcattgttttcttaccgagacatttcctgccttttctgcccatggtgctgcgtcaccctaatttggcccaatgggtcgtgtatcaagttaagtccattaaggacgcatcctaaggttgcagcacgaccccaatacccttgtggtcgtcctcccatgtttataaaccccctagccgccaccaagaacagcgggttntgtttagatcaagtttagctctcgctacttgcttgtaagcgcgcgtgctagtcagccgcccgtcttcttgtcttcggaaccccaccatatagtagttngatctttaaacctacatttagatctggtaattcagtacttggtctactt

SEQ ID NO: 29334 - DNA, 477 bp, Zea mays
  unsure (1)..(477): unsure at all n locations
tanacaaaagcatggcgcgatcacacagtcgttccaagggtaattaacgaatgggacctcgtactcgtccggacaactcggacagagtcacggngcaagctagagccaaagtgggagggtcccttcatcgtcaagacaaaggcgtcccccagcgcgtacaggctaacaactgtaatacccaaaaaatgaatacaatgtgtatatagttgatattcttattttgtgtgccataaattcctcataacaagagcatacctataattaagagtgattaattaaaacaaaagatactccaactaaattatgcatcatgttggggtttcattttgtgtgcatttttgtgacaagatgaaactaatgtacaaaatatataggtatgtctaagtccaaagtgggatttaaaatccaaaaggattctagaagttaagaaaagagaaagaacatattgtataaattagagaaaatanatacataaat

SEQ ID NO: 29335 - DNA, 386 bp, Zea mays
  unsure (1)..(386): unsure at all n locations
acgcgctgcactatcatcgactgcaaactagnctgttttttaaaattttttcacatataaatatgagtccaacatacaaattatccattattaccttctggattatcatttgtcactgacaccatacattataattgggatatgcaattaactgtattgacaacacatttgttactcaatcataacccataactcaactataatatgtttgttactgcaacatatagtgtaaaaataccttttaaggacgatggattgattgacatggcccctgtaattataatacttgatttctaaattgataaataatatctcttcaaaacatccaatacaccaactgtttcttgcaatatatcttcgtgcttatggtatatttctaattatgt

SEQ ID NO: 29336 - DNA, 452 bp, Zea mays
  unsure (1)..(452): unsure at all n locations
acgccttgaactaacttataatggcgtgaaaggccttctcaaggaccttcttgaagagtctatgctgagcaacctcccggctatgaagacagtgagtatcctaaccatgtttataagctctctaaagcgctttatgggctcaagcaagccccaagaacatgtgatgaatgcctaagagatttccttattgctaatggcttcaaagtcggcaaagccgatcctacactctttactaaaactcttgaaaacgacttgcttgcatgccatatttatgttgatgatattatatttgggtctactaacgagtctacatgtgaagagnttagtaggatcatgacacagaaattcgagatatcgatgatggtggagttgaagtattttctaggattccaagtcaagcaacttcaagatggcaccttcattagccaaacgaagtacactcaagacattct

SEQ ID NO: 29337 - DNA, 240 bp, Zea mays
atcacctgcagcatgcaagtcttctaagggagaacacatgataagtctaactattgtttctttctaagaagatagaccttgcgcagctcgtccacagggaaacaggtgttaagctctcatcatgcccaaaatgtgatgacaacatcaagacccctggagctacttcatatggacctcttcggacccgtcgtctatcttatcataagaggaactacgtatggtcttgttatacatgatgat

SEQ ID NO: 29338 - DNA, 417 bp, Zea mays
tatatcattcgtaatgcttccgtaataatactttctaaaaaagaagaacgcgaagctcaacactacgcctagtagctgcaatatccgaacggggcattattgttcaacggtatcggagaagatgattatttgtactgtcttccagacagcaaagagatatctgtctgccgggaaatgagcagaatcttctgattcccaacattagaagatgggctctcactactatccaacgatgaattggccgacatcgttagcatataatagtatacaggtgtgagattaattctcgtacttacaaacaaatatttcatttgttatacttaatactatgctccctctgtagggcttgatccttagcaatgccctcacggcccatataatattgaagacaatgatgaccatagctctgacaacctt

SEQ ID NO: 29339 - DNA, 427 bp, Zea mays
  unsure (1)..(427): unsure at all n locations
ctgcagctacataagaattgataaataagaatttgaatcctatgatatagtttcctccccctaaataagtgcatttcagaaaataccaattttgtactcaaatgccaaaaccacatatttgggtcaaagagtgaagacaacatatatcatactattcatagggtgctttgtgtcataaataaacgtgatgctcatgacatattatgcactcatcaatttccttcatcttatgttntacttatgattcaaccccccttttgtcaattatttctcccccttttcaaaagtcttcttacacttagttacataagactaaaggtaagctntaatgcacaatttctcctcctttgtcataaatctcccaaaaaatataaagaatataaagggtagaaattatgagtaatcaagaattgaacacactatcatg

SEQ ID NO: 29340 - DNA, 304 bp, Zea mays
  unsure (1)..(304): unsure at all n locations
atattacaccgcaagaagtctaaaacgtngtatttgcgaccgtatgtaatgctcgattattgtagaccctgcatgatagattactccaatagttagcgtaacgctatatagagattatggggccaagctagtatacccctattcaactnggtgattattttgtgggaagataattctttcagaaaatattacttgccaaggttagtgcgaatataaaacatacccaacagcagtggcgccccatgaagcaacattataaatgactctagttccatccaatgccttccggattctatctttcttc

SEQ ID NO: 29341 - DNA, 308 bp, Zea mays
agcttaaagccatggttattagcatagactaatattatgcgaattgactcaagcctagctacaggtgcataggtttcaccgaaatccaaaccttcgacttgtgaataccctttggccacgagtcgagctttgttccttgtcaccacaccatgctcatcttgcttgttgcggaagaacccattggttcctacaacattttggttaggacgtggaactaaatgccatacctcgtttctcgtgaaaatgttgagctcctcttgcatcgccaccacccaatccgaatcttagagagcttcctctaccctgtg

SEQ ID NO: 29342 - DNA, 472 bp, Zea mays
  unsure (1)..(472): unsure at all n locations
cgcaatgaggagatggcgctcgncatttatagcttccgccanatcctcaaacaaaggagggggagagactactagtcccgctccaagaaggtttgctacaagtgtggtaagcccggtcattntattgctaaatgtcctatatctagtgacagtgaccgaggtgacgacaagaaggggagacgaatggaaaagaagaggtattacaagaagaatggcggcgatgcccatatntgtcgcgagtgggactccgacgagagctcaagcgactcctccgacgacgaggacgccgccaacatcgccgtcaccaagggactcctcttccccaacgtcggccacaagtgcctcatggcaaaggacggcaaanagaaggttaaatctaaatcctccactanatatgaatcctctagtgatgacaatgctagtgatgaggaagataatntgcgttccctttntgccaaccttaacatagctc

SEQ ID NO: 29343 - DNA, 248 bp, Zea mays
  unsure (1)..(248): unsure at all n locations
ctttgagagctcctgtaagagatggccgtgttccatcgtggcaagagctagccgctactaataatnttccgtcagttatgtgtatggtgagcacaagcatattacatatatagtaaccttccatcctttacttnttttctccacatcaaaaatgtgctctgtgtttaggtttccatcctctctgtttacatatattngatacaaaaattctacaaaatagtgaaccaatgccaaaagaanaaaaaaca

SEQ ID NO: 29344 - DNA, 472 bp, Zea mays
acagcttggcgctttgcatggaaagcggggtagccgcctctgtcgatgcagcaatggcgccattgcgagcaaacgaaagctctcgtacctaggcctcagccacagccttcatctcctcggttgtcctcttggcgttgttaacccgagagagcatcttccggagctctgaagaggaagaaaggataaaacaaccaaagacaaagggtacggaagtgtgaaaggggacctaccctcagtggcagcatgctctcacaaaagctcccattcgtcctctccaggtgggcattggcctcaccaaggaaagactcgacctcatcgacctagaggctcacctcgcggagagccacccaaagttgggcctcctcttcccgatggcgatgggctttggttcgggcaccctcgccctcaaagcagagttgggtctccttgctctcaagacgcttggccttagagcggagctcggctagctcat

SEQ ID NO: 29345 - DNA, 314 bp, Zea mays
  unsure (1)..(314): unsure at all n locations
gctttatcttccctttaatgtaaaaatgacgttagccccttatcgatgacttgctttcccttattatagaactgattctttngagacagtagatgaataatttgtgcatcatactgatgccttcagaagtagctgccgagtagtcttgcagtcggtatcggtgttntagaagcaacgccgaacgattggaggtcgacatcagcattttagaagtaataccgagcaatcgaacacgagatcagcgttntagaggcaacgccgagtgagtgtaagttgacgccagcattntataagtaatgccgagcgattgaata

SEQ ID NO: 29346 - DNA, 352 bp, Zea mays
ccttctggcggcttactgactttcatgaatagcgatgggtccttgatccgaaggtatcttcatgcaaagataggcagggtgaagaattgcttctaaagcattgagggtgccacgaccaataattgcattgtaagggtattccatgtcaacaatgtcaaacacaacttgctcaattctagtgttgttgatgaacccgaaggtcactgacatggtgatcttgcccagtgctacaatctgtcttcctccgaagccacagagaggatgtgtagcatcatgaatcttatcttctggctcttgcatttgtctgaaggccttagcaaatatgatatcagttgcactgcctgtgtcaacc

SEQ ID NO: 29347 - DNA, 394 bp, Zea mays
  unsure (1)..(394): unsure at all n locations
gcttatgaagatacttcatcccaacatgggctattcggcggtgccagagccaacccatgttagtcttagcaatcaagcaagtgtcgagttcagctctatcaaaatccaccaagtatagctgaccctctaacactcccttaaatgctattgaatcatcacttcttctanagacagtgacacctatatcagtgaatagacagttgtagcccatttgacataattgagatacggaaagcacattgtaatctaatgaatcaacaagaaaaacattggaaatagtatggtcacgtgatatagcaattgtaccccaatccttgaccaaaccttgatttccatcctcgaatgtgataagctcgtggggatcttggttttctcatatgaagagaacatcttt

SEQ ID NO: 29348 - DNA, 266 bp, Zea mays
  unsure (1)..(266): unsure at all n locations
gtcatgatcctcttgaaatggttatgataatgactanaattaagagatttatgccagatcaacatccgatacttgacaacgggttataacacataaccagataatatggcagaatcgacgaatgatctacagattccgatgataaagccacaacacgattcacaaagataaagatttactagatctaggtgaaaagggaggtcatcaaacaatatcagctacgatgatcaacagaaatgctaggaagctntatgggcaaggactta

SEQ ID NO: 29349 - DNA, 369 bp, Zea mays
  unsure (1)..(369): unsure at all n locations
gctatatgcgaataacatacaaactctcattgacacactagtcttttactgaagtatcaagacacatgcaagctgtctcctaatccttattagaacccagtcaaaggaatgcccatgtgaggccaaccactcgatttggtaactccatagatagccatgagccttctatatgtgcaagtgtggcctcccccaaatactcctagctgtctcgactatcaagtttctagccaaaacacaacaatcctcgttccctccactacatgatgtcgaccgcaccacanaaatagttaatgtgatcttgntagaatacaangctctctggtacaacatacgatgacacactcaaacatcaagtgataanatgatgtg

SEQ ID NO: 29350 - DNA, 430 bp, Zea mays
  unsure (1)..(430): unsure at all n locations
gntaatgagagtgctgagaggtctggattgcctttcaaagctcgattaattcttgatgttccaaatcgttggaattcgacacacaacatgattatggaggccattgagtacaaagttgtcttgaagagatatgctgaggaacaacttgagccttctccagatgatgaatagtggacaaattctgaggcaattggagagtttcttgtggcatttgaggaagctacaaaagcattctcagcacatagaagtccaacatctcatttggttttgcataatgtgttatgtatccatcaagctctaagatatgaaaataggcaaatcaattgtgtgcttgatgatttggcactagcaatggattctaagttcgatgaatactgtgagaagggcaagtataatatggcacttgtcatagccactatacttgacccgt

SEQ ID NO: 29351 - DNA, 349 bp, Zea mays
  unsure (1)..(349): unsure at all n locations
cacccgcccggtattatcctgcccgtgtgcagcacgaatagccgcgatcagcgcgaatccttgcacataggtcaccggcagcaaggtgagctgaacctgagatctttttgtgtattgtaccatcagaaaccttatcaagacgcttgacagagcaatttgcagtgcccagatctccaattctcatatgataacttgctaatccactttaacaaagatagtggcctataatccaactctgattntgctatagcaaccatactataattctcactagattatactcaaaatagctcccacacttggtcctaattcactgggagtccagtttcagaagtagactcgactgaca

SEQ ID NO: 29352 - DNA, 292 bp, Zea mays
cccctgcattggggagtcatgttgttagatctatatatactgttttagctcttcaaggccttctgttggattggtccccattgaaagacttcggctgacttcagcacttcgaagaatggtaaggttctctctgctgatctggatatgaatctattgagagatgccaatcttcctgtcaatcttgacccccttcttgattggggtcctcgagatacttcatttactgatacttcatcccttgtgaaccacatcagaattcccttttactcaaaccattttgattactcaccac

SEQ ID NO: 29353 - DNA, 389 bp, Zea mays
  unsure (1)..(389): unsure at all n locations
aggggaaagactacccagtccgctccaagagggtgtgttaccattgtgggaagtccggtcatttcatacctaaatgttcaatttctagtgaaagtgatacggatgaagacaagatcgggaagaaggagaagaatagcatctccattaaaaatggcggcgatgcgcacatatgccaggaatgggactccgacgagagctccaccaacttctcttccgacgaggatgccgctaacatcactcgncacaagggacttctctttctcaacgtgaccacaagtgtcttatggctaacgatggccagaaaaagaacgtacactgtagagccactccccaatatacaacctctactgatgaggggagctctagtgacaatgaagatgatttacttg

SEQ ID NO: 29354 - DNA, 428 bp, Zea mays
  unsure (1)..(428): unsure at all n locations
acatgtgctaagcgtttatgctacaaccagcccatgctagtcttagcaattaagcatgcatctagaccggcctcttctttngcaaaatcaactaagtaaagcttgccgtctaatacacccttaaaggctagtgaaccatcacttcttctaaagacagacacatctacacttgtaaaaagacaattatatcccatattgcatagttgactaacagatagcannatgtaaccaagagactcaactaanaacacattggagatagagtgctcattagaaaaatgcaattttacccaactcttttaccttgccttgattccatcaccgaaataattgaacttgggaatcttattcttgacgangaggtaacatcttttctcnccgcatatggttgtgcatncgctgcgaaatctagcttgaaccccgatgat

SEQ ID NO: 29355 - DNA, 464 bp, Zea mays
cttaagcttatgaagattcttcatcccaacatgggctagtcggcggtgccagagcttttccatgttagtcttagcaattaagcaagtgtcgagtttagctctatcaaaatctaccaagtatagctgaccctccaacactcccttaaatgctattgaatcatcacttcttctaaagacagtgacacctatatcagtaaaaagacagctgtaacccattttgcataattgagatacaaaaagcaagttgtaatctaatgaatctacaagaaaaacattggaaatagaatggtcaggggatatagcaatttcatccaatcctttgaccaaaccttggtttccatccccgaatgtgatcgctcgttggggatcttggtttttctcgtacgaggagaacatcttcttctcccctgtcatagtggttgtgcacccgctgtcgatgatccagcttgagcccccggatgcat

SEQ ID NO: 29356 - DNA, 476 bp, Zea mays
  unsure (1)..(476): unsure at all n locations
agctatgaagattcttcatctcaacatgggctagtcgactgtgccagagccaacccatgttagtcttagcaattaagcaagtgtcaagttcagctctatcaaaatctaccaggtatagctgaccttctaacactctcttaaatgctattgaatcatcacttcttctaaagacagtgacacctacatcagtgaatagacagttgtagcccatttgacacaattgggaaacaganagcaagttgtaatctaatgaatcaacatgaataacattggaaatggaatggtcgggtgaaatagcaatcttacccagacctttgaccaaaccttggatttcccatcccgaatgtgatagctcgtgggggatccttgttttcctatatgaggagaacatatctctcccctgcatgtggttgggcacccgctgcagtatcaacttgaccccggatgatanactacaaacaagttagtcttgactt

SEQ ID NO: 29357 - DNA, 120 bp, Zea mays
  unsure (1)..(120): unsure at all n locations
actcagcttgtgtggagtgggagacgatcgatctcttggtgtgtcttgtttgaattctataactcttgtaangagtacaagtatacaaacttggatactcttgaatgtggggtggccacc

SEQ ID NO: 29358 - DNA, 322 bp, Zea mays
  unsure (1)..(322): unsure at all n locations
agcttgtctgccncattgttctgagacaaatctaaggcctctatttttaatgcaccgtacttgcgtactggtgttcagagatcttgggtcagctcacacagttcaggaagatagtcagaagtcagaactttggtgtgtataatacttaanaatgtactgcatattagccataccttaatattattctgtactgatattcagaaatcttgtagtcagctcatacagttcagcaaggcagtcagaagtcagaacattgttttgtataaatattccagattattatgaaatgcatattacccatactttcataatattctatacg

SEQ ID NO: 29359 - DNA, 454 bp, Zea mays
  unsure (1)..(454): unsure at all n locations
tgcattatggcgggtcacgggccggataccgtgtgacacgttcccttgtctagagcccaacccaaggaaatatgtacagacaacacaaggccactgtttgttcagattttcgcagcttctggccaccaaaagctgctgcagactgacaaacactcagctnttcagccagcttctataaaatccatttgtataaaaatcattccaaatcaatataaacatataatcggttgagtcgtcgcaatagtagtaatccgtcactttatagatcattaaccgcatggacaactttatcttcctccgcacgtaaatctaatgatactcagattctatacacagccatattctccctacagctaaattctcggaaaagctggtcagaataaagctgaaccaaacaggcccaagatttgttgccgtaacggtatgacgcaaatgggaagcgtatatgccaaac

SEQ ID NO: 29360 - DNA, 379 bp, Zea mays
  unsure (1)..(379): unsure at all n locations
gcagcttcgctaccaagggacgcgatctcgcctcagctgagtcctgtctctgtctataacagcantcccgaacgaattcacgtctcgcccaaaggtctnctcacgcagtaaggacaccctctgcttagtcaaaggcaagccttgtcgtgcaagcgatcttggccaaatcagcttaccagccgaccgtattgcatgcgcatataatgatgggatcgcctgacaccttatcctgacacgcgcgcatcagtcggcaaggtcgaagtgaccgcagtcacttctctctttcactgacccgactaacaggaanacagggccgcccgcccactccggctggtgtgcaaccacccgggtgaaaccgacaacaaccaagttcagtctt

SEQ ID NO: 29361 - DNA, 389 bp, Zea mays
  unsure (1)..(389): unsure at all n locations
taaaactaagcctgccacatagctctttngaatacctttgatcatatctcttctatatgctatgactaatgcgcnctcaagaccatttcaaaccaagtcataggtatattgaaagggaattagaatcttccgcgaagacaaaggcttccactccgtaactcatgcttcgccatcactccgagcaactctctatttcttgggagaaatgagcatcaaaaaaaacggactctattcttgggggagagagtaaaagctcaaaagccaaaggaccggaccctcgctttggtataatcttaactcatttacttatgaccaaaggggtggaacttacttcaagggctctaatgattccggttttggcgattcatgcccaacaggggggagaaatg

SEQ ID NO: 29362 - DNA, 377 bp, Zea mays
  unsure (1)..(377): unsure at all n locations
tggacgtgagttcacccaccgtgggcgccaatgttggtgacttgttctcanatgctaagagttaagaacaagggcccatanaaagtgttaaatgttaaagtccttcgtccttcaagacattatgtcccttcggatataatgaattccggacgaagggtatganagaagagaccattctaagtccgactcatgatgaagaacaatgcatatatgagatatgaataatactacagatattatcatcctctctattttattttcattatcagaatcaaataacaaattacaaatgtacctttcgattgatgaaaagtaaaggtacaggcgtgatgcgaaaagcaaaatgccacatcatcctgaacagtaccggagtactg

SEQ ID NO: 29363 - DNA, 376 bp, Zea mays
  unsure (1)..(376): unsure at all n locations
ctcagcttacccttgaagcctggaacaagctaccgaagaaaccagtcctattctctcaatcaaatggaccgaccgtgagaatcaaagcactggccctgagtcaaagtaaacaggaaaagaggacaaaaggagttattaccatacagagaggcaaagattcttggaaccagagaccacaaacatcagggtcatcgaccccaccactcacacgtgcccctcgcacgcgtgcccgcctccatgcgcactaccaccgncccacgccccctttgcagcgcacccaccgccgccattatcgccggcaacaccaggccccctctccttatcgcacccgctgccgcgtagcacctactccatcaccactactccgcaaccgaac

SEQ ID NO: 29364 - DNA, 434 bp, Zea mays
tattcgcagctcacacttatctttatctggcgtggatcttgttcctatttttgatgacttgatatcttgaagcaaacaatgcagaaacttatatcatatattgacacgatatgtagggtactcagcatgcaacaagacgtgctgctgcctttgttcggagagatgatgtcgttcataagctatttactgagctggcctttcgctacaggtaatctgatctacctacacatggattcactcagtgtactgtatctgcattcgcgctatttcagaattggtgtgatgttgtcattttgatgtctgaaatacgcaatgaggcataaacagaactgtagtacaatatttaatgtatgttccagaaccttagttcttaatatgaagaatctggcataaaaaacttttaatattcatctgaagtttgataatggttggat

SEQ ID NO: 29365 - DNA, 330 bp, Zea mays
  unsure (1)..(330): unsure at all n locations
agctnggcatacagcagataatctcgtagcctcttaagttcttttctcanatgctnctcatgctcttgctcattctgggaatatataacaatatcattaatgaacactactaccaacttgtcgaggtagtccatgaacacattgttcatcaagtacatgaagtaagctggcgcattcgtcaaaccgaatgacataaccgtgaactcatatagtccatacttggtgatgaatgttgtcttccgtatattcgacggtcggattctgagctaaatggagcccgacctcatatctatctttgagaacacactggctcctctcaactgatcaaat

SEQ ID NO: 29366 - DNA, 420 bp, Zea mays
  unsure (1)..(420): unsure at all n locations
ccagcaatagcaaactctttaacttttatattcntttcaaagactcctggccgcccaagatccataagtccaactctatatcctccgaagaagctccttccaattctttcatttttaagggtgaggccctatcagctggcacttcatccatttccctctcgagaacccacatagctataatcctgtcaatttctgacattgtggttccaagagggccttcgctatttttaacttcacgggcagcttcattagccttcaaatcaacattacctttgacattagcacgggcgacacttttttctccaagaccgggggcggngtcttatggatagtcttcattacaaccatcatctgtcgtttcttttgacccccctcataaccccaagtgtcgagcagtcttcttcctttcggcttttttaa

SEQ ID NO: 29367 - DNA, 335 bp, Zea mays
  unsure (1)..(335): unsure at all n locations
agcttcctttaaccncgaaacgcgatacaccctttattgttgaaactnttaagtagacataatcgcctaccagaaagcataagggttgtcgtcgtcggtctgcataactcttttgtcgagtctgagctttcttcatattatgaataattttctgaaccttttcttcgaccttnttcatcatatcaggtctaaagaagcatctttctccaggttcagaccaatttagcggagtacgacatcgtcgttcatataaaacttcgaagggtgccatcttgatactttctgatagctattattatatgagaattccgctaagggcaaactttcaccccatt

SEQ ID NO: 29368 - DNA, 452 bp, Zea mays
  unsure (1)..(452): unsure at all n locations
tctccgccagtctgagcagttcgaacaagaacaacaagattttaatgcaaaacttaaagccgaagctcaaaagaattcagatttgagaaaactactggcaagtcttcaagaaaactgcttggaattcagcaacagatgcattcatcggttaaaaaagaatttttactcagttggagccagcagtggaaaatntaccccctcagctgaagatctaccaaaaaccttcgaacatattgagggggagattgacgagcttgacgaagtcatagctgggcatggtgacttctgtgcctgggtggcttctcgaggcactgctgcggctttcctgaaggctggctgcgagcatggaagggttgtgaataggccaaattttactttgtcgccatcaatcctggacgacattcctgatcttgcccgaagcatctcgaatagatctataaaaatgatatggg

SEQ ID NO: 29369 - DNA, 291 bp, Zea mays
  unsure (1)..(291): unsure at all n locations
agctngatctttggatcgctcgagaaggtcgatagagattctagttcttngngacancctcaatgggacatagattctntggaactaaacctcgttaaacacattngtgtgtcttgtgttctttactttccgcannattgtttctctctcactccaagttcttgctacaacttcacttgtgatattgcttttgtattaattctgcaatcaagatgagcatcaagtgcagaacttccctcttcccttgctccatttgatttagatctatagctaacatctaatttgggatta

SEQ ID NO: 29370 - DNA, 451 bp, Zea mays
  unsure (1)..(451): unsure at all n locations
taanaatatcttaattaaaatatacgaatattatgttgaccattttaatcattcataaatgtcatatgtgatatgtctaaaattaaaggttcataagatgataaaacgcattataacattattaacccttttaaaccttttaaaaacggtatatgttatatctctaaggtcaatgagttatgaaacaccttataaaactttaatttatgaagcattataaaacatattataaaacattgttaaacaatcacttatgacaaattaagatataagtctaaatagattttatgtgaaaagatcattattattaaacacctattcataaaaagctatgatatatgccttagtgaatttccatgcaaaagatattgaaagaatacctatctttctattttattagaaaacatattacctagaaaggtatatccaaacagtatgtatactattattt

SEQ ID NO: 29371 - DNA, 318 bp, Zea mays
agaaagatgcctggaatttagcagccaatgccttcaacgatttacaaagaatttttactcttttggagccagcagtgaaaaattcacccccctacctgaagatctaccgaacaccttctaacatattgagggggagattgacgagctcgacgaagtcatatctgggcatggtgacttctgtgcctgtgtgggttctcgaagcctgctggaccttcctgaaagctggtgtgatcatggaaattgtcatatgccaatttactctattccatcatactggtgacattctgatctcgctgaagatcgtgatagatttgtaaa

SEQ ID NO: 29372 - DNA, 344 bp, Zea mays
  unsure (1)..(344): unsure at all n locations
agctngngaagggtcttcatccncacatgtgctaagcggttatgccacagccagcccatgctagtcttagctggtaagcatgcatctagaccggcctcttcttttgcaaaatcaactaaatagagtttgccgtctaacacaccctctaaagctagtgaaccatcacttcttctaaagacagacacatctacatttgtaaatagacagttataccccatatgacataattgactaacagatagcaaattatatccaagactctctactaaaaatacattagatatggagtgctcatntagaaatggcaatttacctaaaccttttaccttgccttgttcccatca

SEQ ID NO: 29373 - DNA, 350 bp, Zea mays
taactgagaggtgcacaagactagatatgttcttgaatctatcatcttctcttatgccatcaatataattgttaagttgcaagtcaagttttaacaagtcagtgattgacatgtcattatgataaaaatcagctagctttcataccttgtgtgcatcaaaagaagcaaaagagttggaaggatccaaggctgacatacaagaaagcagctccatattagcctcactaaaccgactatcaagctctatgctaatttgatcaattaccccaatatatacttctcttctgaagtggtcatcattggtttgggtatgaacaaatcgtgatgatctttcataaggcttataattt

SEQ ID NO: 29374 - DNA, 491 bp, Zea mays
  unsure (1)..(491): unsure at all n locations
agcttccataatctntatttgtagttatatagtatatttcaatgtttatatttggcctaagccatgattntatacttttcatggtcttttaccccttttttatctctacttagatagcttgattagggttggtgttagggtttcaacatttttcccttttgaaaatcttatttggttggaacatgattctttagatatacacttagtagatcttttcttcttaagttaatttgatgcttcatgctcacattggttcacatgaaatgttgattcttgggttagcactgagagaaaccctangtaacacttgggtggtaccattattcccacatgtataattgacaggaagagaacatctgggacttgtcagtttctgggaagatacatggtgtcttgtgcttganagaaacaaaactcagtagttctatccaccgcttgagccgagtatattgctgcangacattgttgtgcacaattactctggatgggac

SEQ ID NO: 29375 - DNA, 435 bp, Zea mays
  unsure (1)..(435): unsure at all n locations
taatactccttaatgtatgggttatgctntattgtatttgctctgtgcctcaccatcgagtgagtacgtggtacttgatcctgtcagtggcctcgtcggactagatccgagggattgacgtgttattcccatttaagtgtggtctagcctctaaggcgggacttaggcacttaagttggaataattcgggcagttccggcacagctggtatcagagctcgtaccaccacagagggatcaataaactataaataccatcctttttcaaaataaaacttggtagaaacaaatgttggatagatcgtaggaggatcaggatagacctatgacgtggagccttatgatgatagaggggtagctaggtggctaattgagtaagccctacaggatactataagggatgggagttccttcctcatccccctaaattgaaatg

SEQ ID NO: 29376 - DNA, 443 bp, Zea mays
  unsure (1)..(443): unsure at all n locations
aagcaccgagctgcactaaaaattggatgaatcggggtgtaccttcagttctggaaacttcggactcgatgtacagcggttgggggtatccactccaaaatatccttgactttgctgggatccactgcaacccccttggcagataatacatgtcccaaaaattggatctcctctagccagaatgtgcacttactgaacttagcatataattggtgttcccttaagcgcgttaatacgatccgcaaatgccgagcatgctcctcttcattcgtggagtatattaagatatcgtcaatgaataccaccacaaacttgtccaactggngcataaataccgagttcatcagatatgtgaagtggacaggagcatttgttagtccgaaagacataaatagatattcaaatagttcataccgcgtagtgaatgcggtctttggtatatc

SEQ ID NO: 29377 - DNA, 347 bp, Zea mays
cgctacaggcgcttctttttttctccatagctggaaccttactggaacactaccccacttaaaaagaatgagggtagaactcttgaatcttggagatttgaacttcttgaaatacctcataacaagggtgttacgggccttcttttgctgttgctgcttgagctggctgcggagagatgactgacacaaggttgattctgggagaaccttctttttatcttctcttcactatcttcttttcatttaccctttctttatctttgctcttcccactggaggagtctatcaaagagtattaccatcatacagaggaggaaaccaaggactatgaaccatgtacaacagtc

SEQ ID NO: 29378 - DNA, 480 bp, Zea mays
  unsure (1)..(480): unsure at all n locations
agcttctanagggagagcacatcttaggattaacaaatgttcattttgagaaagacagggattgtagcgcatgccaggcagggaatgcaagtggaatccatcatccacacaagaacatcatgacgaccgacaggccgcttgagctactccacatggatctattcggcccgattgcttacataagcatcggcgggagtaagtattgtcttgtaatagtggatgattattctcgcttcacttgngtattctttntacaggaaaaatctcaaacccaagagaccttatagggattcttgagacgggctcacaatgagttcgccttaaggatcaagaaaataagaagcgacaacgggacggangttcaaaactcacaaattgaaggcttctngaggaggagggatcaagcatgaattctcttctcctaccacctcaacaaatggtgagtgggaggaagatcgactctttgacatggaagaccat

SEQ ID NO: 29379 - DNA, 455 bp, Zea mays
  unsure (1)..(455): unsure at all n locations
gctcgcttcgaacttagctntagtgcatgttgaaatcttatttgttttttataaatggtaggagagaagatggcttctaatcttgctttagtgctagcctcggttgttcctaagatgaaaggggaggctttgggtaccattagtgaacctgtgactgaggtatccagggtagttgctgaagatgttttggtcgacccggctaaggggtcaaaagacgacaatgaatacatatagattgaggaagatagcaacgatatctggtccacaaaagcaagccatgtggactttgaaaaatcaacgatcaaggaggtgtcatattcaggtattgactgagtcccattatatcagtgatgctagcttggtttgatttggtggtgaagacaccacaccgatgccaaaggaggacgaagtttgtgtttttcaaagctttctgaacgctangcttcggtttctac

SEQ ID NO: 29380 - DNA, 435 bp, Zea mays
  unsure (1)..(435): unsure at all n locations
agcttcatgatcggaatgaataacacactctntnggccatatgtattgctgtcatgtntcaagccgttggaccaaagcatacaattctttgtcatacacagaataatttaattgagcacctnccaatttttcactaaaatatgctataggttttccttggtgcattaaaactcctcctatcccaatcccactagcatcacattctacttcaaaagttntagtgaaatcaggaagaataagtataggtgcttcagtcaaacgtttcttcaattcttgaaaagcatcttcttgtgagtttccccattntaaatcaacacctttctttgtcaattcatttaaaggggaagcgatagtacttgaaatctcgcacacattcttctatactaaccagcaagaccatgaaaacttcttacttgacttacattcgttggagct

SEQ ID NO: 29381 - DNA, 444 bp, Zea mays
  unsure (1)..(444): unsure at all n locations
tctgtgccaaaaatcatcgaaggttaattggtggttatttatttgtgattntctaaagttntatgccaaaaaggtgcttataactaacttgttatttgaaaaatatcaaacaacagacttcaaatttttcttatgttcttaataacaactcattagttatcccaaggtttggggtgtttttgccttggggttatttttctagggtttttctaagtttgccttgttttcttaaaataaaaggtatcctatttattttatactaaaccagagtataatcaatttttctagtaaactacactgaataagtatactaacaaaaatatggngctccctggttctttatttaaatcacctttcctattntctttaaccttaagcataatgtaaattaaatggcaaactctaccttaatgggctgtacagagagggttagcatttttaaat

SEQ ID NO: 29382 - DNA, 267 bp, Zea mays
  unsure (1)..(267): unsure at all n locations
tgcaagcttggcgcgtggaggcaactcgagacgtactgacacctcatttatgagctctgtgacgcggnaccgcccacagaagcggggctgaagcttgctcttcggcgcctgagaaatggaagccaccggctgctgacagagtctgaggagcacccactccccaacggcatangagacgtggcggtgagctttgtcgtagtagcgcttctggatcgcctgggcctgctctatgcggtgacggacgtcgtccaagaattcttcacgttc

SEQ ID NO: 29383 - DNA, 435 bp, Zea mays
  unsure (1)..(435): unsure at all n locations
cgccatagcgaaggtctatagcttccgaaggtgttcacgaagactcttagtggaagtgagttcaccggaggtgggcgccaatgttggtgacttgttctcaaatgcttcgaattaagaacaaggcaacataaaaagtgttacacattaaggtccttcgtccttcgaaacattatgtcccttcgggaaataatgatttaggacgaaggtcatcattgacataccttcgggaatataataagtaatgccgaaggattcatataaagcatgaaatacaaacatcaacataaaatcatttctattttattaacatggagaaatagaaatgattntaaattacaaatgtacctttggtcctgagagaaggtaagaagtacaagcgtgatgcaaaagccaatgccaagtcagcatgaacagtacgggagtactgttcatcta

SEQ ID NO: 29384 - DNA, 253 bp, Zea mays
ggcgccggtcttgctgttgagcccggaggacttggaatttccttttgagatgccctctttcttcctcctttgccctttcaacttgcatggccttgtgggagaggtgagagaaactgaggaagtcttggctagccagaattgtcttgagttctggcctgagtccctttaggaaacgggccatcttcttgccctcagtactgacgtcatctggcgcgtagcgggctaactccgtgaacttgtgcacatattcact

SEQ ID NO: 29385 - DNA, 452 bp, Zea mays
  unsure (1)..(452): unsure at all n locations
tcaactccatctatattatggattgcgttggaatcagtccatcttccttcggcccttctggcaggtttctgactcccatgaatagcaataggcccttggtccgaaggtatcttcatgcaaagataagctgggtgaagaattgcttcaaaagcatttagggtaccacgaccaatgatggcgttgtaggggtattccatgtcaacaatatcaaacacaatttgctcagtccttgtgttattaacaaatccgaaggttaccggcatggtaatcttcccgagtgccacaatctgccgccctccgaagccacaaagagggtgcgtagcatcatgaatcttgtcttcaggctcctgcatctgtctgaaggctttggcaaatacaatgtcagctgcactgcctgtgtcaactangacattgtgaaccagaaaccctttgatcacacaagaaatgaccat

SEQ ID NO: 29386 - DNA, 432 bp, Zea mays
  unsure (1)..(432): unsure at all n locations
agctntaaggagattntggttngagtactgtgcacaatatcataggtattgcacgattccttattanccatttgtgggagggtatgtaacctatntcatgttttagagcatctccaacaatgcctcaaactagtgcctcanattgaaatatagggctctatacaggagaaactactccaacagtgccccatttcataaaattttgtcaaaatactatagggcaccctctcaagtgactcanatatattacaccgtagtgggctgccctataatctagatttanggctttactgttggagcggagtggttttgtggtcggcctaaattctatanaatatacttatttttcaaatataggtcattttataggtcacgttgttggagatgctctaaaggactactgaaaacatattaaggtatgtcgtcatttaa

SEQ ID NO: 29387 - DNA, 436 bp, Zea mays
tgccagtacttgtcaaagcaacaacatctaccagcacagcaactgctgaccataccggtgacttggccctttgcatgctgggggctagatatgattggacctttcaagaaagctcaaggaggatatactcatgtactggtagcaatcgacaagttcactaaatggatagagttcaaacccattgcttctttgacctcagctaaagccgtggaattcatacaagacataatattcaggttcggaataccgaacagtatcataaccgacctgggatccaacttcacaagttcagagttctttgatttctacgagcaaaaaagcattcaggtcaagtatgcttcggtagcacacccgagagccaacgggcaggttgaacgagctaacgggatgatattggaggcactcacgaaaagggtttcgataaaatgaaaagtcc

SEQ ID NO: 29388 - DNA, 336 bp, Zea mays
  unsure (1)..(336): unsure at all n locations
agctngtggaatctctacgtgtccttggtggatgtgacttatggactatatngngcggaggttggtcgaagagggttggcctctgtggccggctctcggaggcggtggcggcgcgcttagagctcaccagcgttgggcaatggcttatagaagttaggcgctgaaccgagtgaggaacatagaagattgaaggcttaggtggctttatatgcgctagtangggtggaaacgagccgagccgagctcggctcggctcggctcggtccggctcggctcggtccggctcggtgtatgtacgagccgagctatgctcggctcggtaatggcgcgagctac

SEQ ID NO: 29389 - DNA, 448 bp, Zea mays
  unsure (1)..(448): unsure at all n locations
taagcgngccgcgtatctgtgcttgaccccggcttgtgatgtgatganccgcagcacacctgcccccgcatggcaccatgcgtcgtcgcagtggattgtccaaacattctctgcggacgggtccggctgtgttattggcccagtccagtcgacgacgaagtctgctagaacttgtgacttgatggctgtcctaagctcgaaagtgatgtggtaaccggagagttcggccgcccatttggcgatccgtaccgatgcctccgggtttctgaacagttcgccgagtcccctatctgaggtgactcggaccttgaatgcttcaaaatagtggcgcaatttgcgcgaggacataacgactgcatatgcaatcttttccagttccgtcatgttacattatgacgttgtgagcacttcagagacgtaataaactggacactgnctgatcacgccc

SEQ ID NO: 29390 - DNA, 457 bp, Zea mays
  unsure (1)..(457): unsure at all n locations
agcttcanatctctccaagttccacaattgagacatgtgatctttattaattagtgacttgagagagagagtgatctgtgtgttatntgtcacttttgtcgcttggcttttgcaatcgngctttcttcttttcccattcttattctcaagtgacttgtaatcaaagcaagagacaccaagtgtgtggtggtccttgtagggtctaagtgacccgtttgattaagtagaaagctcattcggtctaagtgaccgtttaagagagggaaagggttgaagagacccggtctttgtgaccacctcaacggngacaatgttctttggaaccgaacctcagtaaaacaaatcaccgtgttcattccgtttatttctaattgaattggtttaacttttgtcggactcngaattaatctaacgctacaccgacttgatgtgtgctaagtttgaaattcaattccgc

SEQ ID NO: 29391 - DNA, 407 bp, Zea mays
cttaagggagaacacatttagggactaacaaatgttcattttgacaaagacaccattcgtagtgcgtgccaagtagggaacctagttggcgttcatcatccacacaagaacatcatgacgaccgacaggccgcttgagctactccacatggacctattcggcccgatagcttacataatcatcggtgggagtaagcatcgtcctgtaattgcggatgattattctcgcttcacttgggcgtactttttgcaggataaatctcacacccaaaagaccttaaagggactcttgagacgggctctaaatgagttccgcttaaggatcgaaaagatcagaatcaataacacgaccgagttcaagaactcacaaacagaatgctttcttgatgacgagggcattaagcatga

SEQ ID NO: 29392 - DNA, 311 bp, Zea mays
  unsure (1)..(311): unsure at all n locations
agcttcggatcaaactgtgttgccgtgtccacagtaatatgccttcggcactccaaagcgacaaacaatantttgccagaaaaatttctgaacagtgaccgaagttattgtggctaaaggcttcgcctcaatccatttggaaaaatattctaccgccaccacaacatnatttaaatntccttgtgctggtggaagtgggcctaacaaatcaaggccccaccttngcaacagccaagtgggctgtattagctgagtcagagatgaaaggctgttttgatctcttgcacanttttgacaaccttcacactttt

SEQ ID NO: 29393 - DNA, 367 bp, Zea mays
tgtcgtggcaacccgtggaccaattcaagcatgattgaacgggaacacgggtttgatgtcacggtttccgccgtgcacatgggcaggccattctcaatgtgttcaagccgaaatcaacgagtgttccaaggtcaccttgagtcggttatgcctcccctgtagctagactagacagccaccaccggtcatggccagaatgggccgcgtcagtgatgaaccgcgagcgcaccgtggtcagggacctatttggagaagaaacgaagttctggggacctctgtgtaagatgtcagtgactcttagaatattctgtagaaacgtttacaaattagttaagacctcgggggcattttcgcaagtcagtcgtgt

SEQ ID NO: 29394 - DNA, 365 bp, Zea mays
  unsure (1)..(365): unsure at all n locations
tgcaagcttctatagggagaaacacatttatgattaataaatgttcattctgagaaagacaggatctgtagcgcatgtcatgcacggaagcaagttggcactcatcatccgcataanaacataatgacgaccgacaggccactagagctcctacacatggatctattcggcccgattgcttacataagcatcggcgggagtaagtactgtctagttattgtggatgattattctcgcttcacttgggtattctttttacaggagaaatctcatacccaagagaccttaaagggattcttaagaacgggctcaaatgagttccgcttacggatcacgaaaatagaagcgacaacgggacggagttc

SEQ ID NO: 29395 - DNA, 320 bp, Zea mays
agacaagatcttctattttctgtaacctactcggagggtgttctcactccactgcgtactaagtcttcgagtatagtaagactttaaggtttatagtgaaaagttttattcgcctattcacccccctctaagcgagattcagatcctgttctcgggtcaaagggaactttctattggtatcagagctatgcctctccagtgtgggcttatccgtccggagataacgatgtcgtcaccagaggtaactgtggaacttcttttaagcgatggttctaaatacaaatcttgggctgtctctatttacaaagctttcatgaata

SEQ ID NO: 29396 - DNA, 361 bp, Zea mays
  unsure (1)..(361): unsure at all n locations
tcgctagccgtctaggccgctcacgagcccagaaaccaatcacataccacgtgaatggttcatcgtgattggttcatcggacacccgctgccaggctcgcgcgtagcagtccggctggatacagtaactntggcgcacaaacggatgcaaataaataacctcagaataacttattttgtattcattcgtacaacccgcatcttctacgtgcaaataaccaaatatatgctcccacaaagtaacacatgtattaatcaggatgagatatatggcaaccaataagcggatgatatgaccaccactctccanggataaagatctacatgtatataataaagctgctacactacttgtatacttt

SEQ ID NO: 29397 - DNA, 473 bp, Zea mays
  unsure (1)..(473): unsure at all n locations
agctngnngttttcgaagcttacgaacctggatggactgtctcccaacaagaaatggagttaagttttactgaaccttgatgagtgcattctcattntaactntctatntggtaaaggactaaaggtataatagtgcttagtttcagaattgttttttgtggcatttactgagtcactaaggctaactccaacaacgatatgcaaaaatggaaacccaaatacacgtttggttacacacacacagtcagccgagggacgagaactaaatgttgcagcgggtgccccanaaagatattcaaccaggtttgaggagattgtcatctatatctngggtatcttccacgttgcatctaanatgggtatcgggtatagataccccgttggagacggttcaatatcatttagatatctataatgggtttaggctcttatangtacntgtgtggagttagtctaagtcacggggtaaagc

SEQ ID NO: 29398 - DNA, 425 bp, Zea mays
  unsure (1)..(425): unsure at all n locations
atggacgtggaaagtgccttccttaatggacccatcaagggaagaggtatatgttgagcaacctcctggctttgaagatagtgagtaccctaaccatgtgtacagactctcaaaggcgctttatggtatctatctcaaaaccctcttgaaagctaagaggagaatttcattcagggagagtttttatctagtcaaaggaaaagcatttgaaacagggggagaaatttcaaatcttaaaaatgcttattgcaatatcattcctatacctttgactatttgcaaaaacaaaacaagtggtgcaaatgtggtctaaaatgttaaataaaagaaaaacaatccattcatactttgtgagattntaattggttaactncancaacctatgcagaatctaatgcaactagtatatcctgcacttatattac

SEQ ID NO: 29399 - DNA, 441 bp, Zea mays
  unsure (1)..(441): unsure at all n locations
atcctcagagtcacctgcggcagcaagcttctactggtacanacctaaggttgattactttatagtctttggttgtaaatgcttcattcttaacaagaaagtcaagagcttgaagtttgctcctagagtggacgagggtttcttgcttggttatgcatcaaatgtgcatggatatcgtgttttcaacaataccactggtcttcgtgaaatagcgatagacgtgacatttgataaatctaatggctcgcacaggcatgtttctaatgatattgcaggaaatgaagaaccaccttgtgaggccataaagaagcttgcaataggtgaagtaagacccccgaacagaatgatgaagagaaaccttcttgatacaaatgaggcattgatgtgggtgccaggtggcgggtgataaatcttcacccaagnaacacatcaacctcaagt

SEQ ID NO: 29400 - DNA, 432 bp, Zea mays
  unsure (1)..(432): unsure at all n locations
tcacccttggtgggatctagtggagcgagaacaacaccttcttctttnnttctttataggcatagtgaagctccttgtggtaattgtgtgttcaccgaacgtgggtggcaatgttgatgacttgttttttattccttcgggttataaaaaacaaagcaacacaattaaattgagcttcatcttcatcctttaattctaccttcttggagaaaaggtcagttaaaggatgaagatataaagagtggatgaagtaaaagtaaagaacatcaaggataaattatgtgtagtataaaagtaacgtacacaatttaacctcatgataagatactctcttcttctttcttattatctaacaaaagattacatgaacaccttcagctctatgtcactggatgaaggtaaggaaaatatgctttgagatagaatgattta

SEQ ID NO: 29401 - DNA, 291 bp, Zea mays
  unsure (1)..(291): unsure at all n locations
agcttcttaattggtgttctagccttcctcatgttccttgtatctcaccgacccattcgattgaactagaccgccttatatggcctagaacatcttgtgttatcctcggnttccgccgtcgtcgtgggcagacgtgctccggtccggatcagtgaaattagctgagggattagtgttgcgaagggttgaattaagtgtcaagcataggagaagtctagccgttgcgttctccggccagtacgagttcaccgaaggtatgtcgtcgctgtccaccgtcgtggacttggcact

SEQ ID NO: 29402 - DNA, 438 bp, Zea mays
  unsure (1)..(438): unsure at all n locations
tgcaagcttctaaacaccaatgcatctttgagagtacagaaatctgatcttccttcatattngcaacatataactaanatatatgttggcaaatgttcctaacgatactacgaacctaanaggcaataaaattaattaggataataagttgagtatcattacaaataaaatcatatctatctgatgtgcctaataatttcttgtatttcttctggaatgttgtctttggattcattgtccttgtacttcaataattctactaagaatttggtcctcaggtcattcccattctgcacattcattattacatatcatnagaacacgataataatcaattatagaagaacaatattgaccaagtattataacaaatagggtactcacagtgcaaatgcagggtaaccttataccattccaatcgtgcataaagttgataac

SEQ ID NO: 29403 - DNA, 450 bp, Zea mays
  unsure (1)..(450): unsure at all n locations
tctatagggagagcgacatttgngactaacaaatattcattttgagaaagacaggatttatagcgcatgtcaagcagggaagcaagttggtgctcatcatccacacaagaacatcatgacgaccgacaggccgcttgagctactccacatggacctattcggcccgatagcctacataagcatcggcgggagtaagtattgtcttgtaatcatggatgactcttctcgcttcacttgggtgttcttcttgcaggaaaaatcacaaacccaagagacattgaagggattcttgagacgggctcaaaatgagttcggctgaaggatcaaaaagattataagcgacaacgggacggagttcaagaactctcaaatcgaaggctttcttgaggatgagggcatcaagcatgagttctcttcccctacacacctcaacaaatggtgtagtggaga

SEQ ID NO: 29404 - DNA, 450 bp, Zea mays
  unsure (1)..(450): unsure at all n locations
cttcatagtatcaactcttactggaacactaacnctgttaaaatgaacgtgtgtagaactctcgagtctcggcgactttattccttttgaagacctcataacatgggtgatatggnggcttcttctatctgatgtgtttgagcatgcttggggagagatgactagcacacgattggttntaggataaccttcttctcatcttctcttcgcccattcttttctcttttcactacctctctctttctctatgctcttcccaccagagggctctattcaagagttttacccttcatagaggagggtcccaagattatgaccatgtagcgcaatcttcaaccatgaataccgatcattgggagcttataattctaaggagagagggaaacgacttcttgcatagaagaggtgtatcagtgttgcttgaggtataaaatgagagctgtgggttta

SEQ ID NO: 29405 - DNA, 452 bp, Zea mays
ctcaagcttgtggcgccctcgggcatcttgtcgcagacgaagtaccaagtcccccacttggaagtctcagggccgaacccttcgggcgtggtagcatcatatagactgctgataccgcgctaagtgtagtaaggccacgtcccgagcctcttctatctggtccaaggaatcttctcagctggtctggttgcctcagtcgacatacgcctttgtccttggggaaccgcattccaaaatgcggggtaagatgggctcagtcccatagactatgaaaaatggcgagaatcctgtggcccagctcgacgtcgtcctcagactccataccaccgagggtagctgcttcatccatcgcttgccaaacttattgaggtcgatgtagatcctatggtttagtccctgcaaaatcataccgttggcgcgctccacctgcccgtttgtatacagtgactacg

SEQ ID NO: 29406 - DNA, 308 bp, Zea mays
  unsure (1)..(308): unsure at all n locations
agcttgagcagtgaccggcttcgttggagactcttggtttctggttatcagcatgtcctctcagctttgccatgaggtgattgttcctggccgaagagaggagtaccaggtttgtgcaacactcttgacagccataacgaaagactttgccatgactgcagtattgccaccatacgaagatatggttgcttcataactcatcaagaattgcttcgggtctgaatgaccgtcctacatggggagctggggtggcttgtaagactggngccaaggtgtagcctgcagttctgttgacagagaagtatcat

SEQ ID NO: 29407 - DNA, 433 bp, Zea mays
  unsure (1)..(433): unsure at all n locations
gtgcattcctttccatgccacatcataaatgtatcttctatttgtagaatcttgcaatcctttctgcaaagctatatcaccaagcgaaggctcattcctaagtaaaggcaatgctttctgtgctatccatgcttgatagtcatttccatagtttacctggctgcttgaggcacacttatgctcattgattaatatagtaacctacaaaaaacttgatatacacaatttccatagttcccgagtactatcggatgtgggggaccaagagtgtcatttcgtagataggatttgatgctagcgcttttgcggcattgagatacaactcgagctatttcgttgagtctctgacaaagcgtattgacccatatgaaacattaatgattgcgacggattctaanactcacctaagacgaatngcacataaacttacgtc

SEQ ID NO: 29408 - DNA, 400 bp, Zea mays
agcttcggatgaagttcgtcatcttgctcaagatgactataaccgaaggcctccgcgcagagagcttcatcaggagggcttctacaacgaggacgactggtatgaagatttccattcatggaaatttgcttttgatgatgcttctcccctgtcaacagaactgcaggctacaccatggccccagtcttacaagccccccaactccccatgtatgacggtcattcagacccgaagcaattcttgatgagctatgaagcaaccatatcttcgtatggtggcaatactgcagtcatggcaaagtctttcgtcatggccggccagagtgttgcacaaacctggtactcttctcttcggccaggaacaatcacttcatggcagaagctgaaggacatgttgataa

SEQ ID NO: 29409 - DNA, 447 bp, Zea mays
  unsure (1)..(447): unsure at all n locations
aaactcagctgagcactgggctgagctctgaaccgcttgttcacttcatgagactgtctcccttcgggaagcccgaagccagaaaaggaaggctgccagtccgacactgccagaggatgagatagaccaagaaatcagagacatggagatgcttcatcaacaggtgcagaggaagaaggaaaagataaccaggctagctgaactgcaaaggcagatagacgaagcctctgaagaagttcgtcatcttactcaggatgagcaacaccgaaggcctcagcaccaagaccttcatcaggagggtttccccaacgaagatgactggtatgacaatttccatcatgggaattntgtttttaatgatgcttctcctctgtccgctgagctgcaggctacaccttggcctccgtcttacaaagccgctcagcttnccatattcgacgggcactc

SEQ ID NO: 29410 - DNA, 350 bp, Zea mays
  unsure (1)..(350): unsure at all n locations
agctcgctgaattctacatganagagttctatggtgacttctatgatgtctgtcttgatgagttagttgctgctatgaagaacctatttctattttatgcaagatcaaaaccttcaaacaaagatatgaatgcaaaccaacatgtcaacccaacagaaccattagctaaaaagaagaatgttgcacttgagagtttcttgtatgatgatgttgggcctagtacaaatgatctaaatgaattggacaaatacatggcagaaccacttctaaagcaagatccatttgatattttagctttttggaagaacaacacagataagtaccctattctctcacaaattgctcgtgat

SEQ ID NO: 29411 - DNA, 317 bp, Zea mays
atgcgtcacgataatgaggggtacattgtgtaccctgctggctaccctgaagataaaattcagagaattgatgccaagaagactcatctcaccatgcttctatatatgaaagcgaggcttctagctctaggtgtgctacacatataagaatgcctaagaagaaacctgctactgcctgccatgatcataatgtttcattcaagacttttaacgctccttatgtgctaactaacaaatcaggccagatagttgccaaatatgtagtggcgaacacataggctccgagactagtgtttgggtacccacagcgcttgctt

SEQ ID NO: 29412 - DNA, 290 bp, Zea mays
  unsure (1)..(290): unsure at all n locations
agcttcttaagggagaacacgtgatagggttgactaacgtgcaattcgaanaagatagaccttgtgcagcttgtcaagcaggtaaacaagtgggaggagcacatcacagcaagaatgtgatgaccacctcaagaccgctggagctgctgcatatggacctcttcggacccgtagcctatctgagcataggaggaagtaagtatggtttagttattgtgaatgacttttcccgcttcacttgggtattctntttgcaggagaagtctgagacccaaggaaccctcaagcgc

SEQ ID NO: 29413 - DNA, 437 bp, Zea mays
tcttcaccatgtgatcacggatatcttgagaaggttgagcaatgcacttcccttttagttgggtcaagctcatttttagcctctcattttcttctttgagattttgatatgtatcatcatttgttcctgcaaattctagctcaaaggaagatttgcttgtcgacggacaacaagcattagcacatggtaatatagtttcaatttgaatacatgtgcatgagtgaggttgttgtgattctaagttttctatcacaacctcatgagcaatatttaatatgatatgatcatccataagattttcatgagagcaaaggagcatatcatatttttcttgaaaagctagattttcaacttttagctcttctacttggtccttaagcaaggtattcctatttactaattgagcgatacaatgtaaagcgttatcttgctcaatt

SEQ ID NO: 29414 - DNA, 381 bp, Zea mays
  unsure (1)..(381): unsure at all n locations
agctggtggaggttcttcatccncacatgtgctaagctgtgatgccacaaccagcccatgcaagtcttagccattaagcatgcatctagaccggcctcttctttggcaaaatcaactaaataaagtgtgtcgtctagtacacccttaaaagctagtgaaccatcacatcttctaaagacagacacatctacatntgtaaataaacaattatatcccatattacataattgactgaccgatagtaaatatatccaagagactcaactaacaacacattagagatagagtgctcattagatattggaattctgcctaaccctttcaccttggcttgggttccatcaccgaatatgaatgaatcttgggaatcttattcttgac

SEQ ID NO: 29415 - DNA, 379 bp, Zea mays
tatcaaaaccacctttgctaagcctatcacccctgtgagagatggtgtgattgatgagcctatgagagatcctcctcagaaacaagtgtggcttccaaaacctaaccatcttaggaacacacttgacacctttcccgacatctctagcgatccccttcctagagcccctcagccatccgaaaagaaaatcctcttccacaaacaaaatccacccaagagagaggtgaggtaccattgtgaatattgtgagagggatgggcatctagcttatttttgctttaggaggaagagagatgagtggcaggtttctgagtcgagcaggaaggacatgaaccgcccctctcatggtgttcatgctcagtctgttcagagacgtcct

SEQ ID NO: 29416 - DNA, 261 bp, Zea mays
  unsure (1)..(261): unsure at all n locations
cgctgcacttaagcaaagccctttttctatccagacttatcttccattcctgacataagggtgtacgcaatcccaagtgaaacatgagcacagctttacgactcagaacatcatccaccacattagcctntcctaggtgataatgaatttctatgtcataggccttgatcagctcacgccaccttctatgtctcatgtataactacgactgggtgaaaatgtactttaaacatctgtgatcagaatacatctctgctatac

SEQ ID NO: 29417 - DNA, 261 bp, Zea mays
tggagaagcaaaaatctctgaagtcttggctgtcgaactgcttgccggtgtcgactgttagttcggacggtactccgaagcggcaaacaatgttttgccaaaagaatttttgtgcagtctttgatggtattgtggaaaccgccctcgcctcgagccatttggtaaagtattcgacagcgaagaaggcgaacttaaggttcccctgagccgtgggcaagggcccgacgatgtccaagccccaacgctggagaggccatgtgt

SEQ ID NO: 29418 - DNA, 431 bp, Zea mays
  unsure (1)..(431): unsure at all n locations
agcttaaagccatggtaagtagcatatgctaataatatgctaatngactcaagcctagctacgggtgcataggtttcaccgaaatccanaccttcgacttgggagtatnccttggccacaagacgagctttgttccttgtcaccacaccatgctcatcttgcttgttgcggaagacccatttggttcctacaacattttgattatgacgtggaaccaagtgccatacctcgttccttgtgaaattgttgagctcctcttgcatcgccaccacccaatccgaatcttgtagtgcttcctcctacccccttatgaatgtcgccgaggatagtgtcgacggggtgatctcgntgtattgctggtggactcttttgatgtgcggncttgttcttcatcctctttgtcttcatcatttgcatctcccccttgatca

SEQ ID NO: 29419 - DNA, 372 bp, Zea mays
gacacttaaaactcagcttctaagggagaacacgcgatagggctatccaatgtacatttctaaaaagatagaccttgtgcagcttgtcaagcacgttaacaggtgggaggagcacatcacagcaagaatgtgatgaccacttcaagacctctggagctgctgcatatggacctcttcggacccgtcgcctatctgagcataggaggaagtaagtatggtctagttattgttgatgacttttcccgcttcacttgggtgttctttttgcaggataagtctgaaacccaagggaccctcaagcgcttcctaaggagagctcaaaatgagtttgagctcaaggtgaagaagataagaagcgacaacgggtccgaa

SEQ ID NO: 29420 - DNA, 309 bp, Zea mays
  unsure (1)..(309): unsure at all n locations
agctngaaggactgcttctgcaggagagcttccgaacgttattactngttcggtccacggagtcgctttatccgagcgcaagttacttatcgcagaaggtgatgagtgaggtatccgtatcccggaggcgtaggagtccctcggctcggtcagcctaggctgcttacgtgtactccatcgtttccaggatccgctttccgaagtagtcaagaagcacgaaagaaatcctgctaaaaagaggtcctttttcgaggaaaaattcgacgcagagggggtctccccccttttagcccccgagggagggtcggg

SEQ ID NO: 29421 - DNA, 439 bp, Zea mays
  unsure (1)..(439): unsure at all n locations
tgcctctccanaacttgcactatcataagtcttgtattatnggtggngggtctatgaaattagggtgccaccagttttccttgactagataggttngtatcggatacgaactgcagaaagggttggttaacttaaacaaagtcagcttaatggttaaggactctgaggcataaggttgggagccgagacatatagatgtcacccaacaacaggagtcatatatatgatatgattagcaaggagttgcttaccgatctaccttgtcttctagcggtgatgctaaagctcactagtagacttgtagttgtgggttctgaatcactaagtatcaatccagggatattgatttagtgggagtagactataaatgttaatatgattactctgcatggatattttgctagattttgattattttgtgagataatggacctacaca

SEQ ID NO: 29422 - DNA, 512 bp, Zea mays
  unsure (1)..(512): unsure at all n locations
atctctaagtcacctgcggcatgcaagctngtatgtcagctcagattnttcacattgacatggtttcncttatgagataaaggcaaacaggcatctcanactctcacatcccacacacaanaactgacagatttctcanacgtccacagacaaaacatatccgcanaccagttggtccacaaaagcttcagcgtaagctagtgatgtcgcttgcacaanaatgaaagttgggtagggcacacagggtctaatatcaaggcagaaattactccatggaagaaaagaggggaaataagcatctgcctattgtaagatttcaatgaggacagagaagttcgtggatgggtagcagcatgcagatcttggatgccagaggaagtcangaaccatggacagcagtcacagcatgcagtgctttacaaaggtggattcatgccactgacaaggatgcgctactcangggcaaagctgtgcanatgcacccctgcccccaattcanaatctatatatat

SEQ ID NO: 29423 - DNA, 411 bp, Zea mays
  unsure (1)..(411): unsure at all n locations
cctggaaggctttgaaaagaggactcacaatgatgttttggtgttcactatgattctgntgggatgaggtataatggtgcattctcaaagcttggagccttggaaggctttgaaaagaggactcacaatgatgaagtggcgttgcacagcaataaccaatcaagacatgtcggatgtgtaaaaaaagagtaagcagaatactatacttagcagtcgtagccagtacagtggcagaacgaggaacagagtaatacaagtaaccaacatgaagttgtagaagtctatactctgaaaaaaaacttactatggaacagaatcaaaacaccaagaaaggcaaagatccctcttggctaaacaaggtttggtttgcggtgagataacaacaaatacaggcactccagcatttggata

SEQ ID NO: 29424 - DNA, 162 bp, Zea mays
acatgagttcacctctgttctaatttttatgtcacaaataaaataaattgaactatgattatgtacttgtaagtaacacttaaggaaataataatctattttcaaatgaagttaatttatattatagctcatgttatactctgaattcattatcccttatgt

SEQ ID NO: 29425 - DNA, 406 bp, Zea mays
  unsure (1)..(406): unsure at all n locations
tcgggagtaggagtggcagccttttcaaacgaaatttgctctgtggtcttttcttctattgccttttcttcaaattccgcaggcttcgtcttagcaggcactgtgggccctgcctcgctttcagcctgggttattgtagtctcaacttctatttgcttagtatcaactttgggttgtgttttgtcagcttcaacaactttccctgtgggagcgggacttatggagtcagttgtttctaaaatatctaacacatttaccatcctccttctcttaggagtgttggtagaactcttttctgccttcagtgttgttgcttctgttgaaggacctaaaatctctggtatttttgttacttcttcagtttttgactnttcagccttatctttgtcaaccttcgtttcagcta

SEQ ID NO: 29426 - DNA, 468 bp, Zea mays
  unsure (1)..(468): unsure at all n locations
agctntgtangagaaggagatggtatgaagccttgttgttcttaagagagtcaattcaatctttgttgacttaagctaccgatatccaagattgacccaaggttattttaaattgttataccttaaactcatatcatctcgagggaagttgttgatgttgtangaaataaagaattatcctatgccgaacagtcaaagcctacaatatggaggaatgtcaaaggatggtaacatctatgcttttaagtgcaagtgtcttaacttatcatttctcatgtgtcttgtgtagtcacatagaaaaacgaagcacttaagatattttaaatttatgcaccatttttgaaaaactcctcccatatggagattgatattttattttatatatgacatctacatgcttaaattgtgcttttccatgaaggttaactaatatctatattgcttgtctaatataaagaattcatatct

SEQ ID NO: 29427 - DNA, 456 bp, Zea mays
aactcagcttgtttatacttcataatatgatagtcgaagatgaagaagtatctgttacaattccgttggacttgaacgagaatccaagtccaactattgtgctaccacctgaagtgcgtactattgacaatcctgacccctgcttcgtggaggtgctacagagaaacactgctctccgtgctcgctcaactcatactcagcttaggacagatttggttgaacacatatggcaacgctatggaaacaatcaaaattagattgacatgaagctatgtattcatactaattggttcctattttgcaatgccatttcatgattcgggtatcaaatgatataattataaattatattatgtttatataaatcatgtcttaattgagtatcttgatgagctcttaaacatgcagcaaaatagctacaaagatccaatgtatacttgatcaatacagatcaat

SEQ ID NO: 29428 - DNA, 286 bp, Zea mays
  unsure (1)..(286): unsure at all n locations
tcatcaagcctacatcggntcgggccttaatcgacttagacagagacactacaccgagacttccttctcgtgcaagtcacccgcccgngttcgtctttatcatttacaacccaaagtttggtacctgacagaggtacttctttttagatgttgaacccagcatggccatgatggattcaccatcacaagtcttttctttgcaaaattcccatcccatatgaagcatcacctcttgtttaaaacacaacatgttgttctctaaagtagagctaagcatcatataaat

SEQ ID NO: 29429 - DNA, 444 bp, Zea mays
gattcttcatcccaacatgggctagtcggcgatgccatagccaacccatattagtcttagcaattaagcaagtatcgagttcagctctattaaaatcaactaagtatagctgaccctctaatactcccttaaatgctactgaatcatcacttcttctaaagacagtaacacctatatccgtaaaaagacagttgtaaccaattttgcataattgagaaactgaaagcaagttataatctaaagaatctacaagaaaaacattggaaatggagtggtcaggagatatagcaattttaccaagtcctttgaccaaaccttgatttccatccccgaatgtgatagctctttggggatcttcgtttttctcgtaggaggagaacatccttttctcccctatcatgtggttggtgcacccgctatcaattatccaacttgagcccccgg

SEQ ID NO: 29430 - DNA, 304 bp, Zea mays
  unsure (1)..(304): unsure at all n locations
ctgcaagcttagaacaggctgcaacctttctcttgttaatgtatntaatcgattggtggaccaacataaaattatcatgaatcgatctacctctgataaaagcactttgattagattctaccaattcatgcagacgagggcccaaacgattagcgagtaattttgtgaccaatttagcaacactatgaattaggctaattggcctgaaatcaccagccgacgaagcatccatctttttaggaatcaaaataatgtaggaggaattcagttgtcccaatctctgaacattgccctggtgtatgat

SEQ ID NO: 29431 - DNA, 442 bp, Zea mays
  unsure (1)..(442): unsure at all n locations
atggacgtgaaaagtgcctttctcaatggaccaatcaatgaagaggtctatgtngagcaacctnccggctttgaagatagtgagtatcctaactatgtatataaactctctaaggcgctttatgggctcaagcaagccccaagagcaaggtatgaatgcctaagagactttcttatcactaatggcttcaaagttggaaaggccgatcctacttactaaaactcttgacaatgatttgtttgtatgccaaatttatgttgatgatattatatttgggtctactaacgaatctacatgtgaagaatttagtaggatcatgacacagaaattcgagatgtcgatgatgggggagttgaagtacttcttaggatttcaagtgaagcaacttcaagagggcaccttcattagccaaacaaagtatattcaagacattctaaacaag

SEQ ID NO: 29432 - DNA, 366 bp, Zea mays
  unsure (1)..(366): unsure at all n locations
agcttacaccgcgcccgtntgacattaccagttatattctataatttcgttatcttctgtgatgcttcaaggcaaggcttanggtgtgtcttaatgcacaatgagaaagttattgcctatgcatcccacttactcaagccgcacgagcagaactaccccacccacgacttggagttggcagccataatgcacgtcctanaattatggaggcactatctgattgggaacaaatgccacatcttcaccgatcacaagagtctgaggtacatcttcactcagccagacctcaacctccgtcaaagaagatggctnngatngatcaaggattatgacctcgagatcattaccaccccgggaagcgcacgt

SEQ ID NO: 29433 - DNA, 426 bp, Zea mays
  unsure (1)..(426): unsure at all n locations
actcagctnttgtaagatgtaagagcacttngcattatnttttaacttattcaagatatatggcctaccgcctacctgttcctcgttagcaaaggtagtgttcaaagacaccaatccagtttagggcgacatgcacatgacatcagctacaacaagcttcaaaaaaaatttccgaacaaaaaatggtcaataaacactggtaagcctacaacaagactgaaaaatatgtatcaaaattcactaaatttccctatacatatagggtagaagaaactttgattgtccatgatgaatatagtcaggatgaaataatataatagaagaccattaaataaaaaatggtggtaagaaacataaatggngtaacaaaaacatatataccgtgaaatgtatatacccgtgtaggttttggaacttgacatcctt

SEQ ID NO: 29434 - DNA, 311 bp, Zea mays
  unsure (1)..(311): unsure at all n locations
agcttctccttgaggagctcaccatgaagatngatgcacctgctctctcctcatcactctacagcgctcctgccgacggtcaggcgtcttctggggggtaggccncttgcccttcgtcgaccggggcccctgccagccctcctcccacagacgctatggcccctcgttaggctgccaccgctgacggaggtcgtcgcccccgcaagggcggatgcggngtggcggctccacccgtggagcttccaccggctggggtggtagccagggctggccatcgttctacaaccactagaccggaatcatctccatgt

SEQ ID NO: 29435 - DNA, 437 bp, Zea mays
  unsure (1)..(437): unsure at all n locations
tctaccttggtgcttatcaaatatactttaacttatatattttgctcaactcaaaattntaaacttttcattccctcttgcttattttcttgaattttgctcatggggttcacttaaggttcttaattagggttgcacattcttatcctttaagagactcaattgtcttgatcatgacacttttaagcatatacttggtgaattctttcttacttaagttattttgatgctcatgcttactttggttcacataaaataatggttcttggtttggctttttaagagaaaccgtaggtgacactggggtgtcacaatcatgagcagagaggcctgngactgtgactgggtttaacactggaaacttgtagcacacggaagaccagaggatgaatccatccacccacgccgcgcatgcatgnatagtcctgatcttggat

SEQ ID NO: 29436 - DNA, 472 bp, Zea mays
  unsure (1)..(472): unsure at all n locations
agtcacctgangctgcagctattcctcctgggaaggtcgtcattatcgttttatttgaagcccgggacatacaagctggccaacgatcaaggcgaggtctacagcaacgcttggaacatcgaacagctacgtgcttntacccttaaagtgtttcaagtcgttcatgtatctcgatccttttacacgtataaataaaaagtctaaccgtcaagggaggatcggccttgcctcaacaaaaaccgaacctccctcgggggctagaaggggggaaccccctctgcgtcaaaatttttctcggaaaagttttctaccaaaacgacttctcgtgcttttcgactatatcgataacggaatcctaaaaacgagctagagggaccttgaacgacaaggccgaccgagccgagggactcctacgcctccgggatacggatacctcactcatcaccttccgcgaaaagtactcacgctcgga

SEQ ID NO: 29437 - DNA, 362 bp, Zea mays
ctaccaaatggacgcgaaaagtgccttcctcaatggaccaatcaatgatgaggtgtatgttgagcaacctcccggctttaaagatagtgagtatcctaaccatgtgtataaactctctaaggcgctttatgggctcaagcaagccccaagagcatggtatgaatgcctaagagaattccttatcactaatggcttcaaagtcggaaaggccgatcctactttatttactaaaactattgacaatgatttgtttgtatgccaaatttatgttgatgatattatatttgggtctactaacgaatctacttgtgaggaatttagtaggatcatgacacagaaattctagatgtccatgatggggg

SEQ ID NO: 29438 - DNA, 245 bp, Zea mays
  unsure (1)..(245): unsure at all n locations
atggctcaagataatgagggttacattttataccctgccggttatcctgagcacaaaattangagaattcactctangaagtctcactctgggtctaatcatgcttttatgtataagagtgaggtatctagttctaggcaatccactcatgttaaattgcctaagaagaanactcctactgcatcaaatgaacctaatatttcatttaagacttttgatgcttcatatgttttaactaacaaatc

SEQ ID NO: 29439 - DNA, 323 bp, Zea mays
cacacagtccgagccctatataactctgcttgctgagaacctttatatggagtcttcacaggaataaagtgagccactttaatccatctattcacaatcacccatatagcatcatattctttctgggtgcgaggcaagtcagtaataaaaatcataccaatctcttcccatttccactcgggtgtcttcagtggatgcagtagatcagctggcctctaatgttcagccttaactctttgacacacatcgcacatagccacatgtgcagccacatctctttttaatccataccaccaatactttcgctttagatcctgaacatc

SEQ ID NO: 29440 - DNA, 473 bp, Zea mays
  unsure (1)..(473): unsure at all n locations
ctcagagtcacctgcggcatggcaagcttgtcctctggcggcaccgggcagtccgcactacctgatttcgcgccttngccgagtggccggggctttgccgagtggcttntatcgggcactcggcaaagcagactttgccgagagccgcactcagcacagttctgcgctcggtaaagagctagtttaccgagtgtaggccactcggcacagcaaagcactcggcaaagactgctntgccgagcgtcaagcactcggcanacatggctctcggcaaagggccggtagcggccgtctacaaccgacgggcgtcagtctntggcgagtgtcaaatatctggcactcgacaaacatagtccttgccgagtgtgctatgtagacactcgggcaagcatatcttaaatntctttattntggccaccaaactgtctgtggcatgttctacactatgtagacctacattgtacatcttggga

SEQ ID NO: 29441 - DNA, 237 bp, Zea mays
tgagcggggactcactctcttgttattaggcgagtaaagcaacccaaatttcccggagaccccctccctcctcgggggaccaaaccaactacttgcaggggcgtaccctggaatgatctttgcacactcagaggtttggactgctcaacttaaattttacgtaactgtcaaaagatacccgaaaggtctgtgacatctccgcgagttaaaaaaggctgtgactgtgtaaaccagtct

SEQ ID NO: 29442 - DNA, 307 bp, Zea mays
  unsure (1)..(307): unsure at all n locations
agctntntctgacgaagtaagcaccanactgaagctttgtctgattgcgatagttaagcttcngctatggttaanaattttggcagcanaacagtgcaatagcaatgaatgctgtggtaacttcacacctacctgtctgtttatatagtgctgcaggtaagaaggtgaatcgtcaggattttttacacaggcaaacagctgctcgcacccgctgcgcggtgggccgcaaagaccaaaacagtgaacctgcatggtgggaccgctacgcgctcggaaactgtatcgtttctcaacaacgagctcaggg

SEQ ID NO: 29443 - DNA, 437 bp, Zea mays
  unsure (1)..(437): unsure at all n locations
taatgagacacttntgagtcttgacaaaatgttttgtttattactataatcatatncctggggatcatgtggaatcgatggtttacatcaattctgcaatgtagcacaaaacatgcctctcctatatggtgagacaaatggcctgtttggatccattagctgctaatagttagctagctaatattagccgttattagctagtttggttcaactagtgaaatatagttgttagtttgcgattcaaataacaattagctggacctgtttggatccaaggagctaattattagcaactaaccattatctctatgcattaggacaaacaagtgataatggtctacaaactcatgcagtgattctgcgggtttcattgtcttctctctatcagatgcttatagttgctagttttattgtgaatcatagcgcccttctctagt

SEQ ID NO: 29444 - DNA, 450 bp, Zea mays
  unsure (1)..(450): unsure at all n locations
acattgactntcgccatgcacacccaagtgcgcaagtatgaaagtgatggttttctcccaacccacttctcataaggggttttctcttcttttcccataggaattctattcagaacatgacatgaagccaggactgcctcccccaccatgccttagataaaccacaagtgtctaagatggcattcaccaggtcagtcaacgtatggttttttcctttcagcaatcccgtttgattcgggtgaatagggaggcgtcctctcatgaataatgccatgttctgcatagaaatcatcaaagaaattgggaaataatctgccaccatgatctgatctaagacgtttgatctttctctctagttggtgttcaacttcagccttatagaatttaaagtagtctaaagcctcatcttttagttttagcangtatacatagcanaatctagacgtatca

SEQ ID NO: 29445 - DNA, 446 bp, Zea mays
  unsure (1)..(446): unsure at all n locations
actaagcttcaaagggagagncacatttgggactaacaaatgatcattttgagtattacttaatttgtagcgcatgccaagccgggaagcaagttgggactcatcatccacacaagaacatcatgactagtgacaggccactggagctcctacacatggatttattcggcccgattgcttacataagcatcggcgggagtaagtactgtctagttattgtggatgattattctcgcttcactagggtgttctttttgcaggacaaatctcatacccaagagaccttaaagggattcttgagacgggctcaaaatgggttcggcttaaggatcaagaaaattataagcgacaatgggacggagttcaagaactctcaaattgaaggcttccttgaggaggagggcatcaagcatgagttctcttctcctacactccacaacaaaatg

SEQ ID NO: 29446 - DNA, 469 bp, Zea mays
  unsure (1)..(469): unsure at all n locations
tgcangctntgctcanacgagcgggtaatacaaactttcttgtggtctttcacaatatttggagactcacaagagacacctagtcgtctaggagctagaagctccaagagtaatgaatccacaaaaaactcaatgtagtaccacagctcgaatcaagaagagcaagaaggatttagagatgaagcaccacaatcgcagctcttcaatctcactcaaatatttctctccaaagatttgaaatgggatangcaagaggtgtgtgagagagagtgggaggtgtttctaaggttagaaatggaggtccagtcgtgctctcttgtggaggagagaggtaggagtgagttatataggtggggcttcaaaaactattcgttttgacttttttgcacaaaaccggtgaaccgatttcaaaagctggctgaccagcgaatggcgaaaaagtaatagtacaaactgctgaccggttcac

SEQ ID NO: 29447 - DNA, 442 bp, Zea mays
  unsure (1)..(442): unsure at all n locations
tcatcgaagcttataagtntctggatgttatatggtcactttagttccagcgatgaagcagtagaagagcaatctatgaagggacccatggataagttcgcaagaaaaaggtttgagtgttggcatcgatgcttcttcaataagctaactgccaagcaaaaactaaaagcctgaagatgatctntgagtagccagaatcaacgttcgcaatcaacaaccggatgctcctgaaaggccagattttgttgaagttccatctcctcgaagagtctgcaaagtgaagatatgtatctgaagtaaagctatacccataacccttctaagccgaatctcgaggacgagattccttttaagtggtgtagatttgtagcatcccaaaaaatcaaatcttagaattttctcaaactcgctctaaattcaaaatgaatttcaaatttcattt

SEQ ID NO: 29448 - DNA, 328 bp, Zea mays
  unsure (1)..(328): unsure at all n locations
gtcacctgcngcatgcaagcttctgcacgatggatagtctctgccaaagagaatttactatgtttgggctacattccagactgccatgacgaaggacttcgccatgactgtagtattgcctcatacgaagatatagttgctctgtagctcatcggaaactgctttggatctgagtgcccatcatacatggggagctgaggtggcttgtatgatgggggccatggnggtagcctgcagttctgctgccaagggagaagcatcatcaaaagtaaaggcgtcatgattaaaatcatcataccatccattctcgntgaataagccttcttga

SEQ ID NO: 29449 - DNA, 450 bp, Zea mays
  unsure (1)..(450): unsure at all n locations
aaactaagctgngatatctacaaatctgaagctgacaggctgaagtttgttctgtttacagtgnttccatgtgtgcagccagccttcaaaaaagcagcaactgtgccccgagaagctaccagggcgcagaagtcagcatgcccaccaataacttcgtcaagggcatcaacttcgccttcaatatgttctaatgttcttggcaagttttcagctgaaggtgtaaatttcgaagagctagctccgacagagtgaaacacgtccttcagccgctgcacacatcggatgccgaagcttaagcatttctcctgaagttctgtaaaggatttctgcagatttgagtatttatccacttcagtcttcaggcttgcttcaaaatatttcttttcttggctcgaattttctgattgacggagcaantcactttttaattttgtcattttcaagttggac

SEQ ID NO: 29450 - DNA, 401 bp, Zea mays
gcaagctggtgccacctctgtgaagctccccgagcaaggattcggtgtttttcttcgtcggagaagccagaccacgctcgccggagctctcacccgcgccggagtacgcggaccgggtaaaccactccaccacctttcaattccttgtgcacacagtcgctgtgtgaccccgtgatgctcaccgtgccctcagattgcaccacctcgccggagtgtggccggtatactcaccgacgacgaggacaccctcctgcacgcgaggaccgggcgattccggccacctacaacgccgagccgtacctcgacgtgaccggcagaagtcttcctgagccaacctcacccttcgtcggacctccctcgccgccggtaagccgcgccgcccttttctttcccacggttac

SEQ ID NO: 29451 - DNA, 446 bp, Zea mays
ttgaccttcgtcatgccgccgaaaaagacatcaggtccagtggctgtattgctgccacttgacgttaatcaagaaacattacgcaaagctaggagccagaaaaggaaggctaccagtccaacaccttaggaggagttggaccaataaatcagggacctcgaagccgtccatcaataggttcagaagaagaaagagaagatgcttcgtctcgccaatctttaaaagaagattgatgaggctgctgaggaaatgtgtcatctcacccaagatgaccaagaccgaagacatcaacacagagagcttcgtcaagacaattcataccatgatgatgaatggtatgatgatttccatcatggaaatattgcttttgatgatgattctccctctacagcagaattgagggctacccatgggccccatcatacaagcacctaactttctatgat

SEQ ID NO: 29452 - DNA, 328 bp, Zea mays
  unsure (1)..(328): unsure at all n locations
agctngntatgcacttcagaaaatagtggattcttcgttttataatggtttgtgcagaaccatacatagcatatgccaccatagccattttctactactggtatccaaatatctttcaaatctatctctagttgtgtgtaccatagcatagccaccatagtgaatctaatctgccaccatacccaccatagtgaatctgccattnttctactatgtgtgtaccataacatcttgtgttcactagcgcgtttcttaatcaaccgccagtgctaatgttatttccactggcgggctgcctaagaaaaccgtcagtgaaaatctgttccac

SEQ ID NO: 29453 - DNA, 356 bp, Zea mays
  unsure (1)..(356): unsure at all n locations
tcacacagttattgaagaatgatttttatttctattggncttcaaagcgggatgaagcttgtgaacaattgaagatattattaaccactgctccggtattggctcaaccaaatattaataagccctttgatgtgtattgtgacgcatcaagtagtggcctcggctgtgtgctaatgcaagaaagccgagtaatggcatatgctttaaggcagttgcgccgacatgaggaacattatcctactcatgatttggagttagctgcggtggttcatgccctacagatctggcgtcattatttgctgggtaatgtctgtcatatttatacataccataaaagcttgaatatatcttcaccc

SEQ ID NO: 29454 - DNA, 322 bp, Zea mays
agcttcaccttggcccgctaacttcagggcatgctcctattctatgtacaacggcagcactgacccagcacaatacatcatgagctacgaagttgtcgtcgcatcatccggaggggatgacgccacaatggccaaatcgttcatcatcgtgctcgaaggcccgaccctaacctggtacaccaggttacctccactgtccatcgattcctggaaaggactccgggacaagttcctgctcaaatttcaagggtaccaacccgatactgacaccctggctgagctatcactctacaagcaacaagagaaagaaacccttcatgag

SEQ ID NO: 29455 - DNA, 298 bp, Zea mays
  unsure (1)..(298): unsure at all n locations
ctcgccggacttcggtcgcccggctgcacgcgtggaccgagcattccggtaagccattntcaaatttcttgcacccacgtgttccctagcacccaggggagctctctgacccgtgtgattgaactatcacgccatgagtaggccggattcctcgccggcgacgagcttctccgcctgcgcacgtggaccggtcgactccgaccatccccgacggtgacccgcacatcgctgtgatcctcgagacctctcctacgtgctcgaccacctcaccagagcagcctcggcgctggtaagcccc

SEQ ID NO: 29456 - DNA, 449 bp, Zea mays
  unsure (1)..(449): unsure at all n locations
agctntctcgactaagtcggggacagggcctcatggactgttgatattctcgtaagcnggcaggccgaccgagccgagggaatcccacgcctctgggatacggatacctcactcgttccttccgcgagaagcaactctcgatcgcacatacatccctgttaccaacagagagtccagatgctcgaaacaagaggaaaaaagacgcagcttctcaagcacggcgagggtgtgtttttctggcctcggcggtcgcagaaggcacacgctacaagatgatctgatcctgcaggctcgggtcttcacgccgaagggagccgtancaccctccgatcgacgactttacagcaaagcccgaccaacccttggcggcgccgaggtccagggctcctcaggaatcggcccgacacgcggttaaccggttctcctgatgcctggcaaccgcttcaagg

SEQ ID NO: 29457 - DNA, 420 bp, Zea mays
  unsure (1)..(420): unsure at all n locations
ttgcactcttgcaatatgtccctttatatctgngaatcagntntgaggatagcccttctgattcccattgcttttagcttccgaacacctaaaagcaaagcttcgtactctgcaatgttatttgtgcaactaaaatcaagctttgccgcataacaagttttgaccttggaaggtgaaaccaacacagcagacgctcctgctccgaaggttccccaagatccatcacaaaacactatccatgcttcggcgtctntatttgcttcttcctcctgagcccctggcgtccagtcagcaatgaagtctgctaacgcctgngactgaatcgaagatctatgaacatattcaatacaaatctcattgagctctgcagcccattttccaatccttccagtagcttctctgttcctcataatatccttc

SEQ ID NO: 29458 - DNA, 498 bp, Zea mays
  unsure (1)..(498): unsure at all n locations
agctnntagtgatagtgagagtgattcgttgtgttcctttgagctctngcgctnggatcgctntcttctttctcattctttcttgtgatcaatactcaattgtaaccaaagcaagagacaccaattgtgtggtggtccttgcggngaagtcttgtcccggttgatttgagaagagaaagctcactcggtccgagggaccgcttgagagagggaaggggttgaaaaagacccgacctttgtggcctnctcaacggggagtaggtttgcgagaaccgaacctcggtaaaataaatccgcgtgtcacactctctactcgcttgcgattngttctcaccctctctcgcggactccattatattcttacactaacccgctttgagttgcgattaactttgaaatttcagtttgcctattcaccccctctaggacttcaaaagtctgatcaacttttgaattttgacggctctaattcgaacatggcctgtgaactctccccta

SEQ ID NO: 29459 - DNA, 389 bp, Zea mays
  unsure (1)..(389): unsure at all n locations
tcggtacactacgacttcattctcttcagggtgtgtacatattttttccccttcgncggccctcacaatggacaaatcccggaaataccttcctctcatgttaacaagatgcttttctttgataatcgatttgccgaaaaccgcatggcttggtcgccaagggcgatcttcggaatcttcaccaccactgtccacatcataactgtcgctgtcaccagtatcttcagacaaaccttgcagaatctcattggtgatttttctgtattcgtccacatcataactgtcgctgtcaccagtatcttcagacaaaccttccagaatctcattggtgattttttctgtattncgcttcgacatcgctataagaaaccccaagttcttctcttcgt

SEQ ID NO: 29460 - DNA, 387 bp, Zea mays
gggattattaattactctctaaaattccacaagtatgggtgttggcttttttaaatataccctaattccctattggaactaaaaatcatgaaactatttttattaaatactatagaaaattatggacttagcagaattggtcttgcatttttagcatttttctgcacttttctagaaattttctaagtctacgagaaaaagaaaaagagaaagtatgaatagtaacgggctcaatctaagcccgagccggtccaagacaggcgaaacgcgctcgcgcgcgcccgcgttgcccattcccatagaggtcctggtcgtttaaaaacccataggactcctttcactgtttctctgttcactgacatatgcactaaggggcctcctttctat

SEQ ID NO: 29461 - DNA, 359 bp, Zea mays
  unsure (1)..(359): unsure at all n locations
aatcgaacatacatctacattagttcatattcaatcctaacaattagagtgtgcagtctggggcagaacctcccaagttattggacccacatgcacctacccttgtctcatagacctcagacggctatgcatgtgcaccagataacttaacaggatctgtccgagtgccccaaggacctcggataaaccacttacaaccaataccacgggattaagtaaacacgaatcacacaccaacaattttgcagctgaaatcttatcaccaaattntacatgttccattcagtttacaatgtacatgatctgagtgatacaaaagcgattcaagaataacttgaattgtatatattggtataagt

SEQ ID NO: 29462 - DNA, 301 bp, Zea mays
  unsure (1)..(301): unsure at all n locations
agcttatgaagaatcttcattccaacatgggctagtcggtggtgccagagccaacccatgttagtcttagcaattaagcatgtgtcgagttcagctctatcgaaatctactaagtatagctgaccctctaacacacccttaaatgctattgaatcatcacttcttctaaagacagtgacacctatattagtaaagagacagttgtagcccattntgcataattgagatacaaaaagcaaattataatctaatgaatctacaagaagaacatttgaaatagaatggtcaggagatatagcta

SEQ ID NO: 29463 - DNA, 413 bp, Zea mays
  unsure (1)..(413): unsure at all n locations
tgtgaagattcttcatcccaacatgtgctagtcggcgatgccagagccagcccatgttagtcttagcaattaagcatgtgtcgagttcagctctatcaaaatctactaagtatagctgaccctctaacacacccttaaatgctattgagtcatcacttcttctaaagacagtgacacctacatcagtaaaaagacagttgtagcccatttgacataattgagatacagaaagcaagttgtaatctaaagaatcaacaagaaaaacattggaaatagagtggtcaggagatatagcaattttacccanacctttgaccaaaccttgatttccatccccgaatgtaatcgctctttggggatcttggtttttctcatatgaggagaacatncgtttctcccctgtcatgtggttt

SEQ ID NO: 29464 - DNA, 364 bp, Zea mays
  unsure (1)..(364): unsure at all n locations
actcgtactcgcgatcctctgagtcacctgcngcatgaagctngaaaatacctagacacagtccgaaggatcgaagcttccttcgaaggattctctgttaagaatatccctcgagggcaaaatgaacatgctganttgttagccaggtctgcagcacaggggctgccgctaccttcggatgtattcttcgaaacaataagggcaccttcggtggagttacttgaaagagcagttcttactatttcccctgtgtacagtgaagattggagaactgaaataatttcttaccttcagggcaacttcctatcagatgacgaagcttataataaaagaatagaggcaagagctcgtccgtatatcatta

SEQ ID NO: 29465 - DNA, 452 bp, Zea mays
gatcgactggtcgatcgcgctcaccctggtgccttcgatcttattatttctcttgtccaagccttctaagtaactactctccgtgacatttttggcatacaaggatcaccaatgataatatttttgtctgtctttatcggtctctttcgatcgaatcaagacttttttatccgtcggttctattatattgacagtaaatgaatgtttgtcaatttgcatctcatgaaaactcaaccgaccctcatttatggccgattgtatctatcgacgaaaactttacaatcattggtggcataagaaaaagaattatgctacttgcaataagtagatcgcgtactctctttagttcatcttgaggaggaatagtatgagccactttaatggtgtcattttttaatagctcatcaaatattttgccacatttggcaacaagaaaagtaaaattaacttat

SEQ ID NO: 29466 - DNA, 296 bp, Zea mays
  unsure (1)..(296): unsure at all n locations
gatcctcagagtcacctgcngcatcaagcttaacaacttaatcctgtggataannatatattttcttgtttatacaacgaaactattatatgaaatctaaacaatgtcctttattacacanaanataaaactgaatgaaaaagactgctatcaaggtaggatattngtcaatagatgtgctttgactctggcacagtgctgttgactgtgcgagcttcggactgttctctgaagtccctttggtgtggagcatattggctcccttctggctgctggccttgttgcagcggtggtgg

SEQ ID NO: 29467 - DNA, 440 bp, Zea mays
  unsure (1)..(440): unsure at all n locations
ggaagccatggtaagtagcatatgccaataatatacgaattgttctctgcctagctacgggtgcataggtttcaccaaaatccaaaccttcgacttgtgaataccccttggccacgagtcgagctttgttccttgtcaccacaccatgctcgtcttgcttgttgcggaagacccacttggttcctacaacattttggttaggacgtggaactaaatgccatacctcgttcctcgtgaagttgttgagctcttcttgcatcgccatcacccaatccgaatcttgtagtgctttctctaccctgtgtggctcaatagaggaaacaaaagaataatgctcacaaaaatgtgcaacccgagatcgagtagttacccccttatgaatgtcgccgaggatggtgtcgacngngtgatctcgttggattgcttggggactcttgggt

SEQ ID NO: 29468 - DNA, 316 bp, Zea mays
  unsure (1)..(316): unsure at all n locations
agctngtgaagagtgttgtggcctttgctgctggcttcctctatcatcagtttgagcagagttatggattgacctaacatgcctcgggtgaaatcnttctccgaagcccatggtcatttcagaaaacctgaatgcttcctcccttctttggcggaagtcattgtcagctcgaatgtattcgtccatcttctggagcagcttctccaacgtttgtggtggcttcctggcaaaatactgctatgatggccccggccgaagccccttaatcatggcctcaatgacaatctcattgngcactgtcngcgcctgtgccctt

SEQ ID NO: 29469 - DNA, 439 bp, Zea mays
  unsure (1)..(439): unsure at all n locations
tctaagggagaacacgtgataagtctgactcacgtacaattcgaaaaagatagaccttgggcagcttgtcaagcaggtaaacaggtgggaggagcgcatcacagcaagaatgtgatgaccacttcaagacctctggagctgctgcatatggacctcttcggacccgtcgcctatctcagcatagggggaagtaagtatggtctagttattgtcgatgacttttcccgcttcacttgggtgttctttttgcaggataagtctgaaacccaagggaccctcaagcgcttcctcaggagagctcaaaatgagtttgagctcaatgtgaagaagataaagagcgacaatgggtccgagttcaagaaccttcaagtggaggagttccttgaggaggaaaggatcaagcacgagttctctgctcctaccaccacagcanaatggt

SEQ ID NO: 29470 - DNA, 430 bp, Zea mays
  unsure (1)..(430): unsure at all n locations
tgagcatctgctgttctaatancaccttcgaaagtcagaacatgttatgcagccaagctatattttagttgtacaaataatattgccgaatacgaagcactcttgttggggctttggaagttaagggcaatgggaatataaaaggctattctgaaaactgattctcaagtcatttctggccatttagataaaagtagcaaggcaagagatccgaaactttgaaaatatttggatacagttcgaaggttggaggcttctttcgaaggtttctctgtcaagaacattctcagaggcgaaaatgagcttgcagatctgttagcaaatcagcggctcaggggctccctctaccttcgngaagtatttttgaaacaataaaggcaccttcagttgaactcatggagagaacagtgctcgccatttctctagtaca

SEQ ID NO: 29471 - DNA, 382 bp, Zea mays
  unsure (1)..(382): unsure at all n locations
cgcttacaggctcacaacgccaaatggcgaggtctctgttcactcctggaacatcgacaaccttcgtaaatttttgtgttaatacttatggctgagttcgcccttgtaattcaccgcaaacaatcttgtaccggcccgcactcttttcctccctgggggtgaggcttttaacgaggcggagccatgtaatatatgtgaaaaaaattcccccgcanaagcatgtgtcgaaaaaagaccgcgacaacggtcttcggcattcgaccaattcgaagtcaccgcgaggctaagcgctagccacccccgcgtgcgaccaatccgcgcataagtcgcctaagggtgcagccggacttatcacaacaagtgcgcagaaatccgtagtcta

SEQ ID NO: 29472 - DNA, 458 bp, Zea mays
  unsure (1)..(458): unsure at all n locations
tcgtcgatcacgctcgccatgtgttctatttatgacttcanctgaaggccaccgtcgttcatgcaactaccatatcaagttgtgatgtggtgagtcgantcactatctttactatcggctntatgatcngaaaataaaacgcttccgatgcatatatgattaagttagaaatactcagaacgcgaggtgtgcttctagaagtctagttgccgaatatatttgaacgagttctattttgtagaatatagtatttcggtgacgcgcacgttacatttaagtatttcaactgctcgaccacaatattgttagtattacttctgacgaattataattggttgataacaataaataggttcttatgaaacaagggtggataatttattaagcggggaaatgacattagcatttaaccaattagctaatgacgtgtgttgagctgattatgttaatgtattgtc

SEQ ID NO: 29473 - DNA, 341 bp, Zea mays
  unsure (1)..(341): unsure at all n locations
ctcaaagtcacctgcggcatgcaagcttctaaagggagaacacgtgataggtttgtcttcttatcaattcgaaaagatagaccttgtgcagcttgtcaagcatgtaaacaagtgggaggagcgcatcacagcaagaatgtgatgaccacttcaagacctctggagctgctacatatggacctcttctgacccgtcgcctatctgagcatangaggaagtaagtatggcttagttattgttgatgacttttcccgcttcacttgggtgttctttttgcaggataagtctgaaacccaaggtaccctcaagcgtttcctcaggagagctcacaatgagtttga

SEQ ID NO: 29474 - DNA, 453 bp, Zea mays
  unsure (1)..(453): unsure at all n locations
actaagcttcgacctncaactaactcgggtgcgcactttttctgttggtcaaaagaatcctgacctgaagaccttaccgactagcgtcttggatgctgcatgtattccacattgcctggcatggacctcatctagaagtcgcttcccggtagatgagaggatgcacttcatgaggatgcccgatgcaccccttctgtataatgcctccccaatgagtgtgtagtgagctgactgtctagcgatgctctcggctgcattgttgtcatctggttcctcttcattctttatatatctgatgatcggccttctccagtcatcggagtctgactctggttgattcacgatattacactcttctgcttgatccattgagatgcttggttgtagtatttcttgtacaaagactccacgtgggagctgagtttgactggaccctagcttggacagtacatc

SEQ ID NO: 29475 - DNA, 290 bp, Zea mays
  unsure (1)..(290): unsure at all n locations
agctacncatgacgaggtatgtgaccagttaaatggttctcgatcatcaagtctacatcgacacggtccttaatcgactcagacggagacactacaccgagactcctttctcgtgcaagtcaactgcctggtcttagcttaattattacaacccanattttggtacctagcagaggtacatcttttccaaatgttgaatccatcaaggcctttgacagattcaccatcaagttttatttttgaaaacattcccacccactgaagcatcacctttgttgtaaaacaaaaca

SEQ ID NO: 29476 - DNA, 453 bp, Zea mays
  unsure (1)..(453): unsure at all n locations
tgtgatttatccaatttaaaacaagcaccatctcttatcatagatnttctatggataaactcaacacaagagatggaattagtagcacaagcactagtttcttatttagcaactcttttatatgtggaagataagcatgttgctaaaaatagagaaacctcataatatggactaaatttcccttgagcccttaagcacaatatattttaaatgacatgaataatatgcatggttgttcaatgaagtctaaagggctgacttaatccatattatggtgagtgtctaataaagaagaatcaaatccaaattaactagatagagaatacgtcacataattttggattgtgcaccatatgataatattcattcatcttccaattagacctttatttcataatcaacaattgatgtatatcctcaagtgcttctttntccttagtggctacacaagtc

SEQ ID NO: 29477 - DNA, 435 bp, Zea mays
  unsure (1)..(435): unsure at all n locations
agctacacaacaataagatntaaagcacanattttgaattctaagtttatagaatgctcnccctaaatatgtgcttacattanaatcttaactatggccttaaatgccaaaatgcacatacttangctaattcgaagcattgctacaccttagcacctgtgggatgcattgtgtgaagaatcaaaccgtgatgcatataacacacaaatgcacagaatcagagttaaacaccaattaaataaatataccataggaatatcaacctaccactattcaccattaagataccgatttaaagcgccagaaccacatgaatatctatcacaggataaacacaggtgattccaattgattcatactcatggaagcactaattttgcttttcaccatataatacaacaagaagcatatgatangtattatcaacaaactaac

SEQ ID NO: 29478 - DNA, 378 bp, Zea mays
  unsure (1)..(378): unsure at all n locations
ccacaaaacggatgggagctgcctgacccaatttgcgccatgctttattaagcagtcataggtgcgcgtcttgaagccccctaagaatctctgcagttgccctcttcgcctgtcgcgtactnctagggtgagccacagatgcaaagcaaagctgggtgccgatgccctcgcaatattcctgaaagatccgacttgtaaactgagtctcgttgtttgtaatgatacgacttgngaccccaaatctactgacgatcgacttgaggaaggcgacagcagcaccctgtgtgatgctgaccacaggggtggactctggccacttggagaacttgtccatggcgacaaagaggtaccggtagccactgatggccctatgaaacg

SEQ ID NO: 29479 - DNA, 321 bp, Zea mays
  unsure (1)..(321): unsure at all n locations
agctntggatattcagaagtctaactgtgttctctcgtatcgttctctccgagctaatcagcctacttctcctgctgaggggaagactaagaagaagagacgtcttcgtcgagtgtctagctnggatcaagatgctggtccctctgttcctgctgctgatgaagcgccggtgcctgcatttgctgaagctgaccccaatgggtgtgactcaactgctgtggaacccaatgggtgtgacctagatgatattgaacccaatgggtgtgatctggccaaagctgaccccattgggtgtactgtccgcgtcgttgataaagatga

SEQ ID NO: 29480 - DNA, 447 bp, Zea mays
  unsure (1)..(447): unsure at all n locations
actcagctcacatttgcaaagnccttgctgcactatcctcatattactcctcatttttgacatacagggtgtcgggatccttattgtaagacaatgacaaacagccttgcgacttaaagcatctgccaccacattagcttttcctgggtgataatggatttccaagtcataatctttaattagctcaagccaccttctctgcctcatgtttagttctgtctaggtaaagatatacttcaaacttttgtgatccttatataaatgacatatattccctcgcagataatgacgccaaatcttgagggcatgaacgactgcagtcaattccagatcatgagtcgggcaatgctactcatgtcggcgtagttgccttgaagcataagctatgattcgtccttcttgcatcaagacacatncaagtccactgcttgacgcgtcacaatacac

SEQ ID NO: 29481 - DNA, 304 bp, Zea mays
  unsure (1)..(304): unsure at all n locations
agctntgaataacttgttcgtgtagatcggtaacgattaacttctccacttatgaggcatcatgttcgaccagaagatatggatcaacaactnggttaaccataatatagctatgtcctcgaggcatctccatgcctcaattgngataccatttgggttcatcggcttatcccttncatccttttcgacgcccctctaaactcagattcttggatcctacgcacaaacatctattggtgtcatcaaaagagtcatctatataaaaggttgtgtcaccattctccatatcgaacaatttgtcaaa

SEQ ID NO: 29482 - DNA, 427 bp, Zea mays
  unsure (1)..(427): unsure at all n locations
tagataaatgtagataattacgtcttttagagagtatgcacaagtggcatgacctgccatttcggtaaatccttgtcaataaattactggtgatcggtacaggttcttctctgcactgcagcccaagtgaagcgacaacactgacatctagtgctattgttcgtgggtcaataaatttgtaatcaaattcagagttagatcacaagcccacgtatccgatttcacaaacctattnattttgttttcattttagattaaatngacatcgatgatcgatcacatgagcagccagcagctgagacgagatcttcatagaatcacctgtcatacagctgagtcacggtaactcacctcttgcaagcctgtctatccatcgctactgtaccatgccaagccatcntcctttccccacccagtaccccaattc

SEQ ID NO: 29483 - DNA, 326 bp, Zea mays
  unsure (1)..(326): unsure at all n locations
agctnggaggcgtcgatgggaagcctactnggtgtagactccttcttctcttctttcgtcgcattgaatgcaacgggttgcacctccggtgtagaggtggctccttgctccaagttgacaatgtgtttggagtctttgatcattagttcanagctcacaaacttgccaataacttccttgggagacattagtttatatctaggatccccacgtattaattgaacttgagtaggtttgcgaaatacgagggatctaagaataaccttgaccatttcatggtcatcccatttggtgctcccgagggtgcgcacttggttcaccatggt

SEQ ID NO: 29484 - DNA, 304 bp, Zea mays
gagcacattttaagacttactaatgttcattttgagaaagacatgggttgtagcgcatgtcaagcagtaaagcaagttggcacccatcatccacacaagaacataatgaccacggacaggccactggaactactccacatggatctatttggcccgatagcttatataagcatcggcaggagtaagtactgtctaataattgtggatgattattctcgcttcacttgggtattctttttgtaggaaaaatctcaaacccaagagaccttatagggattcttaagacaggctcaaaacgagtttg

SEQ ID NO: 29485 - DNA, 314 bp, Zea mays
  unsure (1)..(314): unsure at all n locations
agctngccttcgcctcagtatatcacccacagtccaatgtagttgtggaacgcgccaatggaaaaattttcacagctgtcaagaagatgctcctcgacgnaaaaagggcaggtgggccgatttgttacctgaagcggtctgggcgctaaacacgtttgagtgcagggcgattgngttcacccctttccgccttctatatggatcggaggccatgaccccacaagaaataaaacatgggtccctgcgaacagtttcgtcagctgtccccgacgtggacgaacccacttcgaaggatcttatcgatggagaccgca

SEQ ID NO: 29486 - DNA, 228 bp, Zea mays
cttgcgctcataactttctggattccgggacctcctgaccatttgattgaactatcttgccggaccaggccggtcttcttgccgtcgacaagcatacccgtctagccgcgtggaccgaacggactccggcaatttcgtcgacgtttcgcaaaccgatgtgatccccgcgacctccctttctcctcgacgacttaccggacagtctctcgcgggaagccccttcgcctt

SEQ ID NO: 29487 - DNA, 421 bp, Zea mays
  unsure (1)..(421): unsure at all n locations
agctnngtcagtggcggcgctgcagatagctagggctntgattatatntatgtgggagacagaggagtgttctcgctgccgtcaaggaacagtgcgcgcggcgggcgtcgctttcgaccgacggngtcccctgctctgccgcggccaccaccagcccatcacccatcatcgcgtggattggttctcgtcttgagcgagacgactacccctagctaggcagctagcctcatccgatcctgtaagtaacagccggccccgcccttcctcactcttctcctttataaatacaggtacaaatctcgcgcagggcatgcanatgcatcatctagtagtctagccatcctctctcctcgtgcctcctctggctttcgtcgcggcaggctcgatcttcatcgcacacacatggnggtggggataaact

SEQ ID NO: 29488 - DNA, 461 bp, Zea mays
  unsure (1)..(461): unsure at all n locations
actaagcttcttcagtcttgtcccgttgcttatttgctttttaacctttttttctttaccgtggagtttaaaatagggatagaaaatctgatgatcttaacctaatatttagattacaaatataattaaattttagatccgaaggtaattgcttatatgatggattattaaatcaaaacatctgattataaggggttatagatgctgaaagtcaagcttatactctattggttatccatcttaccaaatataaagaataaatagaaaattatcactttaaccaattataatcaatcatcataattcataagacaaacactggttattttaatgtgtagtttttattataataatttatatataacttaaattataacactcaagttgtgatcaaacagctcctgatttaatcggcagccgaagaagcgaanaaacagcaatgtctaaggttattttcagta

SEQ ID NO: 29489 - DNA, 332 bp, Zea mays
  unsure (1)..(332): unsure at all n locations
agctngagaccgacataagccactatcgacgacaacatcttgtctgtagcttattctattctaatttcaaggtaaaagacttttcttcagttnttattatctgtaacaacaaagatgttttctaacgaaggttgtttgtgcacagagtatgctgttgagtaacgctttgagaatgcaacaagattttgaagataaaaaacatgaagttataattgagagtntagaaagcaaaataaaagatcaagcagcttctcttgaaaagaaggacttcgagcttcagacaacagaaggtttattggcagaagctaaagctaaaattgcagaattaaata

SEQ ID NO: 29490 - DNA, 453 bp, Zea mays
tctctaccagttagaaagtttcgaacaagaaaagctgaagcttaatgaataacttgaggctgaaatccagaatggtttaattgtgaaaaaatcattgataggccttcagaacaaatgtttgaaattcagcaatctatgtgttcaacgactgaagaaggagctttattcagtccgggctaagagtgaaaaatttactccttctgctgaagatctaccacgagccttcgaacacatcgaaggtgagattgatgacctcgatgatgttattgctggacacgacgacttttgtgccctggtagcttctcggggcaccactgctgcgttcctgaaatctggctgtgagcacagaaaaattatcaatatacccaatttcagcctatcaccagcaattctagatgatattgccgacctcgcccgaagcattgcgaataaaattataaaggtgatatggac

SEQ ID NO: 29491 - DNA, 461 bp, Zea mays
  unsure (1)..(461): unsure at all n locations
agctngaagctgggctctgcgctatgacgaaagacgatcttgcggatagccttgcatataatagtctgaagatatgagaattgtatantttgaaatttattaattttgaatcattcttttatccttatactaattcttttttcatatagggtttaatactgagcaacgctntgagagcgcaaaagaatgccgaagacgagagctataatattgctttcaacaacctacgaacagaggttattaagctgaggaacgaagctntggaaaaagataaaattctgcttacattggtggataaaataaaggaagacgaagctacctctaaggctcaagctganacccataaacgtgaaattcnggatctttcgaaacaactagctagagctaaagaagaacacatacttgaagagacaaaacgagaacttagtgatcaatgggcanatcatttggaaataaaatgt

SEQ ID NO: 29492 - DNA, 418 bp, Zea mays
  unsure (1)..(418): unsure at all n locations
ttccttgtcgtcatcaaccttgacatagaaccactctgattccagcctgctgcccacttgcttcggtagctaattacaggggaacttgtagtnttccgatacgcaaagttatagcaaccaaaattatcgtgtaatccatcttttctagcctttgtttgataatgtagctcgtgaacccggcagaagctgtctgcaaatggttccactgctcggcttcggagtgcccagatataaacaataagcctaacgatagcgttaggggtcagctgatgaaaatagataccgaacctcttcagtacctctccaataatcccatgtagggggaaccttaatccagcctttagaaaactttaaaaataacaatctcatccttctctggcttcggggtagtctcttctccaccgaagcgcaacaactt

SEQ ID NO: 29493 - DNA, 295 bp, Zea mays
  unsure (1)..(295): unsure at all n locations
agcttgtgagtgcgagtggttgtaagtattgccattgtctaacttttcaaccaagtgtagcctatacataaaagcaatcaaaagataaagacactggtgtcgtggtttcaggaaccacggacaatgagatntgtgttcggtggggatgctagcgcagactcaccccgaatggtgaatcgctgagacttgaatgtggngttgagaatgaaagtcgcctacagggggtgaaaaggcgaaacctgaaatttataaactctaaacacacactatgctcagggttagtggtagaaataat

SEQ ID NO: 29494 - DNA, 291 bp, Zea mays
cttcaattggtagttgatcaatactagttccttcccagtggcattctttcaattggcaataatatattctatggaaaggaatgtccatatgaagggtaaattccttttggcttaaatttgtaaattagtgcatattgtgaaatcactgctccatgtgcattaacttagaaggaaattaatttatgcctttatgcctcataaatgatgatttatttgccattcctatataaatatcatcattcattaaatacttccctgtactactaatacctcttttcaagtgctttttga

SEQ ID NO: 29495 - DNA, 284 bp, Zea mays
gagctcattaatcgaacgctcgacagtggctagtcgagctgtgttcgaatccatttactcaaccttcgatcgatgtccaaatattgtattcgggtccgtattcgcaagcgggatctctgttgtgtcgagctctaattaagtcttattcgaaccgacttgatgtcaacatatctaatctgaactacaatgaaaataccagaacaaatgtgaagtgagtaataaccgctcatatttgatctaattacttattggctaatttgggtcctggctgaataagcaaaatg

SEQ ID NO: 29496 - DNA, 361 bp, Zea mays
  unsure (1)..(361): unsure at all n locations
ntaccttgattcccaacaaaccancatacccttgagagtcttttctttattcgggtaagtcttgctgagtaattgcgtactcagggttttattccctgttgtttttcaagttataattttgtactgttgtggatgctgctaactgccggtgggctcggccttcttatataagtatatctcatctttagcttctttattgaggattgtcatttaagctagcatgtatttgaaaacctataaatattttatacattttaaattgtaatttttttgaatcactttcgtttgtaatcactccgatgatatatattgtaatcttgttataacttggaaatgatgtaacttgtaatcattttgtaat

SEQ ID NO: 29497 - DNA, 442 bp, Zea mays
  unsure (1)..(442): unsure at all n locations
agccttcggagcangagcttcgatgttttcaggtacaatctgctctngtcgtttttcctcaggcgcggtagactccgtctcggtaggcactgaaggctcagcttcnacttcagcctgagcttgcgtagcttcggcttctgcttgcccagtttcggcttcggcttgctatttggcagcttcaacaattttctttgtaggagcagggctcaaggcctttgtagtctccagcacagcatccagcacgttggccattctcctcctcttgggagttgcagcagaagcctcttgcaccttcggcagttntgcctctgtcggagggcttagaattttggcattntaattattcttcaaccctgactcttaaccctatcaacctatcttcgattggctggactgatgcgtctntggcatatagttggatcttcaacgctcaatataattg

SEQ ID NO: 29498 - DNA, 420 bp, Zea mays
  unsure (1)..(420): unsure at all n locations
tcgtagcaagaaaaagcttcggtaagataaagaattattttaacttcaaaaaacaagaaattcaatcatcaaatggccagagtacgttccacagctagggttacgcacgacggagaggaagccgaaggtgctgaaactgctccaatcttcgaagtaatgaagcgctcgaggctattagcattggaggatacacctgccgctgaaacagaacaggctgatgttgaggagactgattctgaagatgattacagcgcggtgccaagtaaacccagccacctggatttcgggaaatccaccatctctaaagatgacttgcctaagctattgaaattgggctatntcagtgaagcgaagaaagagctggttcgttttggtggagaagagaccactccgaagccagggaaggatgaagtggtagtc

SEQ ID NO: 29499 - DNA, 322 bp, Zea mays
  unsure (1)..(322): unsure at all n locations
gtcacctgccgcatgcaagctngagacgggagaaaccgcaacaagtgttaaactccataagaaggatgttcctaaagcaataaatgaagaaatcaacatgaacaaggaanaaggtaaaaattcaattagtcatgttgtttgtatcgatcatctctctatgtcatccaagagcaaaaagggaagaggaaaaaggaggtgcttcaagtgcaaggaattangtcacttcattgcgtcttgtccacacaaagacaaggatgaangaatgaggagaatgtttggatgcaacaataaggaccatatgatcacttcatgtccgctcatg

SEQ ID NO: 29500 - DNA, 453 bp, Zea mays
  unsure (1)..(453): unsure at all n locations
ntaccaaatggacgtgaaaagtgccttcctcaatggaccaatcaaggaagaggtctatgttgagcaacctcccggctttgaagatagtgagtaccctaaccatgtgtataaactctcaaaggcaccttcatgggctcaagcaagccccaagagcatggtatgaatgcatgtgagattttcttatcactaatggcttcaaagtcagaaaagtcgatcctactccctttactaaaactgttgcaaaagatttatttgtatgccaaatttatgttgatgatattatatttgggtctactaacaaatcaacttgtgaagagtttagtaggatcatgatacagaaattcgagatgtctatgatgggggagttgaagtatttccttggattcaaatcaagcaactccaagagggcactttcatcagccaaacaaagtatattcgagacatacttaagag

SEQ ID NO: 29501 - DNA, 117 bp, Zea mays
ctggtagttcggacggtactccgaagcggcaaacaatggtttgccagaagaattttgggcagtctttgacgttattgtagaaacagccctcgcctcgatccatttggtgaagtattc

SEQ ID NO: 29502 - DNA, 444 bp, Zea mays
  unsure (1)..(444): unsure at all n locations
tctnccttctctgcctgtcgaggctggtggtctgtaagaagtttgctgcattcccgaagactgtgagctgtgatgactgctctgagcattgttggccctttcaccgttgtcattgggattgtggattgttctgacatgcctgggatgaagtcttcctccgaagcccctagtcattacagaatacctatatgcttcctgccttctttggcggaaatcattatcagctcggatgtattcatccatcttctgaaggagtttctccaaggtctgtggtggcttccttgcaaaatattgggttgtgggtcctggccgaagtcccttgatcatggcctcaataacaatctcattgggcactgcatgtgcctgagctctcagactcaggaacctttggacgtacgcctgtaggtactcctcatgatcttgcgtgcatagaaatacggcctg

SEQ ID NO: 29503 - DNA, 421 bp, Zea mays
  unsure (1)..(421): unsure at all n locations
agcttgtagcttcgtcttagcaatcgtgacaactgcacatcatctcatacgaaggtgtctttcagcatttaccctgtcacacctacaatagactcatgaataactgataagtcaatgctttgagaaccttcgtgatagacggcgaggctcgatcctccatgaggtaggataatntgattgggtggagatcttgacattgatgatccaaggctcgaagcgaacagattctcgcaatcactacaccactcctccattggttatcacccgtgacacacgagtgaccttgccacgaaggcttatacctgcaagcgcaatctagaacgcccaccagaatttgaagaccacactataaattgtattgatcacgaagtggcggtctcacaaaccgatgaacgacaacactggtcgatgacataataaa

SEQ ID NO: 29504 - DNA, 363 bp, Zea mays
aacaggtgggaagctctcatcacaccaaaaatgtgatgaccacatcaagacctttggagatgcttcacatggacctcttcggacccgtcgcctatctaagtataggaagaagtaagtatggtcttgttataagtgatgacttctcccgcttcacttgggtattctttttgcaagataaatctgaaacccaagggaccctcaagcgcttcctaaggagagctcaaaacgagtttgagctcaatgtgaaaaagataagaagcgacaatgggtccgagttcaagaaccttcaagtggaggagtaccttgaggaggaagggatcaagcacgagttctccgcttcctacacaccacagcataatggtg

SEQ ID NO: 29505 - DNA, 477 bp, Zea mays
  unsure (1)..(477): unsure at all n locations
cgacccgcgatccttgagtcacctgcggcatgcaagctngaagccatggtaagtagcataggcaagtaatatactaatngactcaagcctagctatgggtgcataggtttcatcgaaatccaaaccttcgacttgtgaatatcctttggctacaagtcgggctttgttccttgtcaccacaccatgctcatcttgcttgttgcggaaaacccacttggttcctacaatattttgattaggacgtggaacaagatgccatacttcattccttgtgaagttgttgagttcctcttgcattgccaacacccaatccgaatcccttaatgcgtcttccaccctgtatggcttaatagaagacacanangaataatgctcacanaaatgagtgacacgagatcgagtggttacccccttatgaatatcgccgaggatagagttcacagggtgatctcattgtatcgcttggtggactcttgg

SEQ ID NO: 29506 - DNA, 397 bp, Zea mays
  unsure (1)..(397): unsure at all n locations
tgtaggtntgtagctaccagagatgtggcatcaggccaaatctcttgggtgctcggtggcttaacacagaagaaagggaggaaggaccgaacgggagagacttaaccggtggtgggtgctcgttgcctgccaacaaattccagtaagaaccgattggaccaaggatgaaacatggcattcacttgatctggattttgaggtggaacttgagatctggtgactgggtacgaggtgggcggccaccgtatgcctcaagacagtagccgtcgggccgaggaacatgccgaggtgcgcgaccaanggcgggatgcgcatgggcagaagcagaagtccttcacgccggagcagggctaggcgacagtctgcacatctggtacacgagctagagcgtcgggaa

SEQ ID NO: 29507 - DNA, 263 bp, Zea mays
agtaccctaacctgggtttaactctcgaaggaccttatgggctaagcaacccctaagcatggatgaagcctgtgagacttcttatactaatggttctaaggaaaaaagtcatcttattcctttacttaactggtgcacagattattcgatgccacattatgttgtgatattaaattgggtctctaacaatcaacttgtgagaagttattggacatgaacccaaatcgagatgctatgatggggaagtgatgatttcttgattt

SEQ ID NO: 29508 - DNA, 327 bp, Zea mays
  unsure (1)..(327): unsure at all n locations
agcttgtgaaggttcttcatccncacatgtgctaagcggtgatgccacagccagcccatgctagtcttagctattaagcatgcatctagaccggcctcttcttttgcaaaatcaactaaataaagtttgccgtctaatacacccttaaaagctagtgaaccatcacttcttctaaagacagacacatctacatttgtaaatagacagttatatcccatattgcataattgactcacagatagcagattatatccaagagactcaactaanaacacattagatatggagtgctcattagaaatggcaattttacctaaaaccttttac

SEQ ID NO: 29509 - DNA, 354 bp, Zea mays
tcacctgctcttttggggatagcggggcagttcagatttgagcttaactggttctctcgagaaggtctccatgccaaagttatagaaatttggagcaggccagtaaaaggtagcaattcagtccaacgatggaatcataagttgggtgctcttcgtaaggctcttcgggggtgggcaagccacaccaacggggtttacaaaaggaagaaaaagagtctgcagttaacaataaatgatctatacatagccgcggaagttagaaacctgacagagcttgaaagggaacaactagcccaagctcgagatgatctagctcgcctcttgagagaggaggagatcaaatattttcagcga

SEQ ID NO: 29510 - DNA, 458 bp, Zea mays
  unsure (1)..(458): unsure at all n locations
taagcatttctcctaaagttccttaaaggatttctgtaaatttgagtatttatccacttcagtcttcaggcttgcttcaagatatttcttctcttgctcgaatttttctgactgtcggagcaattcatcctttaatttgttattctcactttggacttcagccaaagaaccctcaatggcctgaataacaaaatctttcttttctaatgcaccttcgtgctctttgaccatgatttcaaggtcttggattgtgaagtctttcttttttagattagcttcgtaattttcaactttctcagccaaatcttgaatcatggatttgtttttctcttcttccagatcttgttgcatttttaggaccttgcttaataatatgctctgtcgaaacgatcttcgttaaaacacgacgctaaagataataataatagtaataaaataacananatatttgatatctt

SEQ ID NO: 29511 - DNA, 315 bp, Zea mays
  unsure (1)..(315): unsure at all n locations
agcttaatcccgaaaaatgtgtcttcggggaccagcatgttattactcggatntattgggcagccaccgggaatngaagctaatccagaaaagatcaaagctatcatgaggatggaggcatcgtgatcacaaaagaaagttcanagacttaccggatgtatggcagccctgagcagattcatatccaggctgggagaaaaaggcttaccattntataagttactcaagaaggtggacaagtttcagtggacttcagaagcacaggaagccctatacgcattgaanaagttcttaacgacaccaccagtgctgaaa

SEQ ID NO: 29512 - DNA, 347 bp, Zea mays
tcgtattattccagtctactgcaatgccgattatagtccgatggtacctgttcacacattgcactacagaaatactgttaaatccttgtttttgaggaccttcggactccgaaggtcccctacaggtacctacctctctccatcgggtcgtatcatcggacgtctgtcacgaagtatgggtcgcttatggagactctctggacctcgcatgtagatactgctcgaacctgatgagccagaacctgagacgttctgctgagcggcggcgtcgtcgtcgtcgtcgtcatgctgcgccgcatcgtcgtcgtcctgctgtgccgcatcgacagcggcttgctgctccacct

SEQ ID NO: 29513 - DNA, 244 bp, Zea mays
  unsure (1)..(244): unsure at all n locations
ctgcagctagaattgaatggcnatatatgacggtggctatttcgttgactcttgttaagtcagtgattacctctcaagctatgtaccttcttattgctctctgtgcgcctaaagacatcttgcacttcatttactcgaagaggaagcaattcctatcggctggcttggagagacttatagganggaagtgcagggttaactggttacgcttggtaaggccgaatgtgtgtggtggtttgggtgt

SEQ ID NO: 29514 - DNA, 373 bp, Zea mays
  unsure (1)..(373): unsure at all n locations
gatgcgagggggtgaggaagattatatncctactaccacaataaagaaatgggagcatcatcactattcttcacaacatggaagacttgagtacaatgaccccgaccattgtgattgggaaaattgcggcatttgagatgtcgcaaaaaatgggttaacaagaggaaccaacttcttcaagaccatattcttttgcatgtgatgaaagaaaatgcaaaaagaaggctcccactctaagttcctcaagtgaagaagagtaagaagaagaaagtgatgatgatgaagataatcagccatcaacatcatcctctgaggacgaagaaacaatccgacgcgtcagaagggaatggggatgattcgcaagattaatcta

SEQ ID NO: 29515 - DNA, 453 bp, Zea mays
  unsure (1)..(453): unsure at all n locations
agcttgaacccggctattccatacatgaaaatacaatcgcgcactgtgagtggagagatggcgagagaggcacgtaccctcctggcaaaggaccgcctaanaggggtggtgtgctctctggtggtgcggacatgttcatgcagtggacgatccatgggaatggtagacatatgcaaggtttacgagaaacatatgttgtgtggttagagatcctcatctgagtaaatcgatttgaatcgcagttatatccctggatagtggagacttgatctctgacctgcaaccttggtcaggatgtaaacattatgaatataaatgactgtgtacttattgatatgggtgaattagactagatgcaaccagagtctattaatatntaatctagcgttaaaatattgaaagaaggactcactttagtaagctatttctataaaattatctaagttgattctt

SEQ ID NO: 29516 - DNA, 430 bp, Zea mays
  unsure (1)..(430): unsure at all n locations
taatntactaaacatatattaaacaatatcatctataaaaatatgtgttatgataaactattgttgntattgggtagataatgttattacgaaactaacgcaaccggaacaggtcaaatcagaattgaaatgagtagattactgggtttacaagttttctattaatttttacttaaattttatacgtcaaaatagatcaaggggtctatttggaaagtccaaggatgatttgtgaaatctgagggcgtaactgttattgcaacaaaactcggtgattggcgggtttattttttagaaacctgagggctcttttgaataattttgcactcgaaggggtatcttcaatcttgagtcgcccgatcaattcttgacgtcccagattagacccttcttaatatgaagtcgatatgcgatcacgttccttggatca

SEQ ID NO: 29517 - DNA, 409 bp, Zea mays
  unsure (1)..(409): unsure at all n locations
gtcacctgccgcatgcaagcttctaaagggagagcacnatttatgattaacaaatgttcattttgagaaagacaagatttgtagcgcatgccaagcanggaagcaagttggtgctcaccatccacacaagaacatcatgacgaccgacaggccactggagctcctacacatggatctattctgcccgatcgcttacataagcatctgcgggagtaagtgagagcacctagagggggggtgaataggtgatcctgtgaaaacttataacttaatccacaaaactcgattagagttagcacacgtaagcccaagtggccttagaagagagcttggctcacacgaaaaccacaaagagatcaacacagagatggcgtagtggtttatcccgtggttcggccaagttcaacac

SEQ ID NO: 29518 - DNA, 377 bp, Zea mays
  unsure (1)..(377): unsure at all n locations
ctcctagctggttttccatattaatgaaggaggcgcccgtatggnctttatatataccaactatacccagcgcaggtatcatgtgtctgagacaatttaactgcaaagctggtggacgatgcaacccggcttagcctctcctgacacactagacagactgacatcacccagatctttgtgaatttgaggcccatcctcccactccgaatgtggtggagtactgtcttatgagacttctatctcttcttcacgttctaaacataacccttcttaaagttaacaacggatgccgtgggatgctcatgaggatgctaatataacataaacttattatctatgtcttgaatacaacttttcttcacggagatccgggaact

SEQ ID NO: 29519 - DNA, 322 bp, Zea mays
  unsure (1)..(322): unsure at all n locations
agcttnccctgcacgccgatgctacgcagatctcgtatgtcatggcacaagaagaatgctccagcagcaaacattagtagctccaagtactacctctgttatgtttctgggcccacatgttgnggctcagtacccttgtacatgccccccttagctataaaaggggaggcatgcagcgttacaacacaagctctcttgtacagaactgagactctcagttctcaagcttcaacaacaatccaacacacagtggagtagggtattacgccccggcggcccgaaccactctaattcctcgcatgttcatgtgcttggtgatcgc

SEQ ID NO: 29520 - DNA, 448 bp, Zea mays
  unsure (1)..(448): unsure at all n locations
tgacaacaccattngacattntacataanatntctgagatcaagaatatttagttcattcctcaacatgcaaaagcgggtcttatcaagtggcttagtgaaaatatccgctaattgatcttccaacctcactccttctaaaatgatatctcctttagcaacatgatctctaaggaagtgatgacggatatcaatgtgcttggtgcgagagtgttgtacaggattattagcaattttaacagcactctcattatcacacaacaaaggtaccttttctagaactacgccatagtctagaagagtttgtttcatatataaaatttgtgtgcaacaagcacctgcggcaatgtattccgcttcggcagttgacaaggcaacnactatttgctttttagatgtccatgatactagtgatctgccaagcagatggcatcccctagaagtacttt

SEQ ID NO: 29521 - DNA, 318 bp, Zea mays
  unsure (1)..(318): unsure at all n locations
agcttctanagggagagcacattntanggataacaaatggttcatttgagaaagacaggatntgtagcgtatgccaagcagggaagcaagttggcgctcatcatccacataagaacatcatgacgactgacaggccactggaactcctacacatggacctattcggcccgatagcttacataagcatcggcgggagtaagtattgtctagttattgtggatgattattctcgcttcacttgggtattctttntgcaggagaaatctcatacccaagagaccttataggcattcttgagacgggctcaaaatgagttcg

SEQ ID NO: 29522 - DNA, 448 bp, Zea mays
  unsure (1)..(448): unsure at all n locations
tcgatcctgctntagtaatcattgggagaattaaagacaggccggcgggcctattattattattaataatctcacttaacgaccatatcatgcatcttgtacgtattcgactttacttgaaccacaccacccacacaacaaaactaattaaggccacatttcattagattatttcatatgtatgtacctcttcttgcatacattggaacagaggaggacgatccatcgagtgagtagttacgccatgcatgcatgcggtttaaccagctaattgagtaaccatgacatgcatgatgcatcaacgaccaacaagatgccgaagacgacgaatatattaatgtgcctgctgcatgcctactatcctactagcgcgtcgtccgtcgtcgtcgtggtccttgcagacagttcacctaatgttattcttcatcaggacccagagattaatata

SEQ ID NO: 29523 - DNA, 325 bp, Zea mays
  unsure (1)..(325): unsure at all n locations
agcttagcanaagaaatntctagaatcaagaatattgatctcatgcctaagtctggtaaaagaatgttcatcaagtggcttggtaaagatatcggctaattgatctttggtattaatgtaagaaatctcgatatcccncttttgttggtgatccctaagaaaatgataccgaatggctatgtgcttagtgcggctatgctcgacgggattgtcggccatcttaattgcactctcattatcacatagcanagggactttggttaatttgtaaccgtagtcccgcagggtttgcctcatccaaagcaattgcgcgcaacaatgttct

SEQ ID NO: 29524 - DNA, 457 bp, Zea mays
  unsure (1)..(457): unsure at all n locations
actcagcttcgcaccatgtgatcacgggtatcttgagaaggttgagcaatgcacttcccttttagttgtgtcaagctcatttttagcctctcattttcttccttgagcttttgatatgtatcatcatttgttcctgcaagttctagctcaaaagaagatttgcttgtcgacggacaacaagcattagcacatggtaatatagtatcaatttgaatacatgtgcacgagtgaggttgttgggattttaaattttctatcacaacctcatgagtaatgtttaatatgatatgatcatctctaagattttcatgagagcataggagcatatcatatttttcttgaaaagctagattttcaattnttagcttttctacttggtccttaagcaaggtattcttatttactaattgggcgatacaatgtanagcgctatcttgctcaattgaaatagtttcat

SEQ ID NO: 29525 - DNA, 475 bp, Zea mays
  unsure (1)..(475): unsure at all n locations
agctngaagccatggtaagtagcaaaggcaagtaatatactaattgactcaagcctagctacgggtgcataagtntcatcgaaattcaaacctttgacttgtgaataaccttcggccacaagtcaagctttgttccttatcaccacaccatgctcatcttgcttgttgcggaatacccatttggtacctacaacatttcgattaagacgtggaactaaatgtcatacctcattcctcgtgaagttgttgagctcctcttgcattgccagcacccaatctgagtctcttagtgcatcctctaccctgtaagctcaatagaggacacannagaatattgttacaaaaagagcgactnagatcgatagtaccccttacggaataccaaaatggataacggnggatctcttgaatgctggggactctggggggcggcttgacctgaatctaatatttcttgctgacatttatctccctg

SEQ ID NO: 29526 - DNA, 434 bp, Zea mays
  unsure (1)..(434): unsure at all n locations
tgtcaacatgttactcctggagaccctgaagctgtacggttcggtgtccctgatccacaggaaggcgggctcagatctcgacctatgcggcatccgggtacccgagggcgcaatcctgaccattccgatcgccacgatccaccgcgacaaggaggtctggggcgaggacgccagccagttcatgccggatacgttcgacaacggggtgacgagggcggccaatcaccccaacgcgctgctgtacttctccatcgggccaagagtcggcatcggtcagaacttcncaatgatcgacgcaaaggccgtggtcgccatgatcctgcagagggttgcactcgagctgtccccgaaatacgtccacgcgcccatggacttgatcaccctgcgcccaaggcatggagctcccatgctcctcaagcgactgtaggtttcat

SEQ ID NO: 29527 - DNA, 428 bp, Zea mays
  unsure (1)..(428): unsure at all n locations
agcttccactccactctatcggtatctntcgccatcactccacatcactctccanaattggtataatcttttcactcatatttacttgtaccaatggagagaaagtaaatagggctctcaaacaactccatttttggcgattaatgccaaagggggagaaatattaagcccaaagcaaaaggaccgcaccaccaccaatgtcaaaattttaagaagctttcaaattggtatctaaatagctttcaaattggtatctaaatgtatttgatctttcttcaattggtatttaccaaaaattggtaaaacccttttgaaaactaagaggtgaatttattcanggggagtttgtttttcaaaggaaaagcattgnacaggggagaaaatttanatcttganatacttctcgaatcttattatatcctttgata

SEQ ID NO: 29528 - DNA, 336 bp, Zea mays
  unsure (1)..(336): unsure at all n locations
agcttatagatgttctgagatgactattgtgtgtgttggtatgtatactgaatgcgaaccatgtacgtgccaggatcagaactcacgtacacgacgattacataattggacatcatcacacaatgcttgaattatatagcgtacaggtacttagttacatcaagaggtctgagacatccacagagtttattacatagtcatagggttcaacaataatatcaaagtgcggagtaacgaaacgtagaatgtaagcctacatangcagctgactgcgggtttgccactaaagtaaactagaactcgtcgtattcctggaactcctcgaagtcattcatg

SEQ ID NO: 29529 - DNA, 275 bp, Zea mays
tctcctggacaagcgccgcactcactgcatagtgcgaagctgtcacatacagcaacagaggagcccctagcgctggtggagataacgtcgcttgatcgatcacatacttattcagctcttcgaaggctttctgctgaactgatcccctattgaaagacttccgctgatttcaacactttcaagaatagtaaatttctctctgctgaactagatataaatcgattcaaagatgccaatcttcctgtcagccgctgagcccccttctttgtgcttgg

SEQ ID NO: 29530 - DNA, 494 bp, Zea mays
  unsure (1)..(494): unsure at all n locations
agcttctcttggacaagtgctgcacttaccgctgagtgttaagctgccacatataacaacagaggagcccctggcgttggtggagttagcgtcattaggtctatcaaatattgcttcagctcttcgaaggctctctgctggactggtccccattgaaaaacttcggctgacttcagcacttcgaagaatggtaaatttctctctgctgatctagatatgaatctgttgagagatgccagtcttcctgtcaatctttgagcccccttctttgtacttggtggttccattcgaaggatagcttcgattttatttggattaacctcaattcccttttgtggaaacttggcagccaaggaatttccccttcttcactccgaanacacactnttctggattcagttntagaccagcctgtctaannatagcgaaggtctcctgcagatcagcaatgtgaatttcttgcttcgtgctttttacaatgatatcatcaacat

SEQ ID NO: 29531 - DNA, 348 bp, Zea mays
tgtgagattaccttatcgatttaagtttcaagatatcttcttcagtccctgcaatgagtggttggaaatgattgaggagatgtgcaatgaaatactgagaaagaagaccaactaatgtatgctgcttttgataatcaagagaagcgaaggttgaatctggtgatggacacactgggatttaattatccagactacacaaagtttgaagaagaagctattgtggtaaaaaggaagaggaatgtcagtattatgaaaagacaggctgagagattagtgaaaaagataagaagaagaagaaaatggcttctaaaaaatgaaaggcgttgatgaaagtgagtcttctcaatc

SEQ ID NO: 29532 - DNA, 428 bp, Zea mays
agcttggtcattccttgcatcacctgcgttcgtacaaccacacacatgtatagttcattctaacacgtcgtgtctccttgaataggcacatacaactgacgacggcatggagtgtgacgatgagttcaatcaatttgtaatgaatgattgagttcaatcaatatgtaatgagtgaattaattgatcctcgtctttcgatgatgacaacaatctagtttgaatgaattgttatgccacaaaagaagttgtaatcttgcaaatataactgcaaacaccttttcagactgtcgatttcatactaacccagagaaaccagccacaccaaaaaggagagaaaggcactctgcaaccataaaccaataatttattattgaaccttaaactagtacgagggtaaaccattgcaagatgaactataaacagaatca

SEQ ID NO: 29533 - DNA, 170 bp, Zea mays
acttagccgcgggttactggtggtgcgcctgctcccctgtcaatctcacacttgtcatctccagtcaaattcaagctgggttttttcttttttggccaagcaccccgccggccagcgcctgtaacgacagctaagttgttgacctaaattcggacgggagatctgaaatt

SEQ ID NO: 29534 - DNA, 375 bp, Zea mays
gcctggatcgaacgggggaagaccggaacagggcttgccaccgaggttgctctcgggcgggactggcgggtcccgaacaggtcccccgaactataggctaactcgggaaagtcaagcgaggtaccgaagaggcacacgggaaggcaatctagcactggggcgggctttatagccgtggcgcaggcgaggtcacaggcggccgcgggcgcgtgggggttcgcgcacgggcgtgctctgagcgcccccccggatgtagcccccgtccaacacgtggaagctcgctcctgccatggtttaacggctggatttgagcacccttaccgtgcgtatttttggcaaaagccactgtggtacgttcgcttccctgcctcatat

SEQ ID NO: 29535 - DNA, 419 bp, Zea mays
  unsure (1)..(419): unsure at all n locations
ctcaagcttcgacattattttcaagcattccatataattgttccttcatctttatctctaaaggatattatgaggaacagagaagctactggaaggattggaaagtgggctgcggaacttaacgaattcagcattgactatgtgcatagatcctcaattcagtcccaggtgttagcagacttcattgctgactggacgccaggggctcaggaagaagaaacaaataaagatgctgaagcttggatagtgttatgcgacggttcctgnggaaccttcggagcaggtgcgactgctgtcttagttgcacctttcaaagtcagaacatgctatgcaataaggcttgattntaggtgtacaaataatattgctgaatacgaagctttacttttggggcttcgaaagttaaaggcaatggggat

SEQ ID NO: 29536 - DNA, 315 bp, Zea mays
catgcaagcttctaaagggagaacaccttatatgtctatccaatgttcattacgaaaaacacagacccagtgcggcttgtcaagcagggaaacagatgggaggctctcatcacacccaaaatgtgatgactacatcttaacctctggagctgctggatatggacctctttagacccgtcacctatctgagcaaacgaggaagcaagtatggtctagttattgatgaagacttttaccgcttacttgggtgttcttttgaacgaaaaaactgaaaccaagggaaccctttgcgcttccttaagagagctcaaaatg

SEQ ID NO: 29537 - DNA, 399 bp, Zea mays
  unsure (1)..(399): unsure at all n locations
tcctcccttctttgtcgaaagtcattatcaacctacatgtactcatccattttctgaagcagcttcttcagagtctaggggggtttcctggcgaagtattggaccgtaggtcctggccgaagacccttgatcatggcctcaatgacgattncattgggcactgtgggcgcttgtgctcttagtcgcaagaaccttctgacatacgcctgaatgtattcctcatggtattgagtgcactggaacaaggcttgagctgtgactggctttgtctgaaagccttgaaaactggttaccagcatgtccttgagcttctgccatgacgtgattgtccctggccggagagacgagtaccatgtctgggcttacattcggactgccatgaccaacgaacttgtcatg

SEQ ID NO: 29538 - DNA, 410 bp, Zea mays
  unsure (1)..(410): unsure at all n locations
agcttggatgaggtgtcatcatcatcatcattccagctatcatccgagtcccattcaactaagtaagctttaccatccttcttcttggtatagaaattccttttctttttgacactttcatctttgcccttcttcttcttgcttggacaaatcatggcaatgtgaccgggttccccacactcaaaacattttctatcattgaaagcatttcttctagatgtttgacctcttctaagatgacctcttttcatcttcatgaatttattgaatatccttacaaataaagccatgtcaccatcactctcacttccattttcttcatcattgctatcttccttttcaaatgcctttgaggccttggctntgagagcaaaaaatcattttcaccttctttgccaaactaaagcatc

SEQ ID NO: 29539 - DNA, 375 bp, Zea mays
  unsure (1)..(375): unsure at all n locations
gacctataaaactaagcttctaagggagagcacattntaggactaaccaatgttcattntgagaaagacaggatttgtagcgcatgccaagcagggaagcaagttggcactcatcatccacacaagaacataatgacaactgacaggccactggagctcctacacatggatctattcggcccgatcgcttacataagcatcggcgggagtaagtactgtctagttattgtggatgattattctcgcttcacttgggtattctttttacaggaaaaatctcaaacccaagagaccttaaagggattcttgagacgagctcaaaatgagttcggcttaaggatcaagaaaataagaagcgacaacgggacggagttc

SEQ ID NO: 29540 - DNA, 418 bp, Zea mays
  unsure (1)..(418): unsure at all n locations
agcttctaaagggagaacacgtgatatgtttaactaacgtgcaaatcgaaaaagatagaccttgtgcagctngtcaagcacgttaacaagtgggaggagcgcatcacagcaagaatgtgatgaccacttcaagacccctggagctgctgcatatggacctcttcggacccgccgcctatttgagcataagaggaagtaagtatggtctagttatctttgatgacttttcccgcttcacttgggtgttctttntgcaggataagtctgaaacccaagggaccctcaagcgcttcctcaggagagctcaaaatgagtttgagctaaaggtgaagaaaataacgagcgacaacgggttcgagttcaaaaccttcaattaatgagttcttgggaggaaggataagcgtagttcttcgctcct

SEQ ID NO: 29541 - DNA, 443 bp, Zea mays
  unsure (1)..(443): unsure at all n locations
ntgtcttttgtgcatggacgacgtgcggntttatgctagggacagggagttgtagcgtcaccaaggtgccagtgtcagaatgcctggtcccgaggttgagctgcgccaaaaccgtgtcaaatggatttggtttgagttcaaactttcccagaatgtgttcaaggtaatttggcacgactttgatatttggatcttctggctttgagtttggaaaagcagagaacacagatgatctttgagaagaggtctgaaattcagaaattcagaaatctgaatttctctaagggttcattgatcaagggctgatttggggatttgtttgagttattttggctaagccttctcaatctttcttgttgctaaacaaatataatttaacttatataattggctcaactcaaaattttaaactcttcatcctcttttcacatcttcttgaattt

SEQ ID NO: 29542 - DNA, 384 bp, Zea mays
tggaaacatgtgtcataaacaagaccatttttccacgtaccaacggtagactaggctgaggacaataggggtagcattgctttaaataaccctaccaaaatattgggtttggcgtggattagactacggcttgatgattaaattttacatatccaacataacaccaatgatgcctgtctcaactggaggccacaggttcaaaacaatcctgttttgcccaagaacaggctatcaattctccccaccacactttataacctccgacaaacactgcatcttcttaattaatataaaaggaacaattggatctataccattaaaagatccatactttaaaaatataccatggaccccacatgttattgactcatgtggacccacatg

SEQ ID NO: 29543 - DNA, 425 bp, Zea mays
  unsure (1)..(425): unsure at all n locations
tcggatataaaaaaacaacatgttccatcaactttgttctcangnngntataattgctttcaatgctatttgtacacacattggaacaagggatctcattcacgagtttttagcttttacaaagattccctgaggctgtagccgcccgttaggtttcctaaatgtacaacactcctcccgaaggggcaatccaccctcggcagagcgagcagcatacaaggagccccattgacagcacgacggcgaagcgaactacacctcagttcctctaattattcagctaagggtgtcccataccaccctcatggttgcactattttcccatgtggtcatccaacgaactagtccttacggagaagcactcgagataccgctcgagtccccctaaatgtcacaatatcatcatcataattaaaagggaaaac

SEQ ID NO: 29544 - DNA, 430 bp, Zea mays
tttgccgggaatttccagagcacatacgtgctctcctgttatattcctgggacctttgaagctgccgacagcagccgggagagtctctccgggactacatccggcgattctcgaagcagcgcaccgagctgcccaacatcaccgactcggatgtcatcggcgcgttcctcgctggcaccacctgccgcgacctggtgagcaagctgggtcgcaagacccccaccagggcgagcgagctgatggacatcgccaccaagttcgcctccggccaggaggcggtcgaggctatcttccggaaggacaagcagccccagggccacccttcggaagatgcccccgaggcgtcaactcagcgcggcgccaagaagaaaggcaagaagaagtcgcacgcgaaacgcgacgccgccaacgcggacctttgtcgcgccgc

SEQ ID NO: 29545 - DNA, 375 bp, Zea mays
  unsure (1)..(375): unsure at all n locations
tctaaagggagaacacattttatgactaacatatgttcattntgagaaagacaggatttgtagcgcatgccaagcaggaaagcaagttggcacacatcatccacataagaacataatgacgaccgacaggccactggagctcctacacatggatctatttggcccgatcgcttacataagcatcggcgggagtaagtactgtctagttattgtggatgattattctcgcttcacttgggtattctttctacaggaaaaatctcaaacccaagagaccttaaagggattcttgagacgggctcanaatgagttcgccttaaggatcaagaaaataagaagcgacaacgggacggagttcaagaactttcaaattga

SEQ ID NO: 29546 - DNA, 390 bp, Zea mays
ctgcagctgcaactgtgaaatatcaattttaaggataagcagcgtttgccaatcagccgcaacccattctcttatgtgaggacataacaagaaaaagcgctgtttagccactcattcttcccaaccacacgaaaaaaccttgtgaaagtttttgttcaataacaaagatgttcttgcatggtcagccaatgaactatgcggagctaatatggatgttattgaacacttgctcaatgtcgatccattcttcaaacccacaaagacaaagctttcgaacatgttagatgataacgcccaacgtgctccccaccaattccaaaaaattcccattgccgaattattagacaagttaagacccataatggctggctaacactgttttggcaaaaa

SEQ ID NO: 29547 - DNA, 228 bp, Zea mays
aatataaagggtagagattatcattaagcaacgtgtgcacacactatcatgaaaaaggtccctacatgacacgaaagtaatgtacaagtgacatgaagtgatgtacctttgtgttttacctttccaagggggcgttccaaacttgtgttggatttagaattcattttccagctcttgttggtatacttgggacatacgtccaagatattaaatgaagattgtcatact

SEQ ID NO: 29548 - DNA, 206 bp, Zea mays
atacctgaccaccttttacttctggggaaactgtaaatcatttagtgccttcaaccttgttcacatctcgccgaaggactctatcactatctaaaattctttgctcggtccacctcttgttcttaataatatcaatctttcgctcacctaatttggacaatgatgcctttcgcattgcaactggcttcttcatattatgcataaac

SEQ ID NO: 29549 - DNA, 429 bp, Zea mays
  unsure (1)..(429): unsure at all n locations
tctaaagggagaacacgtgatatgtttgactaacgtacaattcanaaaagatagaccttgtgcagcttgtcaagaaggtaaacaggtgggaggagcacatcacaacaagaatgtgatgaccacatcaaggcccctggagctgctacatatggacctcttcggacctgtcgcctatctaaacatagggggaagtaagtatggtttagttattatggatgacttttcccgcttcacttgggtattctttttgcaggataagtctgaaacccaagggaccctcaagtgcttcctaaggagagctcaaaatgagtttgagctcaaggtgaagaagataaggagcgacaacgggtccgagttcaagaatcttcaagtggaggagttccttgaggaggaagggatcaagcacgagttctctgcttcctacacacc

SEQ ID NO: 29550 - DNA, 369 bp, Zea mays
  unsure (1)..(369): unsure at all n locations
taatcccgaantatgtngttttggggtaccatcttgaaagttactcggatttattgtcagccaccggggaattgaggctaatccggataagattgaagctatcatgaaaatggaagcaccacgatcacaaaagaaggttcagcgacttactggatgtatggcagctctgagcagatttatatccaggctgggagagaaaggtttaccattttacaagctactcaagaaagtggataagtttcagtggacctcagaagcacaggaagctctagatgcactgaaaaaattcttgacaacaccaccagtactgaagccggcacgacgagccacatcaactcaaccagctgaagatctgctgctgtatatttc

SEQ ID NO: 29551 - DNA, 384 bp, Zea mays
  unsure (1)..(384): unsure at all n locations
agcttggctatattgggcaccaactatatataaagctagtttattcatggtcgtttatgttcaacctttcattcacaagctacatttgtctgaaagaaccaccaagcataaaaaaaggtacaaagcctttgatttcctctaaagcatgcaacaaccaaaatcttatcttctatctatatgccaactgggtgaacttgaattgattgtcccccaagcacgagaggcagccctgcgattggtccttggggttcacgtcgccgccattctacgtgttgatcgccttcaccaaggacaccacctccgccatctcgggacccttgccgggntgtgtcccacaattggtttgtgtccaacattgaacgttcttagctaacctagacaaca

SEQ ID NO: 29552 - DNA, 361 bp, Zea mays
  unsure (1)..(361): unsure at all n locations
tcatggcagcagcctccgncttcacctctgttgcaacaaggccagcagccagaagggagcgggtatgctccacactagagggacttcanagaacagtccgaagctcgtacagtcaatagcaccatgccagagtcaaagcacatctattgacagatatcctaccttaatagcagtctttcttattcagtcttcttttctgtgtaataaaggacattgtttagatttcatggaaatagtttcgttgtttgccacaaggaaaatatattttctttacacgcctaagttgttgaagttttaaagatttatgaatacaaagaggaccttccgactattcgaaaattcttccaagccacaaaaagtc

SEQ ID NO: 29553 - DNA, 417 bp, Zea mays
  unsure (1)..(417): unsure at all n locations
agcttacctgactccttctctatcggcacaatattggagacccattctgcgtatctgcaaggtctaataaaatcagcttctagcaaccggtggatttcgtccttgatccgtgggagaaggtctggacgaaatgttctagctttctgcttgaaaggtctgaaaccggacttaataggcagccgatgctctacgatctctcgacttaatacaggcatctcagtgtaattccaagcaaagcaatctgaatattccttcaatagaccgatcatctcatttctaggatcggtctccagggtctgtgcctggtgaccggattgagcggcgctcaatcggtcttgtgctggtggtgccaacctgttgaacacggatgtttggggtgccccncaagcggtgtactgtggcataccaaacgaatat

SEQ ID NO: 29554 - DNA, 438 bp, Zea mays
tattgccaaagaagctccaatgtaccccatactggtcttgaacactagtaaccaacaaagaggaatgtgcaagagcagagttgcaatggaggaccaaagcataggaattatcaggctctgagactgtagaaattttgtgagaggctggctgatggcatatgcatagagacctggaatcaaccagactatgtatctcccagcttcccttgagatcaaggggtcctgacctatgaggatcaggagtttgcctatgaatgcccacagaagtgagattggaatgctcacagcaatgagtgtgactatagctctgtaggtgtgcatccccagtttatcatactgttttgctccataggcttgaccgcatagagtttccagtccacttgccataccaatctgttttagaggcacacgaattaagttaggggaagaacaatacta

SEQ ID NO: 29555 - DNA, 375 bp, Zea mays
  unsure (1)..(375): unsure at all n locations
gcaagcctctaaagggggaacacattttatgactatccaangttcattttgagaaagacaggatttgtatcgcctgccaaaccgtgaagcaagttggcactcatcattcgcacaaaaacatcatgactagtgacaggccactggagctccttcacatggatttattcggcccgattgcttacataaacaatcgcgggagtaagcactgcctaaatattgaggatgattattctcgcttcacttgggtgctctttttacaggaaaaatctcaaaccccagaaaccttaaagggattcttgagacgggctcaaaaccagttcggcttaaggatcaagaaaattaaaagcgactacgggacggagttaaaaactctca

SEQ ID NO: 29556 - DNA, 364 bp, Zea mays
  unsure (1)..(364): unsure at all n locations
tgcccgctgganaccgaacgttgctcgcgtatctgcgcatgcttttagaaacgatatntttggcttttgctacagctgcggatgcaatctagatcatgcgtatgcaggtaaccaaactgggtccatgtcaacgcataccgtcggtcctgatggacggatgcaagcatccaatcatgtagaacatagatctaagactacaataaaagctttggactaaccatatcacatattcattatgtagatctattcatatgaaaatgtccgataaacaaatcatgctcagtgaatcatggaggaccgattatatctcaagctgtgaactgcttatggatctacataatgaatagaacttcatgatgaatat

SEQ ID NO: 29557 - DNA, 427 bp, Zea mays
gcagctggtgaagaatcttcatcctaacatgtgctaatctgcgatgccagagccagcccatgttagtcttagcaattaagcaagtgtcgaggtatcaaaatttaccaaggatagctgaccctttaacactcccttaaatgctattgaatcatcacttcttttaaagacagggacacctacatcagtgaatagacagttgtagcccatttgacataattgagatacagaaagcaaattggaatctaatgaatctacaagaaaaacattggaaatagaatggtcgggtgatatagcaattttaccaagacctttgaccaaaccttgatttccatccccgaatgtgatagactcgtggggaacttggttattctcgaagaggagaacattcttttctcccctgtcatgtgggtagtgcacccgctgtcga

SEQ ID NO: 29558 - DNA, 393 bp, Zea mays
  unsure (1)..(393): unsure at all n locations
ntaactgatttagagtcccttggtggatgatccctaggtttagcttttccatttcttgacacaaagtgttctcgaaggtcttcgccataagacagtggcaggaagttttacgactcaacgcatctgccaccacattggccttgcctgggtgataatggatctccagttcatagtctttaatgagcttaagccatcgtctttgtctcatatttaatgctgactgggtgaagatgtacttcaaacttttatgatctgtatatatgtgacagatattacccagcagatagtgacgccaaatctttatggcatgaaccacagcggctagctccagatcatgagttggatagtgctccttatgccggcgcaactgccttgaagcatacgcaatcactc

SEQ ID NO: 29559 - DNA, 426 bp, Zea mays
aactcgctactctagttagttgacaacacttgctggtgccgccaaccaatgtgttgggaatgcaagaggggctctttggatgctttgaccatggagaaaatgcagtggtccgaaagaagcgtcttccttccagctttcttgcacgcacgtacatgtatcatgtgcacccaccttcttcatgcatgcatgcacggcacgtttgcgttgcgtctcttgacacggagtacgtctctgatgctttgctgcagaaatgactccagcaccttcttaggccttactagctcatattggtcttttgggacacgaagtgccatgtgaactgcaatgaggcgctcctgtaatcctcaccacaatttcttcaaacctgcacgccaggcatatattgaagagaaatccttcacaggactttctctctcatacaataca

SEQ ID NO: 29560 - DNA, 362 bp, Zea mays
tgccttcacctcagtataccacccgcagtccaacggagttgtggaacgcgcaaatggcaaaattttcacagttgtcaagacgatgctcctcgactataaaaagggcaagtgggccgaattgttacctgaagcggtctgggcattaaacacgactgagtgcatggcgactgggttaacccctttgcgccttctatatggatcagaggccatgaccccgccagaaatacaacatgggtccccacagacagtctcatcaattgtccctgacgtggacgagcccacttcgaaggacctcatcgatggagaccgcgtgttctccctacaggccctaaacaaataccaagcccaaacaaaagcatggc

SEQ ID NO: 29561 - DNA, 410 bp, Zea mays
agcttgcaagcgaagatgaaaatagttcgaatttacaaaaatccttgagggagcttcaagacaaatgcttaaactttgggaaccggtgcgtgcaacggctgatacactgttttaactcacttggcgctagttctaaaaaaattgaaccttctgttgaaaaattgtcaagcaccttcgaacatattgagggcgaagttgaggcacttgaccaagatatagccgggcatggtgacttctatgcccttctaacttttcgcggaacagctgtagctttcatgaatactggttgcacgcacgggaagatcgtaaacattcgcaacttcagtctatcaccagcagacttgactgacattcccagtctggcccgaagcatttgaaatagattataacacaaatttggatgaatggtg

SEQ ID NO: 29562 - DNA, 437 bp, Zea mays
  unsure (1)..(437): unsure at all n locations
tcggtatataacaaccttcgttgcctccggagcatgggcggtgttgtctccgccagctctcacgatagacatgtcgcaaaagtaccttcctctcatgttgtcaagatgactctgtttaatagttgattttccgaagagagtatggcttggtcgccagggtcgatcttcagagtcttcgtctccactctccacatcataactatcactatcatcagtatcttcagacaaaccttctagaatctctttagtaatcttctctgtgtttgtttttgacatagactcaacaaacccgataataaaaggatccacaattttcttttcttcaaacaacttcgtctcctcagataccttcgtttctgcagncattttcttttccttagtcatcttctcttcagacatggngaaaacacgtccttaaaccaaaactcgaaaagctt

SEQ ID NO: 29563 - DNA, 367 bp, Zea mays
  unsure (1)..(367): unsure at all n locations
agctttcacacgctttgtcctatgatccactaaacatgtntgaatggctctctgataagaccctgcagcatttttgaggccgaacgacatggatgtatagcacaaagcaccgaatggagtgatgaacgctattttttcctcgtcttcttttgccaagctaacctgatgatacccggaatagcaatccaagaaagacagcacagaacatccagcggtggaatctaccacctgatctatcctaaggagcccgaagggatcctttggacagtgtatgttgaaatccgtatagtcgacgcacatgcgccaatccactctattctttttgagtacaagaacagggttggctaaccactccggatgtaacacc

SEQ ID NO: 29564 - DNA, 378 bp, Zea mays
  unsure (1)..(378): unsure at all n locations
ntatcaaatggacgtgaaatgtgccttcctcattggaccaatcaaggaggaggtctatgttgagcaacctcccggctttgaagatagtgagtaccctaatcacgtttataaactctctaaggtgctttatgggctcaaccaagccccaagagcatggtatgaatgcctaagagatgttcttatcactaatggcttcaaagtcggaaaggccgatcctactctattcactaaaactcttgacaatgatttgtttgtatgccaaatttatgttgatgatattatatttgggtctactaacgaatctacatgtgaggaatttagtaggatcatgacacagaaattccatatgtcgatgatgggggaaggtgagtacttttt

SEQ ID NO: 29565 - DNA, 351 bp, Zea mays
ttaaatcaccttccgcatgcaacctgaatgagagtttaatgtccttggtgctctcttgaacgcatattgggtgatcattaaacaacttcgagtatcacttatgtttcttagcgcctcatgtaatttcaatttgatctcaattgggaattttaattgacatctatcttgatatgccctaaggaaaaaggagaattcatgattcatttatgcaacttgtgatccatttgatatatgctaacaataacttgaaaaagatcactcagtgtagaactctctcttgtgcacagtatttccatatattgtcattgagtataggtcttaagcaactaagactaacgacaaagcacaatg

SEQ ID NO: 29566 - DNA, 351 bp, Zea mays
ggattaggcgttagcacaataatgccaagtggcttatagaggagtctcaacaaaacacagtaaccacaggagatcaatcacagagatggcacagtggtttatcccgtggttcggccaagaccaacgcttgcctactccacgttgtggcgtcccaacggacgagggttgcaatcaacccctctcaagcggtccaaagacccacttgaataccacggtgttttgcttgctttactatatcccgtttgcgaggaatctccacactttggagcctctcgcccttacaaagatgttcacaaagaagcacggagtaagggaggaattagcaactcacacaagacacaaagatcacag

SEQ ID NO: 29567 - DNA, 418 bp, Zea mays
  unsure (1)..(418): unsure at all n locations
ntggtgaagaggcaagttcttaagtctgcatcttctgaagcgaaatccactaagtagaggttgttgtatctaaatcccttgaataccattgattcatcatccatctttgttacaataacctctgttggagtgaataagcattgaagtccaagatcacagagttgacccactgataataaattgaagctcaaaggtgcaactaagagaacatttgatattgatagatcatttgagattgccatcttgccaagtacttgcacttttccttttgaattgtctccaaatgtgattttatcttgaccatcaacattttcatccagtgaggtgaacatccggggttgcctgtcatatgtcgtgtgcatccactgtcaataacccaatggctccaccggcttggagttacctacattacagacaa

SEQ ID NO: 29568 - DNA, 345 bp, Zea mays
  unsure (1)..(345): unsure at all n locations
tatgctatgataccaactgtttaaccccgttatccacatacaccccaaaatgctactaaactacacaactatcattcatatataaaattttgacagcatctcctttgaaaattngcataaacgtggaagcaacatagtataaacagatttcaagataagaaaacatactagacattaataatctgctagtaacgggaagataaccataacgacataaactgaattaactagtgtgcacgactagttaataacaaacattcttgacacgaagattctaataaaatatgggtgcgcctaggccgcattattatgagaatgaaagtagacctgctgctacttccctca

SEQ ID NO: 29569 - DNA, 430 bp, Zea mays
  unsure (1)..(430): unsure at all n locations
actcttctctacaagaggaaactttgctttacctaacgccggaattaaacacgcgctcagtacctcattactttaggaatgagagcccccttttaggaatattacatccaccttccaaaacaagcaattataacctcatccacaaagatgtgaaacggacaacaaattatatctcaaggaatctattaataaaacattggaaagtgatctgttggtcatagatatgaattntaccaataccaatcaccttacttttgccactatttccaaacacaaattcttgtgcgtcttgaggtaaatgcaatgtgtgaaacatgtctttcttcccggncatgtggatttgtgcatccactgtcaagcacccaacttgacccaccagaggagtagacctgaaaacaagtttaggctatacttttaaggacccaaattg

SEQ ID NO: 29570 - DNA, 433 bp, Zea mays
  unsure (1)..(433): unsure at all n locations
tgtttgcctatattactcttttgatcatttgctcccactaatatcacgtttgatgtttctgttttctagaaggaaaaggtggtgacatcgcgagtgcagctgaccccaaggtctctgctcaaatgccagtaaggtgagggaaactttatcggcgatatgatatccgataatcctgattttcctgtttatcggtgacctccgatattttttctctatcggccgaaattttcaaatttttaaaattgacactataaaatgttcaaattagaagttagttggtctatatatcttctcactttcttccagaacactaaaaaccctaaatttacttgattggatggtatgtgttggtttcatttgttaaatatctatatatatatatagnatntatgtatataatatataagatctatgtatataatatatatatata

SEQ ID NO: 29571 - DNA, 376 bp, Zea mays
  unsure (1)..(376): unsure at all n locations
tcggctatggtcatatttttggcagcaaaactgtgcaatagcaatgaatgctgtggtaacttcacacctacccgtctgtttatatagtgccgcaggtgggaaggtgaatcgtcaagtccttcgcatcggacgaacagtcgcccgcacccactgaatggtgggccacagaacccgagaaggtgaatcgccaggacgagtgtacccaccgcatggtggagccacctcgcgctcggaatattttaatcgtttctcagcaacgagctcagggaaggtgtttttcggacctttggcatttcgaagcctangagactttttcacggatcaagcttgttacgaaaaacgatctaacaccacgaaagggctactgttgggggta

SEQ ID NO: 29572 - DNA, 159 bp, Zea mays
accgggtcgtggagcgcgccaatgggaaaatcttcacagctgttaagaagatgctcctctattaaaaaaaaggcagatggacccatttgttaccggaggcagtctgggcgctaaacacaactgagtgccaggcgactgggttcactccttttccccttc

SEQ ID NO: 29573 - DNA, 365 bp, Zea mays
tctaaagggagaacacgtgataggtctaactaacgtgcatttcgaaaaagatagaccttgtgcagcttgtcaagcaggcaaacaggtgggaagctctcatcacacaaaaaatgtgatgaccacatcaagacccttggagatgcttcatatggacctcttcggacccgtcgcctatctaagtataggaagaagtaagtatggtcttgttatagttgataatttttcccgcttcacttgggtattctttttgcaggataaatctaaaacccaagggaccctcaagcgcttcctaaggagagctcaaaatgagtttgagctcaaggtgaaaaagaataggagcgacaacaagtccgaaatcatgaacc

SEQ ID NO: 29574 - DNA, 392 bp, Zea mays
  unsure (1)..(392): unsure at all n locations
agcttctctggacaagtgccgcactcactgcagagtgtgacgctgccacatacaatagcagaggagcccctggcgcgggtggagttaacgttgttagatctattaggtattgcttcagctcttcgaaggctttctgctgagctgatccccattgaaagacttcggccgacttcagcacttcaaagaatggtaaatttctctctgctgatctagatatgaatcgattcaaagatgccagtcttcctgtcagccgttgagcccccttctttgtgcttggtggctccatccgaaggatagcttcgattttatttggattagcttcgatcccttttgttgaaactagaanaccaaggaattttcccttttttactccaaagacacanttttctgga

SEQ ID NO: 29575 - DNA, 431 bp, Zea mays
  unsure (1)..(431): unsure at all n locations
tcgacatcgaanacagttntttagtgtttccgtagatgtctgaagataagaaggctgctgccgagatgaagctgagtctcgatgaagagaagaatctggggtttcttatagcaatgtcgaagaccaatacagaaaaaatcaccaaagagattttggaaggtttgtctgaagatactggtgacagcgacagttatgatgtggatagtggtggtgaagactccgaagatcgcccttggcgaccaagccatgcggttttcggcaaatcaagtatcaaagaaaatcatcttgtcaacatgagaggaaggtatttccgggacttgtccgttgttatggccgacgaaggagaaaagacttgtccgaaccctgaagaaaatgaagtcgtagtgtaccgaagctttttgaaagctggacttagaattcccctgagcaac

SEQ ID NO: 29576 - DNA, 410 bp, Zea mays
aatgaatgattttttttaatttgccaatgcgaagcacgaaaaaagcgaaattgaaagattaagggtgcaaaagaatgtccaagagctccgcgactccaaagaaagatgctacgagatatccttggaatgcgccaaaactctaaagaacagttttacaaaggtaggagcctattcttccgagcaaaaatccatccacggtgaccccgatggtgtcgtccagtggatcaacggagaggtcgaaacttttgacgaaatcttaagtgatcgagtagacttctgcgcatttgctggcacacgaggggtcgcgacaactttaaaaaaagccggttgtgagcatgttaaagctgcatgttggggactcgttctcaaatgctatgaattaagaacaacggcacataaaatggtaaatg

SEQ ID NO: 29577 - DNA, 378 bp, Zea mays
  unsure (1)..(378): unsure at all n locations
tatagattctctgagatgaccagnggcttcggaggacgaatccacccgaggcatgtcaggtcgatccatagctccagtcagaacgacgacaaaggaagccagcctcacaggtcacaatacacctcacaatcttcggagcaacaacaaagctctttcaggccaccagcttcaaggggcagaggcgccaggggcttcgaaggaagatttggggatcagcccacaaagatctactgcttattctgtggtgaggacaagggccatactacaagaatgtgccaaatcaccattcagaagcaaaaggagatagcagaagccgaagctcggtagaattagccgaagcaggtcttgcacactgattcgtgtcactctccctacata

SEQ ID NO: 29578 - DNA, 420 bp, Zea mays
  unsure (1)..(420): unsure at all n locations
agcttgtatgcatntctatattggagcatgaatggtgtggacctactcattgatattcgtctgggaacacaatcgggaaagtgactttccatatggcatgcctttattatttcacaggcatccccttctttgcagacctccatttttggctgcctccaatgtcactatgacgtgttattttgttgttttcctttgggcgctgcattccatctctctatccttcatattgcttctttggtttctttacaatttttaagtgactcttggtttttacccttcgatcctttctgtgctctaatgtatgaagtggaaaggcttgtcactactaaaattgcttaggtttttcctacagcatggacgcttccatatcttgatttgcaacatgaagtgaggtttcttgttaatcacttattgcgaata

SEQ ID NO: 29579 - DNA, 343 bp, Zea mays
tgcttacttggtaagatgaccaaggcgcctttcacgggtttaccggagaggacattagatttattggaactcatacatactgatgtgtgcggtccaatgagtacgacagctaggggaggattccaatacttcataaccttcactgatgattttagtagatatgggtatgtctacttaatgaaacacaagtgtgaatccttagaaaagttcaaagagtttcagaatgaagtataaaatcagcgtggcaagaaaattaaagcactgcgatcagatcgtggaggtgaatatttgagtcatgagtttagcaatcatctaaagagttgtggaattggtccacagctta

SEQ ID NO: 29580 - DNA, 371 bp, Zea mays
  unsure (1)..(371): unsure at all n locations
agctttacttagttgattntgcaaaagaagaggccggtctatatgcatgcttaattgctaagactagcatgggctggctgtggcatcgccgcttatcacatgtggggatgaagaaccttcacaagcttctaaagggagaacacgtgatagggttgactaacgtacaattcgaaaaagacagaccttgtgcagcttgtcaggcaggtaaacaggtgggaggctctcatcacaccaaaaatgtgatgacaacatcaagacccctggagctgctacatatggacctcttcggacccgtcgcctatctaagcataggaggaagtaagtatggtttagttattgttgatgacttttcccgcttcacttgggtgttc

SEQ ID NO: 29581 - DNA, 79 bp, Zea mays
  unsure (1)..(79): unsure at all n locations
tggtgccgatggagaaacagaaatccttgaagtcttggntgtcgaatggcttgggcgtatcgactgtgagtttggacgg

SEQ ID NO: 29582 - DNA, 450 bp, Zea mays
  unsure (1)..(450): unsure at all n locations
atcctctgagtcacctgcggctgcagcttcttagggagaacacatnttgggactaaccaatgttcattttgagaaagataggggttgtagcgcatgtcaagcagggaagcaagttggcacccatacataagaacatcatgacgatcgacagaccgcttgagctactccacatggatctattcggcctgatcgcttacataaacatccgggggagtaagtattgtcttgttattgtggatgattattatcgcttcacttgggtattctntttgcaggaaaaaactcaaacccaagaaactttaaagggattcttgagatgagctcaaaatgagttcggattaaggatcaagaatataagaagtgaccatgggacggagttcaagaactctcaaattgaaggctttcttgaggatgacggcatcaagcatgagttctcttctccctaacacc

SEQ ID NO: 29583 - DNA, 433 bp, Zea mays
  unsure (1)..(433): unsure at all n locations
tgtcgatcttnttgacagcaatgtgggtactgagatcatcttgtatctggcccttgtacacaataccagaagcaccagtgccaatcactttctggaaaccaccggttgccttctcaagctcagcataagtgaaggctttcaggggcaatcctatactgtttgatgactgcatagctgggacttcctttatcgtgatggtacagtaagtaccaaagagtattatggagatcagcagaaggttgaccaagacagagcttcccaagaacaatgaacttccaatgatccagntcttcttgtctttcttccatttgtgggaatcgacgatctccgactgcgtgcccgtgtcctttcgtaccttgatataaactgtnctctgcacaccatccgccatttggccgtatgacaaggcatcttcttctttcacatgtattgc

SEQ ID NO: 29584 - DNA, 287 bp, Zea mays
acagctcataggaacgagactttctcaaccagatccatgtattataatttgattgggaccccaccttataaaccaggatgtccgctgtggaagccgatattacccctcaaaattcatatcctgcttagccatctaggtagggggctaagtctaaccgaagaccacttaccctaacgtagatggcgaggaagtacgaagcgcagtttttgtattagaacgagaacatacaacaatatttctttgattgctccatagcctacactggtaggagaattatttattttact

SEQ ID NO: 29585 - DNA, 350 bp, Zea mays
tctaaagggagagcacattttatgactaacatatgtttattttgagaaagacaggatttgtagcgcatgccaagcaggaaagcaagttggcactcatcatccacacaagaacatcatgacgaccgacatgccacttgagctactccacatggatctattcggcccgattgcttacataagcatcggcgggagtaagtactgtctagttattgtggatgattattctcgcttcacttgggtattctttttgcaggaaaaatctcatacccaagagaccttaaagggattcttgagacgggctcaaaatgagttcggattgaggatcaaaaggattagaagcgacaacggga

SEQ ID NO: 29586 - DNA, 432 bp, Zea mays
cagcttcaagcttggtgccgattgttaaacacatatcctcgaaatcttggctgtcgaactgcttgccggtgtcaactgtcaactccgacggtactccgaagcggcagacaatgatctggcctaaaaatttttgggcagtctttgatgtgattgtggaaacagccctcgcttcaatccatttggtgaagtattcgacggctactaaggcgaacttaaggttcccctgagcggtgggcaggggcccgacaatgtccaggccccaacgctggaggggccatgtattggcaatcacctttgtatattgtgaggggttgcctgaccgatgagaaaacttctggcaggcttcccaagaccttgtgactcgatttgcggcgcaaattattgcaagccagtaaaacccgttgtcggatcaccttggcagccagcgccctt

SEQ ID NO: 29587 - DNA, 370 bp, Zea mays
tggtttacgtacacccacggagatggagtcttccccgtcgtgttcctgacgatatagtacaacaacatccaaattaagggcacggtaagatttagcgacgtaccagagctcaagaacggcaactaggaaggcgggtgaagggacaagacagtgggtcgacggaggggtgctcacggtggtgcagaaaacggaattgggggaagtttgaaattcacgagctatggtgactaattggaggcgagaggtggtgttctgagttcgtaataagttggtgaagcaggctggggcatcaatttatagcagctcgaagcggtggctccgaatttgggaggagagcggagcacggttatgacaagacattgtactggcg

SEQ ID NO: 29588 - DNA, 432 bp, Zea mays
tctaaagggagaacacgtgataggtttaacttacgtgcaattcgaaaaagatagaccttgtgcagcttgtcaagcaggtaaacaagtgggaggagcgcatcacagcaagaatgtgatgaccacttcaagacccttggagctgctgcatatggacctcttcggacctgtcgcctatctgagcataggagggagtaagtatggtctagttattgttgatgacttttcccgcttcacttgggtgttctttttgcaggataagtctaaaacccaaggaaccctcaagcgcttcctcaggagagctcaaaatgagtttgagctcaaggtgaagaagataaggagcgacaacgggtccgagttcaagaaccttcaagtagaggagttccttgaggaggaagggatcaagcacgagttctccgcttcctatacaccaca

SEQ ID NO: 29589 - DNA, 369 bp, Zea mays
taacatatttattatgttctctggcgacaagaccacatggccattccagacatccttcttttctttaatggaagtcactaatctcattgatctatcaatttgctttttccaaaggccctggaagagaagacactaatattttgttcatcatacctagaatcaccctcaacatcagaagtactatacttgggggtgggtctaaggggtaccttccttttgcccctcctggccatgaggcaccttgtgccgatgctggggaagaaaaataccttgctgactaaaatcgtggcggcgatctcaatggagtcggaatccgtggacctcttatctaaatcacacttttccacaaaatgcggcgtagctcctttc

SEQ ID NO: 29590 - DNA, 279 bp, Zea mays
  unsure (1)..(279): unsure at all n locations
aaaaactcagctcgaagggagaccatttangacaacatatgttttttttataaagacaggatttgtagcgcttgccaggcaaggaagcaagttggagcccatcatccacacaagaacatcatgacaacagacaggccactggagctcctacacatggatcttttcggcccgattgcttacataaacatcggcgggagtaagtactggctacttattgtggaggattattctcgcttcacttgggtattctttttacaggaaaaatctcaaaccccagaa

SEQ ID NO: 29591 - DNA, 270 bp, Zea mays
ataaaacatacccctataccgaacaggagcaccgaccttatcctcctttggaagaagtataaagagatgctgcctaagatcgaagaaacccgggggcaataatttttccaatttgtacaaaagcaccggggccctctttgtagattctataccactacgtcgcttgggcggtccctctgagacaaaggtgcccctatcaaaatactttctctggcttctgaaagggggagagaaggggagaaaacatttatggcaatcaaagttacatat

SEQ ID NO: 29592 - DNA, 423 bp, Zea mays
  unsure (1)..(423): unsure at all n locations
tgcacatagcaaacacgtacaaatggaacacattntccattgatatcgngtttatggtagctctggatgtttcagttttccccatatattcttcttcctttggaagtagttgttgttggcttgaaatgtctgttatagcattaccctctcttttttgtaagaacataacaggctcgatccatttgtgattctacatttagtgttttcttgtaacatgctccttgctacattagcatttcttggtgccagattaatcatgttgcagtgaaagttttgtaattgtagcatgatgtttctgtatgcagggttagtgtaaaatttttggtacatgatgaatcattgaaagttattgagaattaattgtgaaattgtctgctctattgaaataaacataatgttggttagatgctgatgaagaagtat

SEQ ID NO: 29593 - DNA, 404 bp, Zea mays
cccgggatccttaagccacctcagctgcggcttttttttgtacactatgctatttcttccccttctgtatcttctgttttgccgaaacaaccatttatggcgtgaagatgattatcctgcagatgcctagatgaatgtttatgaatgcaaatgctatgatgtaatgtgatgtgcaaatgaatggcctaacatgtatgcgaagccatattcatacacattattttcttaagaacaatcacacctcagctctgcatttctttatgaaacactttagagcttcttagactttacttttggcggaatcagcgttgacttttcgctgtaagctctgcattcccttaggaaccactttggaacttcctccactttacttttgagcgaataaccgtttacttttcgctgaa

SEQ ID NO: 29594 - DNA, 374 bp, Zea mays
tgagtgaggttattacagaccagactataagtgagtgcagagtagtaatattatacaagccaggggaggcacaaactcctcccgataagtttaataaaccaaaagatcctaagtggaggaccgagtcctcccgcacttcagtcttctttttcctcatttgataccaccttggagcagaagcaacaaaagtttgtcgcttcctcacctaaaaacaacaaagggataaaccctgagtatggaatactcagcaagtcttacccgactaaggaaaagactctcaaggggatgctggataaacaggagtcaaggagaggctttagcaaaaatcaacttatacttttgcagaagtagcttactaaagtgagttcttactt

SEQ ID NO: 29595 - DNA, 265 bp, Zea mays
atgggccaccccctgagaagggggctcaagattgtgacccaaccatttgcctctgacttagcttttagaagagaccaagcaggcgcaagtcaacaaccagtacaagaccataccactaccatacataactggctataaacatttaaatcgggcactccgtctttaagagttcccctgggcctattaataggatagcctacgacttctggaggggcggtgaacacttcacaagatttctcctccatgcggtattggcacttgcctc

SEQ ID NO: 29596 - DNA, 341 bp, Zea mays
  unsure (1)..(341): unsure at all n locations
taagcaacatgtcttgattntccaaagcacttttcaactcttctacctcagtgacaagatcatcattggaatgtgatacctcagaagcagagtcgtcaccaatgtacttgccatcgccgcccaccgcatcatcaccaagggccatggtgtaaaggcctcctgcagtatcggcgatgaagcagagtccattgagcttttcctcaaagcgcctctcaagctcctcatcactcgaagaagaggccaacttgtcgaagtcgtgattgaaagggaaatgtgccttgggccatttctaagtattttggtgatttagtgtccaacacaagtgcctaagtgttgatcta

SEQ ID NO: 29597 - DNA, 431 bp, Zea mays
  unsure (1)..(431): unsure at all n locations
agcnttggatctcttgctttataacttttatcaatatgaccagaaataacttgggaatcagtttttagaaccgcccttctgattcccatcgcctttaacttccgaagacccaaatgtaaagcttcgtactcagcaatattatttgtgcaactgaaatcaatattgtccaaacttcagcatctttattcgtttcttcttcctaagcccatgacatccagtcagcaatgaagtctgccaatgcttgagattgaatcgaagatctatgcacataatcaatacagaattcattgagctccgcggcccattttccaacccttccagtagtttctctatttctcataatatccttcaacgggtgtgaagaaggaacaactatattgtatgcctgaaaatagtgtcgaagctttcttgaggcattaaaacagcataca

SEQ ID NO: 29598 - DNA, 425 bp, Zea mays
  unsure (1)..(425): unsure at all n locations
ntaccctgtagtctggactataagttggttactgtaggtgtgccttatgcagtttgaccatttccagcatttgcgtaatgaggactctagggagaagcctcgtagtgagaccctgaccattcacctcggaagtgaatacgggtctagctaacccgggctagaagggaatcgcgactcatgggtaaagatgcgccacctcttcagagtgtaaaactgatatatcagccgtgctcacggttatgagcagcctggactcctcacatgataattgaacttgaagatggaaataaatcgagatccgatgatctgccaatggtttgcttaagtggtttcacttaagtgtttttgacatactctcatacttttggttactgggaatacttgggattcacacttattagtaagacagggtgttgtaataaaat

SEQ ID NO: 29599 - DNA, 422 bp, Zea mays
gcttgtcccaaggacccgtattctctttcacgtatagatcaaatcgtggattctacctctgggtgcaacctcttgtacttcttagatgcttactctggtttccatcaaatccagatgtctagggaagataggaagcatactgcttttgtaacagtggatgggcttcaagctgtctcagcacagtttgttgcttagaaatgagatccttctcttgaatgctgcaagcaagttttcacaagaaaaattaaaacagattcaatcagcaaaataaccagcattctaccagtgccagaataggagaggaaaataacctggcttcagaagagtttctagttgtctccaaaatttcattgccagaatgaattatggcaacagcacgactctcgccgtctaacatactccatgccatggcactgactgca

SEQ ID NO: 29600 - DNA, 345 bp, Zea mays
  unsure (1)..(345): unsure at all n locations
tgaaaccgagcagagaggagcgccatggggagctcggccggcatggagcacgcgacccagatgagcacgagcgatggggagtggacctgacatccatggcttcgaatcggctagccacggcaaggatgactggcataatgctgacggtagccgtgcgcagggaaggagaacgccgagcagggagctccggcgcggcggtcagggcaaaaaaaaccgagctacgcgagacgttgagcaccacagggatgggtgccgagcgagtaaagggagctgggcgaactccatgggcgaggaggagtcgggctcgtangggaagaggctanggtaagccgagtggtcgagctg

SEQ ID NO: 29601 - DNA, 428 bp, Zea mays
  unsure (1)..(428): unsure at all n locations
agcttctaaatggagaacacgttatangtctaactaatgtaactttcgaaaaagatagaccttgtgcagcttgtcaagcaggtaaacaagtgggaagctctcatcataccaaaaacgtgatgaccacatcaagacctttggaattgcttcatatggacctcttcggacccgtcgcctatctaagcaaaggaggaagtaagtatggtcttgttatagttgatgatttttcccgcttcacttgggtattctttttgcaggataaatctgaaacccaagggaccctcaagcgcttcctaaggagatctcaaaatgagtttgagctcaatgtgaagaagataaagagcgacaacgggtccgagttcaagaaccttcaagtggaggagtaccttgaggaggaagggatcaagcacgagttcttcgctccctac

SEQ ID NO: 29602 - DNA, 401 bp, Zea mays
tggtgccaatggagaagcaaaaatccttgaagtcttggctgtcaaactgtttgccgttgtcaactgttagttcggacggtactccgaagcggcaaacgatgttttgccaaaagaatttctgggcagtttttgatgttattgtggaaacagcccttgcctcgatccatttggtgaagtactcgacagcgacgaaggcgaacttaaggttcccctgggcggtgggcaggggcccgacaatgtccaggccccagcgctggagaggccatgtgtgggcgatcagctttgtatactgcgaggggctgcttgaccgaggggaaaacttctggcaggcttcgcaggaccttgtgacccgatttgcggcgcagatcattgcgggccagtaaaagcctttgcggatcacc

SEQ ID NO: 29603 - DNA, 416 bp, Zea mays
  unsure (1)..(416): unsure at all n locations
agcttctaaagggagagcacattatatgactaacgaatgttcattttgagaaagacagggtttgtagtgcatgccaagcaagaaagcaagttggcgcccaccatccacacaagaacatcatgacgattgacaggccgctcgagctactccacatggatttatatgacccgatagcttacataagcatcgacgggagtaagtactgtcttgttattgtggatgattattctcacttcacttgggtattctttttgcaggaaaaatcacaaacccaagatacattaaggccttgttcggntaatcccattacccatggattggatgggattggaaaattttaagaaggagtttgacttagttgggatttaaacccacccaatccaactcaatccacatggattgaaagctaaccgaac

SEQ ID NO: 29604 - DNA, 428 bp, Zea mays
  unsure (1)..(428): unsure at all n locations
ggacattgnttccctattggaaaccaatgccatccttaatgccagggtgtctcccattatagagcatgctcctagcaaatttaattnttttcattttctatttcatgctcattaattttattagttagttgtgctatgtgatcattttgttctttaattaaagctaggtgatcatgaatagcatcaacattaatgtatctacatctagaacaaatagaaatatgatcaatactagatgtagagggtttgcaagcatttaattcatcaatcttagcatgcaaaatggcgttctcatttctaagattggaaatagaaataatgcaaacatttaaatctttagccttagaaattaatttgtcattntcaattttaagactagaaagtgattcatttaatttatcaatcttagcaattaaactagcattatc

SEQ ID NO: 29605 - DNA, 424 bp, Zea mays
agctttttcaccattactagatgattgaattgagctatgcattcccttaggaatgactttggagctttttcacttgagcgctgcatttcacttaggaacgacttcagagctctttcacctttactaggtgatcacacttgagctctgcattcccttaggaatgagttcagagctctttctatctttcatatgaagattgattgtgatactttctatcatttcactcgaaggtgccaacacattattacatggaattttagagaaaaaaggtttgcatgtagacgtgagagtgtgcagaaatatcttggttggactttggttatgcttacccacccccttacgggctcagaatatgtgcttcatttctgggaccatgttgttgagtgtgcgagctatggagctctcccttttatacttgtgctgc

SEQ ID NO: 29606 - DNA, 388 bp, Zea mays
tgtatccactactacaagcaccccggtgcattataatataagcctcatcctccctctgctggaagtagggccttcttagcccgaaccaggacaaaccttgtgtttcatcttgcatcaatccattcgggccgggacacacaacataaaatttactagtcgggtgagggtcccccaggtccaaaacaccgacacctgtggatagaccttcagtttgtgctcgaacagctctctcgggactcccggcatatccgcgggttgccatgcgaatacgtctcggttatcttgtagaaactagacgagcgcgctttctatttgtcattcaggctggagctgatgatggcagtcttgcgttcattagcgaacccaaggttgattctctttatttcct

SEQ ID NO: 29607 - DNA, 390 bp, Zea mays
acataaaatttctaagatcaagaatatttagttcattcctcaacatgcaaaagcgggtcttatcaagtggcttagtgaaaatatccgctaattgatcttccgacctcactccttctaaaacgatatctcctttagcaacatgatctctacggaagtgatgacggatatcaatgtgcttggtgcgagagtgttatacaggattattagcaattttaacagcactctcattatcacacaacaaaggtaccttttctagaactacgccatagactagaagagtttgtttcatatacaaaaattgcgtgcaacaagcacctgcggcaatgtattcctctgccgcaattgacaagcaacactgttttgtttttggatgccatgaactaggatcta

SEQ ID NO: 29608 - DNA, 414 bp, Zea mays
  unsure (1)..(414): unsure at all n locations
tcagtcttagcgttagtcttattcttagttagtcttagttagacagggtagtttgctatatcctgtgcatttatgtttgtcatgatgaactatgattggtttggatctttgtaatgattgtcaccagagtgtgggtatcccctgcattttggtttacctattatgttaatggagttagttatatagttgagaaaccccttttattccactttcctttctatctgagaagctgtgtggtctgtgttggagatcagtgaagatgctcacctgttcagtgctgttgaggaattctcttctcttctcttatgctgcaagatttgccagatcagttctgatgtgtggttgcattctgcagatgtcagagaacaggcgcagaggaggaaggcgtgctcagcangagcaagcccgtcaaca

SEQ ID NO: 29609 - DNA, 419 bp, Zea mays
  unsure (1)..(419): unsure at all n locations
agcttcatatcatctctgggtacctgcaaaacttattaaatacattntggtacccatttttggatgggtccaccaaggttagctaataaatacttaggcacccaaatggcctttgtgctagtttcaggtgaactaattacctttctagcacaagtgtcatttttgggtctcctaagtgaatatgaatgaattgacatggtaggcttaggatactcactcatgggacaatccttgcataggtgtccctttcttcggcaagtgtagcaaatctgatttttaattttgcaagactcctttttgccttgcttcttgtttgctacatggntagtgagcctctttctttctcaaagtaaaccactatcctttgtgtagggacatgacttaatctcatggtccttatcatgacattgataacactt

SEQ ID NO: 29610 - DNA, 395 bp, Zea mays
  unsure (1)..(395): unsure at all n locations
acagtacaatatcaatgaatgctcgggtgacttcacacctacccgtttgtttatatagtgctgcacgtaaaaaggtgaatcgtcaggatttttacaccacgcgaacagttgcttgcactcgctgcacggtggaccgcaaagaccaaatagtaactctgcagggtgggaccactacgcgctcggaaagtgaatcgtttctcgacaacgagctcagggaaggtgtttttcggaccttcggcttcccgaagcctaagagacttttttcacggatcaagctcgttatgaggggcataattgtaattcctcacaggctgtgtcccgtgcctataaatagtgaacagtattcctttactgttcacgcattnnctgtaattgcatcgcatcattctggaatc

SEQ ID NO: 29611 - DNA, 307 bp, Zea mays
ggaaacgccttctgttggggacttgttctcaatgctatgagttaagaacaaggccacatagaaaaacgttaatcgttaaagtccttcgtccttcgaaacattattcctctcaggatataatgattttccgaccaaggtgtatgaagggtgttccttcgtaaatacaatgacggaggatgaaatatatcgaatatatagaatatcatacacaattgcgcattattattatgtaaaaacagaaatacatcgaattacaaatgtaccttcaccttgaagagatgaaagtcaagcgtgacccaaaacgatt

SEQ ID NO: 29612 - DNA, 349 bp, Zea mays
  unsure (1)..(349): unsure at all n locations
gggggaggttcttcatcctcacatgtgctattcggcgatgccacagccagcccatgcaagtcttagccattaagcatgcatctagaccggcctcttcttttgcaaaatcaactaaataaagtttgtcgtctaatacacccttaaaagctagtgaaccatcacttcttctaaagacagacacatctacatttgtaaatagacaattatatcccatttgacataattgactgacagatagcaaattatatccaagactctccactaagaatacatttgatatagaatgctcattagaaattgcaattntacctagcccttttaccttgccttgattcccatcaccgaatat

SEQ ID NO: 29613 - DNA, 387 bp, Zea mays
agcttgtatagcaatggcacctccacaaacccttgtgcaacattaggagtgtttagcaaataagaatagtacttagccttgtgtgactatccacagcttcaaacaaacctggtggcaacgctctctttgatgctgcatctcgtatagcaccagctatggtttgagtaccaagttcaaaggcgtgaaccaaaggagcaactacattttcatccttcttagctctcttggagggcctattgtctgaacccgctatgtcttctttgtcaatggaagtactggatggtggtccaacattcatctcatcctcttcaacatcaacagcaagaggttcacttgaagtcttcacaaattgacctgttgcaacactatcaccgaagatggtagcta

SEQ ID NO: 29614 - DNA, 410 bp, Zea mays
tggcgactgtcagttcgacctctagaagcagtcctacgtggtcgcatgcgtcgctgtgtacgataagctcccgcgaaaccgccgcttggacgcggtccagagcagctgcaccgcgctgtccatcgttaagcagggggtctcatggttgtccccaacgtcgacgactctcgggttgttctggacaccgcatccgacgacgacgccatcacgccgtccaactcatcgttcacctgaagcccaacctgccacgtaagtcgctactgatcggacatgaattgttgtgcgctgggatgatggacgttgctgacgttgtgtgagtgtcctcgaacatgatgtatgtagtggagtagcgcatccggtggtgcaacggcagaggtactacctcgctgatgagcccgggtgcacttcgt

SEQ ID NO: 29615 - DNA, 414 bp, Zea mays
tcttcaccatgagatcacggttatcttgagaatggtgagcaatgcacttccctttaagttatgtcaagctcatctttagcctctcattttcttccttgagcttttgatatgtataatcttttgttcctgcaagttctagctcaaaggaagatttgcttgtcgatggacaacaagcattagcacatggtaatgtagtttcaatttgaatacatgtgcatgagtgaggttgttgggattttaagttttctatcataacctcatgagcaatgtttaatatgatatgatctgttgggggccttcggcttctgaaggtcctcaaaaacatgatttaacaatgtctctggagtataatgtgtaaacaggtaccttcagacttaaatcaaaaccacagcgtgaagatgcacaaagaatatg

SEQ ID NO: 29616 - DNA, 345 bp, Zea mays
agcttatgaagagtcttcatcccaacatgtgctagtcgacgatgccacagccagcccatgttagtcttaacaattaagcaagtgtcgagtgcagctctatcaaaatctactaagtatagctgaccctctaacactcccttaaatgctattgaatcatcacttcttctaaagacagtaacacctacatcagtgaaaagacagttgtaacccattttgcatagttgagatacggaaagcaaattgtaatccaatgaatctacaaaagaaacattggaaatagaatggtcaggagatataactatcttaccaagaccttcgaccaaaccttgatttccaatcccgaat

SEQ ID NO: 29617 - DNA, 329 bp, Zea mays
tctgttagcagagggcataaactagaagctattttgatagatattaatggcgcaggaaaataacacgctcttgcattgcatctcgcactgtcaactgagaacctgaagaggccagcgtgagctcgagggactagcatgagatgtgacggccttggcggctacgcgcgaaagcattgcagtactgataaggatcgtgatgctcctgttatactcgcggccacaggccacagctgcgccatccaacgagaacagtcaccatggtggaaacatgcacaccgtcgaatgcccaactccacgcaagttcaatggttctagcagggatccacaac

SEQ ID NO: 29618 - DNA, 374 bp, Zea mays
ccgggattctctaagacacctgcggcatgcagcttctttcgcctcagcgatctttccctctttctcttatcgatttctaccagaccttgatgggagctcagaacaaagcactgggcgcgatgtggttggctatgccgcgggcgaaaccaggggatgccactcgtcgcaatggccgaaatccgcgccgccctgagactgcctaactcgggcgcgcatgctcaagacccactctcagcttcagggggccatcgttttatttctcctggcgggcacacgatcacggcggacccgccttttccccgattggggcactgcgcctatttatttatggtgaggaccctctcttgtgattctttgttgttagtgcttcgcgt

SEQ ID NO: 29619 - DNA, 420 bp, Zea mays
cgtattagaataatgtgtatgttttagggtcttaaatgtacttttcttgggctgcgtccgatggctataaatagatgaacagtgccatcgtactgttcatgctggattggaatcacattcacgcttttgccttcggacaagccgaagatacaaatgtaatgtacattatgtatcactttatcaatgtatgggatggattataaatattgtttaacatttgatatgaaatgaataagtgtaatgttacatctgtaattatacttttatatttttgaattgtgaagacttgttcttcatgaccttcgtccaagactcattatacccgaagggagataatgcttcaaaggacgaaggtccttaacgtttaacaattgtgttgccttgtttatggttcacagtaataaaaaacaagaacccaca

SEQ ID NO: 29620 - DNA, 410 bp, Zea mays
agctttattccagtgtacccatgatcacgaagaatacctccaggcgtatgtccgaaggtttctgcgcctgagggcacaagcgccaacagtgcccaatgaaattgtcattgaggccatgattaaggggcttcagccgggaccttcagcgcaatactttgctaggaagccaccacaaactttgtagaagctgctccagaagatggacgagtacatccgggccgacaatgacttccgccaaagaagggaggaggcatttaggttctctgaaatgaccaggggcttcgaaggaagatttcatacgaggcatgtcaggtcaattcataactccactcaaagtgatgatagagggagccaacagcaaaggccacaatactcttcacaagcttcaggacaacagcaaaactctgttc

SEQ ID NO: 29621 - DNA, 347 bp, Zea mays
  unsure (1)..(347): unsure at all n locations
ctcttgcattgcatctcncactgtcaactgagaacctgaataggccagcgtggcttccgcgactgcatgagatgtgacggccttggcggctacgcgcgaaagcattgcactaccgataggatcgtgatgctcctgttataactccggtcacaggccacagctgcgccatccaactagaacatgtcaccatgggggaaacatgcacaccgtcaaatgcccaactccacgcaagttcaatggttttagtcaggatccacaactcttgctgccaatgccaatgctcactggtgatccgctcgtggacgccatgaccagacgctaatactgacaaccattcaaatgaaacc

SEQ ID NO: 29622 - DNA, 436 bp, Zea mays
tgcaagcttggctcgccaagaggagttttgtgttttcgaccggccggtacagcaaccaccgcggccagcaccgcgcggtcacccgggccctgcacagcgggctgccctgccggcaacagcgccgatcctggcgcttcctgcccctccagcggccgcccaacaaggccgcggcgagaacgaccagaggcgtttcacaccggaggagatggcagaacgacgacgcctagggttgtgcttcaattgcaatgagaagttcacccgtgggcacaacagattttgccgccgccttttcttcctcaatggtgtggagatcgatgacgtcgcacgggacggcaacgcatcaagggatgatcccgggacaaggaggcgcccgtgttcgctgtatgggccgcaaccagggcgcccaccgaggaatcgccgtgtttctccctcttcc

SEQ ID NO: 29623 - DNA, 346 bp, Zea mays
  unsure (1)..(346): unsure at all n locations
ctcaagctntgagtgcatgatcgaaggctcgaggaagatcaacgagcttgatgatccatctacatccgaggctcaacccgtcgcattcaaggcgacggaggacaaaaaggaggaggctacaccaagtcgacaaccaatagacgcctccaagctcgacaatgaggaaatggcgctcgtcatcaaaagcttccaccaaatcctcaagcaaaggagggggaaagactacaagtcccgctccaaaaaggtttgctacaagtgtggtaagcccggtcattttattgctaaatgtcctatatctagtgacagtgaccgaggtgacgacaagaaggggagaagaaaggaaaag

SEQ ID NO: 29624 - DNA, 406 bp, Zea mays
agctttctaaagctctctatggtcttaagcaagctccacgcgcttggtatgaaaggcttatggatttcttgctttccaaagacttcaaaattgggaaggttgacactactctattcactaaaagaattggcaaagatttatttgtttgtcaaatctacgttgatgatattatttttggatctactaatgaattattttgtgaggagttcggaaaaatgatgtcaaaagaatttgaaatgtctatgataggagaattgagcttctttcttggccttcaaatcaaacaattgaaagatggaatttttataagtcaatcaaaatatttgaaggacatgctcaagaagtttggtttagaaaatgctaagcctatcaagactccaatggcaacaaatggtcatctagactt

SEQ ID NO: 29625 - DNA, 426 bp, Zea mays
  unsure (1)..(426): unsure at all n locations
ngagacgggaacaaccgtggcatgtactacatcccttgaagaaaatgtcaaggatttgaggattatcaagaggaagaaacaaaagatgaaattcaacacctcctccaaaagcctcaaccacgcctccacaaaaggtaacatccaaggtaatgatcaagccacacttcacattaagaggtgtagtgagtgctttaaagaggggcacttgattaggtcatgtccctacattaaaaatggcttgattattaacaaggatgatagactttgttttaaatgctccaagaagggacacttgcttagatcttgtccccatttaaagcaaagaggcatagggttaggaaagaanatttttactaaccatgtagcaggcaataaacaaggaaagaagaaaatcttcaaatttggaaaacgcctatgctacacatg

SEQ ID NO: 29626 - DNA, 303 bp, Zea mays
atgacgaccgacaggccactggagctcctacacatggatctattcggcccgatcgcgtacataagtatcggcgggagtaagtactgtctagttattgtggatgattattctcgcttcacttgggtattctttttacaggaaaaatctcaaacccaagagaccttaaagggattcttgagacgggctccaaatgagttctgcttaaggattcaagaaataagaagcgacaacggagcggagttcaagaattctacaatgaaggcttcctgatgaggagggcatcagcatgagtctcttctccta

SEQ ID NO: 29627 - DNA, 437 bp, Zea mays
  unsure (1)..(437): unsure at all n locations
ntggtatgttgcttgggctcccacactaagaaatggccagtttgggatgtatttatagcccccaacacaaatagagccgttggagaaaagttgttgcttctctgcggcacaccggacagtccggtggtgcaccggacagcgcactgtagcatgtccggtgcgcctagccgttgccctgtcagagcaggtgaccgttggcgccgcaggcttttcacatcagatagtccggacttcacaccggacagtccggtggtcttctcagctcggtgcctcatggaactagccgttgggctggggttccctagtgcaccggacagttcggcgtgtgggcaccggacaagccggtgtgccacgggacagtccggtgctcctcgcacaaacagtccgcaggcaacacacgtcttcattcttggacttttncttgatcttcttaatgg

SEQ ID NO: 29628 - DNA, 291 bp, Zea mays
aaatgggttcaatgataaggtccacagggttccgggaaccttttcttaaaacttgcccctttaaaggatataaaaaccatatgggttccgctcctccaaaatgcgcacgccctcagcctctgaggggctgggttctttcccaacaacacctaatattacatacccaaaacgcccccccttgattttttccccaaaaacccctctatggcgggggcctcgatcccttacccgaggatacacacattcccgccctgaattgtgatcggccttaattttaacaaacccgtccaa

SEQ ID NO: 29629 - DNA, 436 bp, Zea mays
  unsure (1)..(436): unsure at all n locations
tncaataactagagatagcccaggttagactgtgctattcggtttagctggaccaggtccaggctgctgtaaaaatacctccacgccaccagggattaagttttagcgacggcggcagttccctcaagcgtgcgagcggcagcgatcctgggggccagcggcggtgccgccctgaggtcggtgaccgacggcggcgctccaccaggaacgagcgacaacgatgctcccgaggcgggcgggcaagcggtgatggcgctcctgaagcggatgggcggcggcggcagcgcaccctagactcggtggcaacgacagttgtgcgagccgcggtaggcgtcgacagcggcggcggtggccacgacggacacaggtcgctacggcgatcgcgcgaggcgcggtcgtctctggctatggcagcacaacacttttacaacatact

SEQ ID NO: 29630 - DNA, 424 bp, Zea mays
agctctcccgcgccactacatgtttctcacctaccaccatcttaatcacgtgcgggaccccgacatcgccccagatcgacaagaatctgggagcctaaaagcccgctaacctaccaccgacgagaatcatgctgcccaaaacctcaccccaaatcgacaggcgatcaatcgacgccgatttgggtcgtccttaaaaaccatgccaccccagtccacaaacatggcagccccaatctctcgaaggaatagttctgctttggcgtcaactttgcaagggaatgtctctactgtttagttcgaattacttcgattctagcactgccaaatgtctctactgttcgaagccagtgtctttactggttaattcaaacaaaatgaatgggtaggtctgcgaatacttgtgtaagcgccataaaatgaatgg

SEQ ID NO: 29631 - DNA, 409 bp, Zea mays
tcttcgctctataagagcttgttggtagtttgttggtgtttggtagtaatggggacagaaaattcaaaagatctgtgaagctagtatcagaccatccggcgctagccttcaacttcagaagttctagaactgtacgcagtgtagtaaactctttgtcacaaccctttgattcatcatataaaggttcttttgaggcactttccagtccctccattttagatagccctttctgcgatcccacagaactcaacatttctggttccatatggcgcaacatctcttcgcaatcaaattcttcaaaatcttgattagcattcacattatccactttaccatcaactttaagatctaaattccgacactctctcggattacccagcacttcacacggatcccactcaccatgttc

SEQ ID NO: 29632 - DNA, 381 bp, Zea mays
  unsure (1)..(381): unsure at all n locations
catgagctaagcggcgatgccacagccagcccatgctagtcttatctattaaacatgcatctagaccggcctcttctttngcaaaatcaactaaataaggttgccatctaatacacccttaaaagctaatgaaccatcgcttcttctaaagacagacacatctaaatttgtaaatagacagatatatcccatatgacataattgactaacagatagcaaattatatccaagactctctactaaaaatacattaaagatagaatgctcactagaaattgcaattttacctaacccttttaccttgccctgaatcccatcaccgaatataattgaatcctgggaatacttattcttgacgtaggaagggaacatcttcttctc

SEQ ID NO: 29633 - DNA, 376 bp, Zea mays
  unsure (1)..(376): unsure at all n locations
ntatcaaatggacgtgaagagtgcctttcttattggaccaatcaaggaggaagtctatgttgagcaacctcccggctttgaagatagtgagtaccctaaccatgtttataaactctctaaggcactttatgggctcaaacaagccccaagagcatggtatgaatgcctaagagattttcttattgctaatggcttcaaagtcagaaaagttgatcctactctctttactaaaacacttgcaaatgatttgtttgtctgccaaatctatgttgatgatatcatatttgggtctactaacgaatctacatgtgaagagtttagtaggatcatgactcnaaaattcgagatgtcaatgatggaggagttgaagtatttt

SEQ ID NO: 29634 - DNA, 371 bp, Zea mays
  unsure (1)..(371): unsure at all n locations
agcctgggcaattatagattactgtcctgttcaagaaagcgaccaggagaaggggaacacaccggagaagaagaaacactacaaaaaggcccagggcgaggcgcatataagcaaggagagggattcggattgctcctcctccgactccgacgatgagggactctccgccaccgccttcaacaaatcggcccttttccccaacgagccgtacacgtgtctcatggctaatgagaagaaagtaagtactcgaaactctacttatgcttcttataanggtgatgattctagtggcgatgaagaaatacactattctaccttatttaaaagcctagattgaattaccacccgcaaaattaatgaattaattgatg

SEQ ID NO: 29635 - DNA, 347 bp, Zea mays
tgatggcccctccacgtccgaagcacaaccgttctcatttaaggcgatggaggagaagaaggaggagtctacatcgagtagaacacccatcgacgcctccaagctcgacaatgaggaaatggcactcatcatcaagagcttccgccaaatcctcaaacaaaggaggggaaaagactacaaatcccgctccaagaaagtgtgctacaagtgtggtaagcccggtcattttattgcaaaatgtccattatctagtgatagtgacaggggcgacgacaagaaggggagaagaaaggagaagaagagatactaccagaagaagggcggcgatgcccatgtttgccgggagt

SEQ ID NO: 29636 - DNA, 426 bp, Zea mays
agcttgtcttaagctcgtcttttttcttcatccagatttgatgatagcctgaatagcaatccaataaactcatgagctctgaagtagttgttgcatccacaagagaatctattcttggcaatgggaattcatcattcggacatgccttattgagatctgtgaaatcaatgcacattctccattttccattagctttcttcaccatcacagtattggccagccaatcttggtatgttacttctctgattacaccagcactcagaagccttttgacttcgtttcgtgcaccttcggctttatcatcggacattttctgaagcttctgctttcttggcctgataaatggatctacattaagtgaatgttcaataacatccctgttaacaccacatagatcattggctaaccatgcaaagacatccttat

SEQ ID NO: 29637 - DNA, 434 bp, Zea mays
  unsure (1)..(434): unsure at all n locations
taaagatttgcgataacaatgaggaccttctttttatcaaaaaattcttcgaagcaacaaaaagtcgttctaaggaacgcagagtaagtttgccgaagtcacaaaaagtcgttccaaagggagcacagtgtaagttttttgctccaaagtcgttccaaagggaatgcagagcttacagcgaaaagtcaacgctgattccgcctaagtaaaaggcgaagcgcgaaaagtcaacgcgaataccgctgaaagtaaaaggcgaagaagctcctaagggaggcttacagcgaaaaataaacgctgattccgctgaagtaaaaggcgaagaagctcctaagggaggcttatagcaaaaagtcaacgcttgattcaaaagattatgtgttttatcgcanggatgtgtgtatcttcggaataaacaccaccttgcatagcat

SEQ ID NO: 29638 - DNA, 405 bp, Zea mays
  unsure (1)..(405): unsure at all n locations
agctttctcaacatttcttgttgctcaataaacatactttaatttttataattggctcaagtcaaaattttaaacttttcataccctttatcttattttctttaattttgctcatggggctcacttatggtttttattatggttgcacattcttatcttttaaaagactcaattgttttgatcatgatacttttaagtatatacttggngaattctttcttacttatgttaatttgatgctcatgcttactttgatgcacatgaaataatggttcttgggttggtatttgagagaaaccctatgtgacactggggtgtcacacactccgaagacacacttttctggattcagcttcagaccagcttgtctaaaattaacgaaggtctcctgcatgtcagcaatgt

SEQ ID NO: 29639 - DNA, 361 bp, Zea mays
  unsure (1)..(361): unsure at all n locations
ntgccgccgctctgngaggagtgcctgagaagagagagggccgccacctatgaattactgctcatcgtcgctaacgtcatggagagttcgcgaggatcgtctctggtgctcaaggaatctcaccggcagtcggtccgggtgcggggtattatggtggcgccataattcctcatcggagctctagcttcgccgcagctccgcttcatgctgcggaccggcatcaccgcaacacctccgtcggtaataccttacccgttgtccttgcctccgctcttgcatcgtgttgtgtgtctccaatcgaaggttagttcactgggcgaagaacgagttgtcgtcggtggatctccgccgtggggatcgc

SEQ ID NO: 29640 - DNA, 366 bp, Zea mays
agcttatgaagattcttcattctcacatgggctagtcggtggtgccagagccaacccatgttagtcttagcaattaagcaagtgtcgagttcagctctatcaaaatctaccaagtatagctgaccttctaacactcccttaaatgccactgaatcatcacttcttctaaagatagtaacacctatatccgtaaaaagacagttgtagcccattttacataattgagaaacagaaagcaaattgtaatctaaggaatctacaagaaaaacattggaaatagagtggtcaggagatatagcaattttacccaatcctttaaccaaatcttgatttccatccccgaatgtgatagctcattggggatct

SEQ ID NO: 29641 - DNA, 422 bp, Zea mays
tgtaccaagcccgctggaattaatcttcggttaaacccgacctcgctgcaacatgacacgcgaaggtccaacacaacaagcaatgagtgaattcagaattattgcagagcatatcagcacaagggacctggttcaagagtttttagcattcaaagtttttcccagtttgaaagaatgggaaatgccgaagctacagggggaaaagaaagaaggtgaactcgtacgtttaccttactatttcaagtttgagaagtactttaaagcaccttgccaagagtggctagatacgattgaagcaatgtgtaatgaaatacttggcaattattccaaaaaagaagatcaattgatgaccgcagccttcggcacccgtcccaagcgaagctaaatcgagtggtggacgcctgggctttgataccctgata

SEQ ID NO: 29642 - DNA, 425 bp, Zea mays
agcttattattctagagcacctggatccaagtgttcatgagttcagcgatctgaaattatctcatgaagcctttgcagaagggagggatgatgagttgctatatgctcctgaggtgggtcctaccatgatgatcgaaaatggtcagattttcaaggacctaaaagccttgaagatgtggttgcagcattatgtcgtcttacgtaagaggtcgtatagggttcttcattcatacgagaagcgtcgttacactgttgtatgcgacaaggaacagtgtccatggagggtctgtgcaagggtacagaagatcaacgagaagtggaagataacaaaagttgtgggctcgcacaactgtgctgaacatgagctaacgacgaagcatcgtcagttgacttctaccctcattgggaaacgacttatgggaata

SEQ ID NO: 29643 - DNA, 435 bp, Zea mays
  unsure (1)..(435): unsure at all n locations
tgatagcatgaaaaatattgtcatcgcaattctcatatatatatgcaaatcaccactgcatggtgggccccatgatatagaaggtttcactattctagtgaatggaaggngtntttttggaccttcggctaaaggccttccttcgtttcacagtctgaatttgttacaaagaaacaaactaatactgcgaggggctactgttgagggccttcgtctttcgaaggtcctcaaaacacggctaaccatttttcatcancatgtttctaagtgttacaggagcttcgttactagaaaaagctctggtttagatcaatggaagtgcgaccaagcatgcttcgtttcgttgacaccgtaagacaacgttaggataaagtgttgttcaacctgcttattgccaatgacaatattatccttgggataatgtaaacttgtgtg

SEQ ID NO: 29644 - DNA, 303 bp, Zea mays
tctaaagggagaacacattttacgattaacaaatgttcattttgagaaagacaggatttgtatcgcatgccaagcatggaaacaagttggtgctcatcatccacacaagaacatcatgacaactgacagaccactggaactcctacacatggacctattcggcccgattgcttacataagcatcagcgggagtaagtactgtctacgtattgtggatgattattctcgcttcacttgggtattctttttgcaggaaatatcttatacccaaagaccttaaatggattcttgagaccggctcaa

SEQ ID NO: 29645 - DNA, 349 bp, Zea mays
  unsure (1)..(349): unsure at all n locations
tataagggagaacacatgntatgatgaacatttgttcttntttagacacacaagacctggagcgcatgcgaagcagggacacaagacggtgctcatcatccacacaagaacatcatgacaactgacagaccactgggactactacacatggacctattctgcccgagtgcttagataagcatcggcgggagtaagaactgcctagatattggggatgattattctcgcttgacgcgggtatactttctgcaggacaaatcgtatacccaagaaaccatatttggattcttgagacaggctcgaaatgactatggcttatggatcactaagattataagcgacaacggga

SEQ ID NO: 29646 - DNA, 428 bp, Zea mays
  unsure (1)..(428): unsure at all n locations
agcttggggaggttcttcatcttcacatgtgctaatcggcgaagccacagccagcccatgcaagtcttatccattatgcatgcatctaaaccggcctcttcttttgcaaaatcaactaaataaagtttgccgtctaatacacccttaaaagctagtgaaccatcacttcttctaaagacagacacatctacatttgtaaatagacagttataccccatgttgcataattgactaacagatagcaaattatatccaagagactctactaaaaacacattagatatggagtgctcattaaaaattgcaattttacctaaccctnttaccttgccttgattcccatcactgaatataattgaatcttgngaatccttattcttgacgtaggaagtgaaccatttcttctcccccgtcatatggtttgtgca

SEQ ID NO: 29647 - DNA, 437 bp, Zea mays
  unsure (1)..(437): unsure at all n locations
tcaagcttcgcatctctgaactaattcggctgcgtcgttcttcgccgtctgccaatataatcctgacctgaagacctttccgactagtgttctggaggctgcatgtattccacattgccctccatggacctcctccagaagttgcttcccagtggacgggagaatgcatttcatgagaacacctgatgcaccccttctgtataatatctccccaatgagtgtgtagtgagccgactgtctggcaatgcgctctgccgagttcttgtcgtctggttcttcttcgttctttatgtacttaatgatcggcctcctccagtcatcagagtctgactcgggttgatctacgatgttgcactcttctgnttgatctattgagacactcggccgtgtaatttcttgcacgaaaactccgggtgggacctgagttcgaccggatc

SEQ ID NO: 29648 - DNA, 430 bp, Zea mays
  unsure (1)..(430): unsure at all n locations
agcttcaattgatttaatgttccatgtttaatcattcccagatttaacttctccatttcttggcataatgtgatgttagaggctttcattgtaagacaatgacaggaagccttgcgacttantgcatctgccaccatgttggccttgcctgggtgataatgaattttcaattcatagtctttaatcagctcaagccatctcctctgcctcatgtttagttctgactgggtaaaaatgtacttcaagcttttatgatctgtatatatatgacatatattccccaacagataatgacgccatattttcagggcatgaaccacaacagctaattctaaatcatgaaatggataatggttctcatgccggcgcaactgtcttgaggcatatgctataactcggncctcttgcatcaagacacaacctaaaccac

SEQ ID NO: 29649 - DNA, 437 bp, Zea mays
  unsure (1)..(437): unsure at all n locations
tctagttctggttcgggcactctcttatattgcttttcgaatattatgtctgttcaatgcgtaaaaaagaacaaacccagtgctggcggctcccacatgagtggggtctggtgcattttcgcagagaggctgcattggacacatgacctttggctcagtgaggaggcttctcaccactgcgccaggcctgtcctcctgtctgctcaatgtgtaaggggctaattccttctgtgactatacaggatgaagctgatgagatgttgagtagaggttttaaggatcagatttatgatgtctacagatatctcccgccagaacttcaggttactactggaacctatagtttgggacaaatgagagatagntttttccctcttctttntctcttcagttntgtagctggtcagaaaatttgcgcttctcccccatagcattat

SEQ ID NO: 29650 - DNA, 428 bp, Zea mays
cagctttaagttgacttgccgaatcaacttatactgcggggtgggtacctacgtattctgggaagtaaagcacatggtactaaacaatatgcatgacctgcttctgctgaacttgttgtgctgcaacttccgctatcttcttttgcttttggatgggaacatggcacattctggggggatggcccttgttttcaccgcaaaacaaacaaaatattctccttgggtgatctacaaaacttccgccaaaacccctggcgcctctttctcttggagctggtggacagaagaagctttgttgttgccccaaacccgtgacaaaggctgcaggctgtcctgctgactccccttaataatactttgagtagagtaatgatggacctgaactgccttggataaatacttctccaagcccctggcatcttaaaaaa

SEQ ID NO: 29651 - DNA, 122 bp, Zea mays
cttatgttgcctttatttggtataactatatatctctgacccccattgatcaatcttctttttatccaaattgcgtacttcttcttttctgctaccggctttcaatgacgactttgtttccg

SEQ ID NO: 29652 - DNA, 400 bp, Zea mays
tgctttctcgactatgttgtgacagggcctcatggacaggtgaaagtacgcgtaagcgacaaggccgaccgagccgagggattcccacgcctctgggatacggatacctcactcgtccctttcgcgaaaagcaactctcgctcacacaaacatccatgttaccgacagagtccagatgctcgaaacaagaggaaaaaagacgcagcttctcaagcgcggcgagggtgtgtttttctggcctcggcggccgcataaagcacacgctacaagatgatctgatcctgcaggctcgggtcttcacgctgaagggaggccgagcaccctcggcatcgacgacgtcttcagcagaatccgacgcagccttgggcggtgacgcggtccaaggactcctccgggaatc

SEQ ID NO: 29653 - DNA, 342 bp, Zea mays
  unsure (1)..(342): unsure at all n locations
tgagacattatngctnaggttatcatatatatgcaccannaaaccacataaagccttcaatgtccataccatctatgtaatggaccacactcgttcctttgaaacaatacaaagaacttaaccaattcagatcagattttaagataagagggacttaaaatctcatttccaatgatactcatcaagtatccttcttatgggaaaaacatgaccaatagaattgttcataacttttcatttcatcccaacaatgggatgaccaattcagtcttacccagcatggtaagtatcatcacatgaaaagttataacatatgcaacactttggatgggaggatgtatg

SEQ ID NO: 29654 - DNA, 385 bp, Zea mays
  unsure (1)..(385): unsure at all n locations
tttaacactcttttttggaattgtgcttgaagacttaattgtctccaagacgtctagtacatttaccattcttttcctttttggggtcactgatggccccttttggttttttgctgtttcaatatttactgcaagactcaaaacttctaatgttttttccttagtcggctttttcgcttcttccattttttctgtggatggtgcttcggccatctccgcagtttctggcagcaaggttggctgttcagcttcggtggccgaaaaagcttctccggtgaactcaggcaccgaagctggttcaatataacgtggccggcgtgtgaggaactttatcctctttctctntgattctggctcgctaagagcaggtgcagcttcttctttt

SEQ ID NO: 29655 - DNA, 392 bp, Zea mays
  unsure (1)..(392): unsure at all n locations
tgccaaanactgggtgctttctgcaacacagttaaatgtcatattatcaacagaactgagtcagaaaaccatggagttcacaaatgaaatgaacaagacattatagaggtttgcccagttaacagtttatggcacaagcccgcaacattcctaacatagtaaaaagccaaaaggcaaaaccaaaactgtctcactccatccacatatgcatgtcaaacaggtttgctcctactctcaccttctattttcacaaccaaaaaaagacatgcataccataggaaacaaatttccacagtgcaaaattccacacatagacagcacaaaattaatgcaacatgtcaaacctaataaactggcaaatggtactgtaagaacttgatcgatttcacata

SEQ ID NO: 29656 - DNA, 378 bp, Zea mays
tgcaagcttttatgatttgtatatatttgacagatattacccatcagataatgacgccatattttcagggcatgacccacaacatctaattccaggtcatgagttggataatgctcctcatgccgcacaactgccttgaagcataagctattactccgcctttttgcattaaaacaaagcctaaaccactgcctgatgcgtcacaatacacattaaaaggcttttcaatgtccggttgagctaataccggagcagtggtcaataatactttcagctgttcaaaggcttcattacattttgaagaccaattaaatttagtgtcatttttcaataaacttgtgattggtttcacaagcttggaaaaatccggaatgaatc

SEQ ID NO: 29657 - DNA, 433 bp, Zea mays
  unsure (1)..(433): unsure at all n locations
tcggttgtaaggacgcattttcgtcattntttaagaaaagatgtctcaagacaaaaaagttgctgctgagacgaagctgagcgaagaggagaagctccttgaggaaaagactgctggatttgttgattcaatagcaaaaaccaatacagagaagattactaaagagatactagaaggcttgtctgaagatactgatgatagcgacggttatgatgtggagagtggaggcgaagactctgaagatcgaccctggcgaccaagtcatgcagtcttcaggaaatcaactatcaaacagagtcatcttgataatatgagaggaatgtattttcgagatatgtctattgtgagcgttgacatagatagagcggttcctgctcccaaagaaaacgaagttgtgatctttccgaagcttcttcaaagctggactttggtt

SEQ ID NO: 29658 - DNA, 386 bp, Zea mays
agcttcagctctgtctatattgtggactttctttgaatcagcccaactcccttcggcccttctggcagcttcttgacttccatgaatggcaatgggcccttgttcctaaggtatcttcatgcaataagatgctggatgaagtatttcttctaaggcattaagtgttcctcgaccaatgattgcattggacgggtattccatatcaacaaggtcaaaaacaacttgctcagttcttgtgttgtgaacataaccgaaggtaactgacattgtgattttgtcaagtgccataatatgtcgttctccgaaaccacaaagaaggtgtgtagcaccatgaatcttgtactctggatctcgcatctgcatgaacgcctttgcaaatataatgt

SEQ ID NO: 29659 - DNA, 405 bp, Zea mays
  unsure (1)..(405): unsure at all n locations
tgccagtactcgncaaagctacaacatctattatcacatcaactgcagacaataccagtgacttgacccttcgcatgctggggactggatatgattggacctttcaagaaagctcaaggaggatacactcatgtactggtagcaatcgacaaattcactaaatggatagagttcaaacccattgcttctttaacctcaactaaggccgtggaattcatacaagacataatattcagattcgggataccaaacagcatcatatctgacctacgatccaacttcacaagttcagaattcttcgatttctgcgagcaaaaaagcattcagatcaagtatgcttctgtagcacacccaagagccaacgggcaggttgaacgagctaacgggatgatattggaggcactc

SEQ ID NO: 29660 - DNA, 363 bp, Zea mays
  unsure (1)..(363): unsure at all n locations
agcttcgtcagcaaacaccttctttgtttaaacaatgaagaagctgaagagaagattttaccttgcaattagaatagaataaactaccgacgatatgctgtcgtcgatagcggctaatgtcggcctcaagcttcgggaagccaatactcttcgacagagtattgataacctttgctcctgttcggtctcggaggcaacctaagctttcatcatcaatgctgccaaagagcatcgcccctggctgatacccgctggatatggcatagtctctcaattcttctttctcagcctttgacaattcttgtccaatcaagttntgaaagttgaaattttcttcttctgaagtaccttcgaccatctcct

SEQ ID NO: 29661 - DNA, 423 bp, Zea mays
  unsure (1)..(423): unsure at all n locations
ttngaacgtactaagcacatgccgggaaaaatggtaaccggtaaacctagtacctgattgaagccgggcgcggactttatccctcatgcgatctgagactgggtctcccatgctagctatggtgggtacaagtgcggtcactgcacgacggcagccggggtcagtggagcattgtatgccaagacggtgaggcctggacgcgaacggggaatcgatggggacgattgtcatgtgtgggatcggagtaccctgacatgccgtgtgtttaggtttaccttgcaaggttaaaactcgattcgaatcgtctgcttctcgcagctaatgagactgcttgattccttgtactgcatcgagtaagaagtgaaatgtggttacatgagataacttngtgattgaactaatngattggtaccatgtatgctt

SEQ ID NO: 29662 - DNA, 415 bp, Zea mays
agcttaatccacaaaaacttgttaagtgttagcacaagtatggccaagtggctagagaggagtccaaacacaataaccacaagaaatcaatcacagagatgacacggtggttatcccgtggttcggccaagtacaaaaacttgcctactccacgttgtggcgtcccaacggatgagagttgcactcaactcctctcaagtgatccaatgatcaacttgaataccacggtgttcttgcttttcttttctcaatcccgtttgcgaggaatatccacaacttggagcctctcgcccttacaaaagatgttcacagagaatcacggagcacgggagggattagcatctcacacacgacacatagatcacagcgaatacgcacacacaagacccagacttgagctcaagagatagcacac

SEQ ID NO: 29663 - DNA, 304 bp, Zea mays
tgtcgtactccccccagctcgtcggttgctctgataactctcaccgtcgtcgtgctgtcgctgttgcgcaccaagtgccttagcactggacttcatcgcggtgactcactggattgcatgtccggcgatcaccggagtaagcgccacggtgaaagccacccaccccttgctccagtattcttgtttccctccggccgccgcgcgtcatcgcctaaattcgcggccaccgctcgagggctctataaattgacctcgcccgtagctccgtcagatagtcaagcaactcctacatcaatccgtgccc

SEQ ID NO: 29664 - DNA, 415 bp, Zea mays
  unsure (1)..(415): unsure at all n locations
agcttattgtctttctccggttactccattntcctttcaatgagactactgcatataatagacttgaaaacatgtattagtctcaaggacttaaattatagagtaacattcccctgaaagtgtgcatacaagttttgaatacttgtaggagacatgcactttgattttatatcaagaggggcaaattatctataatccgagctttggcacatataagttaaatgataccaattgaagcataattgaagtgttggggacttgttctcaattgctatgaattaagaacaaggcaacacaacaaatgggttaaaggttaatacccttcgtccttcaaaacattatttccctgangatataangacgaaggtcatgaangacataccttcatgatcataatatacttagatgaaagatg

SEQ ID NO: 29665 - DNA, 417 bp, Zea mays
  unsure (1)..(417): unsure at all n locations
tcgtcgncttttgttctttcttcgtcctgagcccctggcgttcaatcagcaataaagtctgctaatgcctgagattggattgaagacctatgaacataatctatggtgaattcatttagccctgcagcccatttcccaactcttctcgtggcttctctgttccttattatatccttgagaggctgagaagaaggcattatgatatggtatgactggaaataatgtcgaagctttctggaggccatcaatacagcatatagtaccttctccaactctgtgtaatttttctttgatggactaagtacttcaaagacgaagtacactggcacttgcttcttcgcttggccatcttgcttttcttgcaccaacgttgcactgactgcatcgtgagaagcagctacatacaacagcaatggg

SEQ ID NO: 29666 - DNA, 410 bp, Zea mays
  unsure (1)..(410): unsure at all n locations
agcttgtgaagattcttcatcccaacatgtgctagtcggcgatgccagagccagcccatgttagtcttagcaattaagcaagtgtcgagttcagctctattgaaatcaactaagtatagctgaccctctaacactcccttaaaagctactgaatcatcacttcttctaaggacagtgacacctacatccgtaaaaagacaattgtagcctattttacataattgagaaacagaaagcaaattgtagtctaaagaatctacaagaaaaacattggaaatagagtggtcaggagatatagcaattttaccaagtcctttgaccaaaccttgatttccatccncgaatgtgatagctcgttggggatcttgattttttcatatgagggagaacatcctttctcccgagtcatg

SEQ ID NO: 29667 - DNA, 315 bp, Zea mays
  unsure (1)..(315): unsure at all n locations
ngacccttgcactgaaacgaagcaccactccggactctgcttcgtcacaagaagagcttcggaaaaaaggtcattaatttcaaaaaactttaggaattcataatcaaatggctagattgcgctccactgccaggattgagcgtgagggagccaaagccactgaaactgttctgatttccgaagtgatgaggcgttctgggctggtttcatcagaggacacacctgctgccgaagcaacacaagctgacgttgaagaaattggttctgaagatgagtacaacttcaggatgccaagtaaacctagtcatctggact

SEQ ID NO: 29668 - DNA, 417 bp, Zea mays
  unsure (1)..(417): unsure at all n locations
agcnttagcttcttcgctgattcattctatgattccttngggaccgcctctaataaatgtttgctccgatgagtatgcacccacctttgtaaaactatctttcaatttcttagcacaatccaaggatttcccataatatatctccttcgattcatgaagctcatccacattcttttgaaatcttgaactagtccattcgcttatttcttgtttcgctttcgccacttcaaaatccttattcttttcggcaagcttttcctttaagtttttaatttcggctgtatgagcttcagactgtgtagcaagtttggcttcgctaacctttactttctctaccaaggaaagcagaatattatccttttctagggcttcattcctcagtctgataacctctgaccgaacgttccaagggctatt

SEQ ID NO: 29669 - DNA, 364 bp, Zea mays
tcgtcatctgataggaatttgccctgaaggtaagaaattatttcatttctccaatcttcactgtacacaggagaaatagtaagaactgctctttcaagtaactccactgaaggtgcctttattgtttcgaagaatacatccgaaggtagcggcagcccctgtgctgcagacctggctaacaaatcagcatgttcattttgccctcgagggatattcttaacagaaaatccttcgaaggaagcttcgatccttcggactgtgtctaggtatttttcaagcttcgggtctttagccttgcaacttttgtcaatatgacccgaaacaatctgagaatcagttttaaggatcgccctcctgatcccca

SEQ ID NO: 29670 - DNA, 353 bp, Zea mays
agcttatcttatcttctttccaaccgatctgaccttatctcaaaaatcggtctgagcgctccgcaatcatcgtagaaatttctggacttcctatattaacaagatttgttaaatctgatttaaaggggttggtagcaatatctttattggttgggttgtcatagagaaaaaaagggtttaagcccctgcacaaaaaaactgaagaagaagaaaaaaaaagaatcgaaaagaaaaaaaaatgaaaagaagaagaaaggggctgaatctctaaatctgttgtttctctttgtgctgtgctagttgttcttttcaaagactacctttgtgcctaggctcacctctctagcctggtt

SEQ ID NO: 29671 - DNA, 442 bp, Zea mays
gctttggagaaacgttcaatcgtttgagtgtagcttcgtctcatataaactgaaatggctagaatgaggtctactgctagagtagcgcgcgaaggggaggatgctacagcttctgagacaattcccatctcagaaatgatgaaacgttctggattagtttttcaagaggaaaaagagtcagttccaactgaagatattgctggtgctaaagctgaaccaactaaagcagaagctgatagtgataacaaagatgaggatggcattttaagttcgagcaatcccagttatattgagttcaggaaatccatggttaaagcagaagatctggttttaatgaagaaattaggatattttggagagaataatgacgaactatttcggtttgctatgaaagaggtgattccagaaccaaaagatgacaaagtcgtagttttcaaaagct

SEQ ID NO: 29672 - DNA, 415 bp, Zea mays
  unsure (1)..(415): unsure at all n locations
agcttatcttaagggtgaagattatttttttgtgtgctaaaacctcgacctgagaggaaagcttatcttaagggtgaagattattttttttgtgtgctaaaagactcaaaggggtttccttgagttcctttgatcttaaagaaaaatatgttagtttgttgataatacttatcatatgcttcttgttgtattatatggggataatgcaaaattagtgcctccgttgatatgaatcgattggtatctactgtgtttatcctgtgatagatattcatgtggttctggcgctttaaaatcggtatcttaatggtgaatagtggtagggtgatattcctatggtatatttatttaattggggttaactctgattctgtgcatntgtgtgttatacgcatcacagtttgattcttcacac

SEQ ID NO: 29673 - DNA, 421 bp, Zea mays
tgcgacagaggttgcattgtgtccgctgcatgatcgacatatgatggccattagcgagtctagcactacgacgtaccgcggagagattgaatacatgtcgatgtttaatgttctgagctgttgttgcagcagccgtggccacagcaggtgtttctgcaggcatcaattgaggcagcacaggtgaatcaagtattgcagcaatcggccttacaaagagattgctgaggagagcgccctgcgaggtggttggtgccccaccctatagaacagcagctggttcgaagggagcaccatctctagaacctgctttagtaacagaactaggagaagacaacaacttgatgtttcccccagcctgcaacacaagcaacccaacctgcctaggtaatcatgatgacagggaagcatggagcctattaaa

SEQ ID NO: 29674 - DNA, 292 bp, Zea mays
catttgagaaagacaggatttgtttcgcatgtcacacacggaaacaagttggtgttcatcatccacaccagaacattatgacgactgacaggccactctagctcctacacatggatctattcggcccgattgcttacataaaaatcggcgggagtaaggactgtctaactattgtggatgattattctcgcttcacttgggtgttctttttgccggaaaaatttcatacccaacagaccatatagggattcttgagacgggctcaaaatgagttctgcttaatgatcaaaaa

SEQ ID NO: 29675 - DNA, 428 bp, Zea mays
gcttcagaagcagcgcaacatgccgcctcatcgagttctccatgcttctgatgcttctaacgcgcagtaaaatacacagagtaggaagaaagaagcaggaacaaataatagaacatctaagcattaccacacagagaataggcgcgtgcagagtttcaccagcgagcataaaatttggagtgattgattctttgccgctgaatttcaatcgccgtagatggtggatgtgaggattttttgtgctgtttggtacacgaactataacgtaaatgacaacgacgatgattcacactcgacagcggtagcaagtttgaatataccggtatctgttttcagacctaaacagacatgatttagcgttatcttttatctggatccatcacgttgcaatcatatgaaccagacatcaccttaatgtaaactgatct

SEQ ID NO: 29676 - DNA, 415 bp, Zea mays
agctaactctctattttttcttttacaaaatagggaagcgagacgacagacatctgacttgttttaatgaccatacgctttgcttttcagaggacttgtggcgagatcttgagaacaatccatcaaactggtgggacaaccgatcagacaaggttcgtataaaaggaaaaactgcacctcaactagcctcatgttcctagtatttgtgctaaacattgcagatgtcttgtttggcgtgcagccgacacttaagcatcctgatttcaagaacaaggattcacggcaagctctatggatatgaaccaaatcaccttcatgggctgtatatgcactgccgaccttgaactttaagggaggtagcaagggtaccatgaaagaaaccctgctgtcatgaacgatatgataagagcttggc

SEQ ID NO: 29677 - DNA, 375 bp, Zea mays
agctttcttgtctcgttgtttgtttctagcttcaaaattcaacattatgttctttattacagctagcctctcaccaccaccgaagccatacaaccctgaagctgacccagttataaaaaggccttagatgtaatgaagattactaacgaagttgttgacgaagtcgtagccgctaaaaatactgaaagaagattaaattcttgcatactaggaaatgtaatccttgtgtatggttgtcgtcatgtgtacgagtcaaacatcgaatatttgtatgtatactaatgtaatatatttctttgtgatgcatgaaatttgtgtacataccattttttagccttcggtgaaaaaacaccttcccttcttttcatgcttcgc

SEQ ID NO: 29678 - DNA, 411 bp, Zea mays
  unsure (1)..(411): unsure at all n locations
tcccttntacctttaaacatgatatacccttcatcggtgagactttcaggtagacataatcttcaacttgaaagtataagggtttgcgtcgcttgtctgcatagctcttttgacgagcttgagcttccttcaaattatgaattattcatcgaacctttccttctgcttcctttaccatatcaggcctgaagaaacatctttcacctgattcagaccagtttaacggagtacgacatcgtcgcccatacaaagcttcaaagggtaccattttaatgctctcttgatagctattattgtacgagaactccgctaatggtaaacaatcatcccatttctatgggaattctagaacacatgctcngcacatatcttcaagtatctgatttactctcttagtctatccactagttt

SEQ ID NO: 29679 - DNA, 319 bp, Zea mays
atgccacaagcaggccatgcttatcttagctattaagcatgcatctagaccggcttcttcttttggcaaatcaactaaatatagtttggcgtctaatacacccttaagagctagggaaccatcacttcttttaaagacagacacatctacatttggaaatagacaggtataccccatgttgcataaatgactaaccgaaagcaaattatattctagagactctacttaaaacacattagagatagagtgctcattagataatgccattttaactaaaccttttaccttgccttgattcccataccgaatatgattgaat

SEQ ID NO: 29680 - DNA, 407 bp, Zea mays
  unsure (1)..(407): unsure at all n locations
tcgtcgtctgaaagaaaatttccctgaaggtattagatgatttcagntctccaatcttcactataaacaggggatatgttgaggattgctctttcaagaagctcgaccgaaggtgcttttattgtttcaaaaaatacttccgaaggtataggcagcccctgggctgctgacttagccaatagatcagcgtattcattttctccacgaggaatatttttgacagagaaaccctcgaaggaagcctcaatccttcggactgtatctagatacttttcaagcttcgggtctcttgctttgtaacttttgtcaatatgaccagaaataacttgagaatcagttttaagaatggcccttctgattcccattgcctttaattttcgaagacccaaaagcagagcctcatactc

SEQ ID NO: 29681 - DNA, 251 bp, Zea mays
gaccttaagcgactgggctgcagctgacacgttgcctttggctccaaaccgaagtgctcaatacactattcaaatctaccttaaaagcctcttacatcattggaagttatgtgggccagcatacgaaaaattaatgctccatttgcacgagcaatattaccaaatcatctttattggatatcctggcagagcttgcttatctactccatcatcttttggctgtggaacactattgtacatacattgggtct

SEQ ID NO: 29682 - DNA, 430 bp, Zea mays
  unsure (1)..(430): unsure at all n locations
ntggaatagaacagacaaggccaataattccttttatttgggaaaaatcatctgatttgtaatctttcgacaaagcaaatggagataactacttggcaagagcgaaagaaataccaatatccgcctgggactagtcttcaacaacagataatactgctctcatacgaaggagtcatcatgactagggagaatgcaacaggtctccataagatctttatatttttatcacaaattatcaccacttacaatctcgtggtcaagacttatggctcttctggtgccaaggaccaaggacatattaatgcctaatttagcttcaagctctgtgttgatgtgggatttcatggctatttttctactcttcttacttctcgaagatcatatatagttccaatgtagttctgctacatataccccaattntatttcca

SEQ ID NO: 29683 - DNA, 368 bp, Zea mays
  unsure (1)..(368): unsure at all n locations
ngatagcatgaataatattttcatcgcaaccctcatatatatatgcaaatcaccactgcatggtgggccccatgatatagaaggtttcactattctagtgaatggaaggngnttttttggaccttccgctaaaggccttcgttcgtttcacagtctgaatttgttaccaagaaacacactaatactgcgaggggctactgttgagggccttcgtctttcgaaggtcctcaaaacacggctaaccatttttcatcaccatgtttctaagtgttacaggagcttcgctactataaaaagctttggtttagatcaatggaagtgcgaccaagcaagcttcgttaccttgactcactacgacgacctaatga

SEQ ID NO: 29684 - DNA, 409 bp, Zea mays
agctttatctccattgatgttatggatagcttatgaggcagtccaattaccttcggcccttcttgcagcttcctgacttccatggatagcgatgggtccctgatccgaaggtatcttcatgcaaagataggcatgatgaaggattgcttcgaaggcattgagagtaccacgaccaataattgcattgtaagggtattccatgtcgacaatgtcaaacacaacttgctcagttctagtgttgttgatgaacccgaaggtcactgacatggtgatcttgcccaatgctacaatctgtcttcctccgaagccacagagaggatgtgtagcatcatgaatcctatcttctggctctcgcatttgtctgaaggccttacaaatatgatgtcagctgcactgcctgtggtaacca

SEQ ID NO: 29685 - DNA, 384 bp, Zea mays
  unsure (1)..(384): unsure at all n locations
aaaatactcgtctcattgaatattggaaggagatgacaccgtagacatcctgccttgcatgttcagccttttgtttttcactcttttcgtgttctcactgtgcttcttgtgaaatcatatttgattaccttttccgcaggttgtctgcaaggattttccaagacctccactagaaagcacaataaactatttggaagctggacaactctcttcattttttagaaacagagaacgccccagtaagccgttgcaggttgtggttgctggtgcangtctgacataattctcgctcttcatcttatcactagaatcacaaatagattacgaaaccttttctcttacaatataacacatatttgtacataaattactgtgatattatat

SEQ ID NO: 29686 - DNA, 408 bp, Zea mays
ggcttctgtccacaccacacctagctgctgttataacgagagattgcttctcctaaatcaccgaacgggtcacagccaccagctgtgcagacgagagaacgatcatgagatgagaagctaagagcaaatgcctagctcacactttattcagctcttcaagacttcttcagttcagaaagatttctttactggctagctagtaaacctgacgaggtaggaaaccatctccgagttcaccctctcggcctgctcctgctggagaaaatggtggccttcgatgacggtgacttcaagatctggaacggtggacttgaactccgcgctcttgatgtactccccagttccaaaggactgggcaccgatgtccttatcgccagctatgaacttcacaggcactgtaatcttcgc

SEQ ID NO: 29687 - DNA, 433 bp, Zea mays
tgcaagcttatcccatcgactgcaaattccagtttctgcaattcaaaagtaaatacttctcagcatataatattatgtagtccaacatacagtatttataccattattacctttctggcattatcattttgttcactgacaccactaacattcattattgcgtgatcatgcaaattaatctgtaattgacaacacattttgttaagctcaatcataacccaataactcaaacgtataaatcatgtatatgtataactgcaaatcagtaaaggtgttaaagatattacctcttctaatggacgtactggtatatgtatttgatcattggccacaccttgttcaagtataatagatacgtcttgaatttcctgaaaaattggatgaaagatcattatacatcatttacaaataaacatttacaacagaacgattc

SEQ ID NO: 29688 - DNA, 288 bp, Zea mays
cccctggtgtggcgcaccggactgtccggtgtgccatcggacatgtccggtgcaccacggggactcagactcgaactcgctaccttcgggaatttccagaggcgactcccctataattcaccggactgtccggtgtacacccgacagtgtccggtgcgcccagggaggtcggcctcaggaactcgccagctctcggaaaagccaacggctcatccactataattcaccggactgtcccgtgtgcaccggactgtccggtgcgtctccagagcaacggctatctccgcg

SEQ ID NO: 29689 - DNA, 375 bp, Zea mays
  unsure (1)..(375): unsure at all n locations
cagcttggtcactttattgctcactgtcctctccatgatagngatcacgatcacaggaacaagagggagaataacaataactattacaatgcaaagggcgacgcacatcttggccaagaatgggattcggattgcttctccttcgactcccacaatgaatgacttgccgccaccgccttcaacaagtcattcctcttccccaacaagcgtcacacattccttatggcaagggagaaaaaagtatgttcttcaaactcgacttatgcttcttcaagtgaggacgaatctattgatgaggatgaaataaattattcatgtttattttccggcctaaatagaaccaacgtagataaaactaatgaattgattgatgcc

SEQ ID NO: 29690 - DNA, 386 bp, Zea mays
  unsure (1)..(386): unsure at all n locations
tgngactaaactttngntctccaccacatgccacccccaaactgacggccaaactgaagtggtgaatcgtacattgttaatgctgctgcgaacaatggtaaagaagaacttgaaggattgggaggaatgtttgccacacgtaaagtttgcttataacagggcagtacattctacaactaatttatgccccttcgaaattgtatatgggttcaaacctattgctctgatagatttgttgctccttccattgcaggaaagaactaatatggaagcttccaagcgtgctgcatacataaaaagatacatgagaagaccaaggaagcaattgagctcaaagcagtgcgcaaggcgtcaagcatgaacaagcatatgaagaaagtgttatt

SEQ ID NO: 29691 - DNA, 259 bp, Zea mays
ggggaacacattttatgactaaccaatggtcaatttgagaaagacaggatttgtaacgcatgcccagccgggaagcaagttggcactcatcatccacacaaaaacatcatgactagggacaagccactgaagctcctacacatggacttattccgcccgattgcttacataagcatcggcgggaagtagtactgtctagatattgtggatgattattctcgcttcacttgggtggttcttttgcaggaaaaatctcata

SEQ ID NO: 29692 - DNA, 410 bp, Zea mays
tgaaatcgagcacacatgcaaacactgaacataacatcgagcctagatgctgtaatataaaggaaactagcaattattgagcgataaagcttttgatcaactatagtacctcactcatctaggtctagatgaccatttgttgccataggagtcttgataggctttgcattttctaagccaaacttcttgagcatgtccttcaaatattttgattgacttataaaaatcccatctttcaattgtttgatttgaagaccaagaaagaagctcaattctcctatcatagacatttcaaattcttttgacatcatttttccaaattcctcacaaaacaattcattagtagatccaaaaataatatcatcaacataaatttgacaaacaaataagtctttgccaattcttttagt

SEQ ID NO: 29693 - DNA, 185 bp, Zea mays
tcagcggctttaaccggaactgccccctaatgcctcgcgaggccgccggagagtttagcttggaaacgggacatcctctctcaggttaacatagctggctgttacacctacacatccgaggactctgagatctctggctggctctgtagcacatctccgtgggtgcatagaggacctagctctgt

SEQ ID NO: 29694 - DNA, 420 bp, Zea mays
  unsure (1)..(420): unsure at all n locations
tggtgccacgcctgatcacggtacctgcaccagagtgtgtgattagctccctctcgaggctctcggggtggatgatagccacactcgagcttctgggcaggtcgtccaaaagggtcttgatatcacggatcttgctgcgagtgccgtggatgacccanggcttcttcatgtacacgtcgtactcctcgtccaagttgatggcctggatgagctggccagtctctttgtcgtgaatgccacccttctcggaaaggtagacgatcttgagagggacaagcgcacgagcaagctcagcggcggccttgtcggcgttgacgttgagaacctggccctcagagctctccgccatacaggtgagaacgggaatgtagccgtcggcgatggcattcttgacagacttggtctgcacctcgttgacct

SEQ ID NO: 29695 - DNA, 292 bp, Zea mays
  unsure (1)..(292): unsure at all n locations
agcttattaagatatttcatccctacatgggctagncggcggtgccagagccaacccatgttagtcttagcaattaagcatgtgtcgagttcagctctatctaaatctactaaggatagctgaccctctaacacacccttaaatgctattgaggcatcacttcttctaaagacagtgacacctacatcaggaaaaagacaggtgtagcccatttgacataattgggaaacacaaagcaagttgttatctaatgaatcaacaagaacaacattctaaatagaatggtcaggag

SEQ ID NO: 29696 - DNA, 369 bp, Zea mays
  unsure (1)..(369): unsure at all n locations
tgcaccaatttatgttgatgacttcaccgaatatgattggataggtcttagagacccacttgatacattcattactgaaggaagagaagattcagtttcctatcatgttgtgatcctggtactcttgctatgaaaatggttaagacagatagacatgttgtatttccattggtttatcgnctaattgaattggctttgattttgcctattgcaactgcaactatagaaagagcattttgagccatgaaaatcatcttgacagatttgcgaaataagatgggtgatgaatggatgagtcattgtatgatttgttatatccagagggatatatttgcaagtattgaagatcgtcaaattatagagcattat

SEQ ID NO: 29697 - DNA, 402 bp, Zea mays
catggagaagatcttcagttgcatgaaccgaccatcttcttccttcttgatctccgaagtcttggtacgaacagagcaatctcccttaataaaatttgttcaccatgtatcagtctaccaactatctataggattcttgggctaaaaccgagtggattcaaagatatggcgcatcaaactcggcctcatcacactgggaccatttatgacctagggttcagattcagttttctaacccagttctgacaaagaaactttgagttgtgttttctccaaattttgcataacaactaaggggagatgtctgcatcaaaggtgctctcctataataggtctaccaaatctatgtggtgacctatggcgactcctcactaattagagagctacagatctccaaagttg

SEQ ID NO: 29698 - DNA, 376 bp, Zea mays
ggagcttggaaatgaaactacgtgttcactacaagcattaatgtcaaaatctttacgcctagtacaaatttcaacatgttctacacaagaattggatttatttgctacttctaatttagcatttaaatcattgttgacacctttcaaagtagaaatggtttcatgacaagtagatagttcaaaagaaagcatttcatttcttttaacttctaaagcataggatttttgtgcctcaacaaatttatcatgctcttcatacaacaaatcctcttgcttttctaaaagtatattcttttcattcaaggcatcaattaactcattaattttgtctatcttagatctatctaaccccttgaacaaacatgaataatctact

SEQ ID NO: 29699 - DNA, 352 bp, Zea mays
agcttctgaaaaccgacactcttttatagagtgccgattaccttcactccgatacgggcacaaacacatcccaaggcctcttcattgattccaccaaagagcatggctcctagctggtagccacaagaaatgccgtattcctgtagctccttctgagcctcagatagttcctgtccgatcaggttccgaagctcaaaaccttcttcagccgaagtagcttcagcaattttctttcctttgtcagacactggggccatgacctgtttcgcagctgcaactgtttcttctgtgcccatatccaataacaatttttcaatcccaaacaaggtagcctccaagttggtagctttgg

SEQ ID NO: 29700 - DNA, 404 bp, Zea mays
  unsure (1)..(404): unsure at all n locations
tatgaactctggaatgaagtcttttattctcatgttaatacttntattctttcttgcagggcttaatacttagcaacgccctaaaggcgcaaaagaatgttgaagacgagagctgcactatagctctcaacaaccttcgaactgaggttatcaggctgagaaacgaagccacggaaaaagacaaaattctactttcattggtggataaagtaaaagaagatgaagctagtttcaaggctcaagctaaaattcaaaagaatgagatcgaagatcttcggaaacagctggccgaagccaaagaaaaatgtggtctcgcagaggcgaatcgaaatattagtgaatattggaaaaactattagaaaaacaagtgaagacttcgcgcatcaaagaagatgctcaaaaat

SEQ ID NO: 29701 - DNA, 337 bp, Zea mays
ggatcttaagcacctgagctgcagcttttaccatgttttcttttatcataagaaggttgagcatgacactcttccttcaaaagagttaaactccttcttaaccttccaacttctttcttgagcactttattttcttgtgtgatagaaatatcactaattcctgaaatttctagctcaatggaagattggctttcttgagagcaacatttgttagcacatgataatatagtttctacttgagtacacgtgcatgtgtgaggttggtatgatttcaaattagttaacacaacctcctgagccgattctaacatgatatgtgaatccatcaatttattat

SEQ ID NO: 29702 - DNA, 365 bp, Zea mays
  unsure (1)..(365): unsure at all n locations
aatactcaagctnngggcacgcatctgaatatcagttcagcttatcatccgcagacagaagggcggaccaagaggaccaatcaaattcttgaagacatgttgagagcctgtgcattgcaagaccagtccggatgggataagagattgccttatgcagagttttcctataacaacagttaccaggccagtttgaagatgtcaccatttcacgcgctctatggaaggagttgtagaactccgttgcaatgggatcagcctggagaaaagcaggtgtttgggccagacattttgcttgaagccgaagagaacatcaagatggtccgagagaatctgaagatagcgcaatcgaggcagtgaagctatgc

SEQ ID NO: 29703 - DNA, 300 bp, Zea mays
agctttatagaaatctggcgtttattgtttggcgcaagctgcttctgaggctggtccctcagctcccgccgaaacatgccctctgggggctactcatgtgttcgtggagaaagaaagtgtacctaaaaaacttaagtcttctgctcctgaagcgtctaccaaagagttagaatttatcgtgcgacatgctttctgaaagcaactgtcagaagaacagattgccgaagatagacaatatgccagggatctgaagtattcacaaagatccttggtatacagtggcactaatgaagatgactt

SEQ ID NO: 29704 - DNA, 427 bp, Zea mays
tcaagtgatttgaagttccatgctgaattattttcaggttcaacttttccatttcttggcataatgtaatgtcagaagtcttcatcgtcaaacaatggcaggaagccttgcgacttaacgcatctgccactacattagccttgcctaggtgatagtaaatccccagttcataatccttaataagctgaagccatctcctctgcctcatattcagttctgactgggtaaaaatgtacttgaaacttttatgatctgtataaatatgacagatattccccagcagataatgatgccatatttttagggcatgaaccacagcagctaactccaggtcatgagttggataatgctcctcatgccggcgcaactgccttgaagcataagctatcactcggccttcttgcattagaacacagcctagaccact

SEQ ID NO: 29705 - DNA, 240 bp, Zea mays
gatattgtagcctcataactcattaggaattgcttatgaactaaatggccatcataccttggtaactaacgtggactatatgatggtggccatggcatggcttggatctcttgtactagtggagaaacatcatcctataagaaaacattatatgtatggccctcatgccaaaaggtcctctgaaaaaatggtgttctggctgctcaaattgttgcggtatattgggcatctgctctgaag

SEQ ID NO: 29706 - DNA, 407 bp, Zea mays
tggtgccgatggagaaacaaaaatccttgatatcttggctgtcgaactgcttgccgttgtcaactgttagctcggacggtactccgaagcggcaaacgatgttctgccagaagaatttttgggcagtctttgatgtgattgtggaaacagccctcgcttcaatccatttggtgaagtattcgacagctacgaaggcgaacttaaggttcccctgagcggtgggcaggggcccgacgatgtccaggccccagcgctggagaggccatgtatgggcaatcagctttgtatattgcgaggggttgcctgaccgaggggagaacttctggcaggcttcgcaggacctcgtgacccgatttgcggcgcagatcattgcgggccagtaaaacccttgtcggatcaccttggca

SEQ ID NO: 29707 - DNA, 383 bp, Zea mays
  unsure (1)..(383): unsure at all n locations
aaacaccacggtataattggaaatttatagagcagactaatagagccatccgctactattgaaaagaaaaacttcgagcttcatacaacagaacgcttattggcgaaagccgcagcctaaatagtagaattgagtacgaagcgtttctgaccatctgaacagtttgaaccagaaaagcaagaacttaatgcgaaacttgaagccaaagtgcaacaaaattcagattngaaaaaattattggcaagccttcaagacaaatgtttggagtttagcaataaatgtattcaacgactgagaaaaatcttccactcagtcggggctagcagtgggaaggtcaccccgccaactgtagatttaaccaaaacctttcaacatattgaggg

SEQ ID NO: 29708 - DNA, 356 bp, Zea mays
  unsure (1)..(356): unsure at all n locations
tcacacgacacaactacttcaccatcgcgaacaccatcataccatatatatatctaccaatattcttttcactgaaagtagtaattcaaattttagttcatatatcaacgattttttatcgtaaatatatacacatctttataagtgattaanatattntatcatcacacaggcctactaatattctactcggtccaccaattcagctaattgactggaatagcgaaataacttgctataactgattctggctcgataaacgcaagaaccttgaagtcgacgagagttccgtgactcgcaatttattgagcacctagtgagcatcgcgctgaacctctctttcttcttcatctaat

SEQ ID NO: 29709 - DNA, 60 bp, Zea mays
gggagactcgacttatcgaatactaccccccagagggatggctgaaccccaaaacaaccg

SEQ ID NO: 29710 - DNA, 269 bp, Zea mays
agcttatgaactgctgatcttcgactgggactgcatttctgccgacttcgtaaggcgcatcgtcgagatcatgaacgcagctttcgtgcgtgcctgtgccgcgcaaaactgttatgatgctatcaaaggcatcatccgcctggccctggacgaagcatccataccctgtacccgcacctggagcccgttcatgtcgaaaactttcatcaacactactcttatatctacaccgccctggatcagcatccttctgcgctgttcgaagggtg

SEQ ID NO: 29711 - DNA, 330 bp, Zea mays
  unsure (1)..(330): unsure at all n locations
gctttctcaacatttcttggtgcttattaaatatacttcaatatttataagtggctcaagtcataattttaaattattcttacccttttccttatattctggaattttgctcatatggctcacttaagggttttattaaggttgcacattcttaccctttttaaaagaactcaaatgttgatcatgatacttttgaagatatactttgtgaattcttattacttaagtaatttgatgctcatgcttaccttggttcacatgaaataatggntcttggttggcatttgagaaaaccctatggacactggggtgtcacagccttccccctta

SEQ ID NO: 29712 - DNA, 72 bp, Zea mays
cataccaactgactcttccctgagacacgaagacatacaagcagtatgttgttcgacccccgagactgacac

SEQ ID NO: 29713 - DNA, 463 bp, Zea mays
  unsure (1)..(463): unsure at all n locations
gcttgagttactttattacagaccagaactaatagtgagtgcagagcaatattatacaaaccaagggaggcacaaactcctccccgatagcaaaagatcctaagtggaggaccgagtcctcccgcacttcagtctttgttttcctcgttaggtaccaccttggagcanaaacaacaaaaatatgtcgcttcctcacctaaaaacaacaaagggataaaccctgagtatggaatactcagcaagtcttacccgactaaggaaaagaactctcagggtatgctggataaatangagtcaaggagaggctntagcanaaatcaacttatacttttgcagaagtagcttactaaagtgagttcttactttcaatcntttacgccatattaagattaatagacttattgcattaagttatctaacatctcataatacacattattttatcctagtgtcacatctgact

SEQ ID NO: 29714 - DNA, 467 bp, Zea mays
  unsure (1)..(467): unsure at all n locations
agctngaagctggactctgcactatgacttaggacgatcttgcggatagccttgcatataatagtctgaaggtgtgagaattgtatatttggaaatttattaattntgaaccattcttttattcttatactaattctttntcatatagggtttaatactgagcaacgctntgagagcgcaaaagaatgccgaagacgagagctacaatattgctttcaacaacctacgaacagaggttattaagctgaggaacgaagctntggaaaagataaaattctgcttacattggtggataaaataaaggaagacgaagctacctctaaggcttcaagctgaagcccaaaacgcgaaattgaagatcttcggaaacagctagccaaagctaaagaagaacgcatacttgaagagacaaaacgagaacttagtgatcaatgggcaaatcatttggaaaataagtgtaaagagct

SEQ ID NO: 29715 - DNA, 362 bp, Zea mays
  unsure (1)..(362): unsure at all n locations
agcttcagtcttagcgttagtctcggtcttagttagtnttagttagacagggtagtttgctatatcctgtgcatttatgtntgtcatgatgaactatgnttggtttggatctttgtaatgattgtcaccagagtgtgggtatcccctgcattttggtttacatactatgtcaataaagttagttatatagttgggaaaacctttattctactttcctctntatctgagaagctgtgtggtctgtgttggagatcagtgaagatgctcatctgttcagtgctgttggagaattctatactcttttcttattgctgcagctttgccagatcagttctgatgtgtggttgcgttctgcagatgtc

SEQ ID NO: 29716 - DNA, 273 bp, Zea mays
  unsure (1)..(273): unsure at all n locations
agcttcgtcagttccagtcctagaggacttatcagcttgataggtagagattcagtcattacctttaaaatttctgccactacggcagcaggaggtgtcgaaggagtttcctcttctacctcagacaccttcagctctggagttgcagcttttcttttcttcaaagctgccaccttcagctcaagactggattntctcttctnntaaattttctcatcttccttcaccattctggcagctngtctgttcaagacgctaacaattcttttccct

SEQ ID NO: 29717 - DNA, 312 bp, Zea mays
  unsure (1)..(312): unsure at all n locations
agcttctaaagggagagcacattntgngactataccaatgttcatttgagaaagacagggtatgtagtgcatgtcaagcaagaaagcaagttggtgttcatcatccacacaagaacatcatgacgactgactgaccactcgagctactccacatagacctattcggcccaatcgcttatataagcattgacgggagtaagtactgtctaattattggagatgattattctcgcttcacttgngtgttctttttgcaggaaaaaatctcaaccccagagactttataggattcttgagaccggcttcaaatga

SEQ ID NO: 29718 - DNA, 352 bp, Zea mays
  unsure (1)..(352): unsure at all n locations
agcttgtgaaggttcttcatcctcacatgtgctaagcggcgatgccacagccagcccatgctagtcttagcaattaagcatgcatctagatcgaccacttctttttcaaaatcaactaagtaaagcttgtcgtctaatacacccttaaaggctagtgaaccatcacttcttctaaagacagacacatctacatttgtaaaaagacaattatatcccatattgcatagttgactaacagatagcaaattgtaaccaagagactcaactaaaaacacattggagatagagtgctcattagaaatngcaattntacctaacccttttacctcgcctcgatcccatcaccgatata

SEQ ID NO: 29719 - DNA, 148 bp, Zea mays
gaggtttcactcgtaggcttctgcattaatgctttcaatatagagatacggggcttttcaatctaaactatacagtttatgtaatgacaactattgtaaaccagaaccattcagtagcgcaattcagacttgtaataagacctaagaa

SEQ ID NO: 29720 - DNA, 210 bp, Zea mays
  unsure (1)..(210): unsure at all n locations
agctntagctgattcagagttccttgttgtatcattcccaggtttatcttctccatctctggacataaagtgttgtcagaggtcttcaccgtaagacagtgacacgaaaccttacggctcagtgcatctgccacaacattggctttgcttgggtgataatgaatttccaattcatagtccttaataagctcaagccatcgcctttgtctc

SEQ ID NO: 29721 - DNA, 481 bp, Zea mays
  unsure (1)..(481): unsure at all n locations
ctcgtcccggatcttaagtcaccgcggctgcagctttctgcaaactgatctttgaatttggttagccttaccttgattcccaacaactagcatatccttgagagtctttttctttagtccggtcagtcttgctgagtatttccatactcagggtttatcccattgttgttgcaggagaaactatcaacacgtatgagttttgttaaactcataatggtgacttttacttgtgtacattatgtgggtgctgcgggaagatggtttcttcccagttgatgtaataagttagcactttaactctacctcgggcatgtaataataaatactttgtggtttgtaaacttattagctttgtaatgtatattatcttattgtaaagacttctgctcaactcctgtnttttttaaactctatgttctggattggttatngtaatattngcaactntgcgtgaatggtccttggaaaggaacgagttcat

SEQ ID NO: 29722 - DNA, 415 bp, Zea mays
  unsure (1)..(415): unsure at all n locations
agctgtgaaggttcttcatccccacatgtgctaagttgcgatgccacagccagcccatgctagtcttagctattaagcatgcatctagaccggcctcttcttttgcaaaatcaactaaataaaagttgccgtctaatacacccttaaaagctagtgaaccatcacttcttctaaagacagacacatctacatttgtaaatagacagttataccccatattgcataattgactaacagatagcagattatatccaagagactctactaaaaacacattagatatggagtgctcattaaaaantgcaattntacctaaaccttntaccttgccttgattcccatcaccgaatacaattgaatcttgagaatcttattcttgacgtaggggtgaacatcttcttctcccccgtcatat

SEQ ID NO: 29723 - DNA, 205 bp, Zea mays
  unsure (1)..(205): unsure at all n locations
agctnntaagggaattctagaaatggggagataagaataagattaaggatatgaatacatagataatatatgttaataaatatctccaggattagtacctctaatttcacaaatataaattgtaatgatgggccacaaaaggttgaattataattgaattcaatttgaatttgaatcaagaaaggaaataaagaaaatatgaaaa

SEQ ID NO: 29724 - DNA, 308 bp, Zea mays
  unsure (1)..(308): unsure at all n locations
agcttgtgaaggttcttcatccccacatgtgctaagcggcgatgccacagccagcccatgctagtcttagcgattaagcatgcatctagactggcctcctcttttgcaaaatcaactaaataaagtttgtcgtctagtacacccttaaatgctagtgaaccatcacttcttctaaagacagacacatctacatttgtaaatagacaattatatcccatattacataattgactgacagatagtannatatatccaagagactcaactaanaacacattagagatagagtgctcattggatattgaatc

SEQ ID NO: 29725 - DNA, 392 bp, Zea mays
  unsure (1)..(392): unsure at all n locations
atgggcacgccgagcgcgctcaccactctcacgtataggtactccacctgctccaccaggtcgtatgtcgcgctcgccttgtcggcgacaacgccgctgccgatgcggtgccgcgtctccttcaacgagaagttcgcaaggccggagaacatgggcgggacggtgtaagggtccgcgtgcatcgccaccggcttcataaccatcgggaccggcgggtgcggcatgacatccatgggcggcttctgcggcggctgcacngtcgacataagatggcgctggtgcttcttctgcagcggcggtgggtgtgggtgctaatgctgctgctttttgggccacttacagtttgtgccgtcacaccttcggccaaccaccatcgctttgctgcttctcct

SEQ ID NO: 29726 - DNA, 363 bp, Zea mays
agcttgtgaagccaatcacaagtttattgaagaatgacattaagttcaattggtcttctaagtgtaatgaagcctttgagcaattgaagacattattaaccactgctccggtattagctcaaccggacatcactaagccttttgatgtatattgtgatgcgtcaggcagtggactcggctatgtattaatgcaagagggctgagtaattgcatatgcttcaaggcagttgcgccgacatgaggaacattacccaactcatgatctggagctagctgctggggttcatgcccttgaaattaggcgtcactatctgctgggagatatctgtcacatatatacagatcactaaagtttgaagtaca

SEQ ID NO: 29727 - DNA, 321 bp, Zea mays
cagtgggatgagcgcatacaacaagaatgtgtgaccacttcaagacccctggagctgctgatatggacctctttgacccgtcgctatctaagatacggggaagtagtcagtctagttattgtgatgacttttccgcttacttggtgttcttttgcggatagtctgaacccaaggacctcagcgctcctcagagggctcaaagagttgactcaagtgaaaaataagacgacacgggccaattcagaaccttcagggggagttctgaaaaaatgatcagccagtttcgtcctaccaccacaaatggggttagagaaaagacct

SEQ ID NO: 29728 - DNA, 234 bp, Zea mays
taaaagtatgtaatggacaaatacggggttgacttttaaaaaacccgagtgaaaaaatcgagtcccttttacagacgctggcgtagacccctgtcgcgtttaaggagcccaacgtttgaagtggggaggcattaaagatgccacgatgacctggatggttataaccattccatagtaagctgctctgtattaaaaatgcggtattccatccccccccccccccccccccccccc

SEQ ID NO: 29729 - DNA, 416 bp, Zea mays
  unsure (1)..(416): unsure at all n locations
agctcgtgtagatattttccaaagcttctctttcgaagatcaatagcgtatctccttgtgacttagcatgattnttcccttttttcaaaacattcttctgaagatcgatattgtgtccggctcttgtgccatatgcagcatgatgtatgatgcttatgctatgtgaaatgatgcgatgatgttatgttatgcaaggtgggtgtttatccgaagatacacacacatccctgcgataaaacacataatccttttgaatcagcgttgactntttggctataagcctccttaggagcttcttcgccttttacttcagcggaatcagncgttatttttcgctgtaagcctcccttatgagcttcttcgccttttactttcagcggtattcgcgttgactattcgcgcttcgccttttactt

SEQ ID NO: 29730 - DNA, 84 bp, Zea mays
actactttagtgagtaaaggttcgaataatttttatttacctaccaaaccacgggcactgacctactcgtatctatacccctga

SEQ ID NO: 29731 - DNA, 385 bp, Zea mays
  unsure (1)..(385): unsure at all n locations
agctngtgctccccatcactggtgctcattcttctaaccaagcaataagatatanaagaaagaggcccaaagatgggtgcaacatgtatgtgtctaatgacgctatattatgaccaattgggtcccatattcccatcaccttttctcaagacgatctttgtctcaaggattatcctcatagagatgccatggtgaagtgtctcaatcctctaggactcatatgtgatacaaatacttatcccaggaggctagtatacacatttatacatcaaatgattctagatttgcttaaacgagacaaacctatanaggtggcaatcaactttaagaagtatgtcacaactcgggacatgtcatcagagtggggctaaaaaagcctaatata

SEQ ID NO: 29732 - DNA, 307 bp, Zea mays
agcttatggctgcagggtgcattttatattattctctcctgaatgagtagccaaccctgtgcttgtgatatagaaaggtgggaaatggacgatgtgtgtaaactacactggtctaaacaaagcatgtccgataggtccctaccctttgccttgcatcgatcaatatgtggactccattgctgggtgcgaaaccctgtcattcctctgcgcctactcaggggatcaccaaatcatgaagagagagtccgacagctcgcgaactttttttcacacctttggcatgactgctaacttctatgcatttggc

SEQ ID NO: 29733 - DNA, 294 bp, Zea mays
  unsure (1)..(294): unsure at all n locations
ggagaacacgagatagggttgactaacgcgcaattctatttagatataccttgcgcagcttggtcagcaggtaaacaagtgagatgagcgcatcacatcaagaatgtgatgaccacttcaagacccctggagctgctgcatatggacctctttggacccggcgcctatctgagcatangagggagtaagtatgggctagttatttgtgatgacgtttcccgcttcacttgggtgttctttgtgcaggataagtctgaaacccaagggaccctcaagcgctctctcacgagagct

SEQ ID NO: 29734 - DNA, 387 bp, Zea mays
  unsure (1)..(387): unsure at all n locations
agcttcttgaccacaatcttcgttcaccattttgttgcggctaccaccgtcaatgatggtatgtacacgacagtccttgacgatgaggaacatgttgaagaggttgtggcgctgtctgttgtcgtcgtcactagccgtggcactcaaagctcgttgcacaatcaaggccttataggtctcggtcgctgttgtaccaagaacctcttcatcaccatcataagtctctgcaatgttagctccaacagtatcttcatcttccacatcagaagcactaacatacccaccatcaccagtagcaatgtatgcccatttgctggagcaatctcgttgaatatggccaagtccctggcagcggtggcacttgatgtcngaggagcggcctgtgga

SEQ ID NO: 29735 - DNA, 515 bp, Zea mays
  unsure (1)..(515): unsure at all n locations
cctatcaatactcagcttctaagggagaacacatnttaggactaacaaatgttctatttgatataaacaagcatttgagcgcatgccaagcacgaaagcaagtntgtgtccatcatctacacaagaacatcatgacgactgacaggccactggagcttctacacatggatctattcggcccgattgcttacataagcatcggcgggagtaagtactgtctagtaattgtggatgattattctcgcttcacttgggtgttctttttgcaggaaaaatctcatacccaagaaacattaaagggattattgagactggtctcaaatgagttctagctaaggatcaagaaaattagaagcgactactggacggagntcaagaactcacaaatcgaaggcttccttgaggaggagggcatcaagcatgagttctcttcttcctacaccccacaacacaatggtataatggagaggaagaatcgactctattgacattgcaagaaccatgcttgatgagta

SEQ ID NO: 29736 - DNA, 264 bp, Zea mays
  unsure (1)..(264): unsure at all n locations
agcttcttcaccatgtgatcacggttatcttgagaaggtngagcagtgcacttcccttttagttgtgtcaagctcatctntagcctctcattttcttctttgagctcttgacatgtgtcatcttttgatcctggaaatttagctcaaaggaaggtttgcttgtcgaccgacaacaagcattagcacatggtaaaatagtttcaaattgaaaacatgtgcataagtgaggttgtggggattttaagtttctatcataccctcatg

SEQ ID NO: 29737 - DNA, 336 bp, Zea mays
ccataaaactcagcttgaggaagctactccgcaagagtcttatatttcatgtactgaaatcgtggcattgcatcgcgaatgatctttggatagccgatagcaaacacctggctgaatgcggtctgcacgacctcttctctgtgaataaaataaagagagacttgcatctgttaatggacatttcatgtctgcagagagccactgtacatatcgtcagatggaacatacctgagatgcagagagaactacactcggaaaacaacacgctactatgtcctatctgtgatagcattgaactggcatgagatgcatagcttgacctgatgccggtccgtt

SEQ ID NO: 29738 - DNA, 426 bp, Zea mays
  unsure (1)..(426): unsure at all n locations
gcttctccgtacttgaaaagccggcttctgttccgacaggatccacaggtacactggggtgcaattgtgaatacagtacatgaaattcttcatgtagagtattgcaataagcctgtaggttatcaatggccgagctaagctcttcaactcgggctcgagcttttgcctccttagcccaggcaagcgaacgagagtgaaccgcccagtcgagcgctaaatctcgatccacaagctgatcttgcaggcggcggacgtcgcttctcaattcattgattctgtcgtcatccacgacccanatgtcaatcctgcgttggagttctgtttgaagctgatttacttttgcttcaagatcaacgatcagatcattactcccactactgctatcgtcgtacctgggggcaaagttgatgacgtggtaccccaatt

SEQ ID NO: 29739 - DNA, 496 bp, Zea mays
  unsure (1)..(496): unsure at all n locations
actcagctgtcagtaggtttactgccaagcattcaatattggtatattattattttctcactgttgataatatttgcctccatttagaaacctctggttagatataattgcccctcgctttctgcagaggtgaacaaaacgctgccctttctccacagattgcctcagtcgaagcaccacctattgtagggtcttattctgtacctgacatgttctgggctacaaaccatatggttcataagatgtcgtattcaaagggtgagactgcgaaggatggccaatacggatcacttacatcatgatggaactttgctcagagaccacactctaatagtccagtcatgagcagggttcaatggtccgatgcctattcaagtactaaaaccgatgtgatcacattctgcagcataataaacactgtatttactactcngtgtcaccataatcacctgttttctatgttataataagattatgctaactatgccactttgac

SEQ ID NO: 29740 - DNA, 446 bp, Zea mays
  unsure (1)..(446): unsure at all n locations
gcaagctggaggcgtctattggttggcgacttggngtatactcctccttcttctcctccgntgccttgaatgcnaacgggtgggcttcggatgaatcaccaagctcgttgattttcctcgagccttctatcatgcactcaaaacttacaaaatgcccgataacttcctcgggggttattttagtatatctaggattaccacgaatcaattggacttgagtgggattaagaaaaatgagagatcttaaaataacatttaccacttcgtggtcgtcccacttcttgctcccgaggttgcgcacttggttcaccaagggtntgagccggttgtacatgtgttgaggcttcctccctttgcgaagccggaaccgaccgagctcccnctcgatcgtttcccgctgggtgatcttggtgagctcgtcttcctcgtgtgcggttttgagcaca

SEQ ID NO: 29741 - DNA, 426 bp, Zea mays
  unsure (1)..(426): unsure at all n locations
atatgagagagcttgtattgcatgcttcgagaatagctagagaaatagaaggagaagataccnaagatattcatctttgcaaggtagcctaggcttctggttttggtctgaatgttgccagtataatgaagactgaagtgcataaaaatatagtatacacgcacattcttagcatttaaaatcttaagtattgtgattatgtctgcaagagagaggcttattcctgggtgatgacttggaccatgatgaaggataaaatattcacagtgcgtaagacaccgattacagcagtcaagccaccattactaatgcccagcagtcataccaagttgattgttaacggacagtcatattgtcccagggattgtgggatgtcataacatggtcataatatagactccatgagtcttcaagaatactttggca

SEQ ID NO: 29742 - DNA, 402 bp, Zea mays
agcttatgaagattcttcatcccaacatgggctagtcttgctgtgccagagccaacccatgttagtcttagcaattaagcaagtgtcgagttcagctctatcaaaatctactaagtatagctgacccttcaacactcccttaaatgctattgaatcatcacttcttctaaagacagtgacacctacatcagtgaaaagacagttgtaacccactttgcataattgagatacataaagcaaattgtaatctaatgaatctacaagaaaaacattggaaatagaatggtcaggagatatatgcattttacccaatcctttgaccaaaccttggtttccgtccccgaatgtgaatcgctcgtggggatctttggttttctcgtaagaagagaacatcttcttctc

SEQ ID NO: 29743 - DNA, 277 bp, Zea mays
  unsure (1)..(277): unsure at all n locations
actaagcttcatcttgaccatactcttgtatacccgtaacccgattccgaagacacctgttcacatatntcacttggaaaacattgtcaaatcatgttgttgaggaccttcagaagccgaatgcgcccaacactaaggatgctacaggtgcaaggaatcgaccaatggcttaccgtggagctcggtctacgtgcgctggtggtcgggtgaagtctggcgacctccatccggtttctccagtgaggtagaagtcaatccccgtctctgggagcttcac

SEQ ID NO: 29744 - DNA, 159 bp, Zea mays
accatgttgtttacatagcaggcagtcacttacaaattacagatgcgaccttacctcttaatgcttgacatacttttaagacggcccattaggaaaaagtgtaccttgctatgaatcgaacaatgtattagaataaaatacatgaatgatggagaattg

SEQ ID NO: 29745 - DNA, 428 bp, Zea mays
  unsure (1)..(428): unsure at all n locations
agcttttagccatctcccggcatacaaatatctctntgttgtccaggagacagtacaagaaatcatcttcgtctgtgccattaaacaccaaggccccctccgaatatttcagtttccgggcgtaatgtttggcttctaagatttcttcttcggataatcttttccctgaagcatgtcgaataatgtaattagtatcttcggacggagctntgggagcaggagctttagtttttctatcacgacttgcctcgctgtcatactggtattcggagtttgttgctcagccttatcctcaggcgcagcaggcttcgtctcaatgggcactgaaggcccagcttcggcttcggcctgngctttgacagctttggcaactttcttcgtaggaaaggggtcaaggcttttgtggtctccatgacagcgtctagcac

SEQ ID NO: 29746 - DNA, 456 bp, Zea mays
  unsure (1)..(456): unsure at all n locations
tcatctttttcttcgtcatcctacatgaggcaagggatcataagaatcaagtccaaaggaaaaggtaagcacgacatgtcatttcttactggttcaagatgacttcnggcttcgtctccagctttctctcgcccgccctttgtccattaccattttataaatctattggagatacttcnggcgaggtcgggcatatcatccaggattgatgaagataaggtgaagttgggcctgttgacaacctntccatgatcgcagcccgccttcagaaatgcagcagcggtaccccgagaagctacccatgcacagaagtcgccgtgccctgctataacttcgtcaagctcttcgattcagcttcatatgatcgaaggcctgggtaaatttcgccgaaggttaattccactgctggctcacaagaaaaatctttttatcgccatacaatattgcaaattcaag

SEQ ID NO: 29747 - DNA, 311 bp, Zea mays
  unsure (1)..(311): unsure at all n locations
agcttcttcagctgtntccttctccttctttgtactgtagccatggcttcttcagcggctgcgacaactntttctgtggccatgtccagaagtatcttatcaatattagaaagtgtgctttctaaatgtacatcttcggctgtggcagcttcngtagctgcagcttcagtaggtgcagcttcngtagctgcagcttcagtaggtgcagcttcngtagctgttgcgctctcaacagctggtgccttcgaagccgaagctggtggtggtgtcccttcaataacttctgtcactgtaacaatttcttcattttt

SEQ ID NO: 29748 - DNA, 273 bp, Zea mays
  unsure (1)..(273): unsure at all n locations
cagcaccacatcgtctgcatataaggaaatgcgtttgtctttatcgcgccttagaagaggttgcaacacacccagatcttgcgcctctagtatcagcgagttgaggacatccataacantgattaagagcatacgggacagggggtcctcctgcctaagacctcttctgtgatgaataatattcccaggctctccattaaccaagaccctagtagtggaagaactcatgacccttgagactattccacaccacagaggaccaaaacctcaatg

SEQ ID NO: 29749 - DNA, 257 bp, Zea mays
agcttctccctccctgcgcgtatctctgctattgcgctccctgtccgctcgtccaacagctgcccaagtccggcctctgcttggatctcgtctgtgccatggagctctcccctgccgcgcccagtccaagcttcttccctgccggcgttcagcacccggccggatctctgatggcgcgcgtgcccttctcttggcggcgctcactttctgcttctctctgtctctagctcgccgcaatgctttttccttgctcccat

SEQ ID NO: 29750 - DNA, 446 bp, Zea mays
agcttcacccacatgcgggacgctccgttctctggaccgcttgtcttccccagagttgtgattgcctccctggtgatcgagaccttgttgtctccctcctctactcgtgactttgtcagagaacctcccctggctcttttcttgcaccccgcgacttcaccaccctctccctctgtcggtgtttatgacccgactacacaccacgggcgtccccacatgatgcttttgagcaggacggcgtcgttgatggcgactcaatggtacgtgcggatgcacgtcggatcacacaagggtttatacagggttgggccacgggaatgcgtaacaccctacgtcctgtcgaggctgagtatttgagtattactggtgtacacgggttacagacgagctatgggcggtggagggtgaattctcttgtctatctagtggtagagtagttgctatga

SEQ ID NO: 29751 - DNA, 353 bp, Zea mays
  unsure (1)..(353): unsure at all n locations
ccacatgtgctaagcggcgatgccacagncagcccatgctagtcttagctattaagcatgcatctagaccggccttctcttttgcaaaccaactaaataaaagtgtgccgtctaatacacccttaaaagctagtgaaccatcactttttctaaagacagaaacatctacatttgtaaatagacagttataccccatgttgcataattgactaacagatagcaaattatatcccaaggactcaactaaaaacacattagaaattgagtgctcattngagattgcaatttacctaatccttttaccttgccttgattcccatcaccgaatataattgaatcttgggaatcattat

SEQ ID NO: 29752 - DNA, 314 bp, Zea mays
  unsure (1)..(314): unsure at all n locations
agcttctaaaagtataacacgtgataggtttaactaacgtgcaattcgaaaaagatagaccttgtgcagcttgtcaagcaggtaaacaagtgggaggagcgcatcacagcaagaatgtgatgaccacctcaagacccctggagctgctgcatatggacctcttcggacccgtcgcctatctgagcatangaggaagtaagtatggtctagttattgttgatgacttttcccgcttcacttgggtgttctttttgcaggataagtctgaaacccaagggaccctcnaagcgcttctcaggagagctcaaaatgag

SEQ ID NO: 29753 - DNA, 316 bp, Zea mays
  unsure (1)..(316): unsure at all n locations
agcttgtacccttaccttctttcaagccgtaggtacatttgtaacttgatatcatttctaattttctatgataataaaatagaaatgagttggtaatgatatataattattcatgtgattctctttacatttcatatgattctctttttattatcatacgctgcattgatgaaggtatgtccttcacaaccttcgtctgaagaccattatatcctaanggaaataatgcctcgaaggacgaaggtcattaacgtttaacatcttttgtgttgccttgttcttaactcatagcatttgagaacaagtccccaacatt

SEQ ID NO: 29754 - DNA, 181 bp, Zea mays
acagatatactttgtgtctgagagacagttaggaagtcatcttcgtctgtcccattgtacactatggctcccttcggatacttcactactcgggcgtagcgatgaactttagaaatctcttttttagataatttcttccacgaagcatgtcgcacagattaatgatggattatggaagatg

SEQ ID NO: 29755 - DNA, 430 bp, Zea mays
  unsure (1)..(430): unsure at all n locations
agctaatatgctatntagatcctatgagttaagttttacttgctttggacattgtttgattcctaaacccaataccctagctcttgtaggtaaaaatgtcaaccctactaaagactaacctagaanaaccatagtgcaccgtgaaggaaagttgtattcaagatacaacttgatgcatcttttctattattgcattttcataagcattacatgagcattcatgattatatatggttatgtatagagaacgaaaaagagataactggtgaagaggaagagactactccatcgacagaaaatccacctgccgggaactgtttctatnntgatatttgtggaacagaggccgactctcctacaacgcaaggcaagccccggtgcatttgccacctccttgatgttaaactctttatcacttgaatgatgcatt

SEQ ID NO: 29756 - DNA, 413 bp, Zea mays
  unsure (1)..(413): unsure at all n locations
tcataattagaatgtaaagcatcgtatcataattgtatctcattatgttcattgattaaagtagagcactagcattaaacctacaatattaacccagaatgtaatcaatgacaatgtgaatataaagctattcaatccttatgcttcaattatgtaacgcggggaaatgaattatcatgtgaataggacataagtaggtcatatgacacttgacttcaccaaacatatgctcatggtcttcaaccttgtataactcgaagagtttgatctcangatcaccacaacttgatacttcgattctctaacccctagaacggatcgctttcgcgatattctactgtcgcaaatggtcacacgaatggtcattgggagtacaaccacataatatcctaacaggtgggatcaaatgtggc

SEQ ID NO: 29757 - DNA, 360 bp, Zea mays
  unsure (1)..(360): unsure at all n locations
agcttgtgaagattcttcattccaacatgggctagtctatgatgccagagctaacccatattagtcttagcaattaagcaagtatcgagttcagctctattaaaatcaactaagtatagctgaccctctaatactcccttaaatgctactaaatcatcacttcttctaaagacagtaacacctatatccgtaaaaagacaattgtagcccattttgataattgagaaactganagcaagttgtaatctgaagaatctacaagaaaaacattggaaatagaatggtcaagtgatatagcaattttaccaaatcctttgaccaaaccttgatttccatccccgaatgtgatagctctttggg

SEQ ID NO: 29758 - DNA, 346 bp, Zea mays
  unsure (1)..(346): unsure at all n locations
acactgtgtacaccctttattacatgttaaacttctggagatagatagaaccttgactcatgggtttctcgagtttctaatttgggattctggacatagtgagaaccttgactcatggggcgctcgagtntctaatttgggatatggattttatcttctgaagataatgtagataatattctgacccaacatttatgaatgtggcgtgtatctatagtgtgccacgtaattgatatgagctttgtggatgttatcatactctcttcgtattatgctattagcggtgcattagagttcatggagaagcacatcgaaactcaatgtcaacttaaatgtcgtgctttat

SEQ ID NO: 29759 - DNA, 302 bp, Zea mays
  unsure (1)..(302): unsure at all n locations
tctatgttgatcatacctccggctttgaagatagtgagtaccctaaccatgtttataaactctctaacgcgctttatgggctctagcaagccccaagagcatggtatgaatgccttagggatctccttatcactaatgaattctaagtcataaaggccgatcctactctattcgtcaaaactctagataatgactcgtttgtatgccaaatttatgtcgatgaatatatatttgggtctactaacgagtctacatgtgaagaatttagtacgatcatgacacanaagttctagatgtctatg

SEQ ID NO: 29760 - DNA, 444 bp, Zea mays
  unsure (1)..(444): unsure at all n locations
agcttctaaagggagaacacattntaggactaacaaatgttcattttgagaaagacaggatttgtagcgcatgccaagccgggaaagcaagtggcactcatcatccacacaagaacatcatgactagtgacaggccactggagctcctacacatggacctattcggcccgatcgcttacataagcatcggcgggagtaagtactggctagttattgtggatgattattctcgcttcacttgggtgttctttttgcaggaaaaatcccatacccaagaaaccttaaagggattcttgagacgggctcaaaatgagttcggcttaaggatcaagaaaaatagaagcgaccactggacggagttcaagaactcacaaatagaaggcttccttgaagaggannggcatcagcatgagttctcttcttcctacaccccacaacaaaatg

SEQ ID NO: 29761 - DNA, 300 bp, Zea mays
  unsure (1)..(300): unsure at all n locations
agagatacttaagcacctgccaatnnttttaccaaagcaccatgtctangatctcaattgtgcatggctatatgccctcttatgagagaattntaactttgtaagccatgacatttcaaatcacgttagttcctcaatattatttttgtttaccaagcagcaacttagcacaagacattcacttgataagctatggttcaatcctgactataaccagcttgatctctattttgcatacctcgtgttagagaatgaaactcctgtgttatattaatcatgccgagggtggattaaccaaca

SEQ ID NO: 29762 - DNA, 470 bp, Zea mays
  unsure (1)..(470): unsure at all n locations
ccgggatcttaagcgactgngctgcagcttatcaaggacggataggcttctaacggaccatcaggaagagtctatgttgagcaacctccgctatgaaacagtgagcatcctaccatgttataggctctctaagcgcttacgggctcaagcagccccaaagcatggtatgaatgcctaagagatttccttattgctaatggcttcaaagtcggcaagggccgatcctacactctntactanaactcttgaaaatgacttgtttgtatgccaaatttatgttgatgatattatatttgggtctactaacgagtctacatgtgaagagttcagtaggatcatgacacagaaattcgagatgtcgatgatggtggagttaaagtattttctaggattccaagtcaagcaactccaagagggcaaccttattagccacacgaagtacactcaagacattctaccaagtttgggat

SEQ ID NO: 29763 - DNA, 433 bp, Zea mays
  unsure (1)..(433): unsure at all n locations
gcttaactggggtgttctcagatgtagctagctacacatgctgataggtgacaaactttcttctatggcttcacatangccgcagcaagcgccgagcagcggtgtagcttgatggccacaagcctgcaacccctcgtcggtgccgtagccctgctctgctcctcgcgccagtaccgcagcactgtgccattcaactcctcgccgaagttcgcaggcggcaggcccacgtgctgcctagcatagctctaagactaacctaagctttttgtgaaggtttcatatgagcttcatattcatttattatattctcgcgtaatcganagtgatgaacattaagaggacgaagagagaagattagtatcaattccatgaaactcaggtggcattgttcctacgatgaactcaaatgaaacctatngtaatcatgttgagt

SEQ ID NO: 29764 - DNA, 423 bp, Zea mays
  unsure (1)..(423): unsure at all n locations
cacaatgaataaggaggccagcaccttatgaactagtgggagaaatactcaccattaaccttgtgccccaagttcctaatcacattcacaatcacattgagcctatggaactatggagcctatctagcatgttgtcatctctccaacatcttgaactttgcatacatttccattatgatataaagcttggcctctctgatcgttgatgtgccctcatatgatttctcaaacatctttcacatgtcatttgcaaacttgaagtccttgatggacttgaagaccttatgatcaagagcataaaaatcacgttgagatcttgatcattgattngatgttgtgatcttctcttgagattgtgtctttcacgtccatcaccacacatangacctgcatagattccatatatttatactcatattctta

SEQ ID NO: 29765 - DNA, 328 bp, Zea mays
  unsure (1)..(328): unsure at all n locations
agcttcggcttcgctgctgatccactcaattacgcnncttaggtcgcctcttatgaagttgtcttcgcttgagtatgcgcccacattggcgaagctagttnttatctttttgacgcattctatagattnttcaaaacatctttctttcgacgagcgaagctctgcaactattttttcanaataaattttccagtactcactggcatctcggtcagcttcggcaatagcgcatttcaatttggcttcggctagttggttttgaagggtttcaatctcattcctttggatttcagattgagccttanagttagcttcatccccctttact

SEQ ID NO: 29766 - DNA, 291 bp, Zea mays
ctctataagagagtctcggtgtagtgtcttcgtctgagtcgattaaagaccgtgtcgatgtatgcttgctgaccaaggaccctttaactgggcacatgcctcattatgggtaagccttgcctcgggtagactaaggccagaataagataacacacaatggatgtggagcggtggcgagagtaacgtgtaccctccgtggcaagaggctggaaggtggtgtatctatgctctcggttgacgtgaacctgatctagtcttaagaaccccggtggcgggttgacatatgccagg

SEQ ID NO: 29767 - DNA, 312 bp, Zea mays
  unsure (1)..(312): unsure at all n locations
gcttctaaagggagagcacattntaggacttacaaatgttcattttgagaaagacagggtttgtagcgcatgtcaagcaggaaagcaagttggcgctcatcatccacacaagaacataatgacgactgacaggccgctcgagttactccacatggatatattcggcccgatcgcttacataagcatcggcaggagtaggtactgtcttgttattgtggatgaatatcctcgcttcacttgggtanctttttacaggaaaaatcacacacccaagaaactntgaagggattcttgagaccggctcaaaatgag

SEQ ID NO: 29768 - DNA, 333 bp, Zea mays
  unsure (1)..(333): unsure at all n locations
agctngagacgggaacaaccgtggcatgtactanatcccttgaagaanatgtcaaagacttgaggattgccaagaggaaggaacaaaagatgaaaatcaatgtctcctccaaaagcctcaaccacgcctccacaaaaggtaacatccaaggtaatgatcaagccacacttcatactaagagaaataagaagtgtagtgaatgctttgaaaagggacactcgattangtcatgtccctatattaaaaatgacttgattattaataaggatgataaactttgttttaaatgctcanagaagggacacttaattaagtctttgccctatatgaaac

SEQ ID NO: 29769 - DNA, 303 bp, Zea mays
  unsure (1)..(303): unsure at all n locations
cttaaagcctttagttgagagaaagatcaagccaatgcacatttcataatttaaaacttaaccaaaagttaagagtaccaaaatgtttacaaaagacagtaaaggaactttacaaaaatacccctataagacccctaaatcagccccaagtggagaacactatggaaccacccncattcccttctagtccaaaatcagccctaatctagagatcaggggtgttcacctagctaatgacaccaaaaccccagggtctaaataacaaaaaggagccaaattatctaatgaaccccctggaagagt

SEQ ID NO: 29770 - DNA, 359 bp, Zea mays
tccttttaaagactccatcggatcacctaatacctaaacatctgaagggtagaatattcacagtcaagactgaacatttgaataaaaccttatagtaagaaaaccaggatctcatttctatgactcctaccatgagatggccaattaacagtacgtttgctgctgcaagaatcattctctgattaaataagcataatgcttgacttcataacatactgggatagaaggcatcaatactctctaacattagaaaataacccatatgtatgtagggtaaataaaaaataagatactgaagacgcctaggcttacatactatatgttgatcgtccacctagccatcataaactgcctaacaa

SEQ ID NO: 29771 - DNA, 476 bp, Zea mays
  unsure (1)..(476): unsure at all n locations
agcttatcggatcaggcaggttggcacacgtctacgttgtgcaagctgattgacgccggaacctacgtacagtgagatcagcagagcgtcgaatagtcacttggtgatggactgcagaactactctaacctctactacccaccatctttcatttttctccgaagacacaaactataactactaagaaccatgaacgtaatcaggcgacagcatttttgtagcttggctttggcatgatccggcgtctgtatctgtatgtagcccctgtgtggcgtanggctgggcaaaaaacccgaaacccgaagccagaataaccgaattcgaacccgaaatacccgaaacctgaattttggttaggaatttcgggtagcaacttgcanaacccgaatttatatagagtaattcagacatcacaatcgggtactcgaaatacccgaactttcatgtgtcatgtactcatgtcatgttaattatta

SEQ ID NO: 29772 - DNA, 431 bp, Zea mays
  unsure (1)..(431): unsure at all n locations
tctanagggagaacacgtgataggtttgactaacgtacaattcgatttatatagaccttgtgcagcttgtcaggcaggtaaacaggtgggaggagcgcatcacagcaagaatgtgatgaccacatcaagacccctggagctgctacatatggacctctttggacccgtcgcctatctaagcataggaggaagtaagtatggtgtagttattgttgatgacttattccgcttcacttgggtgttctttttgcaggataagtcttgaacccaagggaccctcaagcgctttctcaggagaagctcaaatggagtcgagctcacagtgaagaagataatgagcgacaacgggttcgagttcaagaaccttcatgtggaggagttccttgaggaagaaaggatcaagcacgagttctccgcttcctacacaccac

SEQ ID NO: 29773 - DNA, 333 bp, Zea mays
  unsure (1)..(333): unsure at all n locations
gcttgtcgcaatgtatttggtaaatgcattatgggtttatcgttgggggagattggcaaatttttgtattatagcccaaaggccaccaccttacgcaatcaagcttaacaagaagaggattagaaatctccacatcaatggtattgggtcctttaccaattcatctattatttggatatagatacgtgccatgcatatatctctactactatgaagaatctaaaactgngtgcaatggttcactattggcctcccctaccctaatcctgtagctcgcgtaggggctacagagcaactcttcaacccgcaacgatgtcctctacggtgccccct

SEQ ID NO: 29774 - DNA, 358 bp, Zea mays
acatcaccttttttgaatcttgtgatgcagactactgactacaaagctatgcttttttaaacttccgattatacttaagccaccatgggctgcttcaaaaattggtacgtgatagttctatgtttgttcttataatattcatgcaagacatatagggatgctctactatttatagactccctcactctggatggacaatttgaatctactggcataccttctcgtttggactcttcttttgatcgcaaattgactcctacaattctattctggactgaatgctaatcttgatggtaaatatctatgcttttaaaattactcaaaattacggcttaaggataattacagccttacacct

SEQ ID NO: 29775 - DNA, 326 bp, Zea mays
  unsure (1)..(326): unsure at all n locations
gcttcatcatctntagttctttcttcgtctttatttttctggcgtncaancaacaatgaagtctgctaacgcttgggattggatcgtagatctatgaacataatcaatagtgaattcatttagctctacatcccactttcccactcttcctatggcttctctatttctcattatatccttgagagggtgtgaagaaggtactatgatatggtacatctgtgagtaatgccgaagctttctggaagccatcagtacaacatatagtaccttccaactctgtgtatttttttaatgggctaagtacttcatagacgaagtacactggc

SEQ ID NO: 29776 - DNA, 389 bp, Zea mays
  unsure (1)..(389): unsure at all n locations
agcttgtgtntacaagaaggaaagngggatctctgttgtatntctaatcttgtatgtggatgacatattatngattgggaatgacatttctatgctggagtccgtcaaggcttcactgaaaaagaagttttctatgaaggacttatgggaagcagcatatattttgggcataaggatctatatagataggtcgaagaggcttatangattaagtcaagatacgtacattgacaagggtttgaaacggttcaacatggaacagtccaagaaagggttcatacctatgtcacatgggtaacaccttagccagatgcaatgttctgcaaccgctaatgagcgggagcgcatgagtaaggtaccatacgcctcagcaaagggttcaatcatgt

SEQ ID NO: 29777 - DNA, 361 bp, Zea mays
  unsure (1)..(361): unsure at all n locations
tagncgggtaagtcttgctgagtaattgcgtactcacggttttattccctgtttgtttttcaggttataattttgttctgttgtggatgctgctaagtgccggtgggctcggccttcttatataggtgtatcccatctttagcttctntattgangattgtcacttaagctagcatgtattttaaaacctataaactatttatacattttaaattgtaattcttttgaatcactttctnttgtaatcactccgataattgtataatgtaaacttattgtaacatgtaatcattttgtaataaagaatntatctccgctgcaaatgctggtgtgtgatttgtgtttacttaatcctgcgatc

SEQ ID NO: 29778 - DNA, 416 bp, Zea mays
  unsure (1)..(416): unsure at all n locations
agctngtgaagattcttcattccaacatgttctagtcggtgatgccagagccaacccatattagccttagcaatcaaacaagtgttgagttcagctgtgttctcattaaaatcaaccaaatatagctgaccctctaacactcccataaatgctattgaatcatcacttcttctaaagacaagaacacctatatcagtaaaaagacagttgtagtccattttacataattgagaaatagaaaacaaattgtaatctaaagaatctacaagaaaaacattggaaatagaatggtcagaggatatatcaattttacccaaacctttgaccaaaccttgatttccatccncgaatgggatagctcgttggggatcttggtttttctcgtaggaggagaatattctcttcttccctgtcat

SEQ ID NO: 29779 - DNA, 296 bp, Zea mays
  unsure (1)..(296): unsure at all n locations
agcttctaagtcctctaggatcttatctataatatnnttacagaggaaagaatagccttcgactacagaggagaaagttaaagagcacaagaaacgacgaattgttaatgtgatgcaagcaattgaacaaacaccaccctcagcttcggtgggtaagacaacgattcctgtggatgccgaaactgaagctgaaggtgctgncgaagccaaagttgctggtgaagccgagacgacaatgtcagatattgatagacttgtgttagatatagttgcagatgtgactacagagacaaatg

SEQ ID NO: 29780 - DNA, 245 bp, Zea mays
acggcagtgatgacgtggcaggggctccttacatgtaccgtgtgcacccgactgaacggtgcgccatctaacagacagcctgccaacggccacatttggtggattgcgctttaaataccctatccactcgaccatacattgcatgccagtttttcactttccagctactacaggagctctagcattcaattctctacccacctaagagatccatcctttccaatatcacacaacgccatagtgac

SEQ ID NO: 29781 - DNA, 400 bp, Zea mays
  unsure (1)..(400): unsure at all n locations
agctnttatagaggctctgatctgtttttatttgttcggtattgagtaantactaccttaatacgtgccatgcaantgtatcatgcgaaaccgccaagttaagttgatcatgagttgttgccttgtgcctctttaagataattggataaatcatacccatcaagtttgggtgctatcattggtacccaattcttttgaattctgtgagatcttgtcatttcatcccctcccctcttacgattttatgacattcaataatgcggccagtcacggtaaatatgaagtgcctgttcatttcatctgacttttccggctgctcagggctgaatgttcatcacatctaattaactgtagacttagtatgctaatactactctggggtatggcgtgataatgacta

SEQ ID NO: 29782 - DNA, 360 bp, Zea mays
agcttaaccttataacaaggttaagttatctttgttccaaaggtggaggttccttaagtttctttgaatatttaagggttaatgcatcaaatatttataataatgctttcttaaagtgcatatttcgtcatgagcatcacgactatcaattatgacacattggacttcacgggtgctatggtatagatatatcctcactcatttacctaatgatgtgcaattggcatttaaggccaaaatatgtattcctctcaatgcacatatttagggtgagcaatctatattaagaactctttaaagctaaataacatatcttctgatcatgtatgtctctttcattgggactcgtcataattcatg

SEQ ID NO: 29783 - DNA, 362 bp, Zea mays
  unsure (1)..(362): unsure at all n locations
tcgccccgngatccttatagtcacctgcggcatgaagcttatagaatatctatgtgagtgcctgtgcgttgcaacagagacataatatcatggtaacttatgtacatctagacagtgttaggtaatacttgaaaacaaacgatatatatattatcttcgatcttaatatcttataggtatgtgcccgtgcattgtaacgaaacatataattacataaatggacgagcctctaatagctcagagccctagtgacaggtgatgcaagcgcaatggtaatgggaaccctcatggggaacagtgccttgcagaggagcgcaagtccgagtgagccaccacttgacgccttgagctccatcgtcctg

SEQ ID NO: 29784 - DNA, 437 bp, Zea mays
  unsure (1)..(437): unsure at all n locations
acatgtgctaagcggtgatgccacagtcagcccatgctagtcttagctattaagcatgcatctagaccggcctcttcttttgcaaatcaactaaataaagattgccgtctaatacacccttacaagctagtgaaccatcacttcttctaaagacagacacatctacatttgtaaatagacagctataccccatgttgcataattgactaacagatagcaaattatatcccaaggactcaactaacaacacattagaaattgagtgctcagttgagatngcaattttacctaatccttttaccttgccttgattcccatcaccgaatataattgaatcttgggaatccttattctcgacgtacgaggtggaacatttcttctccaccgcatatggtatgtcatccgctgtcgatatccagcttgacccccgatcataa

SEQ ID NO: 29785 - DNA, 319 bp, Zea mays
  unsure (1)..(319): unsure at all n locations
agctttggaaatctgtaatatattgtagattaaatgctaaaaatgcaagaaccaatttgctggattcctaattttccatagnaattaataaaaatagtttttggatntttaatccaaacaggaaattatagagtatttaaaacagctcaagaccttgcttctggatttttagaaaataaataataaatccaaaattcacttaaattttaggataatctctaaataatatatataagcctcgggcagagtttggtatgaattggaccatgtttgatacttagaacccanaaccctagctcctgccctgtgaacttcacta

SEQ ID NO: 29786 - DNA, 463 bp, Zea mays
  unsure (1)..(463): unsure at all n locations
agctcactgggacctagcgttgcttttttttaccaatctccactggaacctcgggccgaacccttccggcgtggtagncgtccagagactgctgatatcgcgccgagtgtaataagggccacgttcccgagcctcttccagctggtccaacaaatcttctcggttggtctggttgctttggtcgtcagaagactttgtcctcggggaaccgtgttctaagtccgcgggtaggatggcctcagccccatagactaaaaagaacggcgagaaacccgtggtccggctcggcgtcgtcctcagactccaaaccatcgagggtagctcttttatccaccgcttgccgaacttgttgaggtcgttgaagatcctcggctttaatccctgcanaaatcataccgtggcgtgctccacctgcccatttgtcattgngtgagctaccgcggcccaatccacacggatgtgg

SEQ ID NO: 29787 - DNA, 345 bp, Zea mays
accttgatactcagctggtgagattcttattccacatgtgctagtcggcggtgccagagccagcccatgttagtcttagcaattaagcaagtgtcgagttcagctctatcaaaatctactaagtatagctgaccctctaacactcccttaaatgctattgaatcatcacatcttctaaagatagtaacacctatatctgtgaaaagacagttgtaacccattttacatagttgcgaaactgaaagtaagttgtaatctaaagaatctacaaggaaaacattggaaatggaatggtcaggtgatatagcaattttaaccaatcctttgaccaaaaccttggttcca

SEQ ID NO: 29788 - DNA, 437 bp, Zea mays
  unsure (1)..(437): unsure at all n locations
agcttgattgatcttttcctttgcacattttatctatgcttggacctctggcatagctggcctctcatctccatctaccaccctaagtacaataagtagtggccctgaagctctaaggcaatcttctactgaattccaaaactgtgtggagaagacaatgttatacacatccaatccagcactagtctttgacaatctggtatcagtccaagctgtgcttgcaaataaagccttcaaagcatccttgtgctttgacaagctcttcaatgtgagaaaggaagtagcaaaacgagtggcggcaggcctcacaagatcagccccaccagttntctctctcatggcagcaagaattctcccgtgtcggtatattgaaagtgtcacacgcctttgcacttgcaatggttctngaattccttcaagttcctatgtcctcaaca

SEQ ID NO: 29789 - DNA, 357 bp, Zea mays
  unsure (1)..(357): unsure at all n locations
atgaagattcttcatccaacatgggctagtcagcggtgctagagtctacccatgtgagtcttagcaattaagcaagtgtcgagttcagctctatcagaatctaccaagtatagctgaccctccaacactcccttaaatgctattgaatcatcacttcttctaaagacagtgacacctatgtcagtgaaaagacagttgtaacccattntgcataattgagatacagaaagcaaatggtaatctaatgaatctacaagaaaaacattgganatagaatggtcatgggatatagcattttacccaatcctttgaccaaaccttggntncatccccgaatgtgatcgctcgttggggatc

SEQ ID NO: 29790 - DNA, 323 bp, Zea mays
cctggcattggtggagtcaatgttgttagatctatcaaatactcgttcagttctttctaagccttctgctggattggtccccattgaaagacatcggccgacttcagcacttcgaagaatggtacatatctctctgctgatctggatatgaatctattgagagatgccaaccttcctgtcaatctttgagcccccttctttgtagttggtggctccatccgaagaatagctctcattttacttggataggcttcaatctccttttgtgaaccaagcattcaagaatattcctcttcttcactccgaagacacatttttctgga

SEQ ID NO: 29791 - DNA, 247 bp, Zea mays
cactatagttacaccacttgcaaaactgctaccgaagggacctaaataaagcataactcaaaacttattgtaagaagcttagtattcacagctggccgcataaaagacagatccgcgtaatgatggttgatactacatgactattctaaccaagcatgaattggtgtttagaaaatgaataatattagtaagaagatttggtggaaacttactttaaggagtgctcacttgcatatttcaggaagtt

SEQ ID NO: 29792 - DNA, 326 bp, Zea mays
  unsure (1)..(326): unsure at all n locations
aatgtggggtccggaatccttactgcaagacaatggcaagaaaccttgcgacttagtgcatctgccaccaagntggcctttcctgagtgatagnggatttctaattcataatccttaatcaactcaagccatcttctctggctcgtgtttaattctgactgggtaaaaatatacttcaaacttttaagatctgtatatatatgacagatgtttcccagtagattatgacaccatattgttagggcatgaaccagagcaactaattccaagtcatgagttggataatgttcctcatgctgagcaaactgtcttgaagcatatgctat

SEQ ID NO: 29793 - DNA, 220 bp, Zea mays
gctgcagctcgcctcgagccaagtttatttatttgcaaaagccgaagcctcgtgttctgttttttggacgaagattatcaaagctttgcttaggttgcccgtgcgaaaagggaatgcgacgaaccataaagagcgacaggggcttatagctaatcactttaatcgaataaatctgaccaagagactgttaaagcttgaaataaggtaactgtgggctatc

SEQ ID NO: 29794 - DNA, 431 bp, Zea mays
  unsure (1)..(431): unsure at all n locations
agcttacacatgatgaggcatgtggtcattataanggtcctagancagcaggccaacaatcagaacggtccttaagcgacacagacgggcgacctttcctgctcaacgtctggtcttatcttattatttaacacccacaccatgtacctgacagaggtaccatacttgaatgatgaattcatcactggagatgatgcgctcaccattacaagacctctttcataaaacanacccatacccagtgtcacacattattcttttaaaagaaacaagttttaattctctaggcagggctaagcctcattagttctctctgtanaacaggtatcaaggaggataatcacattccaaggaatggcaatgcatcaactggttcatcactcaactcctatcacctaatgcagcatataagtgataaaagttttaaacaa

SEQ ID NO: 29795 - DNA, 443 bp, Zea mays
  unsure (1)..(443): unsure at all n locations
agcttaccagatgatagntgacttttccttattataacattcagtataaacatatntgcagacttggatggaagttgaaaattttttagttttataagaaccttgccttttgatcggcagcgtcgatctggcacaccccacaacacacaatgaaatttgcggtgtcagtataggttgtcttcctgcatgttgcatgtcaaacagaacaatcgataatttagtggcagcccataattagcttaaagctaggaggccactggtgtggcatagaaccaaactaaaattagcatatttctgatgtttcataatcgagaatttggagacttgtttttttcataattggcagccaatgcgactatgtaagaagtgtacccatgcaagaaacaaagtgaaagtctatggtgatctgcacaacggacagcagtacacctcatcagagaatc

SEQ ID NO: 29796 - DNA, 400 bp, Zea mays
  unsure (1)..(400): unsure at all n locations
acatacaagctggccaacgatcaaggcgaggtctacagcaacacttggaacatccaacatctacgtcactnttacccttaaaatgtttcaagtcgttcatgtatgtcgctttctttacatgcataaataaagtctaaccatcaaggaaggatcaaccttgcctcggcaaagcccgacccttcctcggnggctagaaggggggaaccccctctgcgtcaaattttcctcggaaagtcttcaccagacgtcttcgtgctttcgactgcgcgatacagaatctaagacgacggagagacttgacggtaggccgacgaccgaggactctacgctcagatacaatcctactcataccttcgcaaagtactacctcgataacatctgtacaacagtctacctcaaa

SEQ ID NO: 29797 - DNA, 424 bp, Zea mays
  unsure (1)..(424): unsure at all n locations
agcntttgaacgtactaagcacatgccggtaataatggtaaccggtaaacctagtacctgattgaagccgggcgcggactttatccctcatgcgacctgagacagggtctcccatgctagctatggtgggtacaagtgcggtcactgcacggcggcagccggggtcagtggagcattgtatgccaaggcggtgaggcctggacgcgaacggggaatcgatggggacgggtgacatgtgtggggtcggagtgccctgacatgtcgtgtgtttagggttaccttgcaaggttaaaactcgattcgaatcgtctgcttctcgcagctaatgagactgcttgattccttgtactgcatcgagaaagaagtgatgtggattatgagaaacctggttggttgactaattggattgtaccatgtatgctta

SEQ ID NO: 29798 - DNA, 302 bp, Zea mays
  unsure (1)..(302): unsure at all n locations
atcgcttgatggggtcattattgttatgttactaagatctatgaacccaaatgttctttgcgctagcgtttggcaaaatcattgcctttctagcacaagttgcaattntgggttgcctcagtatatatgaatcaaatgacaagctatgagtggaggagttaccatcgggacaatcatagcattgatgtcccttttcccggcatgtgtagcatatgcgttttccaagttctgaagatatcttttctccttgtgtgttgcttgctacatgagatagtaaaactattctttctaactctatgccc

SEQ ID NO: 29799 - DNA, 386 bp, Zea mays
  unsure (1)..(386): unsure at all n locations
agcttgtactactactctacaattaattgtatatatatgatgnncgaaanancgcacaactcaattgagtctaaaatcataaaccttgtgatagatgtggttggactacttgtatatatgatgtccaatgcattgcatatatgtcatagtgtcgntgatatacctgtgaatatcagccatcgtgctgctacttttatttgcaggttttggaaaccctcccgtgcaggggaggtgctgcccgattctttgtcgatatatgttagatagcggtagataagcacaagtagtggtaggtttgccgatggcatgcgtggtcctaaggatggcggtcgttgatgtgaattcatatgaacaaagtttggccatattttttctgattaatagac

SEQ ID NO: 29800 - DNA, 346 bp, Zea mays
cctgctagcctcttcttgaatctcgggggcgagattctgttaaggggtaagtttgaacaccctgcagtctagggataaaaattgattgctctatactcacaatcacgtgtaccctctctttaatctgctctttctctttttctaaactcgcgaggaatttggttatatttggttaacctataatatacaccccaagaacttgatgtgcatcatgcgtgctattgtttaaggtaaacattttgaacatgtaatccctgagaagtgatgaaatttctatttatgagttttgtctcaaaaatcaaccatgtttgaacccaaaaatttaagatccaattattggtgttag

SEQ ID NO: 29801 - DNA, 440 bp, Zea mays
  unsure (1)..(440): unsure at all n locations
ttaagtcacctgcngcagcaagcttatctgtatactgcattaagattgtaaagatacagagtcctgacgtagaaccaatggcatctccatggtccttccataaatgaatcttatcctctgctcatggcaaaagagccatgccttgatgatgttntctttcatccatactatatcttctctttcctgcaaaccactttcaataatttgaagatgctttgatatatcatcatccatcatcaatgtcatcaactgcttcagagatgaatagtctttccacagtatactccaaacttcttttcctgaatccacttcccacatcaatgcaaagttagatgccaggtcgtctgcctttcgtattatantttccctcaagtcatgctgtcctangctcattgtggtgataaacataagcagcgggcaccaatcaattgactaaatct

SEQ ID NO: 29802 - DNA, 303 bp, Zea mays
  unsure (1)..(303): unsure at all n locations
agcttctaagggagaacacgtgataggttttactaacgtgcaattcgaaaaagatagaccttgtgcagcttgtcaagcaagtaaacaagtgggaggagcacatcacagcaagaatgtgatgaccacttcaagacccctggagctgctgcatatggacctcttcggacctgtcgcctatctgagcataggagggagtaagtatgggctagttattggtgatgactnttcccgcttcacttgggtgttctttttgcatgataagtctgaaacccaagggaccctcaagcgccttctcaggagagc

SEQ ID NO: 29803 - DNA, 431 bp, Zea mays
  unsure (1)..(431): unsure at all n locations
gctccctcactcttctcatcctcccattgcctcatggcaaagagagatgctaaggtaaaaatcatcaccgatttaaatgatattaatgatgatgatgatatcgatgatgttgatgatgatggctattcatatgatgatcttgttagaatgttaggtgaggccgatgactacatgcacaaagaaaaagaaaaatttaaggccttgaacgaattatataaaaacctccaagtgtcttttgaggagctcaagacctctcacaatgaccttcaagaaaatgtgagaagctcgccgatgctcanaatcatctagtgtgcatgaagctgaggtggcacaaaggatgttggagtcactcgtgacttacttgatagtcttacaagtgaaccactacctactaactctatttgtgataaatgcanaatttctctcaatga

SEQ ID NO: 29804 - DNA, 406 bp, Zea mays
gctcgccccggatcttaagcacctgggctgcagctgacacaaatgtctcagttttactgacccttgcactatgtacatagcaaaatgtccggccatagagaaaatgcccaatcctgggccagcgggccccatcctcggccgactcaccacacacgaccactggcgtggagaccacgcaggggaggacccggcgccgcacacagcagaccacaacgaccataagatgtgcacgagcggaagggcttcttaacgccctgtggatgtgggatcaatcaaaggggatatgatgagcttgactttatatatgaactgtgcacaactcatatattatgataaagggcatgaaactccttcaggaaacagcacataatgattctgccaacaataaagagtgatctcttgactg

SEQ ID NO: 29805 - DNA, 418 bp, Zea mays
  unsure (1)..(418): unsure at all n locations
gcgtatgaacatgaagcacataatgctcaacttgcattctcgatgccgtacaataatcatcaaatgccttatagtaaattcttcagcattatccattctaatggactttattcgatggtcacggaaagntattttaatccgaatgatctgcgagatcaactttgcaaatgcatggtttctagttgatagtaagcatacatgcgaccacttcgaggatgcattgattaagaccatataatatcgaaaaggtcccgaaagtggttgaattggacacaaatgtccccctggatccttccagaaggcgggaattcattctttactttaagggggatggttcactatcaattttcatggcacatcctgcacacaaaatcttcttgattgtgaagtgttcacattatgcaggccttgtgagtat

SEQ ID NO: 29806 - DNA, 232 bp, Zea mays
  unsure (1)..(232): unsure at all n locations
tcttttgcggactagggcaaccttctcttctgcctctttaacgaaggcatgtncttctagtgtcttttcccctacgttggaccacattagaggggcctggcacttccgtccatacaatgcttcgaacggtgacctcttgatactggcctggtaactgttggtatacgagaactctgcataaggcaaaatggactcccaatttctgtcaaatatcaacacacaggctcttaat

SEQ ID NO: 29807 - DNA, 254 bp, Zea mays
tcagcttgcgtggggtgactaatcagttcaatggtggctgaactggtggtcagtttcaactcgcgcaggcaaaataattattgctggacacctgcgtgtacggcctgtgggggcagaaccagagccatggcagaacaggtcaaaggcagaacaagtcaatggcttacttaataagtagtaatgtcggcgtttcgagaccagggggtccctggaccgacgagtaaattgtcgccgcgtgccagcccatatgggtc

SEQ ID NO: 29808 - DNA, 427 bp, Zea mays
ctcagagtcacctgcggcattgcaagctggcgactgtcagttcgacctctaatatcgttctacgtggtcgcatgcgcaactgtgtacgacaagctcacgcgaagccgccgcttggacgcggtccatagcagctgcaccacgatgtccatcgttaaacaggggggcctcatggttgtcgccaacgtcgacaactctcgggttgttctggacaccgcatctgacgacgacgccatcacgccgttcagctcatcgtccacctgaagcccaacctgccacgtaagtcactactgaccggacatgaattcttgtgcgctgggacgatggacgttgttgacgttgtgtgagtgtcctcgaatatgttgtatgtagtggagtagcgcatccggtgatgcaacggccaggggtactacctcgctgatgagctcgt

SEQ ID NO: 29809 - DNA, 194 bp, Zea mays
taagctatcgcttgcgtgcacctgcatacacacattagtgaagctcttcttctagctcactattgctcgggtgaaggtacttcgtgttgtcttcatattgtacctgatacacactttattaacttggaagatatgggtttagaggatctttggaaatataagccgcccacttataatgcaaacaccattacgag

SEQ ID NO: 29810 - DNA, 333 bp, Zea mays
  unsure (1)..(333): unsure at all n locations
ttaagtcacctgagctgcagctttaagggaaacacggaaggttttacttttttcattnncaaaaaatagaccttgtgcagcttgtcaagcaggttaacaagtgggaggagcgcatcacatcaagaacgtgatgaccacttcaagacccctggagctgctgtatatggacctcttcagacctgtcgcctatctgagcataggagggagtaagtatgggctagttatcggtgatgatttattccgcttcacttgggtgttctttntgcacgataagtctgaaacacaagggactctcaagcgctttctcatgagagctcaaaatgagtttgagct

SEQ ID NO: 29811 - DNA, 278 bp, Zea mays
  unsure (1)..(278): unsure at all n locations
cagctntatttggttgattatactaaagagaatgcttatgcatgtctaattgctaagactaacttgggttggctctggcatcaccgtctaacacatgttggaaaaaaaaatcttcataagcttctaaagggagaacatgtgttatgactaacaaatgtatgttttgagaaaaacagaccttgtggagcctgtcaggcaaggaagcaagtgggacaaatcatccaagccagaacgtgatgacgacatcaagaccactagaactttctcatatggatctc

SEQ ID NO: 29812 - DNA, 359 bp, Zea mays
accactcgtcttactgcacgttgtgttgaccaacacctttttcaatttaaatggccttcgattccatgctttagcttcgaaacccaaaacaggcttcgtacttataatattgcttgacaactgaaatcgagtctgccgataacaagtttaactttggatggcagacaacacataactgctcctgccgaaggttcccaaacccatccaaacactgtcctacttcggatctttatctgttctatattttaacctctggcgtccaattgcgaataaatctaccaacgcttgtgacttgatcgaagatctatgcacattaatccatgcaacattcattgagctctgcagcccatttccaatcc

SEQ ID NO: 29813 - DNA, 422 bp, Zea mays
  unsure (1)..(422): unsure at all n locations
agcttgtgaagattcttcattccttcatgttctattccgcgatgccagagccagcccatgttaatcttaacaattaagcaagtgtccagctcanctctatcacaatctactaaatatatctgaccctctaacactcacttaaatgctactgaatcatcactttttttaaagatagaaacacctacatccgtaaaaagacagttataacccattctacataancgcgaaactgatagctagctataatctaaacaatctacaagataaacattggacatggaattggcaagtgatatagcaattttacccaatccttggaccacaccttgatttccatccctgaatgtgatagntctttggggatcatggcttttctataagaggaggacatattcttctcccatgtcatgtggtctgtgcat

SEQ ID NO: 29814 - DNA, 383 bp, Zea mays
  unsure (1)..(383): unsure at all n locations
tctcaaatctcaaccttgtgatgaggatgagctcaccttggttaaggtggggtttccttgagtttcttttgatcataagggggagaatgcattgagtagtgttgtagtgttgataattcttatcatgttcttagtgatggtggtgataaagcataaatcgtgttaatgttgcttgtaatgctgataatgtgttatatcgatgcttgtgctntatttagtatcttcttggtgtagaatcgtctttctcatgttattgatttgaagatcaatgtatctataatggttattgtctatttaattgatagatattcatgtgttcattatcgatatggtgctttaattggtaactttattgtgtatagngatacattgatatcctcatg

SEQ ID NO: 29815 - DNA, 443 bp, Zea mays
  unsure (1)..(443): unsure at all n locations
atgagtgggtcaacttgtgatcttggccttcaatgcttattcactcctacagagggtgttgtgtcaaaaatggatgatgagtcaatggtggtcaaaggatttaaatacaacaacctatacttagtggatttctcttctgaagatgcaaacttaaggacttgcctctttaccaaagcatctcttggatggctatggcatagtatgcttgcacatgttggaatgagcacactcacaaaggttctaaagaaagacatggttagaggactaaaggatgttgtatttaataatgacatgctttgtagtgcatgtcaagctataaagcaagtngctaacactcatcctacaaaagcttttatgacaacatcaaagccactgcagtacttcatattgatctattagaccaacaacttatgctagtgctggtggcacctctattgctagta

SEQ ID NO: 29816 - DNA, 463 bp, Zea mays
  unsure (1)..(463): unsure at all n locations
gcttgaagccgaagtcgaatatattcttttttcaaaaatccttgaaagagcttcaggacaaatgcctaaacttcggcaaccggtgcgtgcaacggctgaaacaagtcttcaactctgtgggagccagttctaagaaattngaaccttcggttgaagaccagccaagcaccttcgatcatattgaggggcgaagtgaggtgcttgacgaagttatagctgggcatggtgacttctatgccttgctggcttctcgcgacacagatgttgcttntatgaaggctggttgcacgcacggaaagatcgtnacaggccaaacttcagcctatcactagcggacatgactgacattcccatcctggcccgaagcattggaaatagatntataacacanatctggacgaagggtgggcgagacttagctggtgacgaaactcaaagtcatcttaagtcggattaaacttgt

SEQ ID NO: 29817 - DNA, 351 bp, Zea mays
tgatcatcatgtgtctcttcaatcggagaatatatcaatatgtcatcaatgaataccaccaccaactgattccaatattccatgaatactctaatcatcaagttcataaaggatgctggtgcattagtcaatcccaaccacatgaccacaaacttctaatatccatatcttgtggtgaagggtgtcttgggtacatcttctgctcgaatctttaactgatgatatcccgatctcagatctatcttcgaaggatatctagcttccttcatctgatcaaactaaactttaatccgatgtaatgggtatctattcttgagggtacttcattcataactatataatgaacacaca

SEQ ID NO: 29818 - DNA, 354 bp, Zea mays
  unsure (1)..(354): unsure at all n locations
agcttctaaagggagaacacgtgataggtctaactaatgttctattcgaanaagatagaccttgtgcagcttgtcaagcagagaaacaggtgggaggctctcatcacaccaaatatgtgatgacaacatcaagacccttggagatgcttcatatggacctcttcggacccgtcgcctatctgagtataggaggaagtaagtatggtcttggtatagttgatgatttttcccgcttcactagggtattctttttgcaggataaatctgaaacccaagggaccctcaagcgcttcctcaggagagctcaaaatgagtttgagctcatagtgaagaagattaggagcgacaaccggt

SEQ ID NO: 29819 - DNA, 351 bp, Zea mays
  unsure (1)..(351): unsure at all n locations
gcttcatcccacttgaactctttaccttttttcaggagagagggaagtggtttcactaaactggaaaaaccttcaataaatcttctattgtatcctgccaatccaagaaaacttctgatcttggacgcatcccttggtggcttccaatctaatatctcacttatctttcctgggtccactttaatttcaccatcggtaacaatatgtnctaagaaagcaacctcctttcaccaaaaatcacacttcgagagttttgcgtacagttgggtgtcacgaaacttttgtaggactagccttagatgatcttcgtgtgtttcttcattcggagagtatatcagtttgtcatcaatg

SEQ ID NO: 29820 - DNA, 488 bp, Zea mays
  unsure (1)..(488): unsure at all n locations
acacccttcattggtgaaactttcacgtagacataatcttcaactagaaagtgcaagggttgacgtcgcttgtctgcataactcttctgctgagcttgggcttctttcaaattatgaattattcgttgaactttctcttctgtttcctttaccatatcaagcttgaagaaacttctttcacctggttcagaccagtttaacggagtacgacatcgtcgtccgtacaaagcttcaaaaggtgccattntgatgctctcttgatagctattattgtacgagactccacaacatangctcgcaacatgtcttcaagtatctgatataccctctcagtcttaccactattttggtgagataagccgaactgtggagcaatttagtacccaaggatttgcgaagttcatcccagaatctggataccaattgatgttcatgatccgacactatggtcttcngaacaccatgcaaactgacaatgcgagcaatgt

SEQ ID NO: 29821 - DNA, 295 bp, Zea mays
  unsure (1)..(295): unsure at all n locations
agcttngaataagtaagctgtttctgnctacttatatgaaggacaaatctgaacgttatgtaggacatttcaacttaattactaccagtaaaagttactcattcgaccaatccaaatttaactagatcgtagatgaatgccacagcacgctttccatcagaatcaactaggcgtagaattcagacacaaagaaaatagctntcaggcatgatagaagattanaacaaattcctctactgtctagcatattttgtgtcaagcaatgccgtatttggtagtgcaacattattgcata

SEQ ID NO: 29822 - DNA, 257 bp, Zea mays
tctgcagggacacgcgcagcactacaagagctgagcacgcggacacagtcagtgactggaggaatatgaggctccgcaacctctctggcatgtgtagcagcagcttccacccacatccagaccctatctctggcaccctccacagccgaagggtcttcaggtggcctaagttggagtaagaagaggacctcatgcattggtctgcatgcagttgcagcagcttccactcgcatccataccctagctattatattgat

SEQ ID NO: 29823 - DNA, 361 bp, Zea mays
  unsure (1)..(361): unsure at all n locations
gcgcagataagcttcggcatgacaattagaaaaggggaaccacttaaagatgaaaagccaaattagaccctgaagaattactgtagagttattgataaatgtaaagggcatcaatgtaaatttacacgggctgcgtcccgtgcctataaatagatgaacagtactcccgtactggtcacgctgacttggcactcgcatcacgcttgtacccttgcttctctttaaaccgaaggtacatttgttatttaccattatttatacgagtganatgaaatagaaataaatcactaataatgcttaaaataatatgttattctctctattcatgcaaaatctattcttgctcttattatgaatatga

SEQ ID NO: 29824 - DNA, 469 bp, Zea mays
  unsure (1)..(469): unsure at all n locations
agcttcggcatgccccattcccttagcgttgtatatactctgttggctaagtatttctggactagatccctagttccaatatgtttagacacaattctaaactcatacacagcatctgggcatggtgtccctggcgtcatgttgcactgaggcctagtcagcccgaaggttagctccagagggctctgaactagcttctcctttntctcatcaattttaacataaaaccattcatatttccaaccggtcggccatttaatacgatagctaaccaccggcgtcttcatatccttctgataagcaaaattatagcagtcgaagttctcatgcagtccgtcttctctagccttcgtctgatagtgaagttcatgaactcggcagaaggcttcggcgagcggctccaccgcttgacttcggagaacccagatgtacacgctgagcctaaacaatggcgtagggggtcagctga

SEQ ID NO: 29825 - DNA, 369 bp, Zea mays
  unsure (1)..(369): unsure at all n locations
taagcactactagcaaaatcactagntgcactacacaagcacatttagagagaaataactacttagccacacaagctaagcaaaacggattatctacacaagctaacaaatgagtgactatntcacaacaagtntgactagatatattagagcatacaagttaatctaattctcactagcataagtatatgaacaagtaaatacaagctagtgaggaaagttgcaaaccaacaaggacatgatgacactngacacaatgtattttttcccgtggtgtcgatgacttgtcggtcacccctcatccacgttgaggtagattcaatgcacccaatcgctcttctatcaagtatccacttgatctcttaagct

SEQ ID NO: 29826 - DNA, 334 bp, Zea mays
  unsure (1)..(334): unsure at all n locations
agctntaataaacttcaatatgtggaacattctcgatttctctattgaagcccatccagagtcaaaaggggagaacaattcaaagagcttatgnttttgttgctcattgtgtaaaagagccaagagggagagttttaatgtcctgngtctcctaatgctagattagagggcgcttgatcggaggacatgttntttttccaaggatgttctcttttttatggggtgtgttntgttaattctcgatctctaattaaggttgtatgtaagaggctgcaaaagacaagacccacccctctaagatgttggtactccaggtcctggattgaagcataac

SEQ ID NO: 29827 - DNA, 320 bp, Zea mays
  unsure (1)..(320): unsure at all n locations
taagcacctgcagctgcagcttctaagggagaacacgttataggtctaacttatgttaccttttataaagatagaccctgtgcagcttgtcaagcanggaaacaggtgggaagctctcatcattgccaaaatgtgatgacaacatcaagacccctagaggtacttcatatggacctcttcggacccgtcgcctatctaaacataggaggaaagtaggatggtcttgtatagttgatgattttcccgctcacttgggtttcttttgcggataatctgaacccagggacctcagcgctcctaagagagctcaaacagttgac

SEQ ID NO: 29828 - DNA, 248 bp, Zea mays
catgccaagcttaaatctgcttacgattcattagagacagagagcgagagcactcgtagctgatgatcaattaattcctcttatgcgccgaattactgttacaaacaccaaaattactacatggggactggacatataggaatcatcattccacaggccatgacaggggggaggcgaggggagcaaatcatccatagatcatgtggtcggtctcgaccttgatgagtgcccgtgatctgcatcgagta

SEQ ID NO: 29829 - DNA, 463 bp, Zea mays
  unsure (1)..(463): unsure at all n locations
agctnggttataaagatgttagtgcaatagatccatgtgactagagagcgagctcttgtgaatcacaattatcacagagaaagacaacacaagagacacaatggtttatcccgtggttcgaccaagtataacacttgcctacctccacgttgtgctgtcccaatggacgagggttgcactcaacccctttcaagtgatcctatgatcaacttgaataccactgtattcttccttatagttttcttcccgtttgcgaggaatctccacaangtggagcctctcgcccttacaagattgatcacaaagaaagcacgaagtaagggtgggaagagcaacacactaaatataaatccacactggcaacaagcacacangtgagaagatgtcacacaaaacacgcgcgatgaagttacaactcgaaaagtgcttctatctcaagaacgatgaacgattgcgtgaaagt

SEQ ID NO: 29830 - DNA, 277 bp, Zea mays
aggctcaccctatatgtgggcccacattatatgctcactatttgaatatttataagctctccgtcatgctattaaaagctctacctatatatgaagttaataattgaatctcacgccctccattcacattatataaattaaaagaattcgtctgaaagttggtcatgagtaaacatagtgttgaagctacttttgtccaactttggtgggctaaggcattggatggctcacgaataacagtcggtatttaattttataattaaccctgcgtctacac

SEQ ID NO: 29831 - DNA, 389 bp, Zea mays
  unsure (1)..(389): unsure at all n locations
agcttataaaagactggtctgtgtagcttgttagcgagagagcttgcacctatgcagccgatgctcttctcttctgatcttctcttatcttctccacgcattggcccttcggcccactaatgattattttgtggccccgatttagatagtcggagccttcctgattggtntactggtgtaattagcagcctttttcagtgtcgctggggagcatctgctgaaagattgcacacctgcatgcctgctcatctcctacggtgtagtacctgacgcctcaaatgttgaaaaatgttttggtgttgacctaaatataatgcaatttgctcgctggtaccgtgtgctgtcaccctagactcatttgcacctacaaatcggtgaagagaaaatga

SEQ ID NO: 29832 - DNA, 374 bp, Zea mays
  unsure (1)..(374): unsure at all n locations
tatacatttcacaattgccattaaatttaacacctgaaatgggttagaattntctgttcaaatttgaaccaactcgaatcaccattaccagtactgccacgtggagcacctaagatggtaacatcaaaacatgacataatagctatatttatttgcatgcttgttttaaaatgccgataatcatatatttcttcctcaatcatcattacacgtgaggggagattcatggcacatgaggctaagaatcaactgcagaatttcgttcaattggggatatgaaatggctcctgatgtttcggacaatggtaaatatgagctcaggaatatatatatatcatgattcagactggcaggcctataattgttgatgacat

SEQ ID NO: 29833 - DNA, 387 bp, Zea mays
  unsure (1)..(387): unsure at all n locations
cggcgatgccatanccagcccatgctagtcttagcaattaagcatgcatctagaccggcctcttcttttgcaaaatcaactaaataaagtgtgccgtctaatacacccttacaagctaatgaaccatcacttcttctaaagacagacacatctatattagtaaataaacaattatatcccatattacatagttgactaacagatagcaaattatatccaagggactcaactaaaaacacattagagatagagtgctcatttgaaattgcaatcttgcctaagcctttcaccttgccttggttcccatcaccaaatatgattgaatctggggagttcttattcttgacgtaggaggtgaacatcttcttctcccccggcatatgggtt

SEQ ID NO: 29834 - DNA, 296 bp, Zea mays
  unsure (1)..(296): unsure at all n locations
agcttgccgtccaggcctcagtccagcgatttcgcagtgcatcaggagatgtgtattctagaggcgatcatctcctcaccatcaacatgtatcgtcacgatgtgtgacggtttgaggaggcttggagacatctacagcagtgttgtggagatgactcacttgccgagcaaccaagtntgctcttcccagcanaggaagatgctggacggagaaactgagtcttctctcgagctgctggatctctgcaacaccatgcaggagatcttcgttgagttgaaggccattatccaagagct

SEQ ID NO: 29835 - DNA, 429 bp, Zea mays
  unsure (1)..(429): unsure at all n locations
agtatatcacccgcagtccaacggagttgtggaactcgcctatggaanaattttcacagctgtcagaaagatgctcctctacgaacaaagggcatgtgggccgatctgttaccataggcggtctgggcgcttaacacgactgagtgcagggcgaccgtgttcacccctttccgccttctatatggatcggaggccatgatcccacaagaaataaaacatgggtcctcgcgaacagttccattagccgtccccgacgtggacgagcccacttcgaaggatctcatcgatggagaccgagtctttcacctacaggctctattanataccaagcccagacaaagcatggcgcaccacgcagtcatcccgatggaattcggnaaggtgacctcgtactctttcgaacagctcggacagagtcaggtgcaagct

SEQ ID NO: 29836 - DNA, 321 bp, Zea mays
  unsure (1)..(321): unsure at all n locations
agcttcggctccatctatattatggatcttcttntaatctgnccaactcccttcagcccttctggcagcttcttgacttccatggacaacaattggcccttgttccgaaggtatcttcatgcataagtacgctggatgaagtatggcttcnaaggcattaagcatccctcgaccaatgattgcattgtatgggtaatccatgtcaacaatgtcaaagataacctgctcagaccttgtgttgtggatgtaaccgaaggtaactgacattgtgattntgccaagtgccacaattngtcttcctttcaagtcacaaagagggtg

SEQ ID NO: 29837 - DNA, 270 bp, Zea mays
atatttctcaaactaacatttctgtcacgccattatatagtgtcagcctccgattcactgatgtgctctatggattgaagcctggtcccttctatggaatcttatgctacttggcagtcactgtcatcttctgtctaagctaaggttcttattagacccactcttgcttctctcaggtgttattgacttcaccgcgaacataaccttgaacagagtaaaacctgttgatcttgatacatcaatgttggtactaccaaccacctatattaa

SEQ ID NO: 29838 - DNA, 396 bp, Zea mays
  unsure (1)..(396): unsure at all n locations
agcttgcacgctattacacttcttaaagctagtgaaccatcacatcttctaaagacagacacatctatatttgtaaacaaacagttatatcccatattgcataattgactaacagatagccaattatatccaagagactctactaaaaacacattagagatagagtgctcatttgagattgcaattttacctaaccttntaccttgcctgattcccataccgaatattattgaatcttgggatctttgttttgacgaggaggtgacatcttcttctccccgtctatggttgtgcatccgttgcataatcagcttgaccccggatgctaacctgcaagcaaattatgcttggtctangtaccaactcatgttggtctacaggtagtgaaatatccta

SEQ ID NO: 29839 - DNA, 316 bp, Zea mays
cgtcttggctctgtgactgtgccttctcgtgctgcttatcggatgggctggcgggcgcagggacctctcgcttggtcgtgagacattgtaccttcctctgaccaggcacgaagtcccgctctatgttgcgcgccgtctgctggttgccgtagatcgtgatagcgcctagcggacctgggatcttaatacatatgtatagaccgtggatggcagcttcgaacttattgatggagcccctgtccatgatggcgttgtacggatttaccatgtccaccatgtctaatgttacttgctcacttctggcattgggtggtac

SEQ ID NO: 29840 - DNA, 303 bp, Zea mays
  unsure (1)..(303): unsure at all n locations
agcttcactggcaacatatctagtgatgattagcacagtgtatgccgcagcatgggcgtactacctgctaccggagcggacgggcacgccacctgtaggatggcctggccgccgcccgtcagcggagtggacaggacacattaaatgctgaggcggcacatcgcttgtcagtggagtagacaaggcgtatntaatgctgaagggcacatcacctgccagcttcacgggcggcgcgcctcctccgcataaatgtgcggcctanaggccttatgtctggctncacccgttggcttacgtcacggg

SEQ ID NO: 29841 - DNA, 392 bp, Zea mays
atatgtgggagtcgaaatgggaagacaaacctctttcataggtggattcatcgtttggtcgccatcgctcattttcttattcttcctttaaggggctagtttcacaaggactataggaagtagaagcatcatatgaactaacatgtttggactcatcaaatatactaactgagtgcccgtgcgttgcaacggtaatatataataccagtatactacgatagcttatatataaaatgtcacgactacattacaaccatcagtatcatgcagacttcgatatatgccacgacttgtattggctcatctatgtagagcacgttccacacatgctgtaagagatgtcctcgtacatcgttagtatcaacacgcaccaccatacgctcttgcttaac

SEQ ID NO: 29842 - DNA, 468 bp, Zea mays
  unsure (1)..(468): unsure at all n locations
agctngcacccaggtacattggtccattctctatacttgaaagatatgggccagtggcatatcgacttcaactacctgaaaccttgtctgctatacataatgtgttccatgtgtcacaattgaagaaatgtcttcgggtaccagatcgaaccgttgaagtgacagatgttgtccttgaaccagacctgacatattctgaacatcctattcgaatcttggatcaaaaggacagggttacccagagaaaaactctcaagttctataagatacagtggaaccaacattctgaagaagaggctacgtgggaaactcaagactntttagataagaatttccccggctttntagcctcatgtaattngtaaaatgtgttttgtacaatgtatttagttgttataataaagagtgaaccccacaccacccctgccttgtaccaaaataaggaaataaaatgtacacatttctttt

SEQ ID NO: 29843 - DNA, 460 bp, Zea mays
  unsure (1)..(460): unsure at all n locations
tcatcatccgagctatcatccgagttccattcaactaagtaggctatgccatctctcttcttggtataagaaatatatttcttcttgtcactttcaatcttgcccttcttcttcttgcttgggcaattcatggcaatgtgaccgggttccccacactcaacacatattctatcattgaaagcatctcttctagatggtngacctcttctaggttgatctcttttcatcttcatgaaattattgaatgatctacagataaagacatgtaaccatcactctcaccttcactttcttcatcattgctatcttctttatcaatttcctttgacgccttggctctgagagcatagaatcattatcaccttctttgcaaacttatagcattgcttgtgacttctaaatatatctngagtgagaattctcccatacttcagtggagaagtgtaaatgatcaatctta

SEQ ID NO: 29844 - DNA, 229 bp, Zea mays
  unsure (1)..(229): unsure at all n locations
catgaggagcattatcctactcatgatctggagctagctgcagtggttcatgccctgaagaattggcgtcattatctgctgggtaatatctgtcacatttatacagatcataaaagtttgaagtatatctttacccagtcagagctcaatatgagacaaaggagatggctcgagctgatcaaggatttatgaatagagatccattatcacccangcaaagcaaatgtag

SEQ ID NO: 29845 - DNA, 410 bp, Zea mays
tctgtttcttccccgcgatagcccctgaccacgccgcgctctttattcttcccggcgggacccgtactggacatggccggcgaggactactcaagctaacggtcggagagtctctacggacctaaggcgacctaagaacggccctcaatttcgaacggtgctccaagaaattgctctgcccacgctcagggcggaaaccggggcgtcaagctcacgttcccgtacaaccatggccggactgagcaaacggacgccaccgagagcatcacaagcatgcagaggcacgaaaacagtatacgaattggatggcgactcaccagaacgagctggccacgggagggctagttttcacggtgcggcggatggaattgggggaaacttggaattagagctcgtcggtgaaccactgg

SEQ ID NO: 29846 - DNA, 387 bp, Zea mays
  unsure (1)..(387): unsure at all n locations
cctagagatgccacanaccatttgggtgatgagaacaaattatgagaaatggaacgcaaaggccaaaaacactctttttatgggcctttgcaaggatatgtccaatagaagtagaaatcataaaaatactcatgatttgtggtttgatatttgtgctcttggctccgtgaagggctcgaaggcctactgatgcgcacggtgcgcgacgtattgttcgacgaaaggcgaggatgggcgtgggacatagcggtggacgacggcacgactccgacgtacgatgacttgaccatcgagtatgtccactgtgagggagctgggggagtatgcaactcttcttcgagcatgtctaccccagcccccaagtctccaccgacttcagcaccatgc

SEQ ID NO: 29847 - DNA, 362 bp, Zea mays
  unsure (1)..(362): unsure at all n locations
tatccatgttttctaacctgttattaataaacaattaagaattattttatgttctgctataattactcagtatttaattagttattatttgtaaataatataaatacaattagccaagtactgtcatcccatccgctttattctatccgaataaacaggaaaaataactcgtcatattcatctaaccaaatatataacatagatattcatatgacatcactaaatatatatgcatggagtggagccatataaccaaagacacagctacagggctgaatggacgaccgcgtcaccgtcaaagctgaaatgccacccangttcacgcgaagaataaaggccagaagggtgttccgaccccagac

SEQ ID NO: 29848 - DNA, 405 bp, Zea mays
tgcatcataactcaaccttgcgtcttgtggaatttatccagactatggcttcgattcgatccaggagtcgcccaaatcgtcttgtcttcgacttcggttcaacccccgaaacgaaatatctagggttttagtgtcaattttgtcccccttcattacatttgattggcggaggatcggttcccgttttgatgattccctgggttcgttggacggcaggacacgagatcctctaaagggttgtgctgcttggcgtgaggctttgggggcgatttgctttgctcgcatgggggatcatgtcgctgtggatgttggggagctcgttgcgtcccgagtcggtgaggcagcagggctattgtcctgcggcaaggaggaaatgaatgcgctggctgggatggtggagtgccg

SEQ ID NO: 29849 - DNA, 427 bp, Zea mays
  unsure (1)..(427): unsure at all n locations
atctatgttatggattgtcttttattntgtccagtntccttcggcccttctggcagcttcctgacttccatgaatggcaataggtccttggtccgaatgtatcttcatgcaaatatatgctggatgaagaattgctttcaaagcattgagagtaccacgaccaatgattgcattgtaagggtattccatgtcaacaatgtcgaacacaacttgttcagtccttgtgttgttgataaatccgaaggttactggcattgtgatttttccagtgctacaatctgcctttctccgaagccacaaaggggatgtgtggcatcatggatcttgtctttgagctcttgcatctgtctgaaggccttataaaatatgatatcagctgcactgcctgtatcaaccaaaacattatgtgaccaaaatactttgatca

SEQ ID NO: 29850 - DNA, 410 bp, Zea mays
  unsure (1)..(410): unsure at all n locations
ttgtntgcgtacctcctctcctccgccaaccggcgcctaaggttctccttctcggcctccgcagccgccagcctctccaccagcctgcggctcttcttttctgcagccgacttgtcccgaacaacatccacatgctgcgctcggaggcgctcgatcctgcccttgagtcgttgcctctcggcagcgaactccgaagacaaggcacccgacgcaacatggtcggcgaaggcggccgcctgccatagaaaaaacatcagattcgcaaccacatcaaaacaacgaaccaacaaagtctaagacgacttacatgcttcagctgctgggacacaatggccgccacgtccctagcggcgctggtcaacaaaatctcgccgctggcgcagaatttggaccatgggtcctgcgaagtg

SEQ ID NO: 29851 - DNA, 486 bp, Zea mays
  unsure (1)..(486): unsure at all n locations
atcctcanagtcacctgcggctgcaagcttacggcctccagggaagctacctatgggctnggatcgagcggaggaggacagggaatggttcggccacggtggttgtcctcggngggctctggcgggtcgcggagaggtcgccggggctatgggcgagctccggggagtttggcgcggggcaaaggatgcaacggggaagacagccgggctctaggacgggctttatagccgtggcgcgggcgtggtcacgagcggtcgcgggtgcgcggtggttcgcacacgggcgtgctctgagcgcgccctcgtgtgtcagcccgcgtcgaacacgtgggagcttgcttctgccatagttcaacggtggatttgagcaccttagcgtgcatatcttggcaaaaccactgtgtacggtctcttccctgcaccatatcctactctttttatgtgagttccaagccaagatacggtcggngtatggagatagaggcg

SEQ ID NO: 29852 - DNA, 388 bp, Zea mays
tcagtcttagtgttagtctcgctcttagttagtcttagttagacagggtggtttgctatatcctgtgcatttatgtttgtcatgatgaactatgtttggtttggatctttgtaatgattgttaccagagtgtgggtaccccctgcattttggtttacatactatgttaataaagttagttatatagttgggaaaccttttattccactttcctctttatctgagaagctgtgtggtctgtgttggagatcagtgaagatgctcatctgttcagtgctgttgaagaattctattctcttttcttatgctgcaagatttgccagatcagttctgatgtgtggtcgcattctgcagatgtcagataacaggcgttgaggaggaaggcgtgc

SEQ ID NO: 29853 - DNA, 455 bp, Zea mays
taagctgtaaagttcaacacatgttgttctatgtgttatggtccaaaggttgagttgattatggttgtggacatcacaagtgaaggagaacattgcttatgtgaaacttggtgtgcatatcttggagacaactggttcagccaaggatggaggcaagaagagcttctatgtatccagtgcactgcagaaggtcatggaggctgacgaacccacagccaggggtgaagaagaagacttgcgaagtcaaggttgatcgagttgagaagagatatggtgcctcaaggatcacgactaaagaacatgacttacaactaatgagggaacatctattgttatctggtgtaagtcataaggctcacgatcaagctcaagacatagagcaaggtcactataaggagtagtgtcaaagtcagaacctacacacaacccaaaagagcctacgttactttaaccct

SEQ ID NO: 29854 - DNA, 456 bp, Zea mays
  unsure (1)..(456): unsure at all n locations
agctngattaaagagatatatctcatttttatttagtctatgacgcgagctcttacgaacacaacccatcacatagaggagcaccacancatacacacgatctttatcctcgtggntctgccaagtaacacttgcctacatctcacttgtggcgtcccaatggacgaaggttgcacccaaccccttttaagtgatccgatgatcaacttgaatatcatggtcttttcctttcaatgttttcccatttgtgaggaacctttacnatttggagcctctcgcccttacaatagatatcaccaacacagcaccgagtatggttgggaagagcaacacccacaagactcaaatttctatcacaactccccacacaagtnactacttgagctcttaacacatcacatggagttcgcacctacatggatctcatattactatcacatgaagctaatgcccgag

SEQ ID NO: 29855 - DNA, 425 bp, Zea mays
agctttgaacatactaagcacatgcttttaaaaatggtaaccggtaaacctagtacctgagtgaagccgggcgcggactttatccctcatgcgacctgagactgggtctcccatgctagctatggtgggtacaagtgcggtcactgcacggcggcagccggggtcagtggagcattgtatgccaaggcggtgaggcctggacgcggatggggaatcgatggggacggttgtcttgtgtggggtcggagtaccctgacatgacgtgtgtctaagtttaccttgcaaggttaaaactcgattcgaatcgtctgcttctcgcagctaatgagactgcttgattccttgtactgcatcgagtaagaagtgaaacgtggattatatgagataacttgttggttgaactaattgattgttaccatgtatgc

SEQ ID NO: 29856 - DNA, 457 bp, Zea mays
  unsure (1)..(457): unsure at all n locations
agcttcgagaagaagctctggttgcattatgtnctggcagaaggatgtgcagccagtgtggagaaaacttcaatgtggcctccattgatattgagggagaaaatggtggagctccaatgtacctgcctccactattgcctccgccacagtgtgaatcgaagctaataaccagagcagatgatactgaagaagtggtaaagaaccggctacgtgtgtaccatgatctggtaggttccggttgcctaagattgccttttgatagttttcgcttgctcagtagtttttaaaatatctattcatgcaacctgaatacgcaatttgtggtacttgtagtgaatgagtttgttgttgatatagatcagctagactatttcttgcattaaaaaagccctatatatctattatttgtacatgtgaaatattgtaaatcgcattgcattttaatactgctttttaa

SEQ ID NO: 29857 - DNA, 422 bp, Zea mays
  unsure (1)..(422): unsure at all n locations
agctngaaggtgaatatgttacctatgatctttatgacctcaatgcttgtatttagtacgtgacgaattcgtgattgcaactggagtcattgcttgctgctatttttctttggttgtcaccagagcagagacccagtttggtgcatatacattagctgaatattggcactttaacactgtcacttattggaggattatntttcgacgatgtttgcaatggatgcaagaatcttgcccgtcatttcatttcatcatttgttcttagttcttaccattggagaaacataaatacatatatagtgccataactactatgtaattgacaaaaaaaattctttcatctgacacacacaccacataagatgacaggtgtggctattcctagatgtacagtaaaatgcagcacatatgtccttttctca

SEQ ID NO: 29858 - DNA, 392 bp, Zea mays
  unsure (1)..(392): unsure at all n locations
gaactcatacatactgatgtgtgtggaccaatgagtacgacagctaggggaggattccaatacttcataaccttcactgatgattttaatagatatgggtatgtctacttaatgaaacacaagtctgaatccttagaaaagttcaaagagtttcagaatgaagtagaaaatcaacgtggcaagaaaattaaagcactgcgatcagatcgtggtggtgaatatttgagtcatgagtttagcaatcatctaaagagttgtggaattgttccacagcttacgccgcctggaacgcctcagaggaatggcgtgtctgagcgacgtaatcggactttattggatatggttcgatctatgatgagccagtcggacctatctttgtcgttntggggata

SEQ ID NO: 29859 - DNA, 391 bp, Zea mays
  unsure (1)..(391): unsure at all n locations
taaagggtcataaatctatgtgtctacatacataccactagttattcccgcgtgactaagaaaaccctaagttacttattaacttagtttctttagcttaatgttcttaaatcttgcataatcatgacatacatgttcattgcatttcgatagactgtaatcttgctgacggagagtacatcctcgtgccggagcaaggagctgctcaggaggtagccccagatccagcacccgagtttgcaccagaggacctgccagccactgctttggaaggcaagccccggttttatgcataacctgttatttatgctattttacttcacttaatgattgtaggtttgattatgcacttaggtgtangagttgnttgaaaccctagttgcatgacctc

SEQ ID NO: 29860 - DNA, 399 bp, Zea mays
agaaggagatgatatgaaactctgggtgcttgtattatctttgtaattcacattaactcaagctatcaatctacaatgatctacatatccaacattgacccaaggttatttcaaattattatgggtaaaactcatatcatctcgggaagatattgatgctgatggaaacaaagaactaatcccatgtcgaaaagtctatacctacaacatggaggaaagccaaaggatggtaacaattatgcttgtaagtgcaaatatcttaaattatcatttcttatgggtcttgtgtacttacatagaataggaagcacttaaagtgttcttatagttatgccaccattctttgaagatattcctcccatatggtagatggcacattcatcagttctatgctatggc

SEQ ID NO: 29861 - DNA, 400 bp, Zea mays
cctattcaccccttccctctagatgctctcaaaaatatcctcggatattgtttgatataccacttttatgatgaagaccattaattgtgcctccacctaaacctaggaaccacgcccgctcacaattgctcaataattaagtgttgaattggcgggtttgtgcgaaccggtttcattcaagaatctgattgatatttgatgcacattagtctaccaccttagatggagcttataagtcatactcttctctcccattcatgagcttcttatagagttcccatgtctcatagagtgcgaccaacagtcagctcatataggtatgtttgtctaagaataccctataaggagttggagaatgaaaccctaaccctaactagggttgggagttgtattaatagac

SEQ ID NO: 29862 - DNA, 411 bp, Zea mays
tgtcaagatgcttcataccaacatgggcaagccggcgatgcctgagccatcctatattagtcttagcaattaagcaagtgtctagttcaacttggttatcattaaaatcaactaaatatagcttggccatttaacactcccttaaatgctattgaaccatcacttcttctaaagacagtaacacctatatcaggaaaaagacagttgtagcccatcttacataattgagaaatataaagcatattgtaatctaaggaatctacaagataaacattggaaatagaatggtcaggtgatatagcaattttacccaaatctttgaccaaaccttgatttccatccccgaatgtaatagctcgttaagtatcttcatttttctcatatgaggagaacatctctttctcccttgtt

SEQ ID NO: 29863 - DNA, 482 bp, Zea mays
  unsure (1)..(482): unsure at all n locations
atcttaagtcaccgcagctgcagctatggcgngtgatcccttattttcccttttctttcgccgccatggtggcattatcttcaaatgactctaaagatagcgacagcgttagttagtcgcaagagaaaagtcgcagttctgcgactgcgaggggagtagagcagtatgtcagctatacaacatctatggcatgtgctctgctcctccactagattaaccccgttgtgtatttcggattctgttttcttggagtttttggttccaggcttccgaccatgttttgatcccataaattctcctccagcctccgagcaactgagtccatcttcgtaagtcatcaaccccagccagacattgaagcattagaaaactttaatagtttctagagatatggtgatgattaatgtcagtttttttccttctttgacggctattagcatggtctttgcttgagattatgttctctctttcaaaacgatatg

SEQ ID NO: 29864 - DNA, 400 bp, Zea mays
  unsure (1)..(400): unsure at all n locations
tgattagcgagagagatttgtcgtgttcttttgagctcttgctcttggattgcttctttctttctcatttgttcttgtgatcataaactcatttgtaaccgaggcaagaaacaccaattgtgtggtggtccttgcggggaagttttattcccgggttgatttgagaagagaagctcactcggtccgagggaccgtttgagagagggaaagggttgaaaaaaacccggcctttgtggcctcatcaacggggagtaggtttgcgagaaccgaaccttcggaaaacaaatcatcgtgtctcactccgcatttgctcacnaattgttttgcgccctctctctcggactcgtgtttatttctaatgctaacccatctcgtagttgtgtgtgtatttgtaaatttc

SEQ ID NO: 29865 - DNA, 460 bp, Zea mays
  unsure (1)..(460): unsure at all n locations
gcagctcngctcatctatgttgnggatttgcctttgaatctgtctaactcccttcagcccttctggcagcttcttgacttccatggacggcaatgggcccttgttccgaaggtatcttcatgcataaatatgctggatgaagtatggcttcnaaagcattaagcgtccctcgaccaatgatggcattgtacggataatccatgtcaacaatgtcaaagataacctgttcagaccttgtgttgtgaatataaccgaaggtgactgacattgtgattttgccaagtgccacaatctgccttactccgaagccacaaagagggtgtgtagcatcatgaatcttgtcctctggttcttgcatatgcctgaaagcctttgcaaatataatgtccgatgcactgcctgtgtcaaccanaacattatggactagaaatcccttgatgacacaagatatgaccataac

SEQ ID NO: 29866 - DNA, 404 bp, Zea mays
tggtgccgatggagaaacaaaaatccttgaaatcttggctgttgttctgtttgccgttgtcaactgttagctcggacggtactccgaagcggcaaacgatgttctgccagaagaatttttgggcagtctttgatgtgatcgtggaaacagccctcgcttcaatccatttggtgaagtattcgacggctacgaacgcgaacttaaggttcccctgagcggtgggcaggggcccgacgatgtccatgccccagcgctggagaggccatgtatgggcaatcagctttgtatattgcgaggggttgcctgaccgaggagagaacttctggcaagcttcgcatgaccttgtgacccgatttgcaacgcaaatcattgcgggccagtaaaacccttgtcggatcaccttg

SEQ ID NO: 29867 - DNA, 458 bp, Zea mays
  unsure (1)..(458): unsure at all n locations
gcttatgaaggttcttcatcctnactatgtgctagacngtgatgccacagccagcccatgctagtcttagcaattaagcatgcatctagaccggcctcctcttttgcaaaatcaactaaatagagtttgtcgtctagtacacccttaaaagctaatgaaccatcacttcttctaaagacagacacatctacatttgtaaataagcaattataccccatattacataattgactaatggacaataagttgtacccgagcgattcaattaaaaacacattagagatggaatgctcggatgaaatagctatttttcctagtcctttaaccttgccttgattcccgtcaccgaatatgattgaatcttgggaatctttgttcttgacgtaggaggtgaacatcttcttctcccccgtcatgtggtttgtgcatctgctgtcgaaaatccagcttgagccccc

SEQ ID NO: 29868 - DNA, 408 bp, Zea mays
  unsure (1)..(408): unsure at all n locations
tctaaagggagaacacattntgggactaacaaatgtttattttgagaaagacagggtttgtagcgcatgttaagaagggaagcaagttggtgtccaccatccacacaagaacatcatgacgaccgacaggccgcttgagctactccacatggatctattcggcccgatcgcttacatatgcatcgacgggagtaagtattgtcttgtaattgtggatgattattctcgcttcacttgggtgttctttttgcaggataaatctcaaacccaagagaccttaaaaggattcttgagacgggctcaaaatgagttcagcttaaggatcaaaaagattagaagcgacaatgggacggagttcaagaactctcatattgaaggctntcttgaggacgagggcattaaacatga

SEQ ID NO: 29869 - DNA, 437 bp, Zea mays
  unsure (1)..(437): unsure at all n locations
agcttctaagggagagcacattctatttcttacaaatgttcattttgagaaagacaacggttgtagcgcatgccaacgaggatagcaacgtggtgttcaccatccacacaagaacatcatgacgaccgacaggccacttgagctactccacatggatctattccgcccgatagcttacataagcatcggcgggagtaagtatagtcttgtaattgcggatgattattctcgcttcacttgggtgttctttttgcacgaaaaatcacaaacccaagagaccttaaagggattcttgagatgggctcaaaatgagttcggcttaaggatcaaaaagattagaagcgacaatggaacagagttcaagaactctcaaatagaaggctntcttgatgacgagggcatcaataagcatgagtnctcttctccctacactccac

SEQ ID NO: 29870 - DNA, 352 bp, Zea mays
  unsure (1)..(352): unsure at all n locations
gaccttgtgcagcttgtcgagcaggtaaacaggtgggaggagcgcatcacagcaagaatgtgatgaccacttcaagacccctggagctgctgcatatggacctcttcggacccgtcgcctatctgagcatagggggaagtaagtatggtctagttatcgttgatgacttttcccgcttcacttgggtgtntcttttgcaggataagtctgaaacccaagggaccctcaagcgcttcctcaggagagctcaaaatgagtttgagctcaaggtgaagaagataaggagcgacaatgggtccgcgttcaagaaccttcaagtggaggagttccttgaggaggaagggatcaagca

SEQ ID NO: 29871 - DNA, 461 bp, Zea mays
  unsure (1)..(461): unsure at all n locations
agcttcacgggacggaggggtgaaatgttttactgtccatcggtgcccgatcgaacggctaaaaaatagaggatggcgcggacaggctagttgggctccgtttcgttcggctttaaagataaggaaatgcggagaaaagaatagcggtgcgcgggaacatgagaattccaggcaaaagttaccagattttggtgccataaattttctaaaatgaacatttctataggatacattattgaagatgctcttctcaaccatctaaaaaactaaaacataatagtctctactatataaaacaacagtttccacgatntctaccgtcgccatgtttgttagggcatttatcttgaaggtcctcganactcttaggtgacaggatgtttctagcctatttttagtattacaggcactataccgacagcaccttctgatgaagcaaacataaactcggatacgaatgt

SEQ ID NO: 29872 - DNA, 245 bp, Zea mays
caattcacttagaagggtgagaaagagatgaagaaagtatgattgtgaaaaccaagcaacatgagcgacgaataacacacggatcactccctctctcaagtcactaatcactaatgatcactagtctcaattgtggaacttggagagattgcaagctttgattgtgccttggaatggattgctagctcttgtattgaatgtgaaggattggagtgcttgggtgaagtgaatggaggtgtgtgggg

SEQ ID NO: 29873 - DNA, 450 bp, Zea mays
  unsure (1)..(450): unsure at all n locations
agcttcgaaggcttcttatgattttgttcagcatcatcagntatgcacacatgatgattgtccgaagcttctgccttcgtgtgcatgcctatcgacaacttcggccaaagtctaccttcggtattagtcctgcaacgtatgggaaaaggtagaaaatagttattggtttagtgttttgaggaccttcggaagaagtagtccccgacaatacgtgagaccattacatttaaaaagctaggtccttgtcaataaaatacttattttgaaaattcatattatttaaaagctagatccttgttaataaaattgttcttttgaaaagtcatattatntaataaagaatgcgggtttccaagttttcagccaactagatccgtttaatgattaccactagctctaggggctttacacagggtgctgttatgggtcatgtgagcactaaattgagcg

SEQ ID NO: 29874 - DNA, 403 bp, Zea mays
ttgacgagtgcctcctagagcactcgacaaagaacctgacttagggacccgctggtggatcctttgccgagtgcaggcggcagacactcggcaaagaggtaacttctttgccgagtgtattaggagacactgggcaaagccgccgtctccgtcacccgtcttcgtgacggtcacttttctttgccgagtacccgataaaaagtactcggcaaaatactttaccgagtgcccgataaaaagtactcgacaaagaagcttttgccgatgtactgttcgccgagccctctttgtcgagtgcgacactcggcaaagagattgccgagtgtttttcagggtttgccgagtgcttcaggcactcgacaaagcgcccgattccggtagtgatcacaaggtttaaaaatgg

SEQ ID NO: 29875 - DNA, 447 bp, Zea mays
  unsure (1)..(447): unsure at all n locations
agcttgtgaagaatattgtggcctntgctgctgactccctctatcgtcattntgagtagagttatgaattgacctgacgtgcctcgggtgaaatcttcctccgaagcccctggtcatttcagagaacctgaatgcttcctctcttctttggcgaaagtcattgtcagctcgaatatactcatccatcttctggagcagcttctccaaagtctgtggtggcttcctggcaaagtattgcgctgaaggtcccggccgaagtcccttaatcatggcctcaatgacaatttcattaggcactgttggcgcctgtgccctcagacgcagaaaccttcggacatacgcctgaaggtattcttcgtggtcctgggtacactggaatagagcctgagcggtgactggctttgtctgaaatccttggaagctggttatcaacatatccttcagctt

SEQ ID NO: 29876 - DNA, 364 bp, Zea mays
  unsure (1)..(364): unsure at all n locations
ttagaaggctntttacttggttatgactcatacttttttcatatagagtcttcaacaaatccactggattagttgaggtttcttgtgacattgtgtttgatgagactaacggctcccaagtggagcaagttgatcttgatgagctatatgatgaagaggctccatgcatcgcactaaagaacacgttcattggggatgtgtgtcctaaggaatctgtaaagccttcacaagcacatgatcaaccgtcttctttcaaccaagcatcttcaccaacttaagatgaggaataggcttaagatgatgaaaatgaagatcaagaggatgagtcacctcaagagagggacaatggtcaatgtggagatga

SEQ ID NO: 29877 - DNA, 332 bp, Zea mays
  unsure (1)..(332): unsure at all n locations
agccttagagaagagagtgactttgtcttcttgagcacgannagcgatgaggacgacattattcgttgcagaacaacaaaccaggtcgtggcgagagccgtggctgtggcgcatggcgcgtgcttatcaattagttatcagcttatcatcacgtacggtcgggtcaccttatgattatattggtggcaacatgaacgtgatcctatctctgtgccaagtatctgctttcgaactggcgttatgtctaactctcccctatgtgatgacgccaggcgccacgttgcgggggcgaatatgctacatagatgccggcagatactcaatgccgttaa

SEQ ID NO: 29878 - DNA, 349 bp, Zea mays
  unsure (1)..(349): unsure at all n locations
cagattcggccctgcgagagaaagaaccaagaactaccgacaacagccaaggccagaaaccattccgcagaagtcgcaagagctaaatgtcgaacgacagaaaatatcataagccctaagaacatggagaacgtggaatactcacaaccgctcttgaccagaaacggatgtnaagacctgagcttggccgcacaacggagctcgctgaactgtcaggaaccgcacccgcgggtataccgccatctgatatatcacttagccttccatctgatgcaccaccaagatcacccgaggtctggctcaactgacgggcctcgccaagcgagagcaaggacccagccaccgaatg

SEQ ID NO: 29879 - DNA, 371 bp, Zea mays
tggcatttttttttttgtccgatatgataggccagaacaaggaacaagaggaatagaaaagcctccagaaagctaagggcgagacacacacttggaaggagtgggactccgattgttcgtcgttcgactccgacaacgaaagactcgccgtcaccgccttcaacaagtcggccctctttcccaatgagcatcacacctgcctcatggcaagggaaaagaaggtaagcactcgtgatactagtacttacgcttcctcaagtgatgaagaatctagcgatgatgaaatagactattcatgtttattcaaaggcctagatagaactaaggttgataagattaataaattaattgatgccttgaatgataaaaat

SEQ ID NO: 29880 - DNA, 422 bp, Zea mays
  unsure (1)..(422): unsure at all n locations
acaatactcaagcttctaaagggagagcacattttatgactaaccaatgttcattttgataaagacaggatttgtagcgcgtgccaagcagggaagcaagttggcactcatcatccacacaaaaacataatgacgactgacaggccactggagctcctacacatggatctattcggcccgatcgcttacataagcatcggcgggagtaagtactgtctagttattgtggatgattattctcgcttcacttgggtattctttttacaggaaaaatctcaaacccaagagaccttaaagggattcttgagacgagcccaaaatgagttcggcttaaggatcaagaaaataagaagcgacaacgggacggagttcaagaactctcatatngaaggcttccttgaggaggagggcatcaagcatga

SEQ ID NO: 29881 - DNA, 405 bp, Zea mays
tgcacaagcttccttttggccccaaatcaatgcacatgtttcatcggcgatactcttcaaatacataaagtcaccaacttgaaaagtaagtggtcttcatctttgatcagcatagcttttataacagtattgggaagtctccatattcagtcgaatgattcaaacttttctttatcctcaaccactaaagcatccccatagcatcttcggtcactaaactatacccaatttaacggtgtcaagcaacttcagccaaacaaagctttgaataaagccatcttgatactctcttggaagaagttattgaaggaaaactgagctaaagggagccatgagtcccacgaaccatgggacgatagcacacacactcacaacatattttcaagaatttgatatagcccttcg

SEQ ID NO: 29882 - DNA, 445 bp, Zea mays
  unsure (1)..(445): unsure at all n locations
agcttaagagactnntttcacggatcaagctcgttacgaataacgatctaccaccgcgaaaggcgctactgttgggtctatgcttcgtcgccgaacgtcttcaagggagaagcagctttcggctgaagctgtttgtatgagatggccgaaggttcctttccatgaagcttcgacagtataaaccgacttaaagatagaatgactntttagtccatgaaggtctgagtcaatgttgtaagcttttataaggggcatacttgtaattcctcacaggctgcgtcctgtgcctataaatagtgaacagtattccgttgctgttcacacattctggtaactgcaatcgcatattctggaattcaacctttttgcaaggcagaggtattattgtattcaatgattaaacataagaagtaaatataatataattcgtctatgggttatttac

SEQ ID NO: 29883 - DNA, 425 bp, Zea mays
ccttaaaactaagcttctaagggagaacatcatttgggactaaccaatattcattttgagaaagacaggaattgtagcgcatgccaagctgggaagcaagttggcatccatcatccacacaaaaatgtcatgactaccgacaggccgctggagctactacacatggacttattcggcccgatcgcttacataagcatcggcggtagtaagtattgccttgtaattgtggatgattattctcgcttcacttgggtattctttttacaggataaatctcaaacccaagagaccttaaagggattcttgagacgagctcaaaatgagttcggcctaaggatcaagaaaataagaagcgacaacgggacggagttcaagaactctcatattgaaggcttccttgaggaggagggcatcaagcatgagtt

SEQ ID NO: 29884 - DNA, 443 bp, Zea mays
  unsure (1)..(443): unsure at all n locations
agctngaaccgaggacccgcgtcaccggattatttcaatcgtgctcaccggagttcaagaacccgccggcgcacgtggaccgggtaagcctctgcaccatttcccaattcgttgcgcgcatggcctctacatcaccccgtggagcttctcgtgtaccttaattgaactataccgtcgtgggttggccggaacaggagccgccgacgacccccgccgcctgtgttcgtggccagggtagctccgaccacctccgtcgccgacccgcacaccgacgtgaccgtcgtgacctcccggacgtcactgaccaccccgccggagctctgctgccgccggtaagcctcgccgccgtaacctatgccacgggtactgtttaagtcagccagggagcgcgggttagatntcagttaagtccagggggtcttgtgcaatgtcagtgacccatg

SEQ ID NO: 29885 - DNA, 406 bp, Zea mays
  unsure (1)..(406): unsure at all n locations
tcggcatngaaaacagctntttagtgcttccggagatgtctgaagataagaaggctgctaccgagatgaagctgagtctcgatgaagagaagaatctggggtttcttatagcaatgtcgaagaccaatatagaaaaaatcaccaaagagattttagaaagtttgtctgaagatactgatgacagcgacagttatgatgtggatagcggcggtgaagactccgaagatcgcccctggcgaccaagccattcagtttttggcaaatcaggtatcaaagaaaatcatgttgccaacatgaggggaagatacttccgggatttatccattgtgagggtcgacgaaggaaagataacttgcccggcccctgaggagaatgaaagtcgagtggtccgaagcttttgaaagct

SEQ ID NO: 29886 - DNA, 403 bp, Zea mays
ccagcaattgaaggcaagccccggcttatatgcataaccgtattattatatgctactttactacacttaatgcttgtaggattgtaatgtgcacttaagtgtatgagttgcttgaaacctctagttgcatgaacttacgattcctttttgagatgaatactactatgctatgtcgagtaactgcttgctaatcaagatctcggtagaagtcgagtgatttttctagcactcgcgcgaggtcaagaattgattgtattcatcttgataacgggatctatgttagtctatggacatggatccagggaggatgccttgaccatgagacgggaaaaggaactaacgattaatgtgtggatacctgagtcaagcttttgaacgtactaagcacatgccgggaaaaatg

SEQ ID NO: 29887 - DNA, 412 bp, Zea mays
tgaatacaacttaatatagcttctctattattgcattttcatatttattacctgagcattcatggttatatatggttatgtatagagaacgaggaagaaataactgttgaagaggaagagactactccatcaacagaaaatccacctgccaggaactgtttttactttgacatctgtggaatagagcccgactctcctacaacacaaggcaagccccggtgcatttgccacctccttgctattttaaactctttatcacttgaatgatgcattaggtgataggagttgggtgctaaaccaattgttgcattttctcccttggatctgtttaccattccttgattacctgttttcttaaaaggtttttctgatgcttagtcctactttagaaaaacaaatgttttgttttaaa

SEQ ID NO: 29888 - DNA, 459 bp, Zea mays
  unsure (1)..(459): unsure at all n locations
agctntagttctgctaactcggttggtttcatgcggtatggtctctttacgatgggtgctgttccaggaattagatctatgtanaactccacttctctttctggtggcattcctggcaattcttctggaaacacgtccatgagttcttctactactgatatactttccgttgttagattgaacatcattgggtcgctggcgggtggctgtgcctggcaagagactgactttccctgctggtcggtgaggaggactgtcttgtctgcgcaactgataatgcctttgtgtttagttagccaatccatccctaggattacatcaattcctttagatggcaagacggttaagtctgccaggaatactaccccacttaaaaggattctgacttgggagcattttagctggcatangaggtcggaccctgtggttcgggtgaccaacggaatctctagaggagta

SEQ ID NO: 29889 - DNA, 380 bp, Zea mays
tcagcgaccaagtgatctagctctttgggttccacgaatttgaatactctgagcatctgcttggtgaaggcaagtgtcctctgacccattatgtcccatttactttataatacactgtcccgcatactatgaacaacctaaggatttactagctttctatttacctggtccttgattaccttttgggctactatggttagcttcatgctagcactttactttaatcaatgaacatgatgagatacaatgatgatactatggttttattctggatatgatgatttacttgtgacatttaagggggctcgagtggtttctcgagtgcctctccgtaaggacctgttcgttgagagaccacccgggataacagtgcaaccatg

SEQ ID NO: 29890 - DNA, 460 bp, Zea mays
  unsure (1)..(460): unsure at all n locations
agctnganacananacttatgttccgttttcctcacaaatgttaagacaccatgtaaaacaagggcttgagtataacagtggcaaactcctattttttagatggcagcaagagcacgccgcgggcaaaatgagcaagttcccccgccaccaccccaggcttcgacaatgcaggaattaatggctcagcagaatgaaattttgtgatagttggtgcagcgccagctctagccccagcatttcggtggcgggcaacaaaagtgcccgcaagcagcagccacataccaggagtttctgagcactcaactgacgttgttcacaaaggctaaggacctgctagacgccgatgtgtggctcagggttgtggagtctaagtttccccttctcacgggagcttgccctgatgatgccaaggctcacttcgccgcccaacagctccggggacctgcaaggacatggtgg

SEQ ID NO: 29891 - DNA, 384 bp, Zea mays
  unsure (1)..(384): unsure at all n locations
tattgcatttgcagatatatagtgctcagatgggaactcttttgggaccccagttcacccgtccgtcacaatctggacagacaccaaacaccaatgaaacacaggtatagttttgtagtatatttactttcatttacaattataatcatgcattgttttatttggttgtagggttctgagaccggacaaggaaatccacagatggacatacagtggtcgatgccccctagaggacagattcttcctcctccacaaccaggtatgggatattggccgccaccaccatggggatatcctacacatccaatggcgccttggggacgccccccatggccaacacagccacnttcgtcatcagcagtgagttcctgaatttaatgctag

SEQ ID NO: 29892 - DNA, 395 bp, Zea mays
tatgaagattcttcatcccaacatgggctagtcggcggtgccttagccaacccatgttagtcttagcaattaagcatgtgtcgagttcagctctatcaaaatccactaagtatagctgaccctctaacacacccttaaatgctattgaatcatcacttcttctaaagacagtgacacctgtatcagtaaaaagacagttgtagcccatttgacataattgagaaacagaaagcaagttgtagtctaaggaatcaacagaaaaacattgcaaatagaatggtcatgagatatacaattttacccaatccttgaccaaaccttgatttcatccccgatgtgatagctcgttgggatcttggttttctcattgaggagaacatcctttctccctgtat

SEQ ID NO: 29893 - DNA, 445 bp, Zea mays
  unsure (1)..(445): unsure at all n locations
agcttcaagtgatatgcagcttcttgttgttccattcccaggntcaacttctccatttcttggcataacataatgtcagaagtctgccactacattagctttgcctgggtgatagtgaatcttcaattcataattcttaatcagttcgagccatctcctttgtctcatattaagctctaactgggtaaaaatgtactttaagctcttatgatctgtataaatatgacaaatatttcccagcacataatgacgccatatttttatgacatgaaccataacagctaactccagatcatgagttggataatgttctttatgccggcgcaactgccttgaagcataagctatcactcagccttctcgcattaaaacacagcctagaccactgcctgatgcgtcacaatacacatcatagggcttttaatgtccggttgagctaatacca

SEQ ID NO: 29894 - DNA, 375 bp, Zea mays
cttcgcggagaagagatggtcccaggtcccaatggggggctatccccaaatatccttcgcaaaccaccgcgaagatggctgcttgcgagatggaattgggactgaggttgtgtagctccaccccgtaaacgtgcagaatcgcccgcataaaacgacttgccggcactccgaacccccgctcgtgaaaggagacgaagctcaccacataccccggtggtggggacagggcggctccgctcggaggggccatccactccggctgcgagtcaccggagagtgggcgaagcaaaccatcagcaacaagggcctccaggtcatccaccgtaacggtggagaaaggccacgggtcgcgcggcgaaacaatggtcacccggt

SEQ ID NO: 29895 - DNA, 456 bp, Zea mays
  unsure (1)..(456): unsure at all n locations
agcttattattactgttagatgccatcaaatataacccttaggacagaacccactcctagttgagagttgtagtgcaaagtggcccatttacacaacttttgattatttttgtctaaagcatagcctttttatttttgaacctcaatttcctagaacaggctatagtgaccaatgacaacccactgtaatttttacagaatttttggagaaagttaaatcatggttgtagttcaaacctacactagaattcataaatagaaaataaagaaagggaaaatgaatgatggaaattactgtcatcctaaaacccttgtaaattgtccactgaaatatacacaaggaataccaatccactatgcttatccttaacaaaacctaaacctagagtgatacgcataaaccactaanaaccacgtacgaccaagaaaccctangttactcattaacttagtttt

SEQ ID NO: 29896 - DNA, 419 bp, Zea mays
  unsure (1)..(419): unsure at all n locations
agcttncttctgaatttccatgtgctgcactttntcccattntttccagttgaagtcttcggactttgggagatgatctcgtaattattccggctgtgttgtggtgctgctgggctttatcgtctgtaaaaaccctgtggatactgcaaagtgcaatcaaagaagactgggcctccgatcgcagtatgcagatagaaagctggtcaatgattggtcgttacaccgaatccgcagatgtgccataaacaagcagaaggtgatctgatccccatgccatctcatgatgagatgcaacttttaacagaataatgttagcctaattcacatcattaaggtacaatgatgccctaaggctcaccaacaaaaaaacatattctttggatatggtatataatatatacgcgtggcgtggtacgtgc

SEQ ID NO: 29897 - DNA, 357 bp, Zea mays
tcacggatcttagagccaccctgcaacccattaaatatgatgtcaaagcacatgtttctggaccaatgcagagatgaaacttcagtatgtcacaacattggactgtgaaattactcacaacagcaatgcccagccatgcgtttgcaagttgtgtaagtgtatggtcttcatcaatttgttgcatgatcttcaattgcttctcagcatagtctgaacgatgcatcttgatgaagatctggacattcaatgcatgcctgtaaccaagtgaaagtcccatcaacaaacagctctagtttgatggacattggatgcaataaagatgttgtttatagcaccaggcttcacagtgaattactg

SEQ ID NO: 29898 - DNA, 418 bp, Zea mays
agcttgtgaaggttcttcatcctcacatgtgctaagcggcgatgccacagccagcccatgctagtcttagctattaagcatgcatctagaccggccttttcttttgcaaaatcaactaaataaagtttgccgtctaatacacccttaaaagctattgaaccatcacttcttctaaagacagacacatctacatttgtaaatagacagttataccccatgttgcataattgactaacagatagcaaattatatccaagagactctactaaaaacacattagatatggagtgctcattagaaattgcaattttacctaacccttttaccttgccttgattcccatcaccgaatataattgaatcttgggaatccttattcttgacgtaggaggtgaacatcttcttcttccccgtcatat

SEQ ID NO: 29899 - DNA, 401 bp, Zea mays
tgtggcgccatgaacagagctccaccattcttggtgctagttctagagaaagggttataaagtatgaacattaattagtacctgttggtgtatccaaagagtatgaaaggtttagtatcgattgttatattcaactggtactaaattcttcacattaatcttttttatagttaaaatcgatactgaaattaaaggatgtaagtcttttctgcagtagtgaaagcaaagctgagtgcctgagtgtgagcttgtacacacatatactatacatgttagaaaaatagacatacacgacatattgagccggatgacaacaaaatatgctatttcattccaaggaaatataacagagaagcgcaacatagatgatgttcattgcgcaatctagaacaccatttttt

SEQ ID NO: 29900 - DNA, 401 bp, Zea mays
tctcagcgctcccagaggagctatgactaggctatgatcgatctgttgaggacgggaaaagggttgcccaccgtggatgcccctcaggcggctctgacggttcacgcagaggcctccggagcattggacgagctctggggatttacgcgtggatctgttgaggcaactgggaaaactgcccgtctctgggactagcttcatagccgtgacgcgggcttagtcactggcgaccgctggcgcactgtgtgttccgcacagacgtgctctgaacgcaaccccgagtgtattcctgcgacgaacacgtgggaacttgctcttgccgtggttcaacagcagattcgaccgccataccgtgcgcatcatgtctaaaccactgtgcacggtttatgacgtggtccata

SEQ ID NO: 29901 - DNA, 396 bp, Zea mays
tcgcatctctgaactaactcggctgcatcgttcttcgccgtttgtcaatagaatcctgatctgaaaaccttcccgactagtgttctggatgccgcgtgtactccacactgccctgcatggatttcctccagaagttgctttccggtggacgggagaatgcatttcatgaggacgcctgacgcgcccctcctgtataatacctccccaatgagggtatagtgagccgattgtctggcaatacgctctgccgaattcttgtcatctggttcttcctcattctttatatacttaataatcggctgcctccagtcatcagagtctgactcgggttgatccatgacgttgcactcttctgcttgattcatcgagacactcggctgcaggatttcttgcacg

SEQ ID NO: 29902 - DNA, 410 bp, Zea mays
tggatatcgtgtacagcttcattccgaggccgaaagtccctgtgactgtattatacatggaaaacatgttagtgtgttttgaggaccttcagaagacggaggcccccaacagtagcccctcgcagtattaatttgttataataataaattcaatctgcgatgtgaacgaacgtcttaagccgaaggtccgacaaaacaccttcccttcgctagaataacgaaagtcaatgacaaacggggctcgccaagttgcaaagcgtttggcatataaatagaaacccacagctgcagcatttgacgtaccatttctgctgtttgcgttattctcttcaaattttaaccattgcttaccagctcttgcttgattttcgagcttcagttaaggacgtgcttgctccatgtctgacgag

SEQ ID NO: 29903 - DNA, 412 bp, Zea mays
tgaccatcgatgtctcgaagctcggaaatggatcgcagtctatttttgatgtgcaacgaatacaaacagacacgagcaaacatatacatgcattagaacattacactatagtagataaaatattataaaagcgagcaatataaaatagagagctcttctacagttacgcaagaaaaagaaccgcgatagtcgaagctacggtcaaggggttagcgtgtttacactaagcaagtattaattagaatatttaattcgaggtaactatattaatcactatttaagaaatataaattaaaactacttagttttgactaacttactgttttaattgtggatgattaaataaataataaattaactgacatgagtaattataagcgaacgatttaatctcgcgcgcggataatgtgtg

SEQ ID NO: 29904 - DNA, 448 bp, Zea mays
  unsure (1)..(448): unsure at all n locations
tatagattaccgtcctctttatgctgtaactatcaagaacaagtattctttgcctcgtattgatgttctttntgacccagtggtcggggccaaggtattttccaagatagaccttcgctctggctaccatcagatcaagatacgagcaagtgatatntcgaagacgacattctcaaccagatatgggctatatgaattcttggtgatgtcattcgggctgacaaatgcagcaacatatttcatgtatctgatgaattctgttttcatgccggaattggacaagttcgtagtggttttcattgatgatattctggtgtactcaaagaacgaagaagaaaatgccgggcatttgcatgtagtgcttcaacgtctgcgagagcaccacctttatgccaagttatccaagtgtgagttttggctaaaggaaatcaaattcttgggtcacact

SEQ ID NO: 29905 - DNA, 412 bp, Zea mays
  unsure (1)..(412): unsure at all n locations
tctaaacggagaacacattttaggactaacaaatgttcattttgtttttacaggatttgtagcgcatgtcaggcaggaaagcaagttggtgtccatcatccacacaagaacatcatgacgaccgacaggccacttgagctacttcacatggatctattcggcccgattgcttacataagcatcggcgggagtaagtattgtcttgtaatagtggatgattattctcgcttcacttgggtattctttttgcaggaaaaatctcaaacccaagagaccttaaagggattcttgagacgggctcaaaatgagttcggcttaaggatcaagataataaaaagcgataacgggacggagttcaagaactctcanattgaaagcttccttgaggaggagggcatcaagcatgagtttt

SEQ ID NO: 29906 - DNA, 437 bp, Zea mays
  unsure (1)..(437): unsure at all n locations
tacttctggccatttctcggcagacagatagctctnttgtgtcaggcaggcagtataagaagtcatcttcattccttccattgaatattactgcccncttcggatattttagttcctttgcataatggatggcttcatgagattcttcttcaaatagcttcttccccgaagcatgtcgtatcatgtaatcacgcatgctggcaggtgcttccgggatggcggtgtcagtttcttcaactaatactggttctggaatttttattgcttcggcttcaaaaggttgctccttgtagggctctgaaggcccagcttcagcttcagcttgttgagccgaagcttcagtagaagcttcagcaacttcaacactctnttttggaaatgtgcttgaagacttaattgtcttcaagacgtctagtacatttaccattcttttcctt

SEQ ID NO: 29907 - DNA, 406 bp, Zea mays
  unsure (1)..(406): unsure at all n locations
taganaaatctggtgtgaatctgcgataatacccagctagtctaataaaactccggacttggtgaacagatgttgggggtttccactccagaatatctttgaccttgctaggatctaccacaattcctttagctgataacacgtgccccaaaaattgaatatcttccagccagaacgcgcacttgctgaacttggcatatagctggtgttccctgaggcgcgtcaatacaatccgtatatgctgagcatggccctcttcattcttagaatatatcaagatatcgtcgatgaagactaccacgaatttgttcaactcgggcatgagcatcgagttcatcaaataagtgaagtgggcaagagcatctgtgagcccgaaagacatgaccagatattcaaacaatccata

SEQ ID NO: 29908 - DNA, 480 bp, Zea mays
  unsure (1)..(480): unsure at all n locations
cccggatctctaagcacctgcngctgcaacttactaaaattaatcctgcttttatatatgatcaacacgagaattcaagacaatataatctatntttaagttcatcacttccgtaccttcagactgttgtatgcaagggctgtctgtgaggtcatcctttgacatggcagagaggccagcttcaagcttcagaaatcccatatttttggccatctcccggcagacggatatttccttgttgtctaggggacagtataggaaatcatcttcatccgtgcaattgtacaccaaggcccccttcgggtatttcagttcccgagcgtagtgtttggattctacaatttcttctacagatagtctttttcccgaagcatgtcgaataataaagtcaagatattccgacggtgcttcgggaataggagatttagctntttcgggcgcatccttcttctctagagccatgccagtatcttgagattc

SEQ ID NO: 29909 - DNA, 406 bp, Zea mays
gcggatgaaggtacggcgatcatcccatacagctctattgtttattttggggagaacacaagggccacacgacaagaacttgccaagttacaattcacaagcaaaaggagattgccgaatctgaagcacggcagaatcagccgaagcaagtataacatactacttcatgctattcttcctatgtaccaaagaacgtgggcaaccaacaaccttcggcctttgtagcttcggcgagtcattctcaagcttcctgagctcagcttccattaccaccaccgatacaacccactcatacccgaagccagcagccacaagggcactatcttgatcaacaacagcgcgacttcccggaatagtccgaaactcgaacagtcaatatgcaatgttctataacctaagcttattt

SEQ ID NO: 29910 - DNA, 429 bp, Zea mays
  unsure (1)..(429): unsure at all n locations
agctttttgaaagctggactactgatttctctgagcagctntgtcgtagaagtactgaaaacatttgaaatctatcttcaccaacttatccccgaagcaatcataaggatgaatatcttcgtgtgggccgtgagaagccaaggtctggaacctgatgcgaaaagtttctgcaatatacacgaattgttatacgagacaaaaccctggggtaaggaacagtatcacaataatttctgctactacagtttcgtctctcggtccgggtcaagctgtcccgtgccaacctttcggaagagatggcccggcgactggatgacagaatggttttatgtgaagaatgacctgaaaacacgggaagatattaagggtataattatgcgccctttttggcaaagcttcggcctgcggaagccgaaggttgaaatgaac

SEQ ID NO: 29911 - DNA, 404 bp, Zea mays
tctccaaagttggcggtggctatcgcctaaagtattgtgctgttggtcctggcctgagtcccttgatcatggcctcaatgacaatctcattgggcactgtgggtgcctgggctctcagtcgcaagtatcttcggacatacgcctgcaagtactcttcctggtcttgtgtgcactgaaacagagcttgggcagtgactggcttcgtttggaaaacctggaagctagtgattagcatgtcttttagcttctgccacgacgtaattgttcctggccaaagagaagagtaccacgtttgagccacactcctgtctgccatgacgaaggacttctccatgacggtagtgttgcccccatatgaggatatggttgcttcatagttcatcagatattgcttcgaatctgag

SEQ ID NO: 29912 - DNA, 428 bp, Zea mays
  unsure (1)..(428): unsure at all n locations
agctngcattgcatatataaattttttgtattgcatctanggctngtctaacctagttgagataaccgccaacaaagcgagtgaaaaagcttaactcggatcaaacttgacaagtcttagtttttaagcttttatcacttaaaatcttatttactatgcaattgttggttcttggaatatgcatgaggtgctgcacttaggagggtatttaaaactcaaaacactcatgaaaacccctagtgcaaggccaaaatgcaaatttcaccattgcctattttctctaaaaattatctagcctatggcaaaatatcttgaaaattatgagaaaatatatgagggtgccaatacctgttccaacaagtgtttatttgtgtgattataagttgggatttggtttggtaaaaactagatagaataattcnaaaatt

SEQ ID NO: 29913 - DNA, 408 bp, Zea mays
tatgaagattcttcattccaacatgggctagtcggcggtgctgttccaacccaagttagtcttagcaattaagcaagtgttgagttcagctctatcaaaatctaccaagtatagctgaccctctaacactcccttaaatgctattgaatcatcacttcttctaaagacagtgacacctatatcagtgaatagacagttgtagcccatttgacatagttgcgaaatggaaagcaaattgtaatctaaagaatctacaagaaaaacattggaaatagtatggttaggtgatatagcaattttacccaatcctttgatcaaaccttgatttccatccccgaatgtaatagctcgttggggatcttggtttttctcataagaggagaacatcttcttctcccctgtcatatg

SEQ ID NO: 29914 - DNA, 367 bp, Zea mays
  unsure (1)..(367): unsure at all n locations
acgctgaaccggagactcgcgtcttcttattatttcaatcgngctcaccggagttcaagaacccgccggcgcacgtggaccgggtaaccctttgcaccgattatcaattcgttgcgtacatggcctctacatcaccccgtggagctccttgtgcaccttaattgaattataccgccgtggtttggccggagcatgagccaccgaccaccctcgccgcctgtgctcgtggccagtgtagcttcgaccatcttcgaagccgacccgcacaccgatgtgaccgtcgcgacctttctgacgttactgtacactccgcctgagctctactgccgtcgtaagccccaccgcacgaatctatgccgccggtact

SEQ ID NO: 29915 - DNA, 408 bp, Zea mays
tcctagtgctcaagccattgcaataacaatgaatgctatgttatattttaagaaacaacagacattgttatttttatgccattttgtatttataattattcggatgaatcacatacatagaaacgtacctaataagcctagctttggctgcagcacagtcagcccctccatacttcttatcaacgtcattaacaaaaagcttctttgtaggcctccttgtaggtgatgtgcacgacctaaaaccaattggttatactcaaggtacacaaacaagcaagtgatatgaattagaaataatcgaagaaatgaagtgtttgttgattcaaccttttctttgtagcactttgctaggtctaaagcattggataatttattactggtgaatccgcgggaggaaccaactcactt

SEQ ID NO: 29916 - DNA, 426 bp, Zea mays
  unsure (1)..(426): unsure at all n locations
agctntattattagtaaactctggatcgtcaatggtgtcttntggatctcctgatgccgtcactattcctctgcaagatntgaacccaaaataaagacgatcatgctaaaaccttttcctgaattggtttctgttcattcaattctcctaaaaaaaggttccggtgaataagactatgtatttatttggcagaatgcattttgcatccaatttttgtcattggactgttttgtacaagtatagtattttagctctttggagtttaacttttttttctttttgtcctgcgcaacttcgactgaacaaaccactttcattttgttgtattggccagctgtgcgccgtggaaggtctccacgaccaacagttgcagcaattggtgtcgtgtaccaagaccgtctcctcgatcagcgtcaagccctcctg

SEQ ID NO: 29917 - DNA, 406 bp, Zea mays
tggtgccgatggagaaacaaaaatccttgaaatcttggctgtctaactgcttgccgttgtcgactgttagctcggacggcactccgaagcggcaaacaacgttctgccaaaagaatttttgggcaatctttgatgtgattgtggaaacagccctcgcttcaatccatttggtgaagtattcgacggctacgaaggcgaacttaaggttcccctgagcggtgggcaggggcccgacaatgtccaggccccagcgctggagaggccatgtatgggcgatcagctttgtatattgcgaggggttgcctgaccgaggagagaacttctggcaggcttcgcaggaccttgtgactcgatttgcggcgcagatcattgcaggccagtaaaacccttgtcggatcaccttggc

SEQ ID NO: 29918 - DNA, 444 bp, Zea mays
agcttctaaagggagaaaacattttatgattaacaaatgttcattttgagaaagacaggatttgtagcgcatgccaagcagggaagcaagttggtgcccatcatccacacaagaacatcatgacgaccgacaggccactggagctcctacacatggatctattcggtccgatagcttacataagcatcggcgggagtaagtactgtctagttattgtggatgattattctcgcttcacttgggtattctttttgcaggaaaaatctctcacccaagagaccttaaagggattcttgagacgggctcaaaacgagttcgacttaaggatcaagaaaattagaagcgacaacgggacggagttcaagaactctcaaatagaagggcttcttgaggaggagggcatcaagcatgagttctcttctcccttacaccccacaacaaatg

SEQ ID NO: 29919 - DNA, 398 bp, Zea mays
ctgtcttgtttagtgtttccttgcccttcttggtggcagggttgatgttctttttgtgtctgtaacttttgtaaactgatatccccagtggcctcctatatgtgcgagtgtgctgtaaactgaaaaggtcaaaataaactgcttcttgccaggacaatgaaaagggcagacccagaggactgtgccttccaattaaactaccagaaaccaaaagaattactttctctaaaactatatgaagcaagaaactacggtctattctggagtaattgtatacgggagaccaatcccaaagttactgtcagcagtcctgctctcacatgcctctaggggtgcggaagcggaagagggtggtgggggattagacgggaaaatatcctatgcaatcacttatcctg

SEQ ID NO: 29920 - DNA, 449 bp, Zea mays
  unsure (1)..(449): unsure at all n locations
agctngtgaattctctatttgatgaattgtaaaagtgaagcggtgctaaggggtttggcggcctgcttatattcaagccacatttattgttgagaaagttgcttatctggctgatgcggaagcttaacccanaaacaatgaaattagagattggtggtgggaaagagattcaaatcaccgaacacagtggttggtgtgttntgcagttaccaaacgttggcaatgactccgcccccatgtctgatgcagatgctcgtgccttgcgggacgagctgagggagcaaatttgtgggaaatcttatagacgcatatctggtatcaatatatctgttatcactgatagattgcagaagaggactctcaatggggagctgggcctgagagcctttttcatggcagcatttcagtgtcttctattctccaatactgacacttgcatcacgattgat

SEQ ID NO: 29921 - DNA, 402 bp, Zea mays
ttatatgggaggaagtgcaggactcctttgtattgttatcatactggagaaagacagttctttgggcctgaattgattcaagaagcagaagaacaagtccgtataattcgagagaatttgagagtggctcaaaccaggcaaaagagctatgctgataatagaaggagaccactggaatttgaagagggagattatgtgtacctcaaggtgtcaccactgcgtggaatgaggagatttaaagttaagggcaaattgtcccctcgctatattggaccattcttgatctttagaagagttggggagatggcataccaactcgagttaccggatagtctatcggatgtgcataatgtgttccacgtgtctcaacttaagaagtgtctccgtgtgcccgaggaacag

SEQ ID NO: 29922 - DNA, 356 bp, Zea mays
  unsure (1)..(356): unsure at all n locations
gatgaggcgaagaacattatttgaaaagaagaaaatgatcgatggagaccaaacgacgaatccacctcttcacaaggttcgtcttttaaatccacttctcatatgtgctttgttgctaatgagagtgacagtgaaagcgaaagtgaggatgaggaggagcatgaaagtgatagtgaagatgaggatgatcttcaaaaattcttcgctcaactaagcaagaagaaccggatgagcttgctcaaactcatgaaaagagcggaagaacaaaaggaaatgcttcataagcaagaagatatcctcatcgaanaaatcaaagacttggagaagttgaccaaagagcatgagaagctaaagtg

SEQ ID NO: 29923 - DNA, 411 bp, Zea mays
tgaaaagacatattaacaaggaaagatcatattaacagttcatgttacgtttgcagatatggacctcagtggttttctccacattaggaaagctggaagagccttttgaactcagttttttgctaacagtggtgttatggtgaaaccgagttttgtgtgtatataccaacagctaaaatgtaaacacgacattatcatagctgagtacaggaataattatcttttatatcttattgtaaaatctgaaacagttctcctgtagatggttagcttgcattttacgctacaattacctcagatcacttcttgttgtatcttacaccaatttacgaaatttcttgatgcattttatgacaatctcatgcgctgagagatacattcgatctacattcgttattatgaaacagatgg

SEQ ID NO: 29924 - DNA, 335 bp, Zea mays
  unsure (1)..(335): unsure at all n locations
ctactaaacattaagtggctcccatctgtaccatgtgatatactcatatatgaattgattaaaatattcaagaacattccccattcattttctacccgtattaaatattgaacctgaccaagccaaatgagattggaggtctatgaataacagacctggataaatntggcagagccctccgactacagtggttacaatcacaacaagattggttggaccaaaccaagccttgggcangaatcgagggtgcctgcaacaagttagaccatcttctcttcagtaccaccaccgtaatcatggttggaaatgggaagaaagtgctgttctggcaccat

SEQ ID NO: 29925 - DNA, 403 bp, Zea mays
ttgcctcggtcggaccaataccagataggcgaacatgcaatgtgtgtggagagatggtgagagtagcgtgtaccctccgtggctagaggctggacggtggtgtatctgtgctctcggttggcgtgaacccggtctggtcttgtgaaacccggtggcgagttgacatatgcaagggttaagtgctacatatgttgtgtggttggagattttcagctgggtattaatcgatttggatcgccgttacttctcagatatgaagacttggtcactgccctgcaatctaagttatggatggaatcatagtgagcaaaaatcatgtcgtattggttaatgtgatgatgaaaatagactagatgcgaacaatgtctattaatacttaatctagcattaaaatgttgaaagt

SEQ ID NO: 29926 - DNA, 464 bp, Zea mays
agcttatgaagattcttcatcccaacatgtgctagtcggcgatgccagagccagcccatgttagtcttagcaattaagcaagtgtcgagttcagctctatcaaaatctaccaagtatagctgaccctctaacacccccttaaatgctattgaatcatcacttcttctaaagacagtgacacttatatcagtaaaaagacagttgtagcccatttgacataattgagaaacagaaagcaaattgtaatctaaagaatctacaagaaaaacattggaaattgaatggtcaggagatatagcaattttacccaatcctttgaccaaaccttggtttccatccccgaatgtgatagctcgttgggggtcttgggttttctcgtaggaggagaacatcttcttctcccctgtcatgtggtttgtgcacccactatcgatgatccaacctagcccccggatgcataaacc

SEQ ID NO: 29927 - DNA, 401 bp, Zea mays
cttcattcccacatgtgctaagcggcgatgtttttttcgcccatgctagtcttaactattaagcatgcatctaaaccggcctcttcttttgcaaaatcaactaagtaaagtttgtcgtctaatacacccttaaaagctagtgaaccatcacttcttctaaagacagacacatctatatttgtaaatagacagttgtaccccatgttgcacaactgactaacagatagcaaattataacctagagactctactaaaaacacattagagatagagtgctcattagaaattgcaattttacctaacccttttaccttgccttgattcccatcaccgaatatgattgaatcttgggaatccttattcttgacgtaggaggtgaacatcttcttctcccccgtcat

SEQ ID NO: 29928 - DNA, 452 bp, Zea mays
  unsure (1)..(452): unsure at all n locations
agcttcgnctatctgtctctgaagatcagctactcgagccatcctcttcttcttgcgctgcacctgttgctgaaggatctccaggttttggatctcctgatctacgtcatcctccggaggtgttggactaacagccttcctcttctggcttcgggcctctctaagagaaaggacatcctgattgagatccagcggctgtaaagtaccaacccctgtcgctgaagcttttttctgcggcatgacgaacgtgatgcttgccgaaagtgttcaagactcaaaaaatggaagtgagttcaccggaggtgggcgccaatgttggggacttgttctcaaatgctatgaatcaagaacaaggcaacacaaaatgttaaatgttaatatcattcgtccttcaaagcattatttccctaacgatataatgatttccggacgaaggttatgaatgacatacc

SEQ ID NO: 29929 - DNA, 395 bp, Zea mays
  unsure (1)..(395): unsure at all n locations
ctattcacccccccgctctagcgtacgtctcaatctggtatcatgagacgtacttcttcatctaagtgtactaacactgcccgaagagatggatctctaatggaaaggggactggtggtcaaccacaaagaaaaggagtccgtcttctacgagcctagagacgactagcctacagactcacgcatgagtcaaaagaaaagagaacggaagaagagaggtgcattaaaaagattatctactacgaaagcgatgccttcgtttctttaccgcacgacgaccactctttaaagaagaaaacggttagttaaaactattcattngattattcccgtattccgtacaattctaatgctcattngctatcaagtctactcgcgaaacccccccncccccca

SEQ ID NO: 29930 - DNA, 405 bp, Zea mays
taacatgcttgattcaagtgcatccttttcatttgcaagattatctatagaggttttcatatttgtcatttctttcttcttatcctctatagttatcttgactaaagatacttccttagtcaaggcttctagcatttcatctttattgaatagaaattcttgaagctctaggtttctctccttttcaaggatgagcaagtcttcttgagcgtcaagagttgcttttcttttatctagcttctccatcaatttagtaataacattatatccatttaaaccaaattctttaatcattttatttttcatggcaatttgttcatcatcatcatttgtgaagtcatcactaaataaagttaccttatctccttttgccatgaggcaagttggagtgtaagagtcgtcatg

SEQ ID NO: 29931 - DNA, 465 bp, Zea mays
agcttcatgaatgataccttctgtcttatgttcaagcagcttcagccgaagctgtttcttttccgcacgaccttcagcgacgaagcatggtcccaacagtggtctttccttaaaaagggaaactactctaaggccaacaaaaggcaaggggaataataagacatggagggtaggggcatgagcataataaaggatggagctaaagcaatgatcgtaaccaacaagggagagaatgcaaccaaggtcaggatagataaaacaccattctcaaatcgagatggaaaagatgatatttcataaggtaggcataagataacatcatggaaagatctagagattacaaaggtaagggaggtgaaaggcaaaaacacaccaaaagatagagttaggacaagacttgtaacgcgacagaggaaaaagggaacgaacaagagcgcgataggtaagacatcactcttgaaatga

SEQ ID NO: 29932 - DNA, 411 bp, Zea mays
ctaaaaatatcatgctgagtcagcctcaaggataaatgacgcacaaaagatttatgagggtatgaaacacatccaggagaaggaggaggccggaaaagccaaatgttacagaaaggatgatcaacgcattgtatggtccaacaaccgcatagtagagccgaagaataaagagatccgccagcgaatattagatgaagcacatcttagtcgctattctattcatcccggaagcactaagatgtatcaagatctgaaacaacattattggtggacgaagatgaaaatcgaaatcgcacgctttgtggcaaggtgcgacacatgtaaacgtgtcaaggccatacatatgaagactgcaggaccattacaatctttaccactaccaacgtggatatgggaagatattagtatgga

SEQ ID NO: 29933 - DNA, 394 bp, Zea mays
  unsure (1)..(394): unsure at all n locations
gtgtattgcttccacaagtatatacttgtccatcccttgtaagaatcacagtaaaacttagaccagtagcaacctgtgaaaagttaataagatagcatcagatcacgaatacttaattacagaggaaagatgaaagatcttaatggctcagaacaaaatctaggcagcctagtgaataaacagtatagaaaatggaatatagataagtgtagaaaacaattaagcctcaaaaagcttatcccaataacatatagatacatataaaatggtgaatgagtgtgtttattgttcaatagaaagctgatttaatatgtaatagaaagtatgaaactgaagtaccagcaacgatcaaaagataagaatcacttgccccnaaaagaanaacaaaagagaa

SEQ ID NO: 29934 - DNA, 410 bp, Zea mays
tgagtcaatcattatgcaaaggataattgatgctcaaaaggataatgatggcatgaaacacattcgtgaaaagataagggctggaaaagccaaatgtttcaaagaagataatcaaggtgttgtatggtttaataatcgcatagtagtgccaaagaacgaagaactccgccagcaaattcttgatgaagcacatcttagtcgttattctattcatcccggaagtactaagatgcaccaagacttaaagcaacattactggtggacaaagatgaagatcgaaattgcacgctatgtggctaggtgtgacacttgcagacgtgtcaaggccatacatttgaaagttgctggtccattgcagtcattaccaataccaacatggaaatgggaagacatctgtatggactttatcg

SEQ ID NO: 29935 - DNA, 451 bp, Zea mays
  unsure (1)..(451): unsure at all n locations
agcttaattctaaataggatccaatgatcttttgtacgaatcctatgtagcacagttatagctggattgtggctctataactntgatgcagatctttggacaggatgccacaaagattcgagagaaaatcgagttcaaacgttgactgtcaggccaactgaatggtttagtcgatggtacagtaacctgcttgggttcagagcacttcaccgccgtcgatcactcctccaccgcaatacgtgtcgccggcgttaggattcgtgctcggttgggtggataacattgcgagaggaaagatctttgtcgtcggtgggctggaggtcactccggtgactcaccgtcaccatctcctttctgttttgcggctaagcttgccgtacccctccctcgccggccgcacggataactctaccgccgtcgagctgtcgccgtacgtgccacgtgtttgtgc

SEQ ID NO: 29936 - DNA, 408 bp, Zea mays
tctacttccgaagctgcagcggccgaagccacaaatttgtttttcacactttctgacattgatgaaatgatgttgaatatggctgaggaagaaactgctgcagctcctgaggaaaccctggctgtgcctgaaaaaagagagaagatgcctagaaaagagaaggagcttgccgaagatgcttcggaagaaagaaatttcaactttcaaaatataattgggcaagagttgtctaaggctgaataagaagagctgaacgactatgctatatcttgcgggtaccagccaggggcgctgttcttcggtggcgttgctgaagagagtttacgatgctttcgggactgagttggggcgaaggttgtcagcactctatcaaagagtgttggcttcccgaagctcgaaggcgatctc

SEQ ID NO: 29937 - DNA, 476 bp, Zea mays
  unsure (1)..(476): unsure at all n locations
actcgcaccgggatccttaagtcacctgcggcatgcaagctngtgctctacaatttccacagaattgggatgaatgctcgccatcggcggagttctcatacaataacagctatcatgaaagcatctaaatggcaccctttgaagctttatatggacgaccgtgtctcactccgttaaatttgtctgaaccacgagaaagaatgtatatggttaactaaacagaagagaaggttcaacgaataatacataaattaaaagaagcccaagctcgccaaaagaattatgcagacaaacgactgtaacccttgtactttcaagttgaagattatgtctacctgaaagtctcaccaaagaagggtgtatcttattttcgggttaaagggaagcttgcacctcggcacattggtcctttttccattcttgaaagatatggaccagtggcataccgactcctattactcgaaacaatgtgtgca

SEQ ID NO: 29938 - DNA, 404 bp, Zea mays
  unsure (1)..(404): unsure at all n locations
tgngcttgtcttgtccttctctttcatgaaaatctggtggttcccttagaagcaatcaaggagtgacatgacttcgcagcctgctgcgctatcgactattttctcgatctgtggcaaggggaagttatcctatggacaagccttattgaggcttgtaaagtctatgcacctgcgccacttgccgctcttcttttgcaccatgaccacgttggcgagccatgtgggataagcgattggctcgatgaatttggcttctaataggcggtgcacctcagccttggctgcttcagttttctcatcggacattnttcgaagtcgctgcttttttgggcgcaccgaagggtcgatgcccaggctgtgctcgatgatggagcggctgaccccgaccagatcgagggcagacc

SEQ ID NO: 29939 - DNA, 454 bp, Zea mays
  unsure (1)..(454): unsure at all n locations
agcttctaaagggataacacattttatgtacttccaatgttcattntgagaaagataggatttgtagcgcatgtcaagcaggaaagcaagttggcacccatcatccacacaagaacatcatgacgaccgacaggccactggacctcctacacatggatctattcggtccgatcgcttacataagcatcggcgggagtaagtactgtctagttattatggatgattattctcgcttcacttgggtattctttttgcaggaaaaatcacaaacccaagagaccttaaagggattcttgagacgagctcaaaacgagttcggcctgaggatcaagacaattagaagcgacaacgggacggagttcaagaactctcaaattgaagacttccttaaggaggagggcatcaagcatgagttctcctctccctacacgccacaacaaaatggtgtagtgga

SEQ ID NO: 29940 - DNA, 404 bp, Zea mays
  unsure (1)..(404): unsure at all n locations
tcttttacctgtatgaatagaaggctgagcagccctttgatccctaactgcaccaaacttagtctcatatttagtaaacagtttatacaattcatttttgacatcaacataatatgtattgtactcacacccagtgcactctccaagtaaatgcaacacattaaaaaaacctctcatcttagctctagggtccagaatgaatgcatatgaatatagcaaaggtatgtcactccagtatttaaggaatttaagttgcattggaaacacaataattctaagatttaaatctctttcacatgctntcaaatgagatgcaatttccagaatatggtgaagaactagtggactagttggataataaacaccagacagaacaacagtagagtcatagtacagttctagaa

SEQ ID NO: 29941 - DNA, 381 bp, Zea mays
  unsure (1)..(381): unsure at all n locations
agctnggccctcatgtggggatccaattaggattagggggggaaagctgtgtgcttctagatatctcaataaaaatatcggtatcgctgatgagagtttttatctctatcgtatgtaagctccacatttatattgtgcaccttggttatgttttttaccttcctatattagttgttaggctattggacaggtttagaacctatatggcgtaactattttgtgctagagatagcaacacttagtcaaaactatagttgcatgtaatatagtttatttattgcataagttttgactaggaaataaatagaggtcataatttagttatatttntgactaattgaaccccacatacgtgtcaaaatcctaatagagagtacaggt

SEQ ID NO: 29942 - DNA, 404 bp, Zea mays
tgcacataacgaagctaaatgtttgctccatcgtggctcgttggcaccgacgagaatgcaagtatgtcgcgcttcgaatctgaaagggaaatagggtcaaaccttttctaaatgattttggtggttgaattgcccaacacaaattattggactaactagtttgctctagaatatacgttccacaggtgccagaggttcacaacaaaccaatacaaagttaaaagaaagggttcaaatgaaaggagcaaagaaaaccgaaggttgccctggtctggcgcaccgaactatccggtgtgccaccggacagtgtccggtgcaccagggagatccactccgaactgctcagcttcgggaatttggggagtcactccgctataattcactgaactgtccggtgcaccacc

SEQ ID NO: 29943 - DNA, 425 bp, Zea mays
  unsure (1)..(425): unsure at all n locations
agctngcatgacanaaccgtgaatgctatatatctgactcatcagaaaaattaacaaaattcactattttattacacacatcatgcagtgataagcggaacaaacctccgcagtcatatcctttaccaacaaaagtaccatgtttcgtcacaacacatttatttgactcaagaacaactttgtatccatctcgacatagcatagaagcattaatgagattcttcttgatagagggcacatgctgcacgcttttcaatggcaccgtcttttttgaagtaaacttcagaatgaccgtaccaacaccaagaacatgagcacgcgacccatttcccattaacaaggcgccagacctcccgacctggtaggaggagaacatagaggcatcaacacacacatgaatatttgcaccactatacattcaccac

SEQ ID NO: 29944 - DNA, 401 bp, Zea mays
tctaaagggagaacacgtgataggtctaaccaatgttactttctaaaaagatagaccttgtgtagcttgtcaagcaggtaaacaagtgggaggagcgcatcacagcaagaatgtgatgaccacatcaagacctctggagctgctacatatggacctcttcggacccgtcgcctatctaagcataggaggaagtaagtatggactagttattgttgatgacttttcccgcttcacttgggtattctttttgcaggataaatctgaaacccaagggaccctcaagcgcttcctaaggagagctcaaaacgagtttgagctcaaggtgaagaagataaggagcgacaatgggtccgagttcaagaatcttcaagtggaggagtaccttgaggaggaagggatca

SEQ ID NO: 29945 - DNA, 427 bp, Zea mays
tatatgatgaaattgcttactgtatagctgactattgctaaaaaagtcacatcttttacaaatatgaataccttttacaaatataattgatttcatagtagcagaaatataaccctagagcattgtgcatgtgcaccatcttggttattttgagatatgtataacaaaataaaagggtcaaatgtttggcaaataatagtgcagttcaggtgaggcaaagaacaaacctattgctatagaatagtgattgattgacatagagtacgactgataggtgatagctctgaggaacttagcatcatggcctttttttaccttatttgaccaaagttgcatgcttatatatttataattataattgatttcatagcagcagaaatataaccctagagcattatgcatgtacaccatcttgtttattttgata

SEQ ID NO: 29946 - DNA, 410 bp, Zea mays
  unsure (1)..(410): unsure at all n locations
ntggcatggcccactctttcatagtcggaaacactctgaaagcttataattcttgcactaagtccctagtgccaatatgctccgcaataactctaaattcagctaattcaatttgggttggaccctccggtgtcatgttgcacggaggtctggtctctccgaagatcaactctaacggactctgcaccagcttctccttctcttcgtcaactttgacgtagaaccattcagatttccagccaactgaccacttgcttcggtaactgatcactggaaattttatagtcttgcggtaggcaaaattgtagcagtcgaagttttcatgtagcccatctcctctagccttggtctgataatgaagctcgtgcactcggcagaaaccttcggcaaatggttccaacccttggctt

SEQ ID NO: 29947 - DNA, 347 bp, Zea mays
atatagcgctcattatgctctgtcaccatctacgaaagggccatcatattctcataagtgtgccacataggttacaagaacaaaaaacacaatatgaggctatcaaataagcactacataaaattcataaatacttctatgcataaatggaggatcagaattctggcttggtttcttcaaaaagaaaatatggcgctcaatatgttcactgtcgatcgtctggagaaagggtcatcatatcctcataagtgtgcaacacagttaagataacagaaaaggcaccaaaagagcaacaaaacaacaccacactgaattcacaaatattctctcatatatggatgatcaaa

SEQ ID NO: 29948 - DNA, 406 bp, Zea mays
tgccgagcgatccgcgaaccatggctgcagagacctaggcggtttttcttctccgatccagagactgtgcttagaacaagctcgagcagagttttttctggctcaataaaagagcgagccagagcgagccagttcagctcgcgagctggctcaaacaacaacatttttgttatataaatcttaattaacatatattataggtactaaatagatgattaatttatattttttagattactgtacaaaaataacttattttctatattatatgatatatatttattttactaatttaagacgtgtcacttaaattatttttgagactgtatattatattttggagactgatttcatgcttatggtcaggctcgttggctcgccgaaccgagccgactttttatgctcg

SEQ ID NO: 29949 - DNA, 393 bp, Zea mays
tgaaaacttcctctacttcagtagttctatattctatccttagtgggacgtaccataatatagattaatttcattgctatataaaatgctcaatagtgcatataactgtgacattaaccatatatgtgcactaatataaaataatttaatctaccctttgggttctaagaatgatgactcatttgccatcctcatataaggatcatcatttgtgaaaccctcatttgtgtttctaatgctctcttttctaagtgtttcaaaaaggtccttccaagcgctttcaagatgaattcacaatctatggatataagagtcttggttgttcaatcattgagtctaattgatcgaatcaagaaagatgatagggttcaagacacttggtggatgaaatcc

SEQ ID NO: 29950 - DNA, 399 bp, Zea mays
tgtgaagattcttcatcccaatgtgggctagtcggcgatgcttgtatcctcccatgttaggcttagcagtcaagcaagtgtcgaatgcagctctattaaaatcaactaagtatagttgtccctctaacactcccttaaatgctactgaatcatcacttcttctaaagacaataacatctatatccgtaaaaagacaattgtagcccattttgcataattgtgaaactgaaaacaaattgtaatctaatgaatctacaagacaaacattggaaatagaatggtcacgtgatatagcaattttaccaagtcctttgaccaaaccttgatttccatgcacgaacgtgatagctctttggggatcatggtttttctcggacgaggagaacatgcttcatcaat

SEQ ID NO: 29951 - DNA, 473 bp, Zea mays
  unsure (1)..(473): unsure at all n locations
atcctcttagtcacctgcggcatgaagcttctaagggagaacatgtgttatgtctatcttatgtaactctcgaaaaagatagaccttgtgcagctggtcaagcaggtaaacaagtgggaagtgcccatcacatcaagaatgtgatgactacatcaagacctctggagctattacatatggacctcttcggacccgtcgcctacctcaacatcgggggaagtaagtatggtcttgttattgttgatgatttntcccacttcacttgggtattctttttgcaggataaatcttaaacccaagggaccctcaagcgcttcctaagaagagctcataatgagtttgagctcaaggtgaagaagataaggagcgacaacgggtccgagttcaagaaccttcaagtggaggagtaccttgaggaggaaggaatcaagcacgagttctccactccctacacaccacagcanaatggtgtg

SEQ ID NO: 29952 - DNA, 395 bp, Zea mays
  unsure (1)..(395): unsure at all n locations
tgccttcgcttcagtctatcattcgcagtccaacggggtcttgtttcgcgccaatgggaaaatcttcacagctgtcaagaaaatgctcctcgatgaaaaataggcagatggaccgatttattacctgaggcagtctgggcgcttaacacaactgagtgcagggcgactgggttcactcctttccgccttctatacggatcggaggccatgaccccgcaagaaataaagcatgggtccccgcgtacagtttcgtcagccgtccccgacatggacgagccaactccaaaagatcttattgacggagcccgggtcttcgccctacaggccctanacaaataccaagcccagaccatagcatggcgcgaccacgcagtcatcccgagagagttcagcga

SEQ ID NO: 29953 - DNA, 425 bp, Zea mays
  unsure (1)..(425): unsure at all n locations
gcttaacggatgatgaagccgaagccggatcttattggatactaatgaagcttgaatagacaactgtagaaaaaactctaaaaactcttgtataacctttcgtaagaataatgtaattaaattttactttgggaactttgtccataccttgtaatatattcttacctttccatcaatgtataaagcgctctgatgtgaacaaaattagcatttttgagccgaatgcgaaaacaccttcccttcttttcgttcacaacgaagcatataaactgcttctttntcttattgctgaagccttgtctttaaagccaaagcaactgcctgtgtcatgatgatgatgatcctatgtatgtctaaatgaatgttttatgaatgccaatgtatgatgtaatgtatcatgccaatgaatgtccaacacacgcata

SEQ ID NO: 29954 - DNA, 417 bp, Zea mays
actcaagcttccgctgttcttgttcgaagctttctgactgggagagaagcttttatttaattctgggattttagcttcagcttgtgccaataagccttcggttgtctgaagctcgaagtccttcttttcaagagcagttgattggtcttttattttgctttctaaactctcaattataacttcgtgttttttatcttcaaaatcttgctgcattttcaaagctttactcaacagcatactctgcatacaaacaaccttgattagagaacatcttcgttgttaaaaacaataaaagttaaagaaaagttgcttaccttgaaattggaatcgaatacactaccgatgatgtgctatcgtcggtagcggctaatgtccgtctcgagcttcgggaaaccaatactctttgatagagtacca

SEQ ID NO: 29955 - DNA, 484 bp, Zea mays
  unsure (1)..(484): unsure at all n locations
actcgcacccgngatcttaagtcacctgccgcatgcagcttataaatggatgatatagtgctattttaatggcttcataaatgaacttgtatatgttaagaaaccacctggatatgaagaccctagatatcctaaccatgcttacaggttgtccaaggcgttatatgggctaaagcaagctccaaaggcttggtatgagcgtcttcgcgacttcctcatcgaaaagggcttcaagatcgggaccgtcgacacaactctattcacaaagaaacataacagtgatattttcatttgtcaagtatatgttgatgacataatctttggctcaacaaatgactatcattgcaaagaatttggtgagttgatgtcgaatgagttccagatgtcaatgattggtgagctgacgtacttcctcagctctcaagtcaagcaaatgaaagatggtaactttctctcacaagagaattataccaaagacttgttc

SEQ ID NO: 29956 - DNA, 401 bp, Zea mays
tacataagatttgataaataatattttgaaaactatgatatatttttctccccctaaatatgtgcatttcagaaaacaacacttttgtactcaaatgccaaaagcacatatttgggtcaaagtatggagacaacttatatctaactattcatggggtgcagtgtgtcataaaataaacgtgatgctcatgacatagtatgcactcatcaatttactacatcttatgtttttattatgaattccccttttgttaattatttctcccccttttcaaaagtcttcttaccttcttacacttagttacataagactagaggtaagctttaatgcacaatttctccccctttgtcataaatctccaaaaaggatacaaagaatataaagggtagaaattatgatta

SEQ ID NO: 29957 - DNA, 444 bp, Zea mays
  unsure (1)..(444): unsure at all n locations
agctggacagtattctgcgactgctcctgtggaaccttcagggcaggtgcagctgctgtcttggttgcaccttccaaagtcagaacatgctatgcaataaggcttgatttcagctgcacaaataatattgatgaatacgaagctttgcttttggggcttcggaagttaaaggcaatggggataagaagggcggtccttaaaaccaattcccaagttatttctggtcatgttgacaagagttgtaaagcaagagacccgaagcttgagaaatacctggatacagttcgaaggcttgaagcttctttcgaagggttttctgtcaagaatattccacgaggagaaaatgagcacactgatctgctagccaagtcagcgacacangggcttgctttaccttcngaagtattctttgagacaataagaacaccttctgtggaacttctt

SEQ ID NO: 29958 - DNA, 407 bp, Zea mays
tggcttgaccacacgacaacatccccacccttatcacattttatggtttaacaacaacggtaagttcaaggtaacaaaaatagcaagggtgcatttttctattggctcttaccatgactttgctgatttcgatgtggtgagtatggatgcttgctctcttttactgggacgtccttgggagtttgatactgatgctattcaccatgatagatctaataaatatactttcatgcataagggaaagaaaattgtgttgcttcctatgactcccactgaaatggtccactttgaacatgagaaaaagactaatgctaagcaaaaaggtgttttgaactctgaaaatcagcaacctattaagttaaaaactcatactttgctagccactaaatctgatcttgatgagttac

SEQ ID NO: 29959 - DNA, 410 bp, Zea mays
  unsure (1)..(410): unsure at all n locations
agctctgagctaatgatcaaatgctcttataatatcaacgagctngatggcccctccacgtccgaagcacaatctgtcgcattcaaggcgacagacgataagaaggaggaatctacatcaagtagaacacccatcgacgcctccaagctcgacaacgaggaaatggcgctcatcatcaagagcttccgcccaatcctcaagcaaaggagggggaaggattacaagccccgctccaagaaagtatgctacaagtgtggtaagcccggtcatttcattgctaaatgtccattatctagtgatagtgacaggggccacgaccagaaggggagaagaaaggaaaagtatagatactataagaagaagggcggcgatgcccatgtttgcccggaatgggactccgacgagagctc

SEQ ID NO: 29960 - DNA, 388 bp, Zea mays
cggagagcatgtattgcatatacgtaggcttacacatatctgctctaataagtactcaagaatggaactgcgacctccttattctaaaaaaaaaggcaaatttagttattctttaaaatattttctatctctacagaaggccaaatgaaaccaggatcggggacaaaaagccttataattagctctattttagactaatcctattttgtccggcaagattttcgataccctttcacaccatacatctaaactccaactaggatccattttagttattataaatattatctatccccatccgaggtcagatgaaactatgatgggggataaaaaccttacaactctatgttagactcatcctattttacccaacaacgtatttgtttct

SEQ ID NO: 29961 - DNA, 349 bp, Zea mays
agcttgtggacccgtagcctatctagtgtgattgtcacctcacatgtcagtagttcacaatgtgctgcatgtatcttagctgcggaaatgtgttaccctacccactgaagtggtgccagagccacacattgagatataaccggacttatcttaccatgagtaccgcgtcaagggtttagatccaaaggaaagatcaacgctggcgaggtcaatcagaatgtataaagctcagtggagtcaccattcagcacaagaagttcatgggagactgaggattttctacgctctcgcttccccgactttctacccacgggaggccgtctgttaccacgaaactccacccccacct

SEQ ID NO: 29962 - DNA, 404 bp, Zea mays
  unsure (1)..(404): unsure at all n locations
tataattgagggattntatgctcaaaacttttggttattactctccaacccggaggtgcgtctaccagtgaacaacatgccaaattttttacgcagtgtaacgaattgcataaatacctacaccatatagtataattcgtatcagtatatatcataaactagatttaatgtgtttagctgcatggctgttggagggatcttatatttatgaaggaaataaaatattaaatacgattttttgtttctatgcgtgtaatttatttcctttcattgcaaattatttttcatcataaattcgtgtgcatgcatctggtaacagatttttacgcagtatatcgaattgcataattatttacacagtgtagcatatttagtctcagtatatatcataaaatggtccttac

SEQ ID NO: 29963 - DNA, 453 bp, Zea mays
  unsure (1)..(453): unsure at all n locations
agcttcaactccatctatgttatggattgctcttgagtcanaccaatttccttcggcccttctggcagcttcctgacttccatgaatagcgatgggtccttgatctgaaggtatcttcatgcaaagataagcagggtgaagaattgcttcaaaagcattgagggtgccacgaccaataattgcattgtaagggtattccatgtcaacaatgtcaaacacaacttgctcagttctagtgttgttgatgaacccgaaggtcactggcatggtgatcttgcccagtgctacaatctgtcttcctccgaagccacagagaggatgtgtagcatcatgaatcttatcttctggctcttgcatttgtctgaaggccttagcaaatatgatatcagctgcactgcctgtgtcaaccaagacattgtggaccagatatcctgtgataacacaagagataac

SEQ ID NO: 29964 - DNA, 407 bp, Zea mays
taacttgtggactggaggcttcgaccttacgacgctcaagttctatcggtacacttcttgaggatcccttggaccggtgggctaagacccacatactcttcacctgcgccactttgatcttataggttgacgatgatcccatagccttcattacggttagcggctaacccccttaacaggatcatggatatgcacttggtgaaaatgttgtcgactctggtcttgactaattaagagaggatgctcgatgccaaccggacatgtgcaacagggaagggtgtagatagaaaaggaaagcatagatggattaacgatagaaaatggagaccacccagatacctaactctatggcacttatcttgtaaactgatgtcattgcggaccaagggccacaacacattaactct

SEQ ID NO: 29965 - DNA, 449 bp, Zea mays
  unsure (1)..(449): unsure at all n locations
agcttcagacanaatcttatgccaatgcttatgattatcatatatcttcttttttatcaagttaatcactgtcctattactagactcggcatgtccattggcctgagcataatatggagatgaattaagcaacttaattctatataattcagcaaattcacgtaccttctttgacttaaaagaagtcccttgattcgtagtcaaggtctagggaatgtcgaatctatgaataatatgctcagttatgaactcaattacctccttgtgtgtcatgttcttcagagcaacggcttcagtccatttggtaaagtagttagtggcaactaacacgaaccgatgcccctttgatgatgaaggataaatttcccgaataaagtctaatccccattctctgaaggccaacgctngatgataggatgtaattcagctgcagagaccaactgtatgtc

SEQ ID NO: 29966 - DNA, 372 bp, Zea mays
gtttcatccgtagcttcagaatttgtcggagaccatatttatgggtaccctcaaggctcctaatgctcagctggtaacccccatcagcataaagctgcaaaggcctgatgggtgcgattaagtcagggatcggtccatacgagggactcgatcacgcctcgcccgagcctggcctcggacaagggcagccgaccccggaggatctacgtctcgcccgaagcccccctccagcggggaacgtgttcccggctcgcccgaagccctgtcttcgccaagaagcaaccctgaccaaatcgccgcaccgaccgaccaagtcgcaggagcgtttaatgcaaaggtggcctgacacctttatcctgatgcgcgccctcc

SEQ ID NO: 29967 - DNA, 386 bp, Zea mays
  unsure (1)..(386): unsure at all n locations
agcttanagccatggtaagtagcatatgcaagtaaaatgcgaattgattctagcctagctacgggtgcataggtttcaacaaaatccaaaccttcgacttgtgagtatcccttggccacaagtcatgctttgttccttgtcaccacaccatgctcatcttgtttgttgcggaagacccacttgattcctacaatattttggttaggacgtggaactaaatgccatacctcgttcctagtgaagatgttgagctcctcttgcatcgccaccacccaatccaaatcttgaagtgcttcctctaccctgtgtggctcaatacaggaaacaaaagagtaatgttcacaaaaatgagcaacacgagatcgagtagttaccccttttgaata

SEQ ID NO: 29968 - DNA, 403 bp, Zea mays
tcgtctagctaccccacaactcagggcctcaccacggtggctcaccaacgcccagcgcccaccaattcacgcgtccgccaacggcgggatttttgcccttccgatttctaccttaaccctagcgacggcggcagattcagcggtggaagcacggggaagaagtgggcgagctccgcctttatccacagagccttcggagtcgagaacgtggccagcggctccggagaaagggggggagaagaccgcgctgcccgccatgctcgggattcggttgacgatggaattgatgaggtcggcccactggtcagtgccacatggacgcgggtgcggatgtgtgaccgagtcatggatagccactgacagaagagggcccgcaggtcagcaaagggaggaatccacaagc

SEQ ID NO: 29969 - DNA, 397 bp, Zea mays
  unsure (1)..(397): unsure at all n locations
agcttcagcagatcagccgaagcctatgctcttatgtgaggacatagcacaacagaaggtgctgttatgctctcaattatccgaagagcaggagaaaaccttgataaggtttttgttcaacaacaaagatgtttttgcatggtcagctaatgatctctgcggagtaaataaggatgttattgaacactcgctcaatgttgatccatccttcagagccagaatacagaggcttccgaaaatgtcagatgataaagccgaaggtgctcgtaacgaagtcaaaagactcctcagtgcaggagtcatcagagaagtaaagtacccagaatggctagctaacactgttatggtaaanaaggccaatggcaagtggcgaatgtgtatcgattttacagacctc

SEQ ID NO: 29970 - DNA, 406 bp, Zea mays
  unsure (1)..(406): unsure at all n locations
tctaaagggagaacacgtgataggtctaactaatgttactttctaaaaagatagaccttgtgcagctggtcaagcaggtaaacaagtgggaggagcgcatcacagcaaaaatgtgatgaccacatcaagacctctggagctgctacatatggacctcttcggacccgtcgcctatctaagcataggaggaagtaagtatggtctagttattgttgatgacttttcccgcttcacttgggtattctttttgcaggataaatctgaaacccaagggaccctcaagcgcttcctaaggagagctcanaacgagtttgagctcaaggtgaagaagataaggagcgacaatgggtccgagttcaagaaccttcaagtggaggagtaccttgaggaggaagggatcaagcac

SEQ ID NO: 29971 - DNA, 393 bp, Zea mays
  unsure (1)..(393): unsure at all n locations
catttgctatttgacccagtataatcgtatccctaacatcgatgcaagaaagnatcacgaacctcgtaacctgttaaagtcataaaggaagttcctctatacacttctggtgtatttcagaatatatctctggtgtacttcagaatattccaccgatgtgaactttaggaccggagatgagacatttcatcagtcaatgattcgcgctagaactggatttcgaaggcaacaagagatagtcatcgaaggacgtacagtaactgtggctcaactaagccagtgtgatgttccataatataactccacggtggattcatcccaaatgtagacctctcagcatagacggcagcggctgcggtcaccgatggagggtaaaccagcatcgagtaatgg

SEQ ID NO: 29972 - DNA, 353 bp, Zea mays
cctgaactgggatgattgccctttttaaagcattttccgatgatcgataacatgcccccttcttgtgccacatgcaacatgatgtatgatgattatgctatgcaaaatgatgtgatgatgttatgttatgcaaaatgatattttgtgccgaagatgcgcacattcctgcaatggggcacaatcttttgtatcaatactgactttttcattataagcctaccttaagagcttcttcgccttttacttcagcggaatcagcgtttatttttcgctgtaagttctgcatccgcttaagaacgtctttggaacttcttcgccttttacttaggcggcataagctctgcattccctta

SEQ ID NO: 29973 - DNA, 448 bp, Zea mays
gcttcgcggagaagcaccttgaccagatacgcactccaaccgaccgtatcgccggagcattcaatgcaaggatcgcctgacaccttaatctgacgtgcgcccttcagtcgatagaaccgaagtgaccgcagtcactttgccgctccactgactgacctgaccagaaaacaacgccacctgccctgctccgactgttgtgccactcgccagagtgaggccgacagcagctaaggccagcctcgggcgccgtagaaagctctgcctcgcccgaccccagggctcggactcaacctcgactctggaagacggtctccgcctcgtccgaccccagggctcggactccatctcgacctcggacgacggtctccgcctcgcccgaccccagggctcggactccaccttgacctcggacgacggtctccgcctcgcccgaccccagggctcggac

SEQ ID NO: 29974 - DNA, 404 bp, Zea mays
taaacagattaatccacaaaataccaagtgaacaacctggacgaatcgtggctagtcacatgggttgtccacaaggcttggcatttcgtcgaacggccaagcgcggagcgtgactttgacggtggctgcgataatacacgagtttaggggcttggcatatcgtcgacaccatggatacaaaaacagcaagggtagcgggatgtctcaccgagggtcgacgacgtcgcgagcgggtctgcgccaaaaacagcaaacgcccggcgagcgtcacggcgtgctgtcaaccgggcttcacgaaacagcgagccggcagcatgcggcttgctgcacatttttacgaacagccggcgggcaccacggagaacagcgaggagggggctccctgctgcggatcgtcactgcta

SEQ ID NO: 29975 - DNA, 434 bp, Zea mays
  unsure (1)..(434): unsure at all n locations
atgcaagcttattgtcttcccttaatgaaagaatgacgttggctccttcttgatgtctcgctttgcttgattataaaactgattcttttgagacaatagatgaataacttgggcatcacactgacgcttccagaagtagctgccgagtaatcttgtagtcggtatcggtgttttaaaggcaacgccgagcgattgaaagtcgacgtcagcattttagaggtaatgccgagcgatcgaacacgagatcagcgttttagaggcaacgccgagtggttgaaagccgacgtccgcattttagaagtaatgccgagcgatcgaacatgagatcagcgttntataggcaacgccgagtgattgaaggtcgacgtccgcattttagaagtaatgtcgagcgattgaatacgagatcagcgctttataggcaacgccgaatg

SEQ ID NO: 29976 - DNA, 404 bp, Zea mays
tgccgaggggacttcttctatcactgagccggaataccccgctcttgccggtgccaacggagaatccgttgaagtgttgaaagcaatgggacaggagaaagccgagtccgtcgaagcaccgaagcgttctgccgaatccaaaggaaaaaaccgtcgaataactagaactgtatgagtcgatagggctgtcaaaaatcctgagcttgccgcccgagccggagttgccgaaggtgtcaaaaatttctgcaataactcccaaaagatggaggatggctagcgtgttatatgttggcctacagtcaacaagggtgccaacttctgcctctgcagaggtgcccagcatgagcgagaacaatataaaagagttcgctgaaactgttacgacccgtgttgaagctgaagtt

SEQ ID NO: 29977 - DNA, 399 bp, Zea mays
  unsure (1)..(399): unsure at all n locations
ctctacactgcagcatgcgagctntacttgataaagaaaaggagattgattttaactttagtgggccgaattccggtccaggcggtccaacaccatggagaacagcgcgcttgcgcacgcgcgcgcgcccgcttccaggcaattttgcaaaatggccttgcgtttcaggctaattcgaaacaggtcctttctctattgtagtgagtcactgacgaattgcacaaatgcccttggggttccttttcttttccgcgataacccctgaccacccacgtttcctttcatcatggacaaagggcgtaccgggcatgaccggccacgaaagctcaaactctctaccggaggggtttcacggacctacaacggccccggaacgcacaccaatgtaaccccaacacc

SEQ ID NO: 29978 - DNA, 418 bp, Zea mays
aactcagctttcctaaagtcttggatcactctttttggtgatcagaatattatgtcttggatgcctaaagcctgaatactgaatctgtctaattctggacagcaaagccttctagtgtcttttgtccttagttaaatattgaatcaccttgagatgattataaatgatatgtagacaattttattacctttccagaaagtctaggatcaatttgtttggatgtctgaacctgtagttgtgaatttttgaaatcgcaagtctgaatctggccaacctggacagacctgttatttttgcacagttcgactttgctaagagtctagtcatattgagacgataataccaaagttgtagagcgtttcccaagatttccaaaatatatttggtcactatctttagataaatatctgaagagtta

SEQ ID NO: 29979 - DNA, 441 bp, Zea mays
  unsure (1)..(441): unsure at all n locations
gctntacttagttgattntgcataatataaggccggtctagatgcatgcttaattgctaagactagcatgggctggttgtggcatcgctgcttagcacatgtggggatgaagaaccttcacaagcttctaaagggagaacacgtgataggtttgactaatgtacaattcgaaaaagatagaccttgtgcagcttgtcaagcaggtaaacatgtgggaggagcgcatcacagcaagaatgtgatgaccacatcaagacccctcgagctgctacatatggacctcttcggacccgtcgcctatctaagcatatgaggaagtaagtatggtttagttattggtgatgacttttcccgcttcacttgtgtgttctttctgcaggataagtctgaaacccaagggaccctcaagcgcttcctcaggagagctcaaaatgagtttga

SEQ ID NO: 29980 - DNA, 405 bp, Zea mays
tgttcgagaagctgatggtggggtaactttgttacatttcttttatgtggaaaaggtattgagtcgctgtggttttagtgactgtgatcctgctccaacaccttatgaccccagtgtgctattaagaaagaatcagagaatagcatgggatcaattgacatactcccagatcattggctcgctcatgtaccttgcaagtgcaacaaggccagacatctcttatgctgtgagtaagctaagtcggtttgtgtcgaaaccaggagatgatcactggcgtgctcttgagagagtgttgcggtatttgaaaggtactatgacatacggtattcattataccggaaacccaaaagtgctggaaggctattgtgatgccaactggatttctgatgctgatgagctttatgc

SEQ ID NO: 29981 - DNA, 448 bp, Zea mays
agcttcttgtagctgctgccaataatgagaggtgaactacgttcctcgatctgacactatcttcttcggcacaccatgaaggcagactatccgtgacatgtataactcagctaacgctgctctggtgtatgtcgtcttcacaggtataaaatgggccacctttgttaagcggtccacaaccacccagatggaatcataaccggcccacgtacgaggtaggccaactataaaatccatcccgatctcatcccacttccactgaggaatccgcaatggctgcaacaatccggcaggcctctgatgctccgctttggttctctgacagctatcacagatggcgacatattccgcgatctctcttttcatggccataccaccaaaccttctttttaattcctgatacatcttctcacttccagggtgtatggagtaggctgtctcatgagct

SEQ ID NO: 29982 - DNA, 408 bp, Zea mays
tatgaagattcttcatcccaacgtgggctagtcggtgatgttagagccaactcatgttagtcttagcaattaaacaagtgtcgagtttagctctattaaaatcaactaagtatagctgaccctctaacactcccttaaatgctattgaatcatcacttcttctaaagacagtaacacctatatccataaaaagatagttgtaacccattttgcataattgggaaacagaaagcaaattgtaatctaaagaatctacaagaaaaacattggaaatagaatggtcatgagatatagcaattttaccaagtcctttaaccaaaccttgatttccatccccgaatgtgatagctctttggggatcaaggtttttctcgtaggaggagaacatccttttctccccagtcatgt

SEQ ID NO: 29983 - DNA, 452 bp, Zea mays
agcttgtgggtgcaatcgtgtgtatatttacgactcccttagtaagtggttacaagtacatattaatagtcccaggaactctctaaccctagtgtaacaaacgagtcctatctttcctactcttaagctaactaatcatcacacaaaatttagatgcttatccaggtcgctcccgcgtggaggtatgttttggtcccttgggccgctggtcgcgggccatcctgtgttgcggtatggttgaaatggtgatgataacaccgacataaatagcctttctaccgagatacgtcatggagctaggagccattttacacgagacaagccatgagttacaaataaaataagaggctggtattattgtctagatcgactttggaaagacatacaatacagaacgtggaatcctcaatccggtctcgtcccttcgatatatggagagagctgatcttatc

SEQ ID NO: 29984 - DNA, 404 bp, Zea mays
tgaagccatggtaagtagcataggcaagtaatatacgaattgactcaagcctagctatgggtgcataggtttcatcgaaatccaaaccttcaacttgtgaatatccctttgccataagtcgggctttgttccttgtcaccacaccatgctcatcttgtttgttgcggaatacccatttggtacctacaacattttgattatgacgtggaactaaatgacatacctcattccttatgaagttgatgagctccttttgcattgccaccacccagtccggatctcttagtgcatcctctatcctgtatggctcaatagaggaaacaaaagagtaatgttcacaaaaatgagcaactcgagatctagtggttacccccttatgaatgtcaccaaggatggagttgacg

SEQ ID NO: 29985 - DNA, 430 bp, Zea mays
ttctatgcttatatgtctcatccgcggacgatctgcactggctgggcttcgatacctagtgctttctcgagaatgagaggaaactatatcaccatacccaattgtgttccaactcctattgcgctagctatcaccattatactacgatgcattcttattataagtgctgcagcagagacatcgctcttgctatacctgtattagaaactgacactggtgcatcttgtcatctaccagcggagatcgattctttgctacaagcttcatgttcaaatctgaaagattgtgtgatccagcacacccttgacgtttggcatcagatgcataaagactactgtgaagagtttccgtgctcatattctgcgatgcagtcaatcagtggacacagtgctctctgtgagttgcttatacctcccagaactatcttttc

SEQ ID NO: 29986 - DNA, 401 bp, Zea mays
tcgtattattccggtctactgcaatgccgactttagtccgttgtttcctgttcacacattgtactacagaaatattgttaaatcctgtttttgaggaccttctgacgccgaatgtccccaacaaatataacaccaaattaacacaattcatcactcattaattcacaattcacatatatgttcatcagtttaactcataaggatacttgcatagaccaaattaacacataggcatagctcattaatcattagtttaatttatagaccatagacaccttacatatatataacatgttcattaattattatgtaaatgatatgtatatagtttcgctttactggaataatggagctcgtttagctcgcgaactggctcattaacgaaccgagctggctcgtta

SEQ ID NO: 29987 - DNA, 450 bp, Zea mays
  unsure (1)..(450): unsure at all n locations
agctngngagcttaatggtgttgttatgaaggtggatgatanaagctccacgcaatggatcgggggaatcgacaggaatttgtcgtcggatctcgggcgccaccgtggaaccgcacttcaccatggatggtgctgtccgtgcgtcaatcgacagtaagatctctcccatctgattcactatgacctgaactttattttcgcgcaatagtaatcgagaaccttgcttggatttatgttgcgcgtagttgccgacaatggcgccaccgtggaactgtgcgggatccgccgtggaccctgtttggggaagaagcccctcctgccgtcggatccacgttgtgcgcactggattagatctaggggtaaccaaatacgagccgttgattagaattgaacggatgtgattcgagcacgcgtacaccccttcgcgtgatcgaatacnggccgtggatc

SEQ ID NO: 29988 - DNA, 403 bp, Zea mays
gttggctgtcttatgcggttagcaaatataaattttatttcttttttaacttggtcaaaaagtctaagtgccatgtgtgtgttgaatcaaaacaaccccgcaagcctcacaaggctgctgatgcgaggagtttggcacatctagaacttgttcattctgatctgtgcgagatgaatggaattttgaccaaaggtggtaaaagatactttctcacttttatagatgactccactagattttgttatgtgtatctcttacaaacaaaagatgaaacgttcaattattttaaggcctataaagctgaagttgagaaccaacttaagaggaaaataaaacggttaaggtctgatcgaggtggagaatatttctctaatgtgttcgatgagttctgcgtggaacatgg

SEQ ID NO: 29989 - DNA, 430 bp, Zea mays
  unsure (1)..(430): unsure at all n locations
agctggccacgcggcgtacgtaccgttatccgagatggngaagacatgcgatctgagggtgcgctggcaagcctacggcggtctccggtgagggcacgattgccgcttaacccaatcgcgccaccgatgtaacttttgccacgatacccagtcactttaccgcggccaacgacgaccggtcacgccgcgatggcattcttatcgtcggcggagatgtcctgatccataacgcgatagtaactgatgacgatgaacagcgcctctgatccaatgcacaacttgactgacagaccaacttagagcccatttttctctcaatcttccatagtgacacaggttaagctctgcagcaaacttgtagagtatggtacccactacaaacttgctatggcaatcataggtatatttacacaggatcatgctcaaaacc

SEQ ID NO: 29990 - DNA, 292 bp, Zea mays
tgagaagcctacccaagtgtatgaagatgatgttttattcaactggtcttcaaagtgtgatgaagcttttggacaattgaagacattattaaccactgctctggtattggctcaaccggacatcacctagccctttgatgtatattgcgacgcatcaagccggggcctcctctgtgtgctaatgcataaaggccgaccaattgcatatgctgcaaggcagatacgccgacgtgaggaacattatcctactcatgaactgtagatatctgctgtggatcataccctaaaaatt

SEQ ID NO: 29991 - DNA, 446 bp, Zea mays
agcttataggttttctgagatgactatggtcttcaaagaagaatccaccctatgcatgtcagatcaatccacaactctagtcagagtgatgacagaggaagccagtttcagaggccacaacatagctcacagtcttcagggcaaaaacagagctcttttatgccatcaactccaaggggcagaggcggcaggggcttctgaggaagatatatatggggatcaccgaggaaactctattgcttattctgtggtgaagacaagggccacactacaagaacatgccaggtcaccattcataagcaaaaagagattgccgaagcagaagcgcggcagaatcagctgaagcaagttttacatactacttcgtgctactctccctatataccagaatacgtgggtaatcaacctgcagcttctgttgcttcggcagtcattcacaagcttcc

SEQ ID NO: 29992 - DNA, 398 bp, Zea mays
taccgcatttgaagcatgagcccttccccttggctttggtcttgcttggctgccccttgcgacctttaagcgccgtcttgaagcgcttaatgatgagggccatctcctcatcattgagcccggccgcctcaacttgcgccaccttgcttggtagcgcctccttgctccttgttgccttgagagcaatgggttgaggctcatgaataggaccgttcaacgcgtcgtccacgtatcttgcctccttgatcatcattcgcccgcttacaaacttcccaagaacttcttcgggcgacatcttggtgtacctgggattttcacgtatattgttcaccaaatgaggatcaagaacggtaaatgaccttagcattaggcggacgacatcgtggtccgtccatcgc

SEQ ID NO: 29993 - DNA, 408 bp, Zea mays
  unsure (1)..(408): unsure at all n locations
acattccggactaccatgacgaaggacttcgccatgactgcaatattacacccttacgaagatatagttgcttcgtaactcatcaaaaactactttggatctgagtgcccattatacatggggagctgaggtggtttgtatgatgggggccatggggtagcctgcagttctgctgcccaaggagaagcatcatcaaaagtaaaagcatcatgattaaaatcatcataccatccatcctcgttgaataagccttcttgacaaagctccctgtattgngccttcaatcttgttcatcttgagcaagatgacgcacttcttcagtggcttcatcgatcttcctttgaagatcagccagtcgcgccatcttctccttctttctttgtacttgctgatggatgatctccatgt

SEQ ID NO: 29994 - DNA, 411 bp, Zea mays
tgtgaagattcttcattccaacatgtgctagtcggggatgctttatccagcccatgttagtcttagcaatgaggcaagtgtcgagttcagctctattgaaatcaactaagtatagctgaccctctaacactcccttaaaagctactgaatcatcacttcttctaaagatagtgacacctacatccgtaaaaagacaatcgtagcccattttgcataattgagaaacagaaagcaaattgtaaatctaatgaaactacaagaaaaacattggaaatataatgggcaggcgatatagcaattttacccaatcctttgaccaaaccatggtttccatccccaaatgtgatagctcgttggggatcttgggttttctcatatgaggagaacatcctcttctccccagtcatgtgg

SEQ ID NO: 29995 - DNA, 458 bp, Zea mays
  unsure (1)..(458): unsure at all n locations
cacctgcggcatgcagctgatgtcccactagatggaactatcttatctcatgcattgggggagttggcacacaaacaataaggagaacgagtatgtgctagagatggagtttgacaaggacaggggaaatgcgangggaaagggaaaggagaaggattaagagaacattaatctactcatttttgttgcagcttttcttgatccaagatacaaatcatctatgtatatgaagattattgttgacgagatatttggtgaggataggggccaattactttgggcagctattaactcttgtgatcgtgagctgtttgaagaatacaacaatatttatgctccacctgaagtaactgatcctagtgaagcacagggtggtagaggaggcaaacttanagaagtaattgccaagaggatgataatgaccaactattctagtagcacaacaaagtcagaacttg

SEQ ID NO: 29996 - DNA, 409 bp, Zea mays
tcatcttttgattttaagagatacacataacaaaatctagtatattcatcgataaaagtaataaaatatcgcttgcctcctttagtcaatattccgttcatctcacataaatcggaatgtattaagtctagtggtgccaaattcctcgcctccgcagccttgtgaggcttgcgaggttgcttatattgcacgcacacctggcacttagaacctttgactaaatcaaatttcgggattaaatttaaatctgctaaccgcgagacacaaccaaaattgatatgacaaagtcgtgaatgccaaatatatgactcattcgaaacaacattgttcacagacttattacacgcatcatgcaaagataagcggaacaagcctccgctgtcatagccttttccaacaaacgttccat

SEQ ID NO: 29997 - DNA, 418 bp, Zea mays
atgttcattttgagaaagacaggatttgtagcgcatgccaagcaggaagcaagttgcactcatcatccgcataaaaacataatgacaaccgacaggccactggaactcctacacatgggacctattcggccccgattgcttacataaacatcggcgggagtaagtactgtctagttattgtggatgattattctcgcttcacttgggtattctttttacaggaaaaatctcaaacccaagagaccttatagggattcttgagacgggctcaaaatgagttcggcttaaggatcaagaaaattagaagcgacaacgggacggagtttaagaactctcaaatcgaagggttccttgaggaggagggcatcaagcatgagttctcttcttcctacaccccacaacaaaatggtgtagtgga

SEQ ID NO: 29998 - DNA, 407 bp, Zea mays
tcgtctatctgtctctgaagatcaactagacgagccatcttcttcttcttgcgctgcacctgttgctgaaggatctccaggttttggatctcctgatccaggtcatcctccggaggtgttggactaacagccttcctcttctggcttcgggcctctcttaaagaaaggacgtcctgattgggatctagcggctataaagtaccagcccctgtcgctgaaggttttttcggcggcatgacgaaggtgatgcttgccgaaagtgtttaagactcaaaaaatggaagtgagttcaccggaggtgggcgccaatgttggggacttgttctcaaatgctatgaatcaagaacaatgcaacacataatgttaaatatcaaaaggcccttcgtccttcacatcattatttccct

SEQ ID NO: 29999 - DNA, 436 bp, Zea mays
  unsure (1)..(436): unsure at all n locations
gcttctnagggagaacacgtgatatgtctaactaatgttcaattcgaaaaagatagaccttgtgcagcttgtcaagcanggaaacaggtgggaggctctcaccacaccaaatatgtgatgacgacatcaagacccttggagatgctgcatatggacctcttctgacccgtcgcctatctgagcatangaggaagtaagtatgggttagttattgttgatgactcttcccgcttcacttgggtgttctttttgcaggaaaagtccgaaacccaagggaccctcanacgcttcctcaggagagctcaaaatgagtttgagctcacagtgaagaagataaggagcgacaacgggtccgagttcaagaaccttcaagtggaggagttccttgaagagggagggatcaagcacgagttctccgctccctacacaccacagc

SEQ ID NO: 30000 - DNA, 425 bp, Zea mays
gtgacactgtatacttgtccatcttgctgccgatggagaagtggacttgcctgccctcactgcagaaggactgtctgcctttggcgactatgagctagcactggactccgaatcgacactgattattttgccatactaacttctgggaactcttttgcgatattgtggatactgaccttgccttggtccactaggcaaaggactcatatgtgactaaggtgaactgaaggttcccttgagtctcggggaggaggccaaaaatatctaacccccagctatgacctggccatgctaggactatctgctttgccaattgcaaacggctgcctgaacctagagacaactattggcaggcttctcacgacctactgagtctatgcatggcgcatattatatgtctcctgctagaaccttagacagatgac

SEQ ID NO: 30001 - DNA, 428 bp, Zea mays
  unsure (1)..(428): unsure at all n locations
agcttctaatctaataacttggtgcctttnttatattctttagaaataaaaaaccgagtgaccagcacgctgcataggcctttagtctggccaagcttcatgcagcctaacaaacatgcagccaatcgtagcaggacgcgcgcgcgcgcataggcgtgtcgtccctccgtacgctcgagcttggagctagtagcacaattccgactaatgcatgcagtccggcgggcaatcatggccgccgccgcatgtggcggcctggcgggtgcatgcttcgccggagttaggtgagactagtgctgcgaattgtgtcgggtcgggccagcccgacccaaactcatcgttcttcgtgccaaacgggttcgggtcaggaaagcttaaacaatttntgggccgtgccgtgccagcctgaagtataaaacagtggtcta

SEQ ID NO: 30002 - DNA, 407 bp, Zea mays
tcggctctgggatggaggacctttcttatgatagaacaaatggaaataaagaatgggagacgaagctggaagacaagggacttcagctgaacatgttgacgaagctcaagtatgatgatgactgaaagaggctaaagaccatatagtctccaataattcatgctaagattatatgtagttaccagggacataaatgtacttttacccgggctgtgtcccgcgcctataaatagatgaacagtaacaccgtactgttcacgctggattgtaatcactctcgcgctattctcgtactttcaccttctggcaagccgaaggtacaaatgtaatatgaatattattgatgtttattcatgcttatgggatacgagaataaatagattatcggtgcatgattattattacct

SEQ ID NO: 30003 - DNA, 457 bp, Zea mays
agcttatctcctattatctcaatgttatagaaccaaagaaggaaggctgccctaccatgaggagtacagggagcataaatattcgtgagccaccaaacttgatttatcaattttgagtggaatgaaatcgtgtggccaaactcattttgctatatcatctcagcatcaaaatgagaacttttccaaatttttaaaaatcccctagatgcaccaatagaaggtccaaaagcaaatttgtccaaggatctattgcagaacttacgaatgtaggagtcctcaaaagaatcttttttctttcctggatacacaggatgccacagttggtctccataatactattcctcaaagaaatccatttgttgtcggaattaattctccggatattatgcgacagaattttaaatcacgacgcgagttctgatgtgaattatccattatatgcaatattcattatact

SEQ ID NO: 30004 - DNA, 409 bp, Zea mays
tgtggactttggcaaaaaaatagaaattaaataactcattttatcagacatgcctaatttatatgggcactgtaacaatgttaagtaccttttcaaacgagagggtgattggaaactataatgttgctcctgctgagtatgttcaggtatgacaatgccaaccatctttgccatagaaaatagagttgtgagagttttctttctcgaagtgccaataacccacccccacatagagaaacttccactactccaaaatagatcagtaaagacagttcaataaataggtcatcaaaataactttacaaggcactaaacaaaaagagatatatccagaaacaacagcttcatgtacctctcatgtaaggccgaatatttaagttgccaggttcatgtggatttaaaggtgcac

SEQ ID NO: 30005 - DNA, 420 bp, Zea mays
cgctgcagcttgtgtagcttacggccttacttgaatctatctgaaggctcggatcgaacggaggaggacgggaaaggggctggccatggtgtgtgctctctggcggctctggcgggttcggggaggtcgtcagagctaagggcaagctcggggaagttacgcgtggtacggaggaggcaacggggaacgcagccgaacactgggatgggcttttatagccgtggcgtgggcggggtcactggctggccggggcgcgcggtggtttccgcacgggcgtgctctgagcgtgcccccgaatgtcatcccgcgccgaacacgtgggagctcgcttctgccatggttcaacggtacgatttagcaccttaccgtgcgtatctttggcaagttcctgtgtacgggctcttccctgctccatatcct

SEQ ID NO: 30006 - DNA, 396 bp, Zea mays
tgaagccatggtaagtagcatatgccaataatatactaattgactcaagcctagctacgggtgcataggtttcaccgaaattcaaaccttctactcgggagtatcctttggccataagttgggctttgtttcttgtcaccacaccatgctcgtcttgcttgttgcggaaaacccacttggttcctacaacattttgattaggacgtggaaccaaatgccatacctcgttcctagtgaagttgttgagctcctcttgcatcgtcaccacccaatccgaatcttgaagtgcttcctctaccctgtgtggctcaatagaggaaacaaaagagtaatgctcacaaaaatgtgcaacacgagatctagtggttacccccttatggatgtctccgaggatgg

SEQ ID NO: 30007 - DNA, 439 bp, Zea mays
  unsure (1)..(439): unsure at all n locations
catgctagctngaagctggattatgcgctattactatgaggatcttgcggatagccctgcatacaatagtctcgaggtatgacaactgcatgtctggaaatcttataattagcaactcattcttttattcttatgccaactctctcacatatagggtttaatactacacaacgcgttgagagcgcataagaatgccgaagacgagagctatgaaattgctttcaacaacctaccatcagaggttattaaactgagaaacgatactctggacaaggataacattctgctcacattggtggacaagataaaagaggacgaatctgcctcaaggctcatgctgaagtccaaaaacgcgatattaaagatcttcaaaaacagctatctatagctaaagaagaacgtatactcgaagagacaaaacgagagtttactgatcaat

SEQ ID NO: 30008 - DNA, 388 bp, Zea mays
tgcgaacgagccgagctagttctttagcttagttgcttaacgaaccgaaccaagccaactcgtttactgagcgagtcagtttaagctcgatcgagccgagccaagctggctcgatatccacccgacggcacctactctctgtcaaatcagcaagtctttcaaccatgctgatctgtcctacgtgatagtattcgattcctctacgtaatcgaggggtatgtgattctaaattaaatctacaattagtggcggatccaggattggatcaaaggaggggctatatattaaagtatgattggcggagccactagcggccatcttgtggggtgagtgccacgacgacgtccttccaagcctgatgtactaacgtgttgccgcaggtctgcta

SEQ ID NO: 30009 - DNA, 462 bp, Zea mays
atccttaagtcacctgagctgcagcttgacttatagtctgaatgctctgcgagacaaatgatgaaatcttccacgcttgctcaacacggctataaatgataagacgacattatccttagttgatcttctagttcatgtatatagagctggagatatgactataattgtcgggggctataattaagggtaccctcaagactcataatctcagctgttaacccccatcatcacaaaactgcaaaggcatgatgggtgcgattaagttaaggctcggttcactcaaagaacacgatttcgcctcgcccgagcccagcctcgggcaagggcatgcgatcccggatgattcacgtctcgcccgaggcccagtcttcgccgagaagcaatcttggccagatcgccacaccgaccgaccgtatcgcaggagcatttaatgcaaggatggcctgacaccttattctgacg

SEQ ID NO: 30010 - DNA, 289 bp, Zea mays
ttcaatgggaaaatactgggttgccggccgaaagctggaaaataaaattcagggtctggaatttcattctgttgaaagagatcagaacacggccgccgatgtactgtccaaactccgatctggtcaaacccacgtcccacccggagtcttcgtacaagaaattcttctgccgagtattctaatggatcaaacagaagagtgcaacatctttgatcaacccgagtcagactctgaagactataaaagggcgattattaattctcttacgaatgaataacaaccacatgac

SEQ ID NO: 30011 - DNA, 432 bp, Zea mays
  unsure (1)..(432): unsure at all n locations
agcttgctacaggccttcttctttntctccatagcangaaccttactggaacactaccccacttaaaatgaatgagggtagatctcttgaatcttggggatttgaactccttgaagtaccacaaaacaagggcgttacgggtccttctgctgctgttgctgcttgagcaagctgcggagaaatgactgacacagggttgattttgggagaaccttcttctcatcttctcttcactatcttcttttctcttctcacttttcacttttcactgcctctttctttctctttgctcttcccactggagtagtctatcgatgagtattaccatcatacactggaggaaaccaaagactatgaaccatgtgcaacagtcttcaacccaagaatcaccgagcattgtgatcttatgggcgagggagtgggaaaatggag

SEQ ID NO: 30012 - DNA, 404 bp, Zea mays
  unsure (1)..(404): unsure at all n locations
tgtcttatgctcatcttctttcttcatccatatctggtgatatcctgaataacaatctagcaggctcatgagctctaaagtggccgctgcatctatgagtgagtctatcctgngcaaaggaaactcatcctttgggcatgccttgttgagatctgtaaagtcaatacaaatactctatttccatttgccttttttaccattatagtgttagcaagccattgtgggtaaatgacttatctgatcgctccagtattgagaagtcttttaacttcgtttcttgctcctttggctntatcctctgacattttctgaagcttctgcttccttggcctgatggtaggatctacattaagagaatgttcaatgatgtttctgttgacaccacataggtcattggctgacca

SEQ ID NO: 30013 - DNA, 437 bp, Zea mays
agcttgaagccatggtatgtatcatatgctagtaaaatgcgaatgggttctagcctagctacgggtgcatacgtttcaccgaaatccacaccttcgacttgtgaatatctcttggccacaagtccggctttgttccttgtcaccacaccatgctcgtcttgcttgttgcggaaaacccacttggttcctacaacattttggttaggacatggaactaaatgccatacctcattccttgtaaaattgttgagctcctcttgcatcgccaccacccaatccgaatcttgaagtgcttcctctaccttgtgtggctcaatagaggaaacaaaagagtagtgttcacaaaaatgagcaacacgagatcgggtagttcccctcttttgaatgtcgccgaggatggtgttcatggcgtgatctccttggattgcttggtggac

SEQ ID NO: 30014 - DNA, 402 bp, Zea mays
cttacttctttcgccttgagacaccggaatgttacttcaaggtcggagaggacgtcggaagccttccttgtcttgactaccatgtcatcgacgtatgcctcgactgtgcgaccgatgtgttcgccgaacacatggttcatgcaccgctggtacgtcgcgcccgcatttctcaaactgaacggcatggtgacgtatcagtacatgccgtacggcgtgatgaaagaagtcgcgagctggtcggactctttcatccggatgtggtgataccctgattaagcatcgaggaaggacagggtttcgcacccagcggtggaatccaccatttggtcgatgcgaggcatagggtatggaacctttggacatgctttgttgagaccagtgtagtctacacacatccgccat

SEQ ID NO: 30015 - DNA, 447 bp, Zea mays
agcttgtgcctcttggttccggctctcagcagttaccaaggatcacggtgacttcggtgcggtattctgccgcgttgactccttcagcctcggcagcgaccgtctttgtgtaacccggccagtgagcctaaattcaactcggaaactagccgtgcccgtgcagtatcggatgagatcgtgagttgagacgacctgagcaacctgaagtctccactctcctgacacttgttttatctcggcccgggctgcatgccatgcgagataaggtatgcttgctaccggaaagaccatcagtttggccttttacgttgatgttggagaaacgaatcagattcttgtcggcgaaaaaaaagggattgtcgctgtgcaaaagttttggcgttggttttttctttgaggtttcgatttttgtagtgcttctggattaaccacatgtccgtaacttat

SEQ ID NO: 30016 - DNA, 100 bp, Zea mays
aaaaaccaggacacctctcggtggagaacaagcccccgcctcacgtgacgcggcttataccccacccacgtaattgtacccacgactcactcaccaaaaa

SEQ ID NO: 30017 - DNA, 437 bp, Zea mays
  unsure (1)..(437): unsure at all n locations
atcttcatgcaaagatatgctggatngaagaatgcttcgaaagcattgagtgttccgcgaccaactattgcatgtaagggtactccatatcgacaatgtcaaacacaacttgctcagtccttgtattgtccggtgcgccaacggccggcttcaccaaataaggaaggaaatccgcaccggacagtgtccggtggtgcaccagactgtccggtgcgccaggcgacagaaggcaagaattgccttcccggattgctctcaatggctcctagctgccttggggctataaaagggacccctangcgcatggaggacaacaccaagcattccttgagaactcttgatcactcacactccattcttgcgcacttgttcgacattctagtgatttgagcttcgntctagtgtgctagtcttttgagcttaagtctgggtcttat

SEQ ID NO: 30018 - DNA, 487 bp, Zea mays
ctcagctagcaaagagattctagaatcagaatattgagctcatgcctaagtctgtgtaaagaatggtcatcacgtggcttgggtaagatatcggctaattgatctttaatattaatgtaagaaatctcgatatccccctttttgtggtgatccctaagaaaatgataccgaatggcatgtgctagtgcggctatgctcgacgggattgtccgccattttgattgcactctcattatcacataacaaagggactttggataatttgtaaccgtagtcccgcagggtttgcctcatacaaagcaattgcgcgcaacaatgtcctgcggcaatgtactcggcttcggcggtggaaagagcgaccgaattttgcttctttgaagcccaagacaccaaggatcttcccaagaactggcagtccccgatgtgctcttctattgattttgaccccgccaatcggcatccgataaccaattaaataaatgtggat

SEQ ID NO: 30019 - DNA, 540 bp, Zea mays
ctaagcttcacagaatccacacacagtggagtagggattacgctccatccggccttaaccactataaattctcgcgtggtcatgtgctggtgatcgcttatcaagacggcaaaacccttaagactcttctttatttaaaatttaggggcgggtatattttatcacctgaccaaagaatccctctcgacagtatatatcaattaagccaagtagccaacaatgagtgagcgcaatccccaacagagctatacttacgcgtacacgtacattgctacgtacagcaccgctggtcattgatccgttgccttacaagctaaaccagtacctacgcaggacgtgccttgcatgttgaacaacacatacgcttctactggcgcgctgatcaggtcgggtgtcctctataacctccattatgtctaattattattggatagtgcataattaaactattctgcaataactaagaagaaacagagggagttctttgtaatattagtattcgttaagttatgacactacactgttctaaatataacttta

SEQ ID NO: 30020 - DNA, 446 bp, Zea mays
  unsure (1)..(446): unsure at all n locations
tgcttctcagaaacaagtgtggcttccagaacctaaccgtcttaagaacacacttgacacctttcccgacatctctagagatgccctttctagagccctcagcatccaggagaaagccctcttccacgaacaaaatccactcaagagagaggtgaggtaccattgcgaatattgtgagagggttgggcatctagctgctttctgctttaggaggaagagagatgagcggcgggtttttgagtccagcagaaaggacatgaaccgaccctctcatggtgatcatgctcangctgttcagagacgtcttgggaggtctagaggagcttaggctcttgcggtacgactcaacagtgagccacgtggtggtcgcgcacacgggatgctgtccgcgtatatatggccaagccatgtgcagaggtatggtcatacttcaagcgacacaagtc

SEQ ID NO: 30021 - DNA, 444 bp, Zea mays
  unsure (1)..(444): unsure at all n locations
tcgtgagtgcgccgaggcgactgcggggtctcttcgtcgattctggaggttcttcgcaggggcattcccaagatcctccaggtaatgagttcaagcatacctttcgcgtgatcaaggcattctttgtgatgccccgcttcctttcctcaggatctgacggatccagcgccccaagtcatcgttcatccgccgcgaggccgatgtctggggctcgctgcggtccctgaggaccacgcttgccggggctaccgagcgcctctcccaatggagcgccgaggtggcggaccttcggttgctctgtgtcgatctangagcagaggcagcggcggcacgcgtagaggcacagcggcagcggtcggagcttggccaggtcatcggtgagcgggaccaatctctgaaccggaccattgaggctgaaagctgggatgaggctcttggagtcca

SEQ ID NO: 30022 - DNA, 458 bp, Zea mays
  unsure (1)..(458): unsure at all n locations
tgcattgcatatttaaatatcgcgtattgcatctatggcttgtctaacctagttaagataaccgccaacaaagcgagtgaaaaagcttaactcggactcaaacttgacaagtcttagttttgcaactgttggttcttgagatatgcatgcggcactgcacttatcggagtatcaaaactcaagtcattcatgaaacccctagtgcaaagccgcaattcatatctcaccatttgactattttctctaaaaactatctagcctatggcaaaatattttgaatcttatgagaaaatatatgagggtaccaatacctgtcccaacaggtgttcttttgtgtgcttataagttgggatttggtttggttcaaaattagatagaaaatctcaagaatctcaaatnttccctctgtctgggctcaccggacattccgatgtgcaccggacactacactgtgcact

SEQ ID NO: 30023 - DNA, 385 bp, Zea mays
  unsure (1)..(385): unsure at all n locations
tgccgcagncgtgacagtcgacgtctcgtgtctgcttcttgttgtcaacggcgccgccttggacacctccacgggcaccaaccttagcatgtcctctcgtcccggtctgtgcgcctccacgcgcacttgcacgggttgccaagtatgcggtctctatgtataggagactccccttcttcttgtcaccctggtaggcctaccactgatcctgagagatatgtacattcctcgcaatagtgataggctcaaagggaacttgtggttcgttgccaacgaccactttgagacgacctaacgtatctttgaatgtcattgaggagaggtctatcatatactcgatctagcgagcaatctgcttgtacatttaatggatgcaacggaagag

SEQ ID NO: 30024 - DNA, 380 bp, Zea mays
tgattgtagtcgaaaaaacggtgacgtggaaccaagtgcacctcgtcttctttctcacctggagtattatattggcataaccctagactaggtcagtgcccgtgcgtcgaacggaaaatatcatatttcgataacttatatatacacatttgtgttatgcaggtatgagatagaggatgacatccgcgagctgtccgggatgttatcatagagaaactacgtcctgtgacgcacgggcactcacctagtagggcattatataagatagtcagtgctcgtgcattgcatatggaacatataatatctctatgacttatatatacaaatatgtgttatatgactatgcagttatgctacagatcacgtggaagcgagagcgt

SEQ ID NO: 30025 - DNA, 311 bp, Zea mays
aaagagtgcgatctctgcgtatggaacatatactgtgtataatgtccatgctcacaggctaaagcagtacttgcatcctcttcgaggtggatcccatggtggagagacaatggttgcatatgtcatcttggctagaggaccataatgatctatctcgataaggaaactactcacgggtgatgctttgcagggacatacctttactgataactgatacctgagcaactcaaagggattgctttatcctaactccacatacagctggtttactttaaacaaactgggcatttgctgagtacgtagatgatgtc

SEQ ID NO: 30026 - DNA, 442 bp, Zea mays
ctgcggtcctagtttcaccttcaaaagtcaaaatatgttatgcagctaagcttgattccagttgcacaaataatattgctgagtacgaagcacttctgttggggcttcgaaagttaagggcaatcgagataaagggccatcctgaaaactgattctcaagttatatctggccatgtggacaaaagtagcaaggcaagagatccgaagcttgaaagatatctggatacagttcgaaggttggaggcttctttcgaaggtttttctgtcaaaaatattccaagaggtaaaaatgagcatgcagatttgctagccaaaatggcggctcatgggctccctctaccttcggaagtatttattgaaacaataaaggcaccttccgttgaactcatggagagagcaatgcttattatttctctagtacatagtgaagattggaggactg

SEQ ID NO: 30027 - DNA, 512 bp, Zea mays
ctctcgcgagaccatgtctcatttctttctaaccatggttagttcattatcgcatgtgatattctatgcatatttacttcatttggtctctcgtatggtgtactgcttgttccctaatttgaatggatggatgtatgtatgcttgcaatcgcatagagaacgatccggcgaagagccgaggaactcgcatgagaagcccctgagcagcagtcggttggtggagacaagtgtcccttgacctatctctgtcctattcattctttaattcacctcccgctttacacatttatgcctaaggattgactagcttttgttatccatgtccttgtttacctatttgggttggattattattgtctagctctatgctattgcttaactctaatcaatgaacatgatgagattatctatgatacgctcgtttccctctcttatatgatgatgacttgtggcttcaaggggctgagcggttctcagtgctctcgtaagacctgttatgatgacgcccggaa

SEQ ID NO: 30028 - DNA, 473 bp, Zea mays
atatttatgagaaaacggaagctggcaatagcgtggcgcttctaaaaagatgactccggaataatatggtttaatgatcgcatagatgtgccctaagatgctgatgtccagcataatctctggtgaagctcatcttagttgatatatcattcactctgggagtacttgaatgtattaagacttaaagcaacatttttggtggacaaaaatgataattgaataccacgctatgtggcatgatgtgacacctgcatacgtgtcaaatcagtgcatatgaagaccgttggaccattacaatccttgaccatgtcaacttggaaatgggaggatatcattatgaacttcatcgtgggattacccaggacagctaaaggatttgattctatttgggctatacgttgaccggcttacacagaatgcacattttcttcttggttaaacggatcatcagttgcgtctatgccagtttacat

SEQ ID NO: 30029 - DNA, 525 bp, Zea mays
agctggaggcattgacaagcgtgtgatcgagacgattgagaaagatgctgcttaattgaacaagcggtacttaagtacgcgtggatgctcgacaagctcaaggctgagcgtgatagaggtatcaccattgatatcgctctgtggaagattgagaccaccaagaactactgtacggcattgatcccctggacaccgtgacttcatcaataacatgatcactggtacctaccaagctgactgtgctagccttatcattgactccaccactggtggttttgaggctggtatcttcaaagatggccagacccgtgaacatgctcttcttgcgtgcaccctatgagtgaaacacatgatttgctgctgaacaaagaatgctttcaggaatttatgttcaaaagactctagtataatggtatgtgctacttttgagaatctggtgctagataatagttaggagtgaatacagaattgtgaaagatataggtgtatagattgataacctttgttctttatattagtagtagt

SEQ ID NO: 30030 - DNA, 413 bp, Zea mays
  unsure (1)..(413): unsure at all n locations
gctatatcaacctcacaaacaatgcatgtggaccttcaagaacttctgcaccactgcgtaatctgatgattagtcgtaaagaagaaacacaggctctgcatttgtgctcgtgctagcccaatcgttcagntgaagtgaattgctgcggaacagagatgttacttgtagcattgctttctgcatgaacagaaactatatnctcttccataactgattccctggtagactgttaatggccatgtaggcaaagtaaccctagaggaccgatgtgggtatcatcctgatgactggcatagctccaacacacccaccaaccagtatggactgcagcagattgctcagtctctattcgttcactcgaacaagcaagtgggcttctatatggttgcgagggtcaaattctctagccaatc

SEQ ID NO: 30031 - DNA, 498 bp, Zea mays
cctttccaagcgagcgacactcccatccttagtagcaaagcctaaacccagtccgccagattcctcttgaactgactgaccatcatgcctaactggggctcactgcacgacaccaactcacatagatagaagggatgtgttttcttcctcgattcttgtcttgtcgtgtctgtaagactcaagggcagattgcaaaccctcacaaagtgcataccgcacaggtgcatgggcattcactgagctagccttctcaaccaaagctatcctagcgtctctctctgctagctcagactgcaagccaggacaaacggtacacacacccaacaggatagacttagatctcaactcgttgcactcatctagcaaggtggagtacttggtctgcacagtggtgatgttcgacatgtgtagagcgcactcatcacattcagtctcgtcggacacctcaactcaagctctagcagaatcaagtctctaaacgtgcttcgtcttggatct

SEQ ID NO: 30032 - DNA, 499 bp, Zea mays
  unsure (1)..(499): unsure at all n locations
gacactataaaactaagcttttccattgaaatgttatggcacaaagtggcatttgttatggccatgcttaccagtcttggaggtagaaacctccacaacctgtatcantaagtttttatcaaccatattcaacaaacaaacacaataaaacagcaacaagtgtgcaataggacttaagacaaggaattccaaatagtttcaggcacatactcatgaactgttgctgatatatcactcaaatctatcagaagcttagtattaatttacgagaatacaatgacaccctaaaataaagtagggtatgataccgcagaagattttccaggtttagagttaaaaaagagagaacatgtttggtaattgcagaacaagtgggtatatctttgacaatgaattgccaaaccaaaggaaacttcatattgacaacaaaatggttttttaataaataggaagatataactttcaattccaatcctacacattacaaaaaaaataataa

SEQ ID NO: 30033 - DNA, 446 bp, Zea mays
  unsure (1)..(446): unsure at all n locations
tcattctgtagatcttgagatgaaactatncatagaggcatgctcttcttgctagcctctgagctcctttccttgactacagcggatccatccgaagtatggtctcaactttgtgtggatatgcttcaatcccttatgttgatacaaggcaccgcagaaaattgccttctatctccaaacacaacatttgttaaggttcagcttcaagccctgtcttatggaaattgacgaaggtctcttggaattctgaaatatgattttgttgcttcgtgctccttataatgatctcatcaacataagtcaaaatatttctgccgagttgtgtacttaacactatggccatcaatcgactgaagattacaccaacatttttgagcccctccgacattctaatgtagcaataagtgtcactagacgttatgaaactagttctcagcggatcttct

SEQ ID NO: 30034 - DNA, 415 bp, Zea mays
gggaataccaattcaatgagaattcagtgaatgaacatgtgtgatttgttttaacgtgttcggtccaagaaacttgtatccgttgaggggtcacaaaactgggtttatttaccatttcctctttaacggtacttataccgaatgagacttcttctttaatcttacggtttactaagaccccgctaggaccaccacacacttggtgtctcttgcctcgcttactaaagcctttgataataataatgggataagtaaaaaggctaagcccagcatctctagaaatatataacacatgaatatcctttctcaagtcctatagaattgagtgatttgtggctggaaagatccttctatttgatgtgtttgaattaatcttttgtctttttgaatgacggttgaatgttgatgatataat

SEQ ID NO: 30035 - DNA, 358 bp, Zea mays
gcggcaaagaatcattgcggtaactgaagttatcgataagacgccgccaagggcgtcaatccaaaaatcggcagctgccgaagatacaacaatcgtcgagggcgtacttcggggtcgcggctaccgaagccgctacagccgaagatacaaacttaaaatccacgattgagaatatcaacaagattttggaagacatggctgcggaagaagctggtgcgactactgaaaaaaccatggccacagtgcctgagaaaggaaaagaaatagccgaagacccttcggacgacgaagcctactctttccagaacttagttgggcaaaaactgacgaaggacgaaatagaagaacttaaagacta

SEQ ID NO: 30036 - DNA, 448 bp, Zea mays
  unsure (1)..(448): unsure at all n locations
tcttatgggtagcttctgcactgattcacccttctcttgtactacactcttcatattatgtatagcttcatcccatgtccaaaggttcctgtacatatattatacttgggaaacatgttagtcatgtnttttaggaccttaggaagacgaaggcccccaacgatggccaaagtgtgttcgactgcaagggtgactcgtgaaggagaggagactgaggccaccaagacggctccaatttctgaaatcatgagatagtcgggtttagttgtgacagagggaaccgttgacgaagatatacctgttaccgaagctgaacatgctgatattgaggaagaaaatgctgatgaagagcattttgatcccatcaaaacccagccacctagatnttgagaagtctactgtgtctgaagccgacgtgcccatgatgatgaaactgggctactttgga

SEQ ID NO: 30037 - DNA, 455 bp, Zea mays
  unsure (1)..(455): unsure at all n locations
gctttgcgagagagggaatggatcccaggtctcttggaggtctttgttgttataggaggntgatgttggatgagccgtatgggtgagctctcccagcttttttctccgccccttgggaaggccctgggcatctccttttataggcacaaggaggtgacccagatgtacacatcgggtgtactatgtgctaacatggacggcggagaagtgcttgagccctgtaaaagcgtggctggcggtatagcctggtcgtcgaggtggccttgaagtttgtgtcctgctgacgtttcttcgacttcgtagagagctgaggacagtcgacgtcatgggcgcatgccgggaatcatcattacctgttactggagtaattagatgtgacaccggtcttgttccttcatagcctgaggtggctagccaggggaaggatagcgttgtactccctgttcgcgtagtcg

SEQ ID NO: 30038 - DNA, 421 bp, Zea mays
  unsure (1)..(421): unsure at all n locations
cctacgcccgacaatgaggccaccangagcaacatgaagcaggagtagtatagtgtaatagtagcaataatagtgatgtatattaggtagtgtaatgttgttgaaaatcgagtatgaacatctactcttttagtaatgtaaaatggatggctctctttggcatattataattgtttcaaatagttgtttccataaatgccttcctggactcgtgctcaggatggggctagtacctcccgtgggagggaggcaacaccaaacccacctccagtaccctcgacacttgccgaggccatcgctgccttggtaaacgctacagtagataatactcatttactacgggagatggcaggtcagcaactacaacaacaaggcgggcggtgctatccgcaaggcccccatgatacatttatttggattt

SEQ ID NO: 30039 - DNA, 403 bp, Zea mays
tgaaacatagcgagaagcacacagcaagaaaatcacattgctgatttgcaagagacatttgccaatgttaagcaagctggtttgaaataaatcctcaacagtgtgttctcgggtcagaacggcaagtttcttggctggttatgatcaacaaatggaattgaaactaacccaagcaagatctaagctatccttctgatggagccaccaagcacaaagagtggggcccaacgtctggtttgaagactaccattatttaatacatatatatctagatcagcagaaagaagattgccattctttggaatactataagcatccgaagatttccaatggggaccgagttaacaataagcctttgaatagctgaaaccatatttgattgattaacaacattaactcacct

SEQ ID NO: 30040 - DNA, 533 bp, Zea mays
  unsure (1)..(533): unsure at all n locations
tcagctatctaaccttgaggaaagctatcctatgggcgatgttgttattcgttctctgccaagtgtgatattcatgtctcttgcaatgatgctcatatggactactgtgtccgctgcgatgaattatatggcttctatagtgtaaaagatagtcatgtggttaatggtgcttttgattgaccaccgccttagtttaaattaggattagatggtattggtatcttaatgatgaataatggtanggtgatattcctgtgatatatccactattttgaatggcgttaacatctgattatgtgcatttgtgtgttatagcatcataagttgattcttgccaccatgcatactacaaagtgctaatgtgtagatatgctcgatttgcctaagtatgtgcaaaatggcgtatgacgccaaaattatgtcttttgaagtaagcacttatttagggggagcattctataatcttagaattatagttgggctctacaatctattctatgtaagcgttaactgcgtgccctcactcccaaaag

SEQ ID NO: 30041 - DNA, 306 bp, Zea mays
tcgagttcagctctatcaaaatcaactaagtatagctgaccctctaacactcgcttataagctactgaatcaacacttcttctgaagacagcccacattctccgctagaagacagttgtaacccattctgcatatttgataaacagagagcaaggggtattctaatgaagctacaagaaaaacattggaaatagaatggtcaggtgatatagtaattatacccaatcctttgaccaaaccttgattttcatccccgaatgtgacggctcgttggggaacatgggctttctcatggaagagaacatg

SEQ ID NO: 30042 - DNA, 411 bp, Zea mays
atctgcgaattgggaggtgtttgcatgccgatgcgtttgatctggtgggattgcccatgatcgataatgctattgcctgattcaacacctcccttgactgctatgggcaggtatactactgatcaagtagtacgtttcgtgttctctgctcctaaggtcctgtactctgctcctaggttcctgatgctttgtatgtgtccgatgctactagagtggcaccgggaagacatacaccatgtggggccctcttggcgccatggttgacagtggctctgaccatgctgaccgcggcgttgttcctctggttatccaaaacctgttctctctgattcatagagtaatgaaattcttaccagtactttcttttttggtaactttgagtgacttgttgatgactggcgtgcttttcct

SEQ ID NO: 30043 - DNA, 487 bp, Zea mays
cactaagctaaccttgtacgaggagtagctacctgtgttccaaggtgtatggtccttaagtctctttgaaatctttaaaggataatgcttaaaatggttgcaacatgctttcataagtgcataaactgtcttgagcatcacacatatactatgacacaatgcactttactcttctatgtatagacttgctctcattaacctaattatgtgcccttgacatttaaggccaaaatatgtattcctctcaaggcacatatttagggggagaaatctatattgtatagaactatgatcatgcttaattgacatatctcttgatcatatctctttcattttggtacaaatgcatatatcctattattcccgtaccatgactacgactaatatgtttccaagtatatttctatgctaagtcgtagattgaaagggacatggagtcttcggcgaaaacaagggcttcactccgtatatcatacttcggcatcac

SEQ ID NO: 30044 - DNA, 288 bp, Zea mays
  unsure (1)..(288): unsure at all n locations
ttggtttggggccataggaacgtcatatgtattacatgtatttgctttatggaataatttgtgctaagatgtatgatctacaataggcggtagtggtccagatcattcctagtgcttacatatgtatgcaaaagtcatatgcattcattgaagtgcttacatatgtcgatgatgtaaagcgattatgcaacttantgtgggtgttcgataggagatgctattttatatattaaagntattggagtatctatctgaaaggttattcttatcaattaagtattttaaaca

SEQ ID NO: 30045 - DNA, 347 bp, Zea mays
gaattattatagagttattgataaatgtaaagggcattaatgtaattctacacgggctgcgtctcgcgcctataaatagatgaacagtactcccgtactgttacgcctgattggtattcgctttttacatcacgcttgtaccttagctttctgtcaattcgaaagtacatttataatttgttattacaaatatgataatgcaaatgaaaatgaattgatgataatatctgtattattatttggatttcatgtatgaattctttcttatcatctatcgagtctacgaaggggttttccttcataaccttcgtcggaattcattatatctgaagggacatacatgtttg

SEQ ID NO: 30046 - DNA, 414 bp, Zea mays
  unsure (1)..(414): unsure at all n locations
actcagcttcctgcgtcagcttctggtgcccacgatctttttctggctcaaccttcgttctggacgggctccatatccataattctgaatccgaaaatacctgttcatataattcacttggaaaacattgtcaaatcatgtttttgaggaccttcggaggacgaagggcccaacatagcccctcgcaatattaatttgtaaataataaattcagaatgcgatatggacgaaggccttgagccgaaggtccgaaaaaacaccttccctttgctagaatagcaacattcactgacaagcggngccttttaactttcaacgccctaggcgtataaataagaacacatcgtgaattcatttggtacacacgcttgccttttgcttcggcccactggaaatttttagctcttgctcatt

SEQ ID NO: 30047 - DNA, 479 bp, Zea mays
tgcaccggcagcaccgttgtgcgacactaaccatcaacctttataacgctgggagaagaggcctcgtgaagaggtccacgccgccagaccgcccgcctctcgcgcccgaggaggacctcgcggaggcgagcgcatgctggacgacatactcaaccctagtgccgtaccacaaggacatgcgccacaccctccagaactgcagagacttcaagcgttccgtggggaacgaccgaccctttcaacctctacctcctcccccgccgcgaggaggaccaagagaacctggacaaccccagcagcaggagaagggagtaggtggagccttcccgcgcgttgacagagaagtcaacgtcatcttcggcggacacgggtcgcaagaaagcaagagacaacaaaagctcaacaatcgttaatactggtggcggcaccggtcctctgcttgaccgatgttgagacccgacactttcccgggagaaaat

SEQ ID NO: 30048 - DNA, 354 bp, Zea mays
  unsure (1)..(354): unsure at all n locations
tctagagggagaccacattttatgattaacanatggtcattttgagaaagacaggatttgtagcgcatgccaagcacggaagcaagttggaacccaacatccacacaagaacattatgacaaccgacaggccgcttgagctgctccacatggatcattcggccgattgcttacataagcatcggcggaagtaagtactggctagttattgtggatgattattctcgcttcacttgggtattctttntacaggataaatctcaaacccaagagaccttaaaaggattcttgagactggctcaaaatgagtttggcttaaggatcaagaaaataaagaagcgacaacgggactgag

SEQ ID NO: 30049 - DNA, 450 bp, Zea mays
  unsure (1)..(450): unsure at all n locations
ccctgcgagaccttnncccatttctttctaaccatgtgtaatgtatatatcgatgtcatattctatgcatgtttaatctacttgttctcttgtatggggtactgtttgtttcctaatttgaatggatggatgtatgtatgtctgcactcgcatagagaacgatccggtgaagagccgaagaactcgcaggagaagcccctgagcagcagtcggttggtggaggcaagtgtcccttgacctatctctgtcctattcattctttaattcacctcccgcattacacatttatgcctaaggattgactagctttgttatccatgtccttgtttacctatatggggtggattattattgcttagtcttatgctattgctccactctaatcaatgaacatgatgagaatgatcaatgatacgcttgtttcccncttcttattatagatgtatactt

SEQ ID NO: 30050 - DNA, 368 bp, Zea mays
tcaatccatccgggctgggacacgcaacataaaattcactactcggttgagggtccccgcgggtgcaaaacaccgagaatattatttctttgagagatgacgatacacattcattatctttgtccaagaatcattatctttgagaaaagataatgcttccaaggatgaagttcattaatatttaatctttatgttgccttgtttctgattcacagttattgagaacaagtaactaacaactaggccattatacctgtggcgtactgttcggtttaggctcgggttaattagaatacaaccgttggatctagggtgaacgacagggatcgaggcacacgacttctacgtactcccatggtcacccgagc

SEQ ID NO: 30051 - DNA, 423 bp, Zea mays
  unsure (1)..(423): unsure at all n locations
acttaagcataaattaacgccatgtttggttccttagtcgataaagtacattgtttggttccagtgactaaatcggactaaagagcattacttgcttgaataagactgtattacctctattaattaatggatgtttgcttcaagaaaaaagtggagaggacaaataaggtaaaaatcctactttagtcccttttagtcacccactttagtcaccacgtttgtttttttatggactaaaagtgactaaactttagagcatctccaatagttatgtaaatttagcaccctaaattatatattcacgcctgtttggtcccttagtcactagactaaatnttagtggctaaagtgtagtcgctaaagtactctgtttggttccaatgactataccggactatagaacattaattgctgtgaataatg

SEQ ID NO: 30052 - DNA, 442 bp, Zea mays
gcttacatgtgccaaggttctcaacaaccaataaaagactttattgggtttttataaaaagagcaaaagaccaccgaagtgtgccctggtctggcgcaccaaactgtccggtgtgccaccggacagtgtccggtgcaccatggaaccaaactctgaacttgccaccttcgggattctggagccgcttcgctataattcaccggactgtctggtgtagcaccggactgtccggtgtgccagcggagcaacgactacttcgcgccaacggtcgtctgcaaagagcagttaatgcgctacagtgcacgcagaagtcagagcagagccagaaggcgtatcggacagtgaacagtgactgtccggtgcaccaccggactgtccggtggcccagaagttagaagctccaatggtcgaaccctaacggtcgagtgacgtggctggcgca

SEQ ID NO: 30053 - DNA, 357 bp, Zea mays
tgccaagcaggagagcaagttggtgcccatcatacacacaagaacatcatgacgaccgacaggccgcttgagctactcctcatggatctattcggccctattgttacctaacatccgcgggagtaagtatagtgttgtgatattggatgaacatattcgcttcacttgggtgtggtttatgcaggaaaaatttcaaacccgaaaaaccttaatgggattcttgagacaggctcataatgaggtcggcttaaggatcaagaaaattagaagcgacaacgggactgagttcaataactctcacattgtatgctttcttgatgacgatggtcatcagcatgatgtctttttttcctacac

SEQ ID NO: 30054 - DNA, 376 bp, Zea mays
  unsure (1)..(376): unsure at all n locations
tagcaagaaatcatgtgtcaagttcagctctatcaagatctactaagaatagctgagcctctaacacacccttaaatgctcttgaattatcacttattntatgacagtgcccctaccttaggtaaaagacagttgttgcccatttgacataaattgggaaacagaaagcaaggtgtaatctaaagaatcaacaagaaaaacattggacatagaatggccaggagatatagcagatttaccaagttcttagaccagaccttgatttccatacccgaatgtgatagcttggtggggatcttgggtttctcatatgaagagaactacttttctcccggtcatgtggttgtgcacccgtgtcgagtttcacttgagcccc

SEQ ID NO: 30055 - DNA, 381 bp, Zea mays
  unsure (1)..(381): unsure at all n locations
ttgaccacctccncgtgatccctaagaggtggtaacgggctgtggtgctccctgcaatctactttcatcgaggtcgtgggggcattggatcctgtccaggaaccgttgtttagcttcccctattaaggtcgggaggcaggaccggttcttcgtcgagcggaatacccacactcggcccaggaatacctcatggtcatgttgaccgtggaccccttcatattcgtggagagccttgaggagaccctcaccgatgccatgatgcacactgaggcgtcaaccctgccccgactcgacttgccatgctaggaaccaccaccagggcgaggcccagcacggtgcggtcaaggtccccccccccaccgagagcttgacgaacatgaa

SEQ ID NO: 30056 - DNA, 409 bp, Zea mays
caatagacctcgcagaaatatatagagttattgataaatgtcaagggcattaatgtaattctacacgggctgcgttccgcacctataaatagatgaacagtactcttgtactgttccgcctgactgacattcgcattttgcatcacgcctggacctttacttattaccagtcccgaggtacatttataatctgtttcatgaatttgatagtaaaaataaagttgatgataatatatgtattattgttcgcatttcatatatgtgttcttcttcttcatctatcgaacttacgaaggtctttatccttgtaacattcgtacagaaatcattatatccgaatggacatattgtttataacgacgaaagactttaaccattaacacttgttatgttaccttgttcttaactc

SEQ ID NO: 30057 - DNA, 398 bp, Zea mays
  unsure (1)..(398): unsure at all n locations
tgccgtacttgtanagcaacaacacctattgtcgcagttttgcagaccatatccagtacttggcccttcgcatgtgtaaggaaaatggaccccggaccatttggctaattgagttttggtgttngatgaacaacacaatccgtgaactaataagttttttactgttgtgttgtagttcacatgatgcgaagagaattggaccaaggcaatgaggatgcaacaccttctaagaagacataaaaagatgcataggagtccaatactcaagaacaaaaaagcccaaagaaatcagcgaagaaatccaagataaaggctgtcagccagcgcctggtggcgcaccggacattggtgtccggtgtgcaccggactgttcggtggtgcaccggacagtttgcgca

SEQ ID NO: 30058 - DNA, 475 bp, Zea mays
  unsure (1)..(475): unsure at all n locations
tatgaagattcttcactccaacatgggcgagtcggcgatgtcataaccagcccacattagtcttagcaattaagcaagtgtctagtttagctttgttatcattaaaatcaactaaatttagctgaccatataacattcccttaaatgctattgaatcatcactcgttctaacacagtaacacctacatcagtaaatggatagttgtagcccattttgcataattgagaaacagaaagcaaattgtagtctaatgaatctataagaaaaacattggaaatggaatggtcatgggatataacaattttacccaaacctttgaccaaaccttgatttccatccccgaatgtaatagctctttgggtatcttcatttttctcatacgaggagaacatntctttctgccctatcatgtggtttgtacatccgctatcaatatccaacttgatccaaccgatgcataaacctaccaaacaa

SEQ ID NO: 30059 - DNA, 469 bp, Zea mays
tctcctctttaacagaattgcaggctacaccatggccactgtcttacaagccaccccagctccccatatatgacggtcactcagacccgaagcaattcctaatgagctatgaagcaacaatatcttcgtatggtggcaatacggcagtcatggcaaatctttgtcatggccgtcaggagcgttgctcagacttggtactcctcccttcgaccagggacaatcacttcttggcagaaattgaaggatatgctgataactagcttccaagggtttcagacgaagccagtcaccgctcaggctctcttccagtgtacccaggaccacgaagagtaccttcaggcgtatgtccggaggtttctgcgcctgaaggcacaagcgccaacagtgcccaatgaaattgtcattgaggccataataaggggcttctgcggggccatcaacacagtacttcgcaggaagcaccacaacg

SEQ ID NO: 30060 - DNA, 428 bp, Zea mays
  unsure (1)..(428): unsure at all n locations
tcggtattacanaccgacttaaagatagaatgaccttttattccataaaggtctgagtcaatggttgtaaactttataaggggcatacttgtaattcctcacaggctgcatcctgtgcctataaatagtgaacagtattcctttactgttcaccgttctggaattgcaatcgcatctttcgggaaccaacctttgtcaaggcagaggtattattgtattcaatgattcaatatattaagttaatacaatataattcgtctatgatttatttacccttttataccccttatttatgttatcttatacaatctattaaaattgtattacgaagacttgagctttgtaaatatattcttaacaacctttgtccaagctattattctcaaggaataaggttcattgacaangaccttacaattacaatttat

SEQ ID NO: 30061 - DNA, 468 bp, Zea mays
  unsure (1)..(468): unsure at all n locations
acatgtgcacttttcacaagattgttcatgctttcgctacgctgtgtagacaacattagcccacaataatcatttttgaaaaaggcagacacccaatccttacgtattccatacatcttgttgagagtacgttatccgcagatggaaatcttcaagtagcattgaccatgcagtctcgaactccaactcagtcaaaggatgatgtattatagattggaaccttgtcttanagtctatttcctcaatccttgcatacaactcgtttagaaaaggcatatacctattttgcacatgccatagacacaaccgatgtattgtgtgtgggaaaaccctctcgagtgctactggcattgcaggaacttgatctgcattcatagatgtcaaaagtgtatgaaccttattccatgtataaagaaataaaatcaattaaaactatttatgatatacattctgcttatatagcgacct

SEQ ID NO: 30062 - DNA, 407 bp, Zea mays
  unsure (1)..(407): unsure at all n locations
ttcactacagatcacctccgagatgaagctacctcagtgttcagacatggaatatgaacataaatgcaaagaaacttttaccaacaatgtaaagacaacttcaccatgtaacttcataagcctgcttctctggatgtggtgataccggccatcatgttaatggttgtcctaacaaggatgtggagatcaattaggttcaaaagaatagacaacaccctcanacccatgcattaacaaagaataaacaacggacagagacaacaggaaagataagttatgcattgacaggaaccattccatatgacgatgcagtaatttttggaacactagtcattcacacaactatcgtcaccgcgttgtatgatcctcgtacaacacattcttttatcattggccactttgcaaca

SEQ ID NO: 30063 - DNA, 492 bp, Zea mays
ttctcctgaacaagtgctgcacttaccgctgagtgcgaagctgttctatatttatatcaaggatctctctggcgtacgtggagatagtgttgatagatctatcaaatactgttcaactcttataggccttctgctggatttgttcccattgaatgacctttgctgactttagtctttgaacaacggaagtttctctctgctgatctggatataaatctattaagagatgccagccttcctgtcaacctttgagcccactctattgtacttggtggctccattcgaaatatagcttcgattgtacttgcgttgggctctattccctttgttgaaactaaacaaccgagaaattttcccttctttactccgaagacacatttatttggatttcactttagaccaacctgtctgagattagcgaagatctcttgttaatagcaatgtggtatcctgctccggctcttacacgatatttcacatagtagttgattc

SEQ ID NO: 30064 - DNA, 406 bp, Zea mays
  unsure (1)..(406): unsure at all n locations
ttattcacgaagcangaagagaagggaaggtgtcttttttcccaaagactcataaacggtacgtgtgtaaatattcatgcattgtatacaattgagcagtaaaaacaggtatttacattacggttacaaaatgtacacatatttcattctagaagttgttacaatagggcttattcttttatcaaaacaacttctgtagcttcgttcaggagtcggttaacaacttcatccatgatagcttcagccatctttataatttcctctgctcctttcgggtgagggcccggagacgctttagtaggatctgaaggaggacaagatactgacatactgctatacaaattgcgaccaagttttaacctaaaattatacacaataaaaacattagttaaacctatttgccctc

SEQ ID NO: 30065 - DNA, 448 bp, Zea mays
ttgattgtgtcttggaatggattgctcgctcttgtattgtatgtgaaaggttggaatgcttggatgtggtcaatggaggtggttggggttgtatttatagccctcgaccacttcctagccgttggtcctttcctgccgaccgcggacgatccgcgcccctggtcgaacggccgcccctgcacatcaacatctacaatcgcaacggtcagcagtaacagctatatcaacggctactatgcattaaatgtgttgtcagatgtcagataaaggcagtcgcggacggtccggttgtgcaccccggacggtccgcgaggacgctataattcattttaccgaacctgtcaccttcgggtttttcggttctgcaccgaccggatggtccacgcctgagtccggacagtccgtagtgtagacttgtgtttttgcattggttctgtccgaggctcac

SEQ ID NO: 30066 - DNA, 271 bp, Zea mays
  unsure (1)..(271): unsure at all n locations
gtatttatactccagagcgtgaaaatgaaagaccccgcttgtcagtgaatgttgttattctgcacacgaaggtgttttntctgacctttggcgtaaagccttcttccatgtcgcaaactaaatttattattttaaaacaaaataatattgcgaggggctactgttggggaccttctgcatccgaaggtcctcaaaaacatgatttaacagtatttctggagtatgatgtgcgaacaggtatcttctgattcaagtcagcatcacagtagac

SEQ ID NO: 30067 - DNA, 489 bp, Zea mays
  unsure (1)..(489): unsure at all n locations
cgagtcagttcttctgcaaaagattatggatgtattaagatatgataanggttttatacacattcatgagaaaataaaagccgcgcaagcaaactgttttagaaaggatgatcaaggcatagtatggtttaataaccgcatagttgtgcccaagaatgatgaagtccgctagcacactctggatgaagctcatcttagtcggtatttcattcatctcggaagccctaagatgtctcaagatntaaaacaacattattggtggacaaagatgaagattgaaattgcacgctatgtggtgaaatgtgacacctgtagacgtatcacagccatacatatgaaaactgctgggccactgcaatcttagcccattccaactctgaaatgggaggacattatcatggacttcatttggggattaccctggacagcaacaagaattgaatctatctggggtagtaatgatctgactaccagatagcccattttttg

SEQ ID NO: 30068 - DNA, 426 bp, Zea mays
ccgatggagaagcagaagtctttgaaatcttggttgtctaactgcttgtttttgtcgaccgttagttcggatggtactccgaagcggcaaacaatattttgccagaagaatttctgggtcgtctttgatgtgatggtggagactgccctcgcttcaaccatttgggaagtattcaacggctacaaaggtgtacctgaggtacccctgagccgtgggcaggggcccgacgatgtctatgccccagcgctaaaggggccacgtgtgggcgatcagcttcgtgaactgcgaggggcgccccgagcgtggggaaaacttctgacaggcttcgcaggatctgacgacccgatttgcggcgcagataatggcgggccagttgtaacaccctgaatttgggggtataaaaattctttgctcatattcacaaat

SEQ ID NO: 30069 - DNA, 347 bp, Zea mays
gtctatgcccgccgcaatcgctgctcggtgcgcctgtctgctgctcgcggtctggctcagttgctgcgacgtcgagctcaagcagccgtggggggattaccatcgccgccaacgggcgtaccgtacacacgaagaaccgacgtggttggctcctcaccaggtcggagctccatcgccgatcagtgctgctgccaaaacctctggtgagaatcttccccccccccttgccacttctgctttgctcgtccgtgccggtagtactccgtaggctcagattctggggatctggcaatctatgggtcggtcgccgtgcaggcgtggacctggggcgggtgcaacgtcaccac

SEQ ID NO: 30070 - DNA, 502 bp, Zea mays
  unsure (1)..(502): unsure at all n locations
actaagcttataaatggacgtgaatagtgccttctaatggaccattcttgaagaggtctatgttgagcaacctcccggctttgaagacagtgagtatcctaaccatgtttataggctctctaaggcgctntatgggctcaagcaagccccaagagccggtatgatgccttagagatttccttattgcaaatggcttcaaagtcggaaaggccgatcctacactctttactaaaactcttgaaaatgacttgtttgtatgccaaatctatgtcgatgatattatatttgggtctactaacgagtctacatgtgaagaatttagtatgatcatgacacagaaattcgagatgtctatgatgggggagtngaagtatttcttaggatttcaagtgaagcaactccaagaaggcaccttcattagccatacgaagtacactcaagacattcttgtaaagttgggatgaaggatgccaaactcatcaagacacccatgggaactaat

SEQ ID NO: 30071 - DNA, 537 bp, Zea mays
  unsure (1)..(537): unsure at all n locations
gcttatctcaacctgagaggaaagcttatcctaaggggtgatgtgttagtgtgttattgtgtcattgataattcttatcatatgccttttgcagtattatatgtgttgcatcatatggactagtgtttccgctgccatgaattaattggcatctatagtgtttattctgtaatagcgttcatgggttagtggtgctttaagagtaatggtgctttaagattaatggtgttttaagattagtttaaattggtatcttaatggtgaatagtggtaggttgatattcctgtgatatatccactcaagtgaatgatgtttaactctgattctgtgcatttgtgtgttatacgcatcatggtttgatccttgacacaatgcatcccataggtgctaaggtgtagaaatgcttcgatttagcctaagtatgtgcatattggcatttaaggccaaagctaagatattaatgtaagcacatatttatggggagcattctacaatcttagaactcanaatttgtgctttaaatttcacttttatgt

SEQ ID NO: 30072 - DNA, 275 bp, Zea mays
atcttaatgtgatgcaattgatctattatgcctacacaacgtagtgaagcaacccctagatatgaaatgctacaatgtgtatgttaagttaccacgaacatgatatacatttttggggaacgcacaaacttgtgtctttgagactaataagacctttggaaggacctataagccctaacgggaaaaaggagttgacagctatggtaaatatatacttgtgacctctaagataagataatagggactcatcggattatacatatataataagctct

SEQ ID NO: 30073 - DNA, 354 bp, Zea mays
catgttctctaaaactgtccccaggctgtcggaccctcctatcgagggattccaaactgcgagcctagctactcaattcggatgttcatataccaccaagggtggctctgtatggtggtttatataaaaaaatgatgctcataagttgaatcaaaataagaccaccacaaatactaatctatgggcgaaccttatctttataacttggtattcatgagtgtaggccaacagaccgggtttatgagggcagacctcacctggctgtcgtacatatatgcgcaacttagttacatacgaagaaagttgaatcccaagcatgtttgtatggaaaaattacagagatgccttatgttc

SEQ ID NO: 30074 - DNA, 353 bp, Zea mays
aatttttgatccttggtgaacgaaacggcccttaatctcactctctgctcacgtattcgcgttttatacgaatcatcctctgctcggagcttatgtatctacgtgggttttatacaaagaccgcttgggaatataagatttttctagtcctaaaatattaccatgggatttgagcataccatgacatcttagacaaaaaagtgtgtaggagcacatctaaaaactgtgtactataattcttgattttactaataccacagtatttttggggtcaaattttttttgtaaggatcaaagccttttgcttgacgtacctccagtattctcttctctcatattacaactgagatatt

SEQ ID NO: 30075 - DNA, 372 bp, Zea mays
  unsure (1)..(372): unsure at all n locations
tctaaagggagaacacatcttacgaacaacttatgttcatttttgataaaacaggnaaagnagcgcatgccacgcaggaaagcaagttggtgctcatcatccacataaaaacataatgacgaccgacaggccactggagctcctacaacatggatctattngncccatcgctacataaacatcggcgggagtaagtacttcctatatattgtggaagattattctcgcttcacttgggtggtctttttacaggaaaaatctcaaccccaagaaaccttaaagggattcttgagactggctaaaacgagttctacttaaggatcaagaaaaattgaacgacaacgggacgaagtttaagaactctcaaatcga

SEQ ID NO: 30076 - DNA, 345 bp, Zea mays
cttagcaattaagcaagtgtcgagttcagctctattaaaatctaccaagtatagctgaccctctaacactcccttaaatgctattgaatcatcacttcttctaagacagtgcacctacatcagtgaatgacagttgagcccatttgacataattgggatacggaaagcaaattgtaatctaaagaatctacaagaaaaacattggaaataatatggtcaggtgaatatagcaatttacccaatccttggaccaaaccttgagtttcatccccgaatgtgatagctctgttgggatcttgatatttctcatatgaggagaacattcttttcttcccgggcatgtgg

SEQ ID NO: 30077 - DNA, 411 bp, Zea mays
  unsure (1)..(411): unsure at all n locations
ctaagcttagagggagtctgcagcacctctctatcccaggacgatgcttcgtttcttgagtctcgagatcatgtccctcgacggtagctacgacatggtactccttccttcaccgcgcgacaacgataatggtggccttcagcccgcccgccggcgggggaattccgacgtttccccgcatggtggaagagcagcatccgggtctgtcccgtcaccttccccgtcgatggaggaggaggcggngcaaccatggccaagcaggaggcgacacctcgtcggatgtcgagcgagtcgacgacgccggcgcctcagcggtggacacgtcgggcgtcgacctctcgtctgagacgaagactggcgtcgttttcccggcacatgccaaccccaagcggacggatgacgccagcacgc

SEQ ID NO: 30078 - DNA, 416 bp, Zea mays
cttgctgatggagcatctccatattcctgatctcttggtccaagtcgtcctcctggggcgttggactggtggccttcctcttctgactttgggccttccgaaaaaagggtctcctggttcgggtccagcggctgcagagctgcagcccctgtcgctgaagctttctttggcggcatgacgaaggttgatgcttgccgaaggtgttcgaaactcataaagtggaagtgagttcaccggaggtgggcgccaatgttggggacttgttctcaaatgctaagagttaagaacaaggcaacacagaaaacgctaaatgttaaagtccttcgttcttcgaagcattatttcccttgagatataatgattttcggacgaaggttatgaagaacataccttcataaacatgacattatcatatg

SEQ ID NO: 30079 - DNA, 337 bp, Zea mays
  unsure (1)..(337): unsure at all n locations
aatgttcatttttagaaagacaggtttgagcgcatgtcanacatggaagacagttggtgctcatcatccacataagaacatcatgactactgataggccactcgagctcctatatatggactcattcggccgatagcttacataagaatctgcgggagtaagtactgactagttattgcggaagatcattctcgctatacttgggtgttctttttgctggaaaaatctaatacccaagaaaccttaaatggactcttgagaccggctctaaatagattctggctcattgatctagaaaataaaagccacaacgggactgagtttaagaacttttaaa

SEQ ID NO: 30080 - DNA, 521 bp, Zea mays
  unsure (1)..(521): unsure at all n locations
cactcagcttattaccacatgttggaaatatcttgaggaagtcgagcattttgtcttctcctcaatggtctttgtttcttgttcccaagaaatattctttttgaccctacaacttgtttctcaatcaaagactggcctttcttggggcagtggaggtcagcacatgataatactttaacttttgatccttgtgcaagaatgaggttcacatgagtttaaactagtaattactacctcatgagcaatatcgagcatgatatggtcatcaactaatgtactatgagagtatgacaacatatcatacttttcacctagagcaagcttttctaagttcatcatttctacttgactcctaagcatagaattttcagttttaagttgaacaacatcagataatacatcatgattatttctttgctcaaataaaacaaattcatattgttggaccaaattatcatgagagcactntagctcctcatgttctttggtgaatcttctcaggctgtctgtggttttgatga

SEQ ID NO: 30081 - DNA, 303 bp, Zea mays
  unsure (1)..(303): unsure at all n locations
ctgtcccattatgaccactatgggacctcttagctcttaatgtacttctaggtctattgacacatattacacttacgatgttagttnatattttacgttccgcgccctcggtgcactaggatgggtatgcaatctaaatccccagagccttttatttcttggattgcccctaatgcttatgaaggatatagtccctagagctcttcgtgcctctatgcgccataaatatcttatcgctcaaggcacttattccttacggaacttatgataacttattcacttacggtcctatgttggccatag

SEQ ID NO: 30082 - DNA, 333 bp, Zea mays
  unsure (1)..(333): unsure at all n locations
aacacaataaaagtacttgggagtgaagattggagtgactccaacgtcacaagattattcttgagagcatatatagaaaaagataanagttctgcaggtgctcacggatcgtgatgactatgaggatatgacgcctcatcaattattttgcaaaattcaacaacacgagtcctaagaagcccccatctagacaagagactcttatgccttgatcacaaatgaacaagacaaccccaagaagaacaaagaccactaagcatagaaagtggtcgtgacctcaagtgatgaagatagctcaagtgatgaagacacagctatgttcatcataacatt

SEQ ID NO: 30083 - DNA, 321 bp, Zea mays
gccatactgaggggagggttgttacttagtgctcgtgcatgtactgaatgaaactagaacaactattgagttgttcaccttttaaatgatcgtgtgtgtatgtgtgcactctcattcatttgggattcaatgtggtgtatgtacggattgatattgatatgtctgtaataaaatactatgttttaaatcccgtttaatacacaccttgtatattcttccggataccaatgtgattagtatttttatgataattatgggatatgctaccattttgcatctgttcgctatacatactatatggtgattgagtgtacacttacg

SEQ ID NO: 30084 - DNA, 367 bp, Zea mays
  unsure (1)..(367): unsure at all n locations
aagtggccntgggagagacccatctcatatatgtgttagataacactgttccgctatatgatataattaggcatatggcatgattaatatatgctgcttaaaggagttagaagtccatcacgagatcctctaaggacttatattcttgaattataaatatacaacatataaatctgataccgacaatacattcccgatgaatgatcactcttctatgtagaaagaatatcttctatttgagaatatagttcctaaattgaaactttttagaagacacaaaagtctgtgttgaacaccaaagtttgataactcctattaagggataaagacccctacttacccgataatgaattagatgaggtgtcaa

SEQ ID NO: 30085 - DNA, 391 bp, Zea mays
  unsure (1)..(391): unsure at all n locations
ctcagcttggggccttctttacaaatcgttttccattttttaatacccatcggactcaatggcggtttcaagcctgttatcgcaaggattttatttcttgaaagcttattctcaaggatttgatagcacatgctagcaagctcctgttgtttctgcagccacgtttatgaatgcatcatcaggctactcataaacattactgaaagacgaggcaattagacgcgggtgtaaacatgaatggcctatctaactatggtaagttatctctctgaagagttgtgtccagtcacactagctagtcacaaatcataatacttgtgatttggacatgcgtactgtncgcgattcaatattatggtccaagttagcctctcgctttggtggtgtacgc

SEQ ID NO: 30086 - DNA, 500 bp, Zea mays
  unsure (1)..(500): unsure at all n locations
tacctttagtcttatgtaactaagtgttagaagactntatattggggagaaataattaacaaaaggggaagtcataagaaatacataagatgtagaaagttgatgagtgcatactatgtcatgagtatcatgtttattttatgacacactgcaccccatcaatagcggatatagttatctccatactatgatccaaatatgtgcttttggcatttgagtacaaaaattggtatttctgaaatgcacatatttaggggaaggaaactatatcataggattcaaaatcttatttatcaaatcttatgtaagctttaaatgtgttgtcatcaatcaccaaaaagggtgagatagaaagtgcattcatccctcttgtgagttttggtgatttggataacaacacatttaaaggtttaatgagtttgctaatgttgaacaggaaattcagtatgatgaacatactcgaatagtgtataatgatcaatgaacanacggtcaacact

SEQ ID NO: 30087 - DNA, 466 bp, Zea mays
  unsure (1)..(466): unsure at all n locations
tctttataatagctgatgagctcatatttgtttcngctatctcttcctgctngcttnctctattatggagagggacaactcctttacgcatgcacagtgtactacacaccatgtgtgggagagagaggatcttggaggcgagtgctcatgttcatncgttctttttctcctttctttcggatgctaaatgtcttgtttacatttgattgatncgtgatcgatatataccgacgacaatcatggtaacaagatttttagatgcaacaactaacgatagtggttagattcttaccttttcttggtacctccgtgaactcctgcatcgcgagagcattcgtgctgataacgtgttaagaaccctttactactgagtgtagtccaaagggcttttaactcataaacacaggagacaccaagatataggaaggactgagaattttattcatgtattctgcgtcactgggta

SEQ ID NO: 30088 - DNA, 379 bp, Zea mays
  unsure (1)..(379): unsure at all n locations
tcatacatctcgtgaatcagatgagaatattagggccactatatttacatcatatgnttcagttggagcgatacctgggagtattaaaaggttatgtgcgaaatcgcgctcacccactgggtcatcatggagggatacactacagaagaagtgatggagagctgtatagattacatcagtgacggaacaatgataagtgtgcctgtacctaaacatgagggttaactatgtgggagagggagaatgggcaagaaaacttttcgcgttgaggattacaagctagtacattgtgctcatggtagtgtactacaacatctcacgatagccgagccttacatagaggaacacctgaatgagctttttaagaaaattagaaccg

SEQ ID NO: 30089 - DNA, 344 bp, Zea mays
ttctgccattttattcttatcactagcttcaggcgtttttaagattttctattttgctcaattttctgactgtggagcattcattctttaagctgtactctagtttggtttcagcaagaaccctcatgtttgaatacaaaatcttttttttatgaccattggctctttaccatgatacaggtctgattgtaagctctctttcagatagcttgatattctaactttcacctatctggtgaagcttgtctcttttccagactgtgcattttgacctactaaaattgctcgcaatgacttgttgaaacacccagatatttttgtttctattctcattcacatttttt

SEQ ID NO: 30090 - DNA, 504 bp, Zea mays
  unsure (1)..(504): unsure at all n locations
tgtacgccgaggatatgcagttctcggatgtcagggttcaagaagattgccccagcagctaacatttgtagctccaagcgctatattcattatgtctctaggcccacatatcggggttcagtacctttgtgcatgcccccttcagctataaaaggggaggcatgcggtctacaagaagatccaatcttaggctcactcaaacactcacaagttcatacaagctctcaagcaatacatcacacaatggagtagggtgttacgctccggtggcccgaaccactctaaatccttgtgtgttcttgtgttgttcccattnttccgactaacaagcaaaacgcctaggcccctcctcatcttaggatatagggcgggtgcactccgccacccggccagagatttcctctccgacatttggcgcgccacgtagggggctaggcattagggttatgcttgttccttgctcagcatgatgtgcaaatattgacatcggccgaactttgtaga

SEQ ID NO: 30091 - DNA, 447 bp, Zea mays
taagcttctgacacctaacgtcaccagatgagcagcactatctttatgatttgttgtacacggtcagccttgacgatgaagaacatgttgaagaggttgtggcgctgtttgttgtcattgccactatcagtggcacttaaagctcgttgcacaatcaaggccttataggttccgtcgccgcgtaccaagaacctcttattactatcataagtctctgcaatgttaactccaacagtatcttcatctttaacattagaagcactaacattcccaccatcaccagtagcaatgtatgcccgtttgcttgggcaatctcgctgaatatggccaagtccctggcagtggtggcactctatgtctgaagagcggcctgtggaagacgtggtctgatcaagttttgctgcaacacctcaaggcaccacagacttgttgttgtcgtgtcctgtg

SEQ ID NO: 30092 - DNA, 335 bp, Zea mays
ggaggaccccaagcaccggtagcagcaacagcaggaccagcagacggaccctcagatgtatgagcgcgagagcttaaaggggctttcctgaggcgccctgctggattgttgggatcaatccacaaaggggtatatgactgatgtcttgtaccttttgtcaatttaaactgtgtcacaacctcaatcatcttcatgaataacggagcatgaagacaccccttcagggaaagctgccgcatgaatgaattccttgcaacctaccaagacattatacttctgactgtcggttcatgaaaaagcataccttgcttttcaaatgtctttattaccctttg

SEQ ID NO: 30093 - DNA, 344 bp, Zea mays
caaacggttgatcctaggtctctattatacatacttttgtgatccttaatttatacctgctattacaatgttggctctattaattatctctgccccccccgctttacttcgaaataatatactttatatttgaatctaaatcccggttgcctgaatatagtgtgttgccctcaataaatcgctgctatctattatcacctgcatttgtggttagcttcttatgccttgacaacatgagtatggaagaatttttttaaaacttttatcaatccacataagcgtttgaaattaaaactttctccagtctacaaaaaattgattttactgtttttactgagttatcc

SEQ ID NO: 30094 - DNA, 293 bp, Zea mays
tgctgccgctatctgaactactcacgtagcaatttgtacgagatctccctcgggagctaattccgcgctgcaccaacaagtgagaccctcggatgtgtcactcgcgcacctgagactgaataactgaattatgtggtcgtcgcagaccatcccttcttcaaatggtgtgggaatggtgagggtctggatggaccgaccagcatcttgggcacgctagagcttggcatagatagccgcgcgcctaccaagagctagaggaagtctatggtacagaacatcaaggccaaactcaa

SEQ ID NO: 30095 - DNA, 439 bp, Zea mays
atactaagcttatgcactgctgcagaaggaagtgtattgctttcttatctgatactataacctttggcacaccatgaagacaaacgatccgagacatatacaatcctgccaatactgcactgctgtagttggtcttgacaggtatgaagtgggctgacttggttaactgcccacactacccagatggagatcgatccggctcgagtgcgatgcaatccgactatgaaatccataccgattacattccatttccactgaaggatctgcaacggttgcaacaatccagcaggtctctggtgttctggcttaattcttcggcaactatcgcacatagccacatgctctgcgattatcctcttcattggggaccaccagaatttcttcttcagatcctgatacatcttcatactgccacggtgaatcgaatacgctgcttatg

SEQ ID NO: 30096 - DNA, 484 bp, Zea mays
  unsure (1)..(484): unsure at all n locations
ttatctgagtgctttatattgctacctcatgtaaatgacctcttttatcaccattgtgctgcantttgttcagtaatgtatcttgccacttgtttgtaaccctaatgtcaaagagaatcctgttggaaggagaattcttgccaagttgttcaatgttaagcttctattaacaccaatgattgtgccaaaatcaaatttatctataagtcagtgaacgtctctgtcaaatttgcaccctaactggattacctactggttgattcagcctgcacctatctaaattcagttttcacctggaacctgttaatcaactagtcaccttttgcatttcaacatagaatgggagtttttcttattttaacagtggaactctgaatattagatttgacccacaaatagcagggtntagtgttggttgcnagatggtggtgcactcttttttgaaaccgtggtgtgcatggcgttgtcactcggactctattaa

SEQ ID NO: 30097 - DNA, 439 bp, Zea mays
cgctatttgcacgaagggggcatgttgtactatcaagcagtaagctctcctatctgttcaagcaggtacttggattcaactgcgtgctcgaccggcgcttcactcctcacagtgattcctgccttcctcgctattgtattcatgctgcgtgacgctgacgcggaacaggtgaggaacccaggtggcttccttgagcttcagaacataactgtcgtccacctcctgcaacgatggtgaacccactgtcagggataaggcaaacaaagaaacagcagagattcaacgatgtcaagacactgctctactcagaatgcggaatatacctctttcctgatccgatcaagctcgtcggtgctgcagccaatgatcttctctgcatgcttgttgaacacagagaaccatgccttcgcatgatgatcggagaacttgatgaacatga

SEQ ID NO: 30098 - DNA, 278 bp, Zea mays
ttgatttagatacatatggctgaatacatgatagtgtctggttttggtagactatgatgatgtagtctctcttaaggataatggttaccggtaggcttatgataaaatatggcttctactaatgatataatacccgaccaactaaaagcatctgcttgatcctaactcctcattaagctactctacttcaacacaactggacatttgctgaatgcatttatgtgacctcattcttgctttaacacaaaacacctggcttgtcttattgtgaccactgt

SEQ ID NO: 30099 - DNA, 410 bp, Zea mays
  unsure (1)..(410): unsure at all n locations
ggaaattctnttgcgcaagaggtgtattatttgacgaagaactgtaattgaacctgaacaataatttaattatttctaaatactttgtaatgctttttaccttgattcgctgtcgactgctttgttgtggacgaaaccaatgctcgtagcttttgagccgaatgcgaaaaacacacttccttctttttgttcatatcagagcaccctctttagtaaaatcaatggccgggtctcataaacaataaatttcatttgagaaaaaaatcttctgtttacgaacattttttattgaaggcaaagcctcgctttcctgttatgcttgtgctttatccctgtgatgaattacagatcctattcttttttgttgtatgctaagattatttttaacttttcattattataaagttaaa

SEQ ID NO: 30100 - DNA, 454 bp, Zea mays
  unsure (1)..(454): unsure at all n locations
agcttgaagccatggtaagtagcataggctattaaaatgcgaattgactcaagcctagctacgggtgcataggtttcaccaaaatccaaaccttcgacttgtgaataccccttggctacaagtcgggctttgttccttgtcaccacgccatgctcctcttgcttgttgcgaaagacccacttggttcctacaacattttggttaggacgtggacctaaatgccatacctcattcctagtgaaattgttgagctcctcttgcattgccaccacccaatctgaatcttgaagtgcttcctctaccctgtgtagctcaatagaggaaacaaaagagtaatgctcacaaaaatgtgcaacacaatatctagtggttacncccttatgaatgtcgctgaggatggttgtgacggaacctcccaagtaatgaagcccacctacagttgtccttgtccaac

SEQ ID NO: 30101 - DNA, 521 bp, Zea mays
  unsure (1)..(521): unsure at all n locations
tttcgcagcanaacagtgcaatattaatgaatgctgtggtaacttcacacctacccgtctgtttatatagtgtcgcaggtgggaaggtgaatcgccaaggtctcccgcaccgaacaaactgtcacccgcactcgctgtacggtgggccacagggtccgagaaggtgaatcgctggggcgcgcgtaactgctgcaagatggggccaccgcgcgtgcgccgattattntaatttgttctcgccaacgagctcanggaaggtgtttttcggatcttcggcatcccgaagcctataagatttttacacggaccaagctcgttacgaaaaacgatctatcaccgcgaagggggctactgttggggtatgcttcatagccgaagatcctanagaaagagaacaccttcgaaggatcctctcangagcaagcgccgcagctactacctatagagctntggcataatgaccaatctcaagacgaanggccgaactgacttaaagatggattgacttaaagacccatgat

SEQ ID NO: 30102 - DNA, 362 bp, Zea mays
tgattgaacacctgcccatgatggttttgttggtaaaccatgtatactatatcgaaggttatctgctcatttctcacaatgggggttgtatcaaaagatagggacaatttgatcttgcccagaggaaagatgcccttccctccgaaaccatacatagggttgtgagctggctgcagcaaattgtgattgatgcccatacgatcgaaggcatgaagaaagatgatgccagtttaactcctttatcgacgaggaccttatgtagatcatgtcctatcatattgcagattatgaccgttgcgtccgaatgtggagcactgcggaggtccttgtctcttgcatcgaaggctatcgggacatgggac

SEQ ID NO: 30103 - DNA, 334 bp, Zea mays
ctcagctatgcgacagtgcagcgtgtaggatacatgtgccatcgactacattcaaatggttgtacgaacgtgctgaaccatacaacgcgacatgaggacaggcagtgttgatcgtctttgtgggaggcgattcaacacataagtggcagtgcggagtcccttagcccaatactgtcgggaagagatgtctcggatagcaacaagcgaatgacattattgatggaaataataatacgctcggctgtaccattctgagaggatgtgtaaggacaggacatctacagatgggtgcctttgtagagcaatagggccaggtacatgaatatcaaattca

SEQ ID NO: 30104 - DNA, 456 bp, Zea mays
gcttacatgtctcgtatgattcacaatctaatgatgttaaaagcccatcagaatgaagcttcttcatgcgattctcacttatatgacccaaacgacaatgccacatgtaggtaggacttaaatcattaggccgaggccttttagcactaatattacagataggtgcatcatcaagatttaaaatgaataacccattcataatggatgcaaaagccacaaacatgccattcttagagatcacacaaccattgttttcactcgcaaatgaataaccatccttcatcaaacatgaaggagacataatgtttcgactcatactaggaactagataacaattatttaactccaaaataaatcctgatgggaggtggagttgcatcgttccgacggtcaacgcagcaactcttgcattattgcctacccggaaatcaactttctctcttttcacgcttctac

SEQ ID NO: 30105 - DNA, 383 bp, Zea mays
  unsure (1)..(383): unsure at all n locations
taccagaatatgacaacacgcaatgggagtggagagatggtgagagtagcgtgcactctccgtagcaagaggctagacggtggtgtatctgtgctcttgtgtggcgtgaacccgatctggtcttaagaaacccagtggcgagttgacatatgcaagtgttaagtgctacatatgtcgtgtgattggagatccccanctgggtattaatcgattcggatcgccattacttcttggacatgaagacttggtcacttgcctacacgtagcaatccagtgaactgaaagggatgataaaaatacgggtagtatatgccaagtgcttgaactatggtagaaagaactctagatatatgtaacattacttaacctgacaagtaaaatgg

SEQ ID NO: 30106 - DNA, 471 bp, Zea mays
agcttcaacgcctatgaagagatacttagacatatgatgatgcccaataggagctctgggaaggaaagaatataagaagtttccatgaagggaagacatgtgtgtgacatacatgtgtgatgaaatgatataaatgtactccatcgaatacaaagaattactatataataagaaggggtgaatgtaattttggaggaacatttactggagcttgacactacaaataggtgaatagtgcggtcgctagaagggtcgacattttgctaattatgcgcttgtcattacatttgtgtcaaaagatgacactaacgctaataattatgaaaaaataaatcttttatgattcatatgtgtacgaagatcatatttgccttcatcaagtattactacatcttaagttttatgttgattatgcatgatatatttgtttgaacatgacgtaacaatacaactaagaataaatctcgctta

SEQ ID NO: 30107 - DNA, 482 bp, Zea mays
  unsure (1)..(482): unsure at all n locations
agtctagtttcacaagntcgtcataccttgaatcgtccgcattagatcttctcggtgacatgcaaggctcaacctcaatgtcacgcagaacaatttctgtgctatcttgntntatggcttctggaacttcctggtcactgtggatcaatcattccttttctaactcagctaacttctcctttaacctgtgattntcttcgttatataggcataatgcctcatccttttcagatattgcagattcaagtgaagacaattttgcactaagatttagagcagcaccatccatattgtccttatagtcatcaagcaaatgttttgtaacagtttggtacattccttctctaatatcacattcaattctgaggtcctcacagtcttctctaactttatcaatttgtctcaagagctcttncttcgacagcatctgcattgacaggtctatactggcttcagatacccggatgataatgcctaatgtc

SEQ ID NO: 30108 - DNA, 451 bp, Zea mays
  unsure (1)..(451): unsure at all n locations
agctntgtgggctcacagaatatctaaactctcgtgctactaaagtttctccatttgagctcgtctatgggtaggaagcagttttacccgtggagataagtttaaatgctgtcaggatcgccaggcaaaatgacttaattgtcagtgattattataagttgatgatggacaatattgatgagttgaccgataaaagaatggcagccttatgagaaatagaaaaaaataagatcatggtagccaagacttataacaagaaggtcaaagctaagtcatttcaggtggggaacctagtgtggaagaccatcctgcctctaagaaataaagaccaaaagtttacgaagtggtcgctaagctgggagggtccatacaaagtaaaacaagtaatatctggtaacacctatttattgcanatattacaaggcanagatttgcccaaagctttgaatgg

SEQ ID NO: 30109 - DNA, 511 bp, Zea mays
  unsure (1)..(511): unsure at all n locations
tcttcacctaanagaaagattangaatgttcaatgcanaggtatggaacaaatngcttcaattggtagttgatcaatagtagttccttccaagtggcattctttcaatnggtaataatatattctatggaaaggaatgtcaatatgaaggttaaattccttttggcttaaatttgtaaattagtgcatattntgaattcactgctccatgtgcattaacttaaaagaaatttaatttatgcctttatgcctcataaatgatgatttgtttgccattcatatatagatatcatcattcattaaatacttccttgtactactaatgcctcttttcaaagtgttttatcaactagttntaaaaggaaaagagataacaaagaacgaagtctccacaaatgatgaaaagaagaatactaaggtgacaccaccacagatagtaagatctgtcaaattggtataataaatggtacattctatatggtggtaagtattcttatgcataangtaattca

SEQ ID NO: 30110 - DNA, 433 bp, Zea mays
agcttattgagtcatctaaatctgttttattatttgctctaacttctgatatttgaaatggtaaagcaaaatatgactacatttctgttgttgctcactttgtgaattcgaattgggagctcgaaaaaaggttgattggtcttatgctcatagatgtgaaacattctggaaataatatagcataacgtgttaacatggttgctgatgagtatggtttatgtgataaaatatttgctattaatcttgacaatgcttcctctaatcaaactgctatgtattatcttaaaccattgttttatggttatcctggagctctaactgatgttgatgatgatgaattgtcttccattctcttgcatcaacggtgtgcatcgtacattatttatctaatagtgaagtcacgtttgaacagagaaaacattatcttgaggac

SEQ ID NO: 30111 - DNA, 463 bp, Zea mays
actatgatactcagcttgggagatgattcattgccacatgggctagtcggcggtgccagagccaacccaagttagtcttagcaaccaagcaagtgtcgagttcagctctatcaaaatctaccaagtatagctgaccctctaacactcccttaaacgctatggaatcatcacttcttctaaagacagtgacacgctacatcagtaaatagacagttgtagcccatttgacataattgggatacggaaagcacattggatataaagaatcaacaagaaaaacattggaaatagaatgggcaggagatatagcaattttacccaatcctttgaccaaaccttgatttccatccccgaatgtgatagctcgctggggatctctggttttctcatatgaggagaacatctttttcttcccagtcatgtgggttgtgcacccgtggcgagtatccaacttgagcccccg

SEQ ID NO: 30112 - DNA, 447 bp, Zea mays
  unsure (1)..(447): unsure at all n locations
agcttcaactgatgcaaatgaaggtatctaatattgtacatccaacacgcaatcttccatgcctctaacttatgttntatgtaatgtaagtctgacaccccttgatttccaatattctgtcctcttaattgttcgtcatgaccatgattagatgttgaacctgagaagccaagcagcccttctataaagagggcagaagagaaagaggtggttgttgttcatgaaaccaaatgcaaggtgtatgtcaaggtatccatctgatctatttaacatattgctgtaatatcatgctttttggttatgatactctaatattgtgcaaattatgtttagtatgtcaaccgtatactctaatatatatatatacattcgcaaaaatgtttccagaatttaatagtttagttcactttctgattaccgcagatcagtagagattgccaggaactc

SEQ ID NO: 30113 - DNA, 482 bp, Zea mays
  unsure (1)..(482): unsure at all n locations
atcttcacctaanagaaagattangaatgctctatgcanaggtatgtaactaattgcttcaattggtagttgatcaatagtagttcctttcaagtggcatactttcaattagtaataatctattntatgaaaataaatgtcaatatgaaggttaaattccttttggattaaatttgtaaattggtgcatattgttaattcactcatccatgtgcattaacttanaaggaatttaatttatgcctttatgcctcataaatgatgatttatttgacattcatatataaatatcatcattcattaaatacttcattgtactactaatacctcttttcaaagtgcttttttactagttntaanaggaanatagataacaagctaaagaaggaagtctccacaattgaagaaaagaagaatacttagatgacaccatctcatatagtaagatctttcaattgatataacanatggtacattctatat

SEQ ID NO: 30114 - DNA, 443 bp, Zea mays
  unsure (1)..(443): unsure at all n locations
agcttctaaagggagaacacattntatgactaacaaatgttcantttgagaaagacaggatttgtagcgcatgccaagcaggaaagcaagttggctctcatcatccacataagaatataatgacgaccgacaggccactggagctcctacacatggacctattcggcccgattgcttacatgagcatcggcgggagtaagtactgtctagttatagtggatgattattctcgcttcacttgggtattttttttacaggaaaaatctcaaacccaagagaccttaaagggattcttgagacgggctcaaaatgagttcggcttgaggatcaagaaaattagaagcgacaacgggacggagttcaagaactctcaaatcgaaggctttcttgaggaggagggcatcaagcatgagttctcttctccctacactncacaacaaaat

SEQ ID NO: 30115 - DNA, 384 bp, Zea mays
  unsure (1)..(384): unsure at all n locations
atacgaaagagattatcttgttccttaacctctgcgatagacagttnntgtgcttttgtanaagagaataattctggatattggtgtcttggaatactcttagtccactgatcttcccaggaaaaaattgatctaccattgccaatgattggatgcgccaggcccttataagtgtgaagaagtttgagtatactcttcaaccataaggagccaattcttctatgaccaggaagtccgttggacgtataatatttattccagatgatatttacccaaggtaaatcataactattgaagaacttatganagaantttagaagaaaagcatcattntgagtttcaaggcgtaacaccccaagacctccatttacttttctctgagta

SEQ ID NO: 30116 - DNA, 448 bp, Zea mays
  unsure (1)..(448): unsure at all n locations
agctttgcctcgggcagactaataccagaatattataacacagaatgggcgtggagagatggcgagagtagcgtgtaccctccgtggcaagaggctggacggaggtgtatctgtgctctcggttggcgtgaacctgatctggtcttaagaaccctagtggtgagttgacatatgcaagggttaagtgctacatatgttgtgtggctagagatccttagctgagtaaatcgattcggatcgtcgttatatccctggagagtggagacttgatcactgacctgcaatctaagtcatgatgtgaacctcatgaataaaaatgatgctgtgttgatgagaaggtgaaagtacaccatatgcaaacagagtctattaatatttaatctggcattataagattgaagagaaggactcgatntataatctattatgcaaaagatctaagtgattt

SEQ ID NO: 30117 - DNA, 283 bp, Zea mays
  unsure (1)..(283): unsure at all n locations
tattgatcttggnttcaattccttcaaggctgatacgtcacttttcttttttcacaaaggggaggtggcaattntcttggtggtatatgttgacgatataatagtagaaagctccactccgaatgcaattaatgggctcttaagaaatctaaagcaagagtttgctctaaaggatttgggtgagctgcattatttcttgggcatagaagtaagcaaggtaaaagatgggatagttntgactcaagataaatatgctactgatctatttaaaaaggtgaacatg

SEQ ID NO: 30118 - DNA, 362 bp, Zea mays
  unsure (1)..(362): unsure at all n locations
agctntaaccttntcctataaattattnttgtggtggaatgcccaacacaaataattggactaactagcatgctctagattatatattctacaggtgcataaaggttcaatacaaaccaataaaaagatcaagttagggttcaaaagaaaggagcaaagaaacccaagtgtgccctggtccggcgcactggactgtccggtgcaccaggaccgtacaactccgaactcttcaccttcggttttctgaggccgcgctccgctataatttaccagattgtccggtgcgccaagtgaagcaatggctacagcgcaactgtcgactgcaacggacacctgcgaacactacaatgcgcggacagtgc

SEQ ID NO: 30119 - DNA, 447 bp, Zea mays
  unsure (1)..(447): unsure at all n locations
tcgtcactcgagagacaattgacttggagganagatattattttagttctctagtcttcactatgtactggagaaatagtaagcactgctctctccatgagctcaaccgaatgtgcttttattatttcaaaaaatacttctgagggtagagggagcccctgagccgctgatnnttgtggggacttgttctcaaatgcttcagaattaagaacaaggcaacacaaaagttaatggttaaagaccttcgtccttcgaagcattatttcccttaagatataatgatctttagacgaaggtcatgaaggacataccttcatcatctcaataaacaatggaaaacaggatcatatgacacatganaaacatgaataattatatgatatcattcagacattnntattatataatcatgaataaacatggataatatngaaatacatttatacc

SEQ ID NO: 30120 - DNA, 433 bp, Zea mays
  unsure (1)..(433): unsure at all n locations
agcttgaggagggatcgattgacttgatatattntgaacatgaccattctcaacttcatcattntgttggctttggtgggtttcctcatttatagttgaaaaggatggagtgacaataacactatcatcatcatcttcttcctttggctttatttcaccaatagccatagttttcatatcaattctcaattgagttccaccaacgtcatcaaggttctcattttcatcttgatatctatttgtttcatcaaactcaacatcatatgcttcttcaataatgccatgagttttgttgaaaactctatatgccttgctatttgatgaatatccaaggagaaaaccttcatcacatttcttctcaaatttagagagtcgactacctttcctcaaaatatagcacttgcaactgaacaccctanaataagaaatgttt

SEQ ID NO: 30121 - DNA, 374 bp, Zea mays
  unsure (1)..(374): unsure at all n locations
tcggaattgcacaaccgtngataatatggctgaagagaagaagggtgttgaccctgcattgcctgggttntatgaaactacggagaagacaaacacaaagaanatcaccaatgaaatgctggctgggttgtctgaggattccagcgatagcgaaagttttgatttggaaagtgtaaacgaagatgccgaagattggccctagcggccgagtcataccatcttcggaaagtcatccatcaagaagagtcagaatgatgctatgaaagggagatatttccacgatatttctattgtgagggttggaggagatagcaccgcccctacgcccaaagtagacgaagttgttgtctacaggagtgtcggggaccataatt

SEQ ID NO: 30122 - DNA, 444 bp, Zea mays
  unsure (1)..(444): unsure at all n locations
agcttctaaagggagaacacattntatgactaacaaatgttcattntgagaaagacaggatttgtagcgcatgtcaagcaggaaagcaagttggcgcccatcatccacacaagaacatcatgacaatggacatgccactagagctactccacatggatctattcggcctgatagcttacataagcatcggcgggagtaagtactgtctagtaattgtggatgactattcttgcttcacttgggtgttctttttgcaggataaatcacaaacccaagagacactaaaaggattcttgagatgagctcaaaatgagtttggcctaaggatcaaaaagattagaagcgacaatgggacggagttcaagaattcacaaattgaaggcttccttgaggaggagggcatcaagcatgagttctcttctccctacacacctcaacaaaatg

SEQ ID NO: 30123 - DNA, 277 bp, Zea mays
  unsure (1)..(277): unsure at all n locations
gttggctgtcttatgcggntagcagatatgaatctaattgctataataactcggtcaataagtctaagcgccatgtgtcgtgtgaatcacaacaacctcgcaagcctcacatagctgctgatgcgaggagtttggcacctctagaactcgatcattctgatctgtgcgagatgaatggaattttgaccaaaggtggtaaaagagactttctcactttatagatgactcctagatctgtatgtgatctcttataacaaaagatgaagcattccattat

SEQ ID NO: 30124 - DNA, 527 bp, Zea mays
  unsure (1)..(527): unsure at all n locations
ctctacgctcgcctaagccaagaagataaggcggtcatgctcaaacttctatagagagcgagagagcagagcgaagctcgtcaaacgctagaagatattctctccataaagatgcaacactntgacgagttgactaaagaacatgaggagctaaagtgctctcatgttgatntggtccaaaggtatgaaactatttcaattgagcaaaataacgcgttacattatatcgctcaattagtaaataagaataccttgctaaaggaccaagtagaaaagctaaaaattgaaaatctagcttttcaagaaaaatatgatatgcttctatgttctcatganaatcttatgaatgatcatatcatattaaacattgctcatganggtgtgatagagaactntaaatcccaacaacctcactcgtgcacatgtattcaaattaatactatattaccatgtgctaatgcttggtggccgtcgacaagcanatctttcttttgagctagaattgcaggaacaaatgatgattcata

SEQ ID NO: 30125 - DNA, 393 bp, Zea mays
acctgcggcatgcaagcttttccttgtcgtcatcaaccttgacatataactcttctgatttccagcctgctgcccacttgcttcggtagctaattacagggaattctgtagttttccgataggcaaagttatagcaaccaaaattatcgtgcaatccatcttttctagcctttgtttgataatgcagctcgtgaacccggcagaagctgtccgcaaatggttccaccgcttggcttcggagtgcccagatataaacaataagcctaacgatagcgttaggggtcagctgatgaaaatagataccgaacctcttcagcacctctccaatgatcccatgtagggggaatcttaatccaccctttaacaagctcttgaaaataacaatttcatctt

SEQ ID NO: 30126 - DNA, 492 bp, Zea mays
  unsure (1)..(492): unsure at all n locations
taagtagcatatgcaagtaanatgcgaattgtttctatcctanctactggtgcataggtttcaccgaaatccaaaccttcgacttgtgaatatcccttggctacaagtcgggctntgttccttgtcaccacaccatgctcatcttgtttgttgcggaagacccacttggttcctacaacattttggttaggacgtggaactaaatgccataccttattcctagtgaaattgttgagctcctcttgcatcgccaccacccaatctgaatcttgaagtgcttcctctaccctgtgtggctcaatagaggaaacaaacgagtaatgttcacaaaaatgagcaacacgagatcgagtagttaccccttcttgtatatcgccgaggatggtgttcacgggatgatctcgttggatggcttggtggactcttgggtgtggcggcttggaacttgtcatctccttattttgacatgggcatctcccttgacattgtctc

SEQ ID NO: 30127 - DNA, 454 bp, Zea mays
  unsure (1)..(454): unsure at all n locations
agcttancangtgtgagtgtctggatcagctattttctattattgngtcatattataaaccgagatggactagttgtggatccaaagaaggtagcagcgattttggactggaaagcaccaaaagatgtccgaggaattaagagtttcattggaatggccggttattatcagcgtctcattgaaggtttctccaagattgacagaccaatgacaaccctgctagcaaagaaggttgatttcaagtggaccccagcgtgccaagaatcatttgagatgttgaagcagaagttgacaatagcaccagtattggttctgccagatgttcacaatccattctcagtatattgtgatgcttcgtacaccggactangatgtgtgttaatgcaggaagggaaagtagtggcatactcgtcccgacagttgatagttcatgagaagacttaccccactcatg

SEQ ID NO: 30128 - DNA, 326 bp, Zea mays
  unsure (1)..(326): unsure at all n locations
atgattctgacgatacacatataagaactgaaggaagatttggatgtttcccatgtgaatacctatagtggaattgcagaaaaatcaatggttaagttcggcgtattggtgtcatctcttatattgccatttgagcagtctgaacatgtgaacatctctaaaaatcatcaataattgtgctacccaaacaagagtacaagggaactncaggccatttctagcagaaacacactaatttcgtggcccatccttcaatcccctaccaaaccaagtgagcccaccagctacctccaacatcacaatgcagtgttgattacaatagctca

SEQ ID NO: 30129 - DNA, 428 bp, Zea mays
  unsure (1)..(428): unsure at all n locations
agctntgccacacagagtacacggacgtacatgagatcttaaggttctccctgcatgcgtatgtcagcgctgctgggaaggactgcagcatcgttctggaagagataatcgagcaatttagactgcaagaggatccacaagatagcagtggtggattttttcacaggtgagccgtcatattttcagccgcatgcatatttgttctaaaatctaccttctgaatttgtatttcgaaaccgcgtttattagattcgccggagcgtttcctggggctcgtcgtactgaccaagttcatgggttacccgagtatctccaaagganaaggtgatttcttttccacttttctgtgtgcaatttgctgattaattaactattccctctatatatatattgacctcttttttctgcttcggtgctgttatatatat

SEQ ID NO: 30130 - DNA, 272 bp, Zea mays
  unsure (1)..(272): unsure at all n locations
actacgaatgaagcanggatatgcatagacatgctttctcttccttttataaaagatacgcagagaatgtataagaggaagctttatgtacatgtgtaaatgataggaagtagtttaccctgttgtaccttcacatagagacgctcttttcattgagctttgaccttggtcttggctacttaagacctatattcaagacaatatatggcaatattttgcacaagagagagttctacaactagtgatccttttctaagtcatgttatcatata

SEQ ID NO: 30131 - DNA, 433 bp, Zea mays
cagtgtgtcatccgtatattgtactatcggagaaacttgaccacagtgcgcggccacgggtcacttgagcaggtgttgctgtcgcgctctattgatgatggtctgtaacagatacgtcgcgagaacacaaacaataggcgagaggggatcttcgtggctaaccccactcttgcgatgaaaggtttttcctggaacaccatttcagaggactgaggacgtggcccaccgaataatatacctaatccagatcattcatctggacccagagcctctatgcaacatatcctgaagaagtaactggtgctctgtagaatcataggccttttcacaatgaacttgagcagataatctctttttgaaatttgcacatatgaatatttcagatgctcagccgagcctcctgaatggtcttccttgagaaccataatgtttt

SEQ ID NO: 30132 - DNA, 423 bp, Zea mays
cttccctcagttatcatccgcagtccaacggggtcgtggaacgcgccaacggataaatcttcacagttgtcaagaagatgctccttgatgaaaagataggcagatggatccgattgttacctgaggcagtctgggcactaaacacgactgagtgcacggcgaccgggtttactcccttctgccttctatactgatcggaggccatgaccccgcaagaaatgaagcatgggtctccacgaacagttccgtcagccgtccccgatgtggacgagccaacttcaaaggatctcattgacggagaccgagtcttcgccctacatgccctaaacctataccaagcccagaccaaagcatggcgcgaccacacagtcatcccgagggagttcaacgagggggacctcgtactcgttcgaacagctcgga

SEQ ID NO: 30133 - DNA, 385 bp, Zea mays
agcttgtggacccgtcgcctatttattgttgttgtcccccaccatgtcacctgttcaggatgtattccatgtatctcagctgcggaaatgtgctcgcctatccactaaagtgctacctgaaccggacattgagatagaaccagacttgtcctatcaagagtaccccctcagcgtattggatcagaaggagagatcaacacgggcaacgtcaatctgaatgtataaggttcagtggagtcaccattcagcagaagaagctacatgggagactgaggattttctacgctcttgctctcccgactttgtgcccaaaggagtcgatatgtaacccacaaccccacccccacctgccctttgaatacaattactagaaaaacttagatag

SEQ ID NO: 30134 - DNA, 311 bp, Zea mays
taaactagcttcttattcgccagctttttttttccgattttcagaagttgcgatcttgttgataccacatattactagctcaccgcttgccacgatcgtaacaccgtgaggtctctgatagtgtcacgttttaggccacgacatgacgataacaaagcccaacgaggagaacgctattttctgtctcttcccaacaattgaggatcggatacatccaaaagacgacaaatatcacggggagccccactatcatcctggagccaaggatcttgataggttgtgagcagatatcacccatcccatccattttt

SEQ ID NO: 30135 - DNA, 408 bp, Zea mays
  unsure (1)..(408): unsure at all n locations
gcttagatatgtcttccccagcggagtcgtctttaagtatgntgacaccttnttggaggcgccaattactcaagagaaccagcggcggtgctctctggtcaggcgcggacggtccgcggcccaaggccggacggtccgcgacctgacgcgaggccgcggtgctctctggtcaggcgcggtcaagtggagcccccgaggagtggcgtcggcagcctaacttgcgacattgacgtacctgccaacgagtcaggcgagcttattttaacttgttttgttcgaatgtaaaactacggggcggataccactgtttctttgtgtatacactaaagagggttctctaatcggatagtgtgtctctactaagctgtggattgtgaccatgcagacaccgtcccccaacatgaagca

SEQ ID NO: 30136 - DNA, 426 bp, Zea mays
  unsure (1)..(426): unsure at all n locations
ntntctgcanaagtatgtaagttgattcttgctaaatccttttccttgatttctatttaaccagcatatccttgagagtcttttctttagtcgggtaagtcttggtgagtaattgcgtactcagggttttattccctgttgttnttcaggatacaattntgtgcttctgataatggtgttaagtgccggtgggctcggccttcttataagtctaagtaacccttctatacttcttattgaggattgtcattgagctagcatatatttcaaaactataaataatttataacagctcaaagttatttctttgaatcaccttgtaatcactccgatcaggtacaatgtaaacttgatgtaacttgtaaaatttggtaacaagattccgctgcaaattggtggtgtgtgaatggtgtttacttaatcttg

SEQ ID NO: 30137 - DNA, 435 bp, Zea mays
  unsure (1)..(435): unsure at all n locations
agcttctaaagggagaacacgtgatatgtctatctaatataactntcgaaaaagatagaccttgtgcagcttgtcaagcaggtaaacaggtgggaagctctcatcatgccaaaaatgtgatgacaacatcaagacccctggagttacttcatatggacctcttcgaacccgtcgcctatctaagcataggaggaagtaagtatggtcttgttataattgatgatttttcccgcttcacttgggtattctttttgcaggatgaatctgaaacccaagggaccctcaagcgcttcctaaggagagctcataatgagtttgagctcaaggtgaagaagataaggagcgacaacgggtccgagttcaagcaagaaccttcaagtggaggagtaccttgaggaggaagggatcaagcacgagttctcctgctcctacaca

SEQ ID NO: 30138 - DNA, 461 bp, Zea mays
  unsure (1)..(461): unsure at all n locations
tgaaaagtattggatatgggtcgaagaagtgaagcttcttttgaggggatttctgtcaaaaatatccctcgaggaccaaatgagcatgctgatntgttagctaagtcagcagcgcangggctgcccttaccttcggatgtgttcttcgaaacaataaaagcaccttcggtggaacttcttgaaagagcagtcctcagtatatctcctgtttacagcgaagattggagaactgagatcatctcttaccttcagggtaaattcctttcagatgacgaagcttataacaagaggatagaaggcagagctcgtccatatgtcataatagaaggggagttatacaagcacggagtttgtgctccgctactcannatgttatccagagccgaacgtatagaagtaatgaaagaaatacatgcangcctgtgtggatctcacatcngatctangccattactttgaaa

SEQ ID NO: 30139 - DNA, 460 bp, Zea mays
  unsure (1)..(460): unsure at all n locations
tgcaagcttcagcgacaggagctggtactttacagtcgctggatcccaatcaagatgtcctttctcttatagaggcccgaagccacataaggaaggctgttggtccaacaccttctgaggatgacctggatcaggagatctaatacctggagatccttcaacaacaggtgcagctcatgaatgagaagacggctcgtcttgctgatcttcatagacagatatacgaaccttctgaagaggttcgtcatcttgttcaacatgatcaaagccgaatgcctacacgcagaaagattatgccgaaggcttcacaatgaggatgactggtctctaaattccgtcatgtaaactatgctattgatcatgattgttctctctcacagatatgaggatacagcatggncacagtgttacatgccaccccatctccccatgtttacggacatacccactcgaagaattc

SEQ ID NO: 30140 - DNA, 243 bp, Zea mays
  unsure (1)..(243): unsure at all n locations
ngaacccggctattccatacatgaatagacaatcacgcactgggagtggagagatggcgagagtggcacgtacccttctggcaaaggaccgnctaaaaagggtggtgtgctctctggtggcgcggacctgttcatgcagtggaagatccgtgggaaccgttgacatatgcaaaggttaagtgctacatatgtcatgtggttagagatcctcagctgagtaaatcgattccgatcacccgtata

SEQ ID NO: 30141 - DNA, 393 bp, Zea mays
  unsure (1)..(393): unsure at all n locations
agcttcngctatggttaaaaattttggcagtttaacagtgcaaatagcaatgaatgctgtggtaacttcacacctatccgtctgtttatatagtgatgcaggtaagaaggtgaatcgccaggatttttacaccaggcgaacagctgcttgcacccgctgcaaggtgggaccgctactcgctcggaaactaaatcgtttctcgacaacgagctcagggaaggtgtttttcggaccttcggcttcccgaagcctaagagactttnttcacggatcaagctcgttacgaanaacgatctagcaccgtgaaggggctactgttgggactatgcttcgtcgccgaaggtcttgtagggagaaacagcttcngctgaagctgtccgcatgtgatgaccg

SEQ ID NO: 30142 - DNA, 416 bp, Zea mays
  unsure (1)..(416): unsure at all n locations
tggacagtgttctgtgatgatttctgtggaaccttctgtgcatgagcggctgctgtcctagtcgcaccttcaaaagtcagaacatgttatgcagcaagacttgaattcagttgtacaaataatattgctgaatacgaagctcttcttttatggcttcggaagttaaaggcaatggaaataagaatggaaatccttaaaactgattctcaagtcatttctggtcatatcgacaaaagtagcaaggccagagatccgaagcttgaaaaatatttggacacagttcgaaggctcgaagcttctttcgaaggattntctgttaagaatattccaagtggggaaaatgagcatgctgatctgttagccaagtcagcggcacaggggctccctctacattcagaagtattttttgagacaat

SEQ ID NO: 30143 - DNA, 429 bp, Zea mays
  unsure (1)..(429): unsure at all n locations
gctntattaatcttagccaattacatcgatttatacaattacactaagaagtcttccgtcctctacacaactagaatgtatacaatttgaccgtatgtggatataattgttgtttatagcatattatcgaatctctgtttggtaggaactactgttcaatttgaaaccaaaatggatcaagtggagccagcgaggagtggtgtaggcagcaaaatttgcaacattgttgtacctgccaacgagtcaggcgagcttattttaacttgttttgtgtgactgtaaaattaaggcgcggataacatgttttctttgtatataaaactaaagagtgttttctaatcggatagtgtgtttctaattagtctgttggattgtgacccatgcagaacaccgttccaccanacatgaaggcagaacgtctattaactg

SEQ ID NO: 30144 - DNA, 463 bp, Zea mays
  unsure (1)..(463): unsure at all n locations
ctgngtagaatttggatgattnggaccttgttngatacctatactccanaaccctgccctgccccttgaattcctttactaactccgganaccctagtttctcagagaaccatgaaggagaattgtattcaagaccttagataataaactcttattatctttgcactctcataagcattacatgggtattcattattatgtatggttatatttagaaaacgaggaagaagttgaagtagaagaagagaagacttcgccaccaccacctgaggaacgtcaggcaggcagctgtttctattttgacatctacgggaccaagcctgattcacctgtaaaccaaggcaagccccggtgcatttgccgcctccttgattctttaaatctttctcacttgttaatgcattangtgatangagttgaatgttaaaacaattcctgcattaccttccttgaatttgaatac

SEQ ID NO: 30145 - DNA, 433 bp, Zea mays
agcttgtgaacagtacaaattcagaatggttaaagcagcttcagcagaccagccgaagcctatgctcttatgtgaggacatagcagagcagaaggtgctgttaggctctcagttatccgaagagcaggagaaaaccttgataaggtttttgttcaataacaaggatgtttttgcatggtcagccaatgatctctgcggagttaatagagatgttatcgagcactcactcaatgtcgatccatccttcagacccagaaagcaaaggcttcggaaaatgtcagatgataaggccgaaggtgctcgcaacgaagtcaaaagactcctcagtgcaggagttatcagagaagtgaagtacccagaatggctggctaacactgttatggtaaaaaaggccaatggcaagtggcgaatgtgcatcgattttacagatctt

SEQ ID NO: 30146 - DNA, 331 bp, Zea mays
  unsure (1)..(331): unsure at all n locations
tagtaggcagatatttttntactgacatctgngaaaatggcggncgagggatggcccatgagaatataaagaagaaccgaaaagatactcatgacgctagggaagcaacgaaggcaactgtaaaagctgcggaactcgaaaagcggataggtattgcttaatagctcttaactntattatttanttttgtgacttcgaacttatttacgttttccaccgcagccgaactatctcctcccctagagcccttcgagtcattggtcgacccagaggcaaaggaatcagcagaaattattaacatggccgaaagcattgtggacgaagtcgttac

SEQ ID NO: 30147 - DNA, 468 bp, Zea mays
  unsure (1)..(468): unsure at all n locations
agctntctcacaagctattacaaaactcaaatcaacttattatttggaatagctagagtattatatagcatctgtagataacagttggcaatttatcagaaaagtttaccatcatgcaaagtactcattgtgacaaaaaacacagatactttaacaattgaatgctaaacttatggtgagaagtgctctatctaaacgaatatggaagcttgacttacctttagtcctactgcagccaaagtttctttcaccaattcaccaatgcggtcctcgggtaagcttgaattttcatatctaaagcaaaggatggatgtatcagagatgaaagctgaacagaagcaattactgaaaaatgaccttctggcaagcatgttcccttacaaaaggaatccaacattttcacgaactgtgagagaataaaaaaatgcagcactttgaaagacctgtatcacaacaccacatcagaat

SEQ ID NO: 30148 - DNA, 437 bp, Zea mays
  unsure (1)..(437): unsure at all n locations
acttattctcaagtgctatgaattaagaacaaggcaacacanaatgttaaatgttaatgcccttcgtccttcgaagcattatttccctttggatataatgatcctcagacgaaggtcatggaggacataccttcatcatcgcggtatatgttaataaaaggagaagcatatgaaatataagagataacatgaacaattatatagcattgtcaattcatcctcattatattatcatggaaaagtagaaacaatattgaattacaaatgtaccttcngcttgacagaaagtanaagtacaagcgtgacgcacgagcaagtacaagtcagcgtgaacagtacggnggtactgttcatctttntatatgcacatgacgcaacctgtgagaaaatacattcatgcnctttacatttattatcaacttatagataatcctatg

SEQ ID NO: 30149 - DNA, 395 bp, Zea mays
  unsure (1)..(395): unsure at all n locations
agtcacctgcggcatgcaagcttggtgccgatggagaaacanaaatccttgaattcttggctgtcaaactgcttaccgttgtcaactgttagctcggacggtactccgaagcggcaaacaatgttttgccagaagaatttttgggcagtctttgatgttattgtagaaacaaccctcgcttcaatccatttggtgaagtattcgacggctacgaaggcgaacttgaggttcccctgagcggtgggcaggggcccgacaatgtccaggccccagcgctggagaggccatgtatgggcaatcagctatgtatatcgcgaggggctgcctgaccgangagaaaacttctggcaggcttcgcaggaccttgtgacccggnttgcggcgcagatcattgc

SEQ ID NO: 30150 - DNA, 458 bp, Zea mays
  unsure (1)..(458): unsure at all n locations
attactatagcgaataataacaaaaatctccaactgttaaaattcaaaaggcagaaagagacaactttggaaacacacaaatataatagaccctcagcccccaattcattcatccatatatagtatatatccggaaatgcaaagcatttatttgtaacgtgcaaattcccacaaatataacgcaactgtttgtagagtatttcacttggccaaaccaacatttattaaatgatttgccaacatctcttctggggacggattaaataatacgagatagcccattcagacgtaccctncaacgagatggaccaattaaacaagttgttgctttatattgatataccatacataaaggccttctancgaccttaattgtggatggagtaactgatatagaaatgtaacacccagtttgtaacctataatataagaggagaaaattagtcctttatctatat

SEQ ID NO: 30151 - DNA, 400 bp, Zea mays
gacctccaagcacctgagctgcagcttaaaagggacatatcagactggtctgatatgtattattataagagaactcaccatacggaagactgttattccaacatgctccatgctagaaggcacatgctctcagcatatcttccaatactagactaggacttacagtctgacgatcattctgagggagataaaccgtactaaaagtcaactctatactcatattcgcatgaaagcatatgcaaaatctcgatgtaaactgcgaacctctatcatacacgatcatctttggtacacaatacgaaccatatataactctgctagctgacaacctctatatgtagaatacacgggaatacagagagccactataatcaatctatccacaatcacccatataaca

SEQ ID NO: 30152 - DNA, 432 bp, Zea mays
  unsure (1)..(432): unsure at all n locations
tctaagggagaacacgtgataggtctaactaatggtcaattctaataagatagaccttgtgcagctggtcaagcagggaaacaggtgggaggctctcatcataccanaaaagtgatgacgacatcaagacccttgaagatgctgcatatggacctctttggacccgtcgcctatctgagcataggaggaagtaagtatggtttagttattggtgatgacttttcccgcttcacttgggtgttctttntgcaggaaaagtccgaaacccaagggaccctcaaacgcttcctcaggagagctcanaatgagtttgagctcaaagtgaagaagataaggagcgacaacggatccgagttcaagaaccttcangtggaggagttccttgagaggaaggaatcaagcacgagttctcccgctcctacacaccacagc

SEQ ID NO: 30153 - DNA, 459 bp, Zea mays
gcttcaactccatctatgctaaggattgctttcgttttattccaattgccttcggcccttcttgcagcttcctgacttccatggatagcactgggtccctgatccgaatgtatcttcatgcatagataggcaggatgaaggattgcttcacaggcgttgagagtaccacgaccaataattgcattgtaagggtattccatgtcaacaatgtcaaacacaacttgctcatttctagtgttgttgatgaacccgaatgtcactgacatggtgatcttgcccagtgctactatctgtcttcctccgaagccacagagaggatgtgtatcatcatgaatcatatcttctggctcttgcttttgtctgaacgctttatccaatatgatgtgagctgcactggctgagcaaccaagacattgtggccacacatcctttgtaacacaagagataaccatggcatcg

SEQ ID NO: 30154 - DNA, 376 bp, Zea mays
  unsure (1)..(376): unsure at all n locations
atcacatcgagtagagttatgaattgacctaacgtgccccgggtgaaatcttcctccggagcccctgggcattttaaagaacctgaatgcctcctcccttctttggcggaagacattgtcagctcgaatatactcctccatcttttggagcagcttctccaaagtttgtgggggcttcctggcaagtattgcgctgaatgtgcggccgaagccccttaacatggactcatgacaatttcattgncactggtgggcctgaccctcaacgcaaaacctcggacatctcctgaggtattttcgggcctggtcactgaatagacccgacgggactggttgctgaatcttgagctgtataaataccttactttgcatgagg

SEQ ID NO: 30155 - DNA, 491 bp, Zea mays
  unsure (1)..(491): unsure at all n locations
ctcagcttaacatacacctagctagtcctcctccagaactggagacgctctccagccacaggaacacttagagtactcctcatcacctacaacaacatgggtttgaaaaccctgagtacgaagtgtactttcgcaagtcttacccgactaacgaaaaatgactctcaaggatatgctggttaaataggaatcaaggaaaaggctttagcaagaatcaaattatatacttttgcagaaatagcttactaaagtgagtccttactttcagtattttaaagccagattaaatattaatagactctagttgcatctagtctaatttaccatctcatcatacaacatcatttgtattataatgttacattctacttagggtgcggtcaaaatcaagtctcactctccgggatatacngcggtncgatcgattactcagctaggatctctaacacacacatatgtagcactaaccttgctatgtaaccattccacag

SEQ ID NO: 30156 - DNA, 413 bp, Zea mays
  unsure (1)..(413): unsure at all n locations
ttaagcaccgcggctgcagctgcctactcacgttgggcgtccctcttacgagagatgcactcaactcctctcaagtgatccaatgatcaacttgaataccacggtgttcttgcttttcttttctcaatcccgtttgcgaggaatctccacaacttggagcctctcgcccttacaaaagatgttcacagagaatcacagagcaagggagggattagcaactcacacacgacacanagatcacagcgaatacgcacacacaagacccagacttgagctcaaaagactagcacactataacggagctcanatcactagaatgtcgaacaagtgcgcgagattgatgtgtgagtgatcaagagtgctcaaggaatgcttggtattctccttcatgcgcctaggggccccttttatag

SEQ ID NO: 30157 - DNA, 427 bp, Zea mays
  unsure (1)..(427): unsure at all n locations
tctaagctcctgatctgagaagcnctctttattgtattgngatctgtttgatcganntcctngaacgctacttatgggcgtgcgctcaaaggatacaaacagggattcgcaaacaaaaaggggaattcttagtcactttntcctgtcgcgttaaaaaaggctttacgcgagagcaatagaagttgggatacatctatctcttctgagcaacctcttttggattcttaagaccacccttgcagtaagataccgtctgctttaggttccttattatctccttcgaggggtttctacgatcattcaagctatatttagtctatttttgcttgtactgtctacttttctcatggagatggttaatgacctcagaatatagaagagaacgcatgtcgcctatttctcgaatacttctactgtgaatgctcat

SEQ ID NO: 30158 - DNA, 449 bp, Zea mays
agcttgacaacaccatttgacattttacattttatttctgagatcaagaatatttagttcatttctcaacatgcaaaagcgggtcttatcaagaggcttagtgaaaatatccgctaattgatcttccgacctcactccttctaaaatgatatctcctttagcaacatgatctctaaggaagtgatgacggatatcaatgtgcttggtgcgagagtgttgtacaggattattagcaattttaacagcactctcattatcacacaacaaaggtaccttttctagaactatgccatagtctagaagagtttgtttcatatataaaatctgtgtgcaacaagcacctgcggcaatgtattccgcttcggcagttgacaaggcaacactattttgctttttggatgtccatgaaactagtgatctaccaagcagatggcatcccccagaagtac

SEQ ID NO: 30159 - DNA, 219 bp, Zea mays
  unsure (1)..(219): unsure at all n locations
aacagnngagatgggtgngataatatnattnttgataattgtccagcaagccttgtagaaccttcctgtgaatccatcanggccaggggccttatctgagggcagacatttgatggcatcccaaacttcctgctctgaaatggnggcttccagatctgtcagatcaaaactgggcattccaagagcctctaactcaatngcccgtatcctgtctatact

SEQ ID NO: 30160 - DNA, 378 bp, Zea mays
  unsure (1)..(378): unsure at all n locations
agcttgtgcccgacacatcgcagtccacctttagagtttgttgaagtcgggcatctaaaggaccggtcctgtggtgagggcctccgtcagcgcctggaacctatggtcacttcgtcgtcgtgggcagattgtatgacgacgaaccggcggtgggaaggcccagcgtggaggtcatggcgagcgtggcggtggtggagggtggcgtantgtgcggcgtggtggctggaggcgtggcggccatggaggccggtggggattgcgacgaagaactcatggtggccggaggatcgaagggctctggtaccaaattggtaggattgctgatcctaccagggatctcccttagcctataaggatgaacaactgcgcgagggagat

SEQ ID NO: 30161 - DNA, 434 bp, Zea mays
  unsure (1)..(434): unsure at all n locations
agcttctaaagggagaacacattttgggtcttttcatgntcattttgagaaagacagggtttgctccgcatgtcaagcagagaagcatgttggtacccactatccacacaataacatcatgacgaccgacagaccgcttgaactactccacatggatctattcggcctgatcgcttacataagcatccgtgggagtaagtattgtcttgtaattggggatgattattctcgcttcacttgggtattcttcttgcaggaaaaatctcagacccaagagactttaaaaggattcttgagacgggctcataatgagttcggattgagaatcaccaagatcagaggcgacaacgggatggagttcatgaactctcaaatagaaggctttcttgacgacgagggcatcaagcatgatttctcttctgcctacacaccac

SEQ ID NO: 30162 - DNA, 329 bp, Zea mays
  unsure (1)..(329): unsure at all n locations
actatgatactaagcttgattngtcttgaatagattgtagctcttgtattgaatgtagaggatcggaatgctcgcgtgaagtgaatggacgtagttggcgttgtatttacagccaccaaccacttcctagctcgtgctccaattctgccgaccgcggacggtccatgcccctggtccggacggtccgtccctgtacatcaacggctgaaatcgcaacggtcagcagtaacggctatatcaacggctataatgcattaaatggtgtcgtagatgtcagataaaggcagtcgcagacggtccggtcgtgcaccccggacggtccgcgagga

SEQ ID NO: 30163 - DNA, 439 bp, Zea mays
agcttcagcaacttcaacactctgttttgttattgtgcttgaagacttaattgtctccaagacgtctagtacatttaccattcttttcctttttggggtcactgatggccccttttggttttttgctgtcccaatgattgctgtaggactcaaaacttctgatgttatggagccctcagtggcttctcttacctcctcaattttttctgtgagcggcgcttcggttttctcttttgtttctgacaacaaaatgtttgattgttctgattctatctttggtggcacttcggccgtttctgcgatctctggcaacaaggctggctcgattagtttttcagcttcggtggctgaagaagttttcccggtaaactccggcaccgaagctggttcaatataacgcggccgttgcgtaagaaccttatcttttccttttcggtct

SEQ ID NO: 30164 - DNA, 199 bp, Zea mays
cctgtcaggatattataataatagacggtttcttcagtgaagatttaaatactcatactgcattgaaataaagatgtagtgttataactaaagaatatataagaatgactcaattagaaaaggtaatatggatatttcataaagattatatattttttagcaatattaattattacattgaggcaaagtttaagtatgc

SEQ ID NO: 30165 - DNA, 419 bp, Zea mays
agcttatcccctaccccaggtggtttgaacacggcggcgcgttggagctacggcggtgcgcccgccggagttggtcaaaaccgcgacagatggccacaccacccaacctgactagtgcaaaacaacgtggaggcgaacacgagacagaaggtgggcttacctccaaggatcgtggcgttcggagccctgcccacggtgcggcgcggaatcacggcggcacagcggctccggtgagcattcaccgccgccctgatggtcgaaccctgccgccgagtccacgaacgacctctccaaccactcgcgatgcaccctgacccaagaggagatcccaggcacaaggtcaccggtgtcggatatgagtttccctacctatggcggcgcacagtggtcacgaggcgtggcccttcctttatacgcac

SEQ ID NO: 30166 - DNA, 354 bp, Zea mays
  unsure (1)..(354): unsure at all n locations
nnttgctgttctcatatcccacttgaaaacttcngctgacttcagtatntcaaagaatggtagatntctctctactggtctggatgtgacatctgttaatgatgctagtcttcctgcaagccgttgggcccncttctttgtgcttggcggctccatccgaaagatagcttcaatcttgctcgggttggcttcaatccccttcgttgataccaaacagccaatgaacttgcccttcttcactccaaaaacacacttttctagatttaacttcaggccagcttgcctgacattggcaatgtctcttgcaatagcaatatgattcctttcttcggctcttcactatgattctcaata

SEQ ID NO: 30167 - DNA, 388 bp, Zea mays
  unsure (1)..(388): unsure at all n locations
agcttcggcgacgggtaannatntggcagcttaacagtgcaaatagcagtaaatactgtggtaacttcacacctacttgtctgtttatatagtgccgcaggtaagaaggcgaagcgccagaagttttacaccaggcggacacccgctcgcactcgctgtacggtggaccgcagagaccgaacagtaactctgcaaggtggggccgctacgcgcagggagattgaatcgtttctcgacaacgagctcagggaaggtgttttttagacctctcgctctcccaagcttaagagacttctttcacggatcaagctcgttacgaacaacgatctatcaccgcgaaaggggctactgttgggttatgcttcgtcgccaaggtcttataacaaga

SEQ ID NO: 30168 - DNA, 340 bp, Zea mays
  unsure (1)..(340): unsure at all n locations
aagatagaccttgtgcagcttggcaatcatgttaacaagtgggaggagcacatcacagcaagaatgtgatgaccacttnaagacctctggagctgctacatatggacctcttcggacccgtcgcctatctaagcataggaggaagtaagtatggtttagttattggtgatgactnttcccgcttcacttgggtgttctttttgcaggataagtctgaaacccaagggacccttcaagcgcttctcaggagagctcanaatgagnttgagctcaaggtgaagaagataaggagcgacaacgggaccgagttcaagaacctttaagtggaggagtttcttga

SEQ ID NO: 30169 - DNA, 434 bp, Zea mays
  unsure (1)..(434): unsure at all n locations
agcttgagcggcaactggcttcgtctgaattccttgttatctggtgatcaacatgtccttcagcttctgccatgatgtgattgttcctggccgaagagaggagtaccaggtttgtgcaacattcttgactgccatgacgaaagatttcgccatgactgcagtattgcctccatatgaggatatggntgcttcgtagctcatcagaaactgcttcgggtctgagtgcccgtcatacatggggagctggggtggcttgtaagatgggggccaaggtgtagcctgcagttctgctgacagaggagaagcatcatcaaaagcaaaacttncatgatggaaattctcataccactcatcctcgttgaagaagccttcttgatgaagctccctatgttggggccttcgctcttgctcatcttgagtgagatgacgtactt

SEQ ID NO: 30170 - DNA, 469 bp, Zea mays
  unsure (1)..(469): unsure at all n locations
gcttatattagcctgctnctcctctgtatctcgatctntttatctcgttcgcaatgatggctatgaccaagctaagaatgcatcatgcagtgtccagctcgatgatcctgataattcagaattgcttgctgcgtggaaatntaacgcggctccatgctagtacacagccaagtcagatcgtcgaggccggcctgagacaagggggcagctgagccgggtactcatcacccagccncatatatgcatgcaatatactgctagctacctcacatgcagttaaactgatcaagaggacaggacggacgatctgccacataactggtagctatatatagctaccgcagtgagttatcaccttaatcagggacgcagtgagtatttctctaacgagcatcagtgatatttttcagcattgaatctggctaagaccatttatactttttcttgactgactaaatacaccatactt

SEQ ID NO: 30171 - DNA, 173 bp, Zea mays
agcttgagagggtgttcatctcacacaaattaaactatatattaacctccccttaaaaatgtgtacacaagctttgaatacttgtaacacacatgcattatgactcttaacgtcaaaataccacttcaaaagataatgtcagtcaacactaatcttacgtgatacttacgggc

SEQ ID NO: 30172 - DNA, 390 bp, Zea mays
  unsure (1)..(390): unsure at all n locations
atagaccttgtgcagcttgtcaagcaggtaaacaagtgggaggagcgcatcacagcaagaatgtgatgaccacttcaagacccctggagctgctgcatatggatctcttcggacccgtcgcctatctgagcataggaggaagtaagtatggtttagttattgttgatgattnttcccgcttcacttgggtgttctttntgcaggataagtctgaaacccaagggaccctcaagcgcttcctcaggagagctcanaatgagtttgagctcaaggtgaagaagataaggagcgacaacgggtctgagttcaagaaccttcaagtggaggagttccttgaagaggaagggatcaagcatgagttctccgctccctacacaccacagcanaatg

SEQ ID NO: 30173 - DNA, 405 bp, Zea mays
  unsure (1)..(405): unsure at all n locations
agctttaaaggtgccaaaggttcacaatattccaattataagaccaagaaagggttcaaacaaagagagcaaaagacaacccaaggcaccctggtctggcgcaccggactgtccggtgtgccaccggacagtgtctggtgcaccagggaactcaacgctgaactcctcaccttcgggaaaatgggaggccgctccgctataattcaccggactgtccggtgatgcaccggacagtgtccggtgtcacaccggactgtccggtgtgccagcggagcaacggctacttcgcgctaatggtcgactgcaacgcatntaatgcgcgcctgcgcgcgcagaggacagagcacgcgcaaaatgcgcaccggacagtctacaggacctgtccggtgcaccaccggacagccc

SEQ ID NO: 30174 - DNA, 410 bp, Zea mays
  unsure (1)..(410): unsure at all n locations
gcgggagttgcacaccgctcagtgtgatgacagggttatagttctgtatgggccccgtttgttgagaggagcacctcagtcttggtgggagtcctatctcgccacccacgccaaccccgacaccatcacttgggaggaattcagagacaatttctgccagtatcatgttccaccacgtctgatgacagtgaagaaagaggagttcctggcgctcaagcaagggcctatgtctgtcagtgagtaccgagacaggtttctgcagctgtcccgctatgctcctgaagatatcaacacagacgccaagaggcagtatcgcttcttgagaggcttatgtgatcctctgcagtatcagctgatgaaccacaccttncccacattntagcacctgatcgacagagcgatcatgacag

SEQ ID NO: 30175 - DNA, 464 bp, Zea mays
  unsure (1)..(464): unsure at all n locations
agcttgacattgatttcctattggaagcgaatgccatccttaatgccacggcgtctcccactatagagcatgtttctagcaaagataaatctttcattatctatgtgatgctggtgaattttagcagcaagttgaggtatgtgagcattctgctgtttagatcaagcaaggagaacatggatagcatcgacattgatgtatgtacatctagtacaaagggagacatgatctacagtagatgtagatggtttgcggcatttaattctttaatgttagcatgtgaaatatcattctcagttctgagattgaagcaacatcattgcgaacatttagatctttagccttagaaattaatctagcatgtgcatccctgacgctagaaattgattcattcanattatgcatcttagcaagtgaactagcattatcatttttaagagtgacgattgagtcatgacaaacat

SEQ ID NO: 30176 - DNA, 362 bp, Zea mays
  unsure (1)..(362): unsure at all n locations
gtgaagagtgccttcctcaatggaccaatcaatgaagaggtctatgttgagcaacctctcggctntgaagatagtgagtaccctaaccatgtgtataaactctctaaggcgctttatgggctcaagcaagccccaagagcatggtatgaatgcctaagagattntcttatcactaatggcttcaaagtcgaaaaggctgatcctactttattcactataactcttgaaaatgacttgttcgtatgccaaatttatgttgatgatattatatttgggtctactaacgagtctacatgtgaagaaattagtaggatcatgacacanaaattcgagatgtctatgatgggggggagtgaaatatt

SEQ ID NO: 30177 - DNA, 412 bp, Zea mays
  unsure (1)..(412): unsure at all n locations
ccacagnccagtcccatgcgtagtcttagctattatagcatgcgatctagaaccggcctctatcttttgtcaaaatcaactataataaagtgtttgccgtctaatacaccacttaaaaagctagtgaaccatcactctcttctgaagacagacacatctacatttgtaaataaacagttataccccatgttgcataattgactaacagatagcagagtatatcccaaggactcaactaaaaacacattataaattgagtgctcatttgagattgcaattttacctaattcttttaccttgccttgattctcatcaccgaatataattgaatcttgggaatcacttatcttgacgtatgaggtgaacatcttcttctcctccgtcatatggttagtgcatccgctatcaataa

SEQ ID NO: 30178 - DNA, 393 bp, Zea mays
tgccttcgcttcagtctatcatcttcagtccaacggggtctttgagcgcgccaatgggaaaatattcacagctgtcaaaaagatgctcctcgatgaaagaaaaggcagatggaccgatttattaccagaggcagtctgagcgctaaacacaaccgagtgcagagcgaccgggttcactcctttccgccttctatacggatcggaggcaatgaccccgcaagacataaagcatgggtccccgcgtacagttccgtcagccgtcctcgacgtggatgagccaacttcaaaagatctcattgacggagaccgggtcttcgccctacaggctctaaacatatatcatgcccagaccacagcatggcgcgaccgcgcagtcatcccgagggagttcag

SEQ ID NO: 30179 - DNA, 451 bp, Zea mays
  unsure (1)..(451): unsure at all n locations
agctntatcaaatggacgtgaagagtgctttccttattggaccaatcaaggaagaagtctatgttgagcaacctcccggctttgaagatagtgagtaccctaaccatgtctataggctctctaaggcgctttatgggctcaagcaagccccaagagcatggtatgaatgccttagagatttccttattgctaatggtttcaaagtcggcaaggccgatcctactttgttcactaaaactcttgacaatgatttgtttgtatgccaaatttatgttgatgatatcatatttgggtctactaatgaatctacttgtgaagaatttagtaggatcatgacacacaaattcgagatgtctatgatgggggagttgaagtattttctaggatttcaagtcaagcaactccaagagggcaccttcatttgtcaaacgaagtacactcaagacattct

SEQ ID NO: 30180 - DNA, 441 bp, Zea mays
  unsure (1)..(441): unsure at all n locations
tagagaaaatcaaatcaagctttatgggtcctcgtccttcctagaatctattgtagatgacacaagaggtgantttactcactacacaatagactgcaatggcataaagctcagtgcacaacaacattgctaagacaggagtttcaagctgcacgtgatagcatgcaagaggttatggtgagaaattcagttgaagctaccacatccttgacaagtacaaaacaagggagacacatgagaactggattattcaatgtgtcaactgtgacaccatttccccggcaattntggtaagttggagagaaagttgtagattatggattngcttctcaagttgctctcaattgtattntctaaacctttctttttcagctcatcagtctatttatcatcaaacctattanaatgaagcanatatatcagtcatgtttaaagcccaca

SEQ ID NO: 30181 - DNA, 459 bp, Zea mays
agcttctccttgtcgtcatcaaccttgacttataaccactccgacttccagcctgctgcccatttgctccggtagctgattacaggaaactttgtggttttccgataagcaaaattatagcaaccaaaatggtcatgcaatccatcttttctagccttcgtctgatagtgcagttcgtgaactcgacaaaagctgtccgcaaacggctccaccgcttggcttcggagggcccagatataaacactaagcctaacaatagcgttaggagtcaactgatgaaaatagataccaaacctcttcagtacctctgcaataatcccatgtagggggaatcttaatccagcctttagaaagctcttgaaaatgacaatttcatccttctccggctttggggtagtctcttcttccccgaagcgtaatagcttcttctgatttcattgaatagcccgacttaccatc

SEQ ID NO: 30182 - DNA, 320 bp, Zea mays
  unsure (1)..(320): unsure at all n locations
caatattttggcagcaaaacagtgcaatagcaatgaatgctgtggtaacttcacacctcacctgttgtttatatagtgccacangtgggaaggtgaatcgtcaaggccttccgcaccgggcaaacagccacccgcactcactgaacggtgggccacagggtccgagaaggtgaatcgccagggcgcgcgtaactgctgcaagataaggccacttcacgcacggattaatttaatcgtttctcgccaacgagcttanggaaggtgttttcggatcttcggcatcccgaagcctataagactttttcacggatcaagctcgt

SEQ ID NO: 30183 - DNA, 435 bp, Zea mays
agcttctcttaacatataattagtaagtggtatataattcataccaatacaaatattatagtataaacagtggtttaatgtattattagatgttttgatctctgagtattaatgacaattttttagaaagaagagataatactaaaatgagatcattattcatagtataaataattaggtaataattagtttatttctatagaattggctaagtcattacacctatgccacatatgtttagtcagataaaaatatagttttttctagtcatgataaatgtaagtataacacttaattacttagaattagtaaaatacttgtttatgtcataataaccatgaatatgttattaacagtccaattagttatttacaattaattcttagaatattaatgttagaagaattataaatgaacaatttttagttatacgta

SEQ ID NO: 30184 - DNA, 257 bp, Zea mays
  unsure (1)..(257): unsure at all n locations
attggaactcatacatactgatgtgtgcggaccaatgagtacgacagctaggggaggattccaatacttcataaccttcactgatgattttagtagatatgggtatgtctacttaatgaaacacaagtctgaatccttagaaaagttcaaagagtttcagaatgaagtagaanatcagcgtggcaagaaattaaagcactgcgatcagatcgcggtggtgaatatttgagtcatgagtttagcaatcatctaaagag

SEQ ID NO: 30185 - DNA, 317 bp, Zea mays
  unsure (1)..(317): unsure at all n locations
agcctagagaggtggatatgcattttggaattttgtgtggcnggaccnaaccaagctccatgaccatcaccgcatcctagtcatgaactcttatatgcatacagaggacccaactgtataggagagaataaaccaacgtgagatgcccacaaattcggatatttctttaacccaacgagtgatgatagagacccccaaaactgaatgggaccttgcagcctgaacaacgctccaggagaccatgggccatgacgagaggcaccggaacctccccacggaagaggaggcgacatgggaaactcatgactatgtaaaaa

SEQ ID NO: 30186 - DNA, 370 bp, Zea mays
  unsure (1)..(370): unsure at all n locations
tctanagggagatcatgtgttatgactaaccgatgtctgttttgagaaagacagacctcgtgtagcatgtcaagcacggaacaggtgggaagcactcatcacagcaagaatgtgacgataacatcaagaccactggaacttcttcacatggatctcttcgatcccattgcctatctcagcatcgggggaagtaagtatggtcttgttatagttgatgatttttcccgcttcacttgngttttctttttgcaggacaaatccaaaacccaagggaccgtaaagcgcttcttaaggagagctcaaaatgaagttgagcttaacgtgaagaagataagaagcgacaatgggtccgagttcaaaaatctacaag

SEQ ID NO: 30187 - DNA, 292 bp, Zea mays
  unsure (1)..(292): unsure at all n locations
tatgaagattcttcattccaacatgggctagtcggcgatgccagagccaacccaagttagtcttagcaaccaagcaagtgtcgagttcagctctatcaaaatctaccaagtatagctgaccctctaacactcccttanatgctattgaatcatcacttcttctaaagacagtaacacctatattagtaaatagacagttgtagcccatttgacataattgggatacggaaagcaaattgtaatctaaagaatctacaagaacaacattggaaatagtatgatcaggtgatat

SEQ ID NO: 30188 - DNA, 462 bp, Zea mays
  unsure (1)..(462): unsure at all n locations
agcttaacaagaacaggactgtcttgctgattngaccacgtgtatttgcgcccaaaaagtggaacctcattgagactcaagtcctcaaccaacttcctaaatctccccatcatagctctgttaatatttgaattatttttatctgaagccctgtagatgagattgaagtcaccagcaatcaaccagggtccagtgcaagcagccctgacgtctctcagttcttgaagaaacaacatcttatcactgttactttgaggaccataaacacaagttaaccaccaacagcgattatgcgcattgcagaattggattgaaatgctgtatctgtcaatcctagacaacccagtcactcccagatgtcgcttccaagcaaccagcacaacaccactagcaccacaagatggtagaaaggagaactggcaaaaatccgaacccaaggctgcaagaatggttcttgtagaa

SEQ ID NO: 30189 - DNA, 394 bp, Zea mays
  unsure (1)..(394): unsure at all n locations
tcccgcgtccagtacagtgccgtacaatgcttgcactatcttctccaaactaccgctatctgtacgtgacagtggcacactgcgacgctgactgtatagtgtatactactgttctttcttctgacgtcttcccatccaaactagcactaactgcaaaggaagaagacagctaaactgtccattgatcaacagtaaaatcacggtcgctaacagctgctggcagctntcatgtanggcgttcaggctagctacagtgcagtctcgagcatccactccaaatagaacagctcctttgcagactgggaacttaaaggcgatgcacagactcacagtattctcatgatgacttagaattncaatcttacgtactaccttcaacaacctcgaacaggga

SEQ ID NO: 30190 - DNA, 431 bp, Zea mays
  unsure (1)..(431): unsure at all n locations
catgcaagctngcagaaacgtgcaatggtagcaataagatgctcttttctcatggaagtgccactggggcagattgacgaacttgttgtttctccggagtatgtccgctaccttgttagaattgccaacagtaaaatggaggcaaataaaaggcgaatgaatggatttttggatctcttgcaaactaaggtattgagctattttgtcttattgtgttccttgtactgtcgctcactttttttgttagctctcatagcaaaaatgtttggaaactttggatattgtttaagtccaaaaatgtttctgctgaatgttcattaagctggagtgaagagtaaactcagtatttcttttaagagataataataataataatataggacacttctgttaataaactacttaatgagctgatcaagaattttcaagca

SEQ ID NO: 30191 - DNA, 427 bp, Zea mays
ataaaccgactaaagatttatgtctcttctatcccataagagtttgagtcatttttgtaaacttttatgaggggtgtgattgtaattcctcacaggctgtgtcctgtgcctataaatagagaatagtattcctttactcttcacgcattcctgtatttgcaaccgcatcattcgggaaccaatctttgccaaggcagaggtataattgtattcaatgcttaaatacattgactggatacaatatgattcgtttatgattcattcacctttgacactccatattttatgttactttatacaatctgttataattcaattatgaagaattaaccttcgtaatcgtatcgccatcaaccctcgtccagagttcattaatccctaagggaataatatccttcgttggacgaaggatattaacatttaacat

SEQ ID NO: 30192 - DNA, 458 bp, Zea mays
  unsure (1)..(458): unsure at all n locations
tgagcctaactatggcgttaggggtcaactgatgaagaaagatttcataattatccaaaatttctccaattatctcattcagcggaaaccgtaatcctgctctgaanaagcttttgaaaactaccacttcatcatctttcggtttcgaagtggtttcttcctcggcaaaacgaataagcttcttttcagcttctccgaagtagcccaacttcatcatgatgggcatatcagcttcagacacagtagatttttcaaaatccaagtggctgggttntgacgggaccagaatggtataatcctcttcttcttcatcagcgttntccttctcaacatcttngtcagcttcggcagcaggtgcaccttcttcaatggcttccttcgtcacaactaggcccgattgtctcatgacttcggagatcggagctatctcagtggcttcagtctccctcccttcacgg

SEQ ID NO: 30193 - DNA, 409 bp, Zea mays
gcaagctggaaccgagagaccacgacaccggatatcttttattcgctcaccggagtctccgaacccaacggcgcgcgtggaccggacaacacccctagccatattccgaatcctcgcgcgtatgagctctgtgacatcccaaggagctcctcatgcccatctgatagaacacctcgcccgacggacggccagagcaggcatagccggcgacctccgccgcctgctcacgtggagcgaacagctccgaccgtcgctgacgccaaccggaccatcaccgtgaccgccgcgacctcctgaacctgaccgaccaccaagccggacctacctcgccgtcgtgtaaccgcgcagcccttaattttaccgaggctactggttcaataagtggagggaccgccggtgacacggaaag

SEQ ID NO: 30194 - DNA, 400 bp, Zea mays
ctcagggaagcgccatgagaaccattccctgcagtgttctattgagaaaacagtaaataatcataccaagggcatattggcacattcatatcctcaaagctccctgcctatgatgcctcttagaaaattgaccataaacagttataggagaacaagcaacagacctgactctcatggagaaggaattgatgtccttgtcaagcgtatccaatagaaagattgcctggatcaccatgttgtcaacacgattcacattgaacttcaccttggccctgctgtagctatgccccaggccaagctgggccttctccaagtcagaatcctacaatgaccatcggaaaaacaaattaagcacatcaagcattcaacttcacaacaaaatgtgatacactatgcataa

SEQ ID NO: 30195 - DNA, 242 bp, Zea mays
  unsure (1)..(242): unsure at all n locations
cagcttaatctgtcaaatttcacagttagacaagtgatcactattgtattttgactcgagagagagagagtgatccgcgcgatatttgtcaatgttgatgctaggctttggcaatagtgctttcttccttcccaggcttattctcaagtgacttgtagtangaacaagagacaccatgttgtcggggtccttgtgaggggtgtaagagaactgtttgaataaaggaaaagctcactctgtct

SEQ ID NO: 30196 - DNA, 266 bp, Zea mays
aaatggagcaatggcataccgactgcacttacccgataccttgtctgcagtacataaggggttccacgtgtctcaattgaacaagtgtgttcaggttcccgatcgaaccattggagcaacagagctgccttgtaacctgacttggcatattggaatgaccctattccagtatcggatcaaaaggacataattacccgaaggataactatgacgttctaccagatacattggcacattcgcctgggagatgaggctacctgggaaac

SEQ ID NO: 30197 - DNA, 282 bp, Zea mays
cgactgggagaacatgagttaggactatcagatgtctgttgtgagaaagtacaaccttgtgcagcttgtcaagcaggaaagcatgttggataaagtcatcactccaagtacataatgaggacatcaataccactagagttatagcatatgaacttattcggcctcgttgtttatcttatcaacgacgagagtaagtatgggcttgtaattgttgattacaatacacacttcacttaggtattttcttggaggataaaagtgaaacccaagggactctaaagc

SEQ ID NO: 30198 - DNA, 472 bp, Zea mays
gctgcggcatgcaagcttcttccctttttggcggatgtatttttttccggatgtcctcatccattttctgaaggagcttctctagagtctgggggtttcctggcgaagtattgagccgtaggccctggcctaagacctttgatcatggcctcaatgacaatttgattgggcaccgtgggcgcctatgctctcaaacgcaagaaccttcggacatatgcctgaaggtactcctcatggtcttgagtgcactggaacaatgtctgagcggtgactggcttcttttgaaacccttgaaaactggtgactagcatgtccttaagcttctgccatgacgtgattgtccctagccggagagaagagtaccatgtctaggccacattctgactgccatgacgaaggacttcgtcatgactactgtattgcccccgtacaaaatataggtgcttctagctcatcaaaactgcttagatct

SEQ ID NO: 30199 - DNA, 381 bp, Zea mays
  unsure (1)..(381): unsure at all n locations
acttcacaagttggtactttgcagaagaacataatgtatttgctcanaagaagatgtaccatgatgatgaacgagagatgcctccgtgtagtgatatttcgatatttcagaacaacggcaaagtcgttggtccacccaaggcatatcacctcactatggaagaacggaagtctgctttactgtatatgttcacgaatatgcctgacgtggaaaatactttgtgtaagacttatttccttaaattggtcatatgtgaattagtttatggtatcacatatctcatgtcatacaataatatttgacagcgagtttgatgaacaaaacatgacgtggcttgatatgcccacagcgagagacatatgacaattgtgacgtgatgga

SEQ ID NO: 30200 - DNA, 446 bp, Zea mays
  unsure (1)..(446): unsure at all n locations
tgcggcatgcaagcttaatatcaagtgagctgattatcttctttctctaccttctcttttntgctctagcgtagctctagtttaattggttcctagttcacattttgtctatcttgttctgatcctcatagcttcagactgccttaccatacccacccccctctacactgctccaccccttccttttatggcattcccctgatgctgacactatcaaactataaatccgtactacatacttcagtttctaagaaacggaaaacaccttgagaccaatacctgattcactataaccaattaagttacctacacaactataaacccaagtagaccttgctgctgtatgcatagacatcatatgaactaacgggacgtttggatctattcattttggaggaattggtaattacttaataacgtagtctatttggtttggaattagacat

SEQ ID NO: 30201 - DNA, 367 bp, Zea mays
  unsure (1)..(367): unsure at all n locations
agaattcatnctagacatgtcagatcgactcattccactcagaatgatgacaggggaagccagcagcagaggccgcaatattcctcccaggcttcgggacagcagtagagttatcctcggcctccagctccaaggggcagaggtgccaggggcttcngaggaagaattggggatcagccaagggaaaattattgcctattctgtggtgaggacaagggccacaccaccaggatgtgccatgtcaccatccagaaacaaaaggaaatagcagaagctgcagcccaacagacccagccgaagcaagtcatgcatattgcttcgtaccactcgccttatatcccagagtatgtgggtaaccaccctgcag

SEQ ID NO: 30202 - DNA, 459 bp, Zea mays
  unsure (1)..(459): unsure at all n locations
agctctggattctccgagtggtgctggttatgtatctnttgacgggccttagttaaataccgagtctctatttagtagacctcgatggaacttagttaaatagaccgtaccagaccggctcgtgggcttgacttgagacccacaaacagtgtacatattgggccatgccagtctagacccacaattaggttgtaccgtgccagacctgaaccgtactaaaaaattgtacggtttgaacggactattagccacaacacaaatctacacctataaccgcgactaggggtgaaaacgggcggatacagacggatagtagctcgtcctgtatcctaccctaatgtattaaaaacggattcgggatcggatacgaatagttagaaacgggatggatacatatacaggtaccggatatttatccgggcggatatgtgacggatacggatattatctggtcggata

SEQ ID NO: 30203 - DNA, 385 bp, Zea mays
  unsure (1)..(385): unsure at all n locations
ccatctcttaacatatgatttctatggataaactcaacacaagagatggcattagtagcacaagcactagtttcttatttagcaaccctttatatgcgaaagacnaagcgtgtgctaaaaacagaaaaacctcataatatggactaaatttctcttgagccctcatgcacaatatattntgaatgacatgaataatatgcatgggtgttcaatgaagtctaaagggctgaattaatccatattatggtgagtgtctaataaagaagaatcatatccaaattaactagatagagaataagtcacantaatttggattgtcaccatatgataatattcattcatcttccaattagacctttatttcataatcaacaactaatgtata

SEQ ID NO: 30204 - DNA, 445 bp, Zea mays
agcttgtgaagggtcttcatccccacatgttctattcggcgacgccacagccagcccatgctagtcttagcaattaagcatgcatccagaccggcctcttcttttgcaaaaacaactaaggaaagcttgccgactaatacacccttacaggctagtgaaccatcacttcttataaacacagacacatctacatttcgaaaaagacaattatatgccatattgcatatgtgacgaacatatagcagattgtaaccaagagactcaactcacaacacattggagatagagtgttcattacacattgcaactttacctaaccctattaccttgccttgattcccatcaccgaatataattgaatcttgggaatccttattcttgacgtaagaggtgaacatcctcttcttgcccgtcatatggtgtgtgcatccgctgtcgataatcc

SEQ ID NO: 30205 - DNA, 335 bp, Zea mays
  unsure (1)..(335): unsure at all n locations
ntagcgaccgacancnnnnanctatcgatcctctgtcgcttacatngcatacttcacgaccaacccggggttgctatactatagaattagcaaccaatcgtgaatcgttatactatacatttagcaaccaacagaaagttgcgcctaattatagtcgttaataatgataatataccattaattagcattcaacaactgttatatatacaaaagcatcacaaatcaccaagtnttatacacataatcacatagatatacaaatctaattagtattgcacaatgatagatccacatcacataaaccatcaacaagcaccacaacaaattcattcaca

SEQ ID NO: 30206 - DNA, 443 bp, Zea mays
  unsure (1)..(443): unsure at all n locations
agcttcggcttcatctatatagtggattgtttttgaatcagtccaattcccctcggcctttctggcagtttcctgactcccatgaatagcaataggtccctgatccgaaggtatcttcatgcaaagatatgctggatgaagaattgcttcgaaagcattaagtgttccgcgaccgatgatagcattataaggatactccatgtcgacaatgtcaaacacaacttgctcagtccttgtattgttgacgaatccaaaggtcactggcttggtaatcttaccgagcgctacaatctgtcttcctccgaagccgcagagagggtgcgtagcatcatgaatcttgtcttcnggctcttgcatttgtctgaaggccttagcaaatataatatctgctgcactgcctgtatcgaccaaaacattgtggaccataaatcctctgatcacac

SEQ ID NO: 30207 - DNA, 455 bp, Zea mays
  unsure (1)..(455): unsure at all n locations
ntttggtgagaatgagctattctaagattcttctagattgtcttcactttctttttggcttctttcaccaagtctagaccaaagaatggcctttctcttggctcggagcaattggtaggtgtcctacaccttcttacataaagaattcanagggtgacatattgatacttacatgatagctattgttggaggagaaatccacaaaagatagaaatgttgctcacttcttcacatangagagaacacaagctcatagcataacttgcaagatttggctaactttttttgcttgaccttcagcttgaggatgataagtggtgatatacttgagctntgntcctaaggcttcatgcaagattctccaaaaatgagcaataaactatgatcctcgattcgaaacaattgaccttggcacaccatgaagaaacacaacattggcgagatagatctcatgt

SEQ ID NO: 30208 - DNA, 285 bp, Zea mays
  unsure (1)..(285): unsure at all n locations
tcataaccccagtgggacatactgctaccttcggatgcctgatgagctcaagaatgttggaggaagcttcagcaggatgacagccaaagttctccactcnccaaatggcaagaatgtgctgacatacgttgatgatatcatattcaaaagcacgaagcaagaaaatcacattgctgatttgcaagaaacatttgctaatttcaaaagggctggtctcaatttgaatccagaanaatgtgtcttcggagtgaagaanggaaaatttcttggttgtctggtatcaac

SEQ ID NO: 30209 - DNA, 444 bp, Zea mays
  unsure (1)..(444): unsure at all n locations
agcttcgggtaacccatgttatccacatttctcgacatacatcaatttccttgttatcaggaaggcagtataggaaatcatcctcttcatcgccttcgtacactagggatcttcgaggatactgttggaacttgctctcctgtgcaagttgatccaacgggggagtgtagcaacacaaacagggtttttgcacgagatggcaatagctctgttaatctagcctctcaagggcactgtgcgggggtatttataggtatctgagtgcccagcgtccagtgttaaggatgcatgtgcccccagacgcctaggttatccccaaaatattcccataaagcagggttacagaccgtaattatagggaggcttttacaaaataggcccgtaacgcgcagcggccatgcagggcctgttacaatgggccggatcacacgtgggcctncatgc

SEQ ID NO: 30210 - DNA, 424 bp, Zea mays
  unsure (1)..(424): unsure at all n locations
ntgagtngattntgaaataatcaattcaaaggtctntgtcttatgccgctttcanaatgattttttagaataacctggtgatgacatgtgtccatatcttgctaggtctagaatcaatttgataagtgttgagtaggaaatccagtcggttgaaatagagaacccttggctggacaccactcagccccgtactttaatgcttctgctgattggacttgntgctttgtaaccgcatttggaattccttccattccagccgatcttcccttnttgtcgcggtatattcattgcgtatattttgcatgtatcaccgcttcagaaaatcttgaagaatccgggtggtacacccaatgggtgtgcccaaaggggtgtcttcccgcgaaagggtgttatcgcgttgtccttgagtagtaacttgacatga

SEQ ID NO: 30211 - DNA, 468 bp, Zea mays
  unsure (1)..(468): unsure at all n locations
agcttatgaagattcttcatcccaacatggtctattctgttgtgccagagccaacccatgttagtcttagcaattaagcaagtgtcgagttcagctctatcaaaatataccaagtatagctgaccctctaacactcccttaaatgctattgaatcatcacttcttctaaagacagtgacacctacatcagtaaaaagacagttgtagcctatttgatatatttgagaaacggaaagcaaattgtaatctaaagaatctacaagaaaaacattggaaatggaatggtcaggtgatatagcaattttacccaatcctttgaccaaaccttggtttccatccccgaatgtgatagctcgttggggatccttggttttctcataagaggagaacatcttcttctcccctgtcatgtggttggtgcacccgctgtcgatgatccaacttgagcccncggatgcatanacctac

SEQ ID NO: 30212 - DNA, 208 bp, Zea mays
  unsure (1)..(208): unsure at all n locations
gagcttcggatgtggtggcatcatcaagctcgttgatcttccttgagccttcgatcatgcattcaaagctcacaaaattcccgataacttcctcggnggtcattttggtatatctaggattaccacggattaattgaacttgagtagggttaaggaaaataagtgatcttagaataaccttaaccacctcgtggtcatcccactttac

SEQ ID NO: 30213 - DNA, 471 bp, Zea mays
  unsure (1)..(471): unsure at all n locations
gcttatcctttntcttacanacagtgctggacatccncaatgttatagtgcttgtgcgaataaatcccttgtccagcaactcttgcaactgcttcttcaactctgccaactcagcgggtggcattcggtagggcctcttgtgaaatggggtcgttcccggttgcaactcgatggcgaattcaatatcccggtccggtggcatccctggcaattcatcaggaaagacatctgcatactcacagaccanagtggcgaattcatactcacaggatcttcttcaggggattatgtagactgaaaatcaattattaggattgcaaaactataaccaaagtggttaacanaaatccagtgaactcataaccactagagccccactacanaaatacagagcaccccagcctatacttttaagtaaggaaaataaatacaaagtggtaataaagcattntcccaatanatcataaacaa

SEQ ID NO: 30214 - DNA, 398 bp, Zea mays
agctgcataaactccttatacaggcccttctacttatgttctatcatgatgtaatgaatagttacatggtaaggcgttgacgacatagaactataaaactcccttgctgtcgaggatccaccaatagactgagtgtgcatcggctactgaacgggcgacaacctacgtgtgacggatttacagtacaatgccggagactcagatactgatggtgcgtccgacatcaggcacacaaggcacgttgcctcggagttgattcgtgtctaagagcccgcacctatgctagtgcgcagcatgcagcacccgaccactgagacagccccatggagacccgcctgttgcgcaacggatactaataacagtaggttcttagcacacaagacgaccggcggcctaat

SEQ ID NO: 30215 - DNA, 449 bp, Zea mays
  unsure (1)..(449): unsure at all n locations
ctatcgacaaccatgacgcggccattccaatgtcgcatatgcagaggcagaggttatcatcaactatctccagcggcaccggccgcatcgacactccaccttgatgagctgaaagcacacgctntcctcggcgatggctccaacaaagacatgatcgaaggatggtgcctcgacatcggcgccactcatcacatgaccggccgacaagagttcttcactgagcttgactctatcgtccgaggctccgtcaagtttggggatgccttcggcgtanggatcaagggcgtccgcttatttgtcttcatcgtcacgtctggtgagcacatgttgctcaccggagtctactacatncccgcgttgaggaactctatcatcagcttaggacaactggatgagaacgtgtcatacgtggaggtcgagcaccgagtcatgaggatctgggatccatc

SEQ ID NO: 30216 - DNA, 462 bp, Zea mays
agctggtgaaggttcttcatccccacatgtgctatgtggtgatgccacagccagcccatgctagtcttagctattaagcatgcatctagaccggcttcttcttttgcgaaatcaactaaataaagtttgtcgtctaatacacctttaaaagctagtgaaccatcacttcttctaaagacagacacatctacatttgtaaatagacagttatatcccatattgcataattgactaaccgatagcaaattatatcctagagactctactagaaacacattagagatagagtgctcattataaattgcaattttacctaacccttttaccttgccttgattcccatcaccgaatatgattgaatcttgggaatccttattcttgacgtatgaggtgaacatcttcttctcccccgtcatatgggttgtgcatccgctgtcaataatccagcttgacccccggatg

SEQ ID NO: 30217 - DNA, 225 bp, Zea mays
  unsure (1)..(225): unsure at all n locations
cgaggcacatctatgcaaagagtgggattctgactgctcctcttccgactccgacgatgaaggactcgccgccaccgccttcaacaagtcatgtctcttgcacaacgagcgtcacacatgccttatggcaagggagaagaacgtatgtactcngaactctacatatgctgcttcgagtgaggacgaatctagcgatgaggacgaaatagattattcatgtgtatt

SEQ ID NO: 30218 - DNA, 510 bp, Zea mays
  unsure (1)..(510): unsure at all n locations
ttanggtttcttaactngngttaggtgttacccctntaatctctatttagggntaatttccctatctagggttctatttgcaaaatgctataacaatacaacttgtttgaaatttgtacctagtgaatacactctaggtgtgtcaaacatatgcaatgtcaatgcttatgatgttatgctcaagttttagttacagtaacaccaggggtgttacaaggacgtcgccaacatcgtcgtcaacaaggccctcctctttcctaacatcggccacaaatgtttcatggctaaggacggcaagataaagaaggtacactctatagccacccccacatatacaacatctatgtatgagggtagctctagtgaagacgaagatgatttacttactctttttgccaacctcaacatggaataaaagggaaaattaaatgaattaatagaagctattcatgagaaggattgaacttttgatagccaagaagaattcttatnntaagaaacaaaacatgt

SEQ ID NO: 30219 - DNA, 391 bp, Zea mays
  unsure (1)..(391): unsure at all n locations
tctgttaagaatattcctcgagggcaaaatgaacatgctgatttgttagccaggtctgcagcacaggggctgccgctaccttcggatgtattcttcgaaacaataaaggcaccttcagtggagttacttgaaagagcagttcttactatttctcctgtgtacagcgaagattggagaactgaaataatttcttaccttcanggcaacttcctatcagatgacgaagcttataataaaagaatagaggcaagagctcgtccgtatatcattatacaaggggagttatacaagcatggagtttgtgccccgctgctcaagtgcttgtctagagcccaacgtatatagttgatgaacgagatacatgcacgcctttgtggaatccacatcggat

SEQ ID NO: 30220 - DNA, 458 bp, Zea mays
  unsure (1)..(458): unsure at all n locations
agcttgacaatgaggagatggcgctcgtcataatagcttccgccaaatcctcaaacaaaggagggggaaagactacaagtcccgctccaagaaggtttgctacaaatgtggtaagcccggtcattttattgctaaatgtcctatgtctagtgacagtgaccgaggcgacgacaagaaggggagaagaaaggagaagaagaggtactacaggaagaagggcggcgatgcccatgtttgtcgcgagtgggactccgacgagagctcaagcgactcctccgacgacgaggacgccgccaacatcggcgtcaccaagggactcctcttccccaacgtcggccacaagtgcctcatggcaaaggacggcaaaaagaanaaggttaaatccaactcctccactaaatatgaatcgtctagtgatgataatgctagcgatgaggaagataatttgcgtattctct

SEQ ID NO: 30221 - DNA, 206 bp, Zea mays
  unsure (1)..(206): unsure at all n locations
gcgcatgtcaagtanggaagcaagttggtgttcatcatccagacaagaacatcatgacgaccgacaggccgcttgagctactccacatggatctattcggcccgatagcttacataagcatcggcgggagtaagtattggcttgtaattgtggatgattattctcgcttcacttgggtgttctttttgcagganaaatcacaaacc

SEQ ID NO: 30222 - DNA, 436 bp, Zea mays
  unsure (1)..(436): unsure at all n locations
agcttgcccttcaagcgacccgtataggttactgaggagtcctcccttctaaggatcttcacatccacatcagaaaataagcaattataacccattccacaaagttgtgaaatggacatcaaattgtagcttaaagaatctaccaataaaacatttgaaagtgattgttggtcagagataggaattttaccaataccaatcaccttactcttgccactatctccaaacacaatttcttgtgctcttgagttagttgcaaggaatgaaacatgtcttcctccccggtcatgtgatttgtacatccactgtcaagcacccaacttgacccaccaaaggagtagacctgcaaaacanatttaggctatgcttttaggtacccaaattgaattgcgtcctacagtgttagttatagccttgtgtacccacacacttcttt

SEQ ID NO: 30223 - DNA, 339 bp, Zea mays
ctaagctgactagtatccacataatcttaatcattttcttgtctcatggacaaggcatcctccctggatccaagtccatagaccaacatatatcccattatcaagatgagtacaatcaattcctgacctcgcgcgagtgctagaaaaatcactcgacttctaccgagatcctgattagcaagcagctactcgacctagcatactagtattcatctcaaaaaggaatcctaagttcatgcaactagagggttcaagcaactcctacacttaagtgcacattacagtcctacaagcattaagtgtagtaaagtagcatatattaacatggttatgcataaa

SEQ ID NO: 30224 - DNA, 450 bp, Zea mays
agcttggacattcttcatcagagaagtattctttattttatgatatagaaaagattttcttcacgaagcatgaaaagaagggaaggtgttttttcgccgaacgctcaaaaaatggtatgtatgtaaagtttcatgcatcgtaaagaattaaactataaatagattgtatattacatttaaagctacaatatattacacatttttacatttcaaatgtttctacaatgacattcaatcctctttaagcactatatctgcagcttcgctcaatagttggctgacaactctgtccataatggcttcagccatttgtctaatttcgtcgtcccccttcgggtgggggcccggagatgcctcagcagcttctgagggaagaaaagatacggttatattactatcactaaccgagaacggagttcggaataaaagttcagcatgatcaaaccacta

SEQ ID NO: 30225 - DNA, 495 bp, Zea mays
  unsure (1)..(495): unsure at all n locations
tcactgctccctcacggtcacgatgcacccctccagacccttatcactcaccgccaccttgccggcgacctcaccgtcgcggtaacccaccaccccaccgtggctagcttgctccagcctgccaccagccaaattggacccaccaccgtgatcgcccgcctccacccgtgcttgtccaccactccaaaccttgngaactgagtcaccgacagagagccaccgtgaaccctaaccggtggctaattcccccgcccccgccccaacttggtcgcccctccccgttcacaatccttaaatgttgtcccctgtctccctggcgtgtgggaccggccctcaacactgtccncgcatcgtcccnctttcgtgggccgattgggccgcgcgctcgtgctcgccgcctgcgcgtggtaggctagaatcgccctgctaacccataataccaggaatcccctttaatttctattgtaatttctctaattcccatgatctatatat

SEQ ID NO: 30226 - DNA, 422 bp, Zea mays
agcttgagaaatggaatggtggcgcccactattcttaagtagaaaggaggggagggaggggaatgtcgaatgtgtatgtgactgtggtaactggaccgatcagctatggatggagatcacgcatgttgatattgtgaattatctcttttttttaatttcgaaaattcattctcttttttttaaaaaacattagattattcataaataactatattttaaatattccaaaacgtataataaatctaataacattatttgactaaataatatatattataaataagcttttagacaatttaagtaaatggagcttcacacagaggatcaattataagagaggtgttgtaattcattaacaaacaaagaaatcatgcatcgataatgaatgcattcaaacacttgatatttgtttaggttactct

SEQ ID NO: 30227 - DNA, 383 bp, Zea mays
  unsure (1)..(383): unsure at all n locations
ntatatggacgacgatgtcgtactctcgctanatggtctgaacctggtgaaaggtacttatttaggcctgatatggtgaaagagactgaagaaaaggttcaaagaataattcataatatgaagaaagcccaagctcgtcaaaagagttacgcaggcaaatggcgaatgcccttatacttccttgaaggagactatgtctacctaaaggtttcaccaatgaagggagtatcacgtttcggggttaaaggaaagcttgcaccacgatatattggtccttttcttattctggaaagatatgggccagtggcataccgacttcagttacccgaaactttgtctgctgtgcataatgtgttccacgtgtcccaattgaacaaatgtct

SEQ ID NO: 30228 - DNA, 292 bp, Zea mays
  unsure (1)..(292): unsure at all n locations
cttctaaagggagagcacattctggtacttacaaatgttcattgagaaagacaggatntgtagcgcatgctaagcanggaagcaagttggggttcatcatccacacaagaacatcatgacgactgacaggacacttgatctcctacatatggacctatttggcccgattggctacataagcatcgacgagaagtagtactgtctagatattgaggatgattattctcgattcacttgggtgttctttctacaggataagtctcagacccaatagactttgaaaggattcttg

SEQ ID NO: 30229 - DNA, 351 bp, Zea mays
  unsure (1)..(351): unsure at all n locations
ggctcacatatctcatttgaataccttcgatcatatctcttctatatgctatgactaatgtgntttcaagtctatctcacaccaagtcataggcatattgaaagggaattggagtcttcggcgaagacaaaggcttccactccgtaactcatgcttcgccaccactccaagcaactctctcttctttggtggagaaatgagcatcaaggaaaaggacttcattctctggggagagagagtaaaagctcaaacacaaaagaacccggacctcggctttggtataatcttaactcatttacttatgaccaaanggganggaactacttcgagggctctaatgattccgttttg

SEQ ID NO: 30230 - DNA, 457 bp, Zea mays
  unsure (1)..(457): unsure at all n locations
agcttaaacatttatgagggatcgttctacttataacatcgcacgcaaggacatatatgcaatataaacaagtagaacaataagaatggcattcacacaacagttgtgattcggtatggcttgctgtcacatggtgatcctcatctccaataatctgtccatcacgatgatctccatctccatgatataggtatgccatcctccaagtgatgagtccttcaagacctatctaacgtatgctggtaaacaaattacatatacgctntggatcatcacatgttgacatgtaggtcattacattaaatttggacaatacatgtggctccagccgtattgccctggtcacgacacgcaggtcatgaatatattattaacatgcatcatatacacaatagccataccgatcacaagatngtcctgcaaaacaggttagacaaacacgtttctacatgttgac

SEQ ID NO: 30231 - DNA, 464 bp, Zea mays
  unsure (1)..(464): unsure at all n locations
ngaatcagacacagccgatagcaactatgtntctttagcattatattcaggagttntagaaacaacatacatgaaagggacaattggaccttacatttctttattcagattcagattcagtgccttagccaaggtaaggcaccacgtaccttgccttctacagcaaaagggacacagcaggaaccagcttaccagcaggaatacgtctggatcccaaacaggttatgtttgcacatagtacagcttaccaacagcacatgcaaacagaacacaaacatacagctaattttgaaggatgtttatatagcatttgtttcagtttcttaagcaatacatggcattcagaaatttacaattacanccattgggcatttgctggcatactaactgtcattcatcaggctactcacanaatactatagttagcccacaaaatattnngtgtagctctatccaaaatacta

SEQ ID NO: 30232 - DNA, 444 bp, Zea mays
  unsure (1)..(444): unsure at all n locations
agcttaaagggtggaacagcaatattgtatgtcattacaaaaagttgaagaaaaacttgattgaaaaaattgatattctggataaagccagtgagacttctggcttatctgatgctgacagatatctgaaattagatttggaatctaatctcaggaagattgttaatgaggaaaacattagccttagacaaaaagctagagataaattcttattagagggtgatgagaattccaagtattttcatttgatggccaggcacaaaaaaaggaaactgaaaatcttgactctttctcacggtgatattgtggctcatgacgatcatgacatcaatcagttggcgacttctttntacaaagatctctntggtccttcccgtggatcgaatatttccttggctaattnggacatgaaacagcttgaggagggtgatagaaatcttctca

SEQ ID NO: 30233 - DNA, 278 bp, Zea mays
  unsure (1)..(278): unsure at all n locations
gatcaacctagaanaatttattgcctattctgcggtgaggacaagggccatactacaaggatgttccatgtcaccattgagaaacagaaggaaatagcagaagctgcagctcagcagaaccagccgaagcangtcatgcatactgcttcgtatcactcaccctacaaaccagagtatgtaggtaaccatcctgcagtgtctgttgcttcggctagccagccacaggcattctggccacaacccccaccttcgccaccactacaacctgtatattcacg

SEQ ID NO: 30234 - DNA, 440 bp, Zea mays
cttaagtcacctgcggcatgcaagcttcgcggcctcaccaggaagctatctgttggcttgtatcgaacggaggaggacgggaaaggggctggccactgtggttgctctcgggcggcactggcgggtcgcggggaggtcgccagagctaatggctggctcgggtaagccaggcgaggtacggaggaggcaacggggaaggcagccgagcactgggacgggctttatagccgtggcacgggcgcgcggaggttcgcgcacgggcgtcctctgagcgcgcccccggatgtcagctcgcgtcgaacacgtggaagcttgcttctgccatggttcaacggcggattatagcaccatatcgtgcgtatcctggcaaagtcactttgtacgggcgcttctctgctccatattctacccttttgctgtgagtaccaagtcaagatatg

SEQ ID NO: 30235 - DNA, 361 bp, Zea mays
  unsure (1)..(361): unsure at all n locations
gcttcggagtangagttacaaccgtttcagacgcaatctgctctctggccttntctgctgtttgccttgcttcaatttcggcaggctttgactcagtgggctctgaaggctcagcttcngttntagtttgaattattgtagcttcgacttctgcctgctttgtttcagctttgggttgtgccttggaagcttccgcaatttttcttgtatgagcaggattcaaggttcttgctgtttctagcacaacatccagcacattcgccatccttctcttatgagttgtggtggagcttttntgcatcttcggcactgttgcctctgttgaagggcttataacctctggcattnttggtatttcttc

SEQ ID NO: 30236 - DNA, 405 bp, Zea mays
  unsure (1)..(405): unsure at all n locations
agcttcngcagttctccctggagtagagcttgaagtctttatcgtctccagcacatctagtacgttgaccatccttttcctcttgggggtcgctgtaagaacttcttgtgccttcggaactgtcacttctgccgaacggcttataacttctaatacctttgttctttcgacctattactcttcaatattatcggccttcgggtcatctaattaggccgatgatgccttcagcattacaaccggctcttgaatattctgcgcaagcgcacgttctttggcttcagtagcccaagaggtctcaccaccaaattcgggcactgtggccggttcatatagcgcggtcggtgagtaagaacctcacctttcttctcttctgcgcgagctcactcaaagcagctgaagtaa

SEQ ID NO: 30237 - DNA, 413 bp, Zea mays
  unsure (1)..(413): unsure at all n locations
actttcggcttattctcaagcaaaggaaatgaaggagtactaacttcctcctgttatagctaaagcaaagcaaccgtgtcaagttntattgtcccgagtggctatttcagcgaagcctatccctcctaatgtgttacatcctggcaatccttggttgcaatggttcaatcgagagaagagcaagtcaatttcataaattggaacaaccacatcagcttcattcttttcgtaaagggaagttttgtcaactcgcttgaagaccactagaatcgtaaccaatacccctggccacacaattcaaatctaccaaactctagtacttacatncttcanaagggttngctaccggtgtggtaagtctggtcactatattgctaaatgtccatatgcaagttatagtgacagggatgacg

SEQ ID NO: 30238 - DNA, 240 bp, Zea mays
ctctaagtcacctgaggctgcaagctgcccaaatactgaaattagactgtatttttctagtctgaaatccacactttcagacgggatttctttataccacgctttctctatggtccaaatagctttaaggctaagtgtcttaatcaaacctatactcctcatttagctctataattgtgtgataatgagcataccctattaccccttggataaagcaatagagagctcccaagttacccc

SEQ ID NO: 30239 - DNA, 344 bp, Zea mays
cataagcaattatgatatgcccgtttgttggcgatctctcataaagtgataccggatgtctatgtgcttattacggatgtgttcaacgggattatccgccatgcggattgcactctcattataacatatgagagggactgtgctcaacttgtaaccatagtgcctaaaggtttgcctcatccagaataattgtgcacaatattgtcctgcaacaatataatcggctttggtggaggatagagcgactgagtattgttgttttaagctcaagacaccgaggatctctccagaaactgacaagtgcctgatgtgctattactatcaattttacatctggcataatt

SEQ ID NO: 30240 - DNA, 407 bp, Zea mays
  unsure (1)..(407): unsure at all n locations
ctcaattcttatctcaagctatcaatcttacattgtctatcctntaagagtgacccacagatgaattgaggtgttatatcactaacttcatattcatctctagcaagaacttgtgttgtagggaataaggactaacctttgtgggaatcaagcaaaaggcctacaaccaagtgatatccaaaggatggtaacaattaattcttaagtccacattgcttttaattgatatattcctttgtggcttttgtagccacatangaaaaatgaagcacttgagaatgaaactaaatattctacgtgctctgacaagatcaattatatggagattgcaagtcatattntatatttgacaattacatgctctaattgatggatgatcttgggatatttaagttatcatcatatta

SEQ ID NO: 30241 - DNA, 423 bp, Zea mays
agcttgctgcttcatgcggatggtattcattctctaaaccgagggcagggacaacagcagtgcacccagacaaagagttatccaacgactccgaatgattcagacaaggcctctctgttatgttgacctccacgacctgcatcaactgtgcttcctgaattggggcgtgtctgcttctgaatctgcttctcgagtagactctcaggggggccacagcattagatgaaccaccaggaaggggcgaattcgcaccagcctgttccagcgacccatcaacagtcctgtgtcgctggggcgaaacagggaggacagaatccagcgaccccacagcagccgacccagacggcccagctaagatattcttcaaggctgtcatgcatggcacttgagtggcaggaaggggcgagctcaacctagccttct

SEQ ID NO: 30242 - DNA, 190 bp, Zea mays
  unsure (1)..(190): unsure at all n locations
tgtaggaggaagcanacgccggtgcatcaatcctacagtggattggtccanatctncacccgtacgatgcgcctccggatctatcctttctggcgaacactgagaaagaggagcattccacaatccagtttcttcacttgttcaacgaatggggccgtacaggtttgtacatggcgacggatgaatgtgg

SEQ ID NO: 30243 - DNA, 417 bp, Zea mays
  unsure (1)..(417): unsure at all n locations
agcttgggaagattcttcatcccaacatggtctattcggcgatgccagagccaacccatattagtcttagcaattaagaaagtatcgagttcagctctattgaaatcaactaagtaaagctgaccctcgagtactcccttaaatgctactgaatcatcacttcttctaaagacagtaacacctatatctgtaaaaagacaattgtatcccattttgcataattgagaaactgaaagcaagttatagtctaaagaatctacaagaaaaacattggaaatagaatggtttggtgatatagtaattntaccaagttctttgaccaaaccatgatttccatncccgaatgtgatagctctttggggaatcttgtttctctcgtaggaggagaacattcttttcttcctagtcatgtgggtt

SEQ ID NO: 30244 - DNA, 271 bp, Zea mays
  unsure (1)..(271): unsure at all n locations
gcgcataattataccttngatattntctcgtactgacaggtcattcttcacatanaaccattctgtcatccagtcgccgggccatctcttccgaaaggttggcacgggacagcttgacccggaccgagaaacgaaactgtagcagccaaaattattgtgatattgttccttaccccaaggttttgnttcgtatgataattcgtgtatattgcagaagctntntgcatcangcttcagaccttggcttctcatggcccacacgaagatattc

SEQ ID NO: 30245 - DNA, 452 bp, Zea mays
  unsure (1)..(452): unsure at all n locations
gatctctaagcaccgcggctgcactacccaactttactcctgacttttaaagngccaagaacacccagtcgtcgcttgtcctaagaaaagtaaacagctagctctagatagttgctacaaggaaagaacattaatgaacaataatatgaattaagatgaaactactacctctgcaacaaacttgtcgtgctacacggcttaagagtattttgaacatttcctcatcttgctctgcggggggggaccatttgaattgaagagaatgacctccacatcaccattcaggggaaaagacctgcagcaagtatatgaagctggaatgaacaaaccacgtctgcatttcactcagtctaaatcccgcctgagaactgcagccatctgacttcagatatttagaaaacatcgcaacagacggatagtgactaagcgaagcattactgaaaagaaaaaga

SEQ ID NO: 30246 - DNA, 438 bp, Zea mays
  unsure (1)..(438): unsure at all n locations
tatctgaataattaaaacgtatgctacatagaanatcaattctatttctcttccnctattataaggataagcgcanaaacaaacagaatcaaagtaatcaaatctaatagacaattggagaggcttacaatttaagataaactntctctggctaaacaagtgcaacttacaaggtgccctcaaacaagagagatattcatctcatttgctgcaatctttgccatctggtacacgaaagcacatgagcgaccaggaaatatcatacatttgttgcaatgagatatgaaataaagtccttacaatanggctctcaaactcaatgatatctataaaagattcatcgtacatttacgaagtataaccgtacatttctttaatcctctttgcaacattaaaaagattcttctgctggaatgttctcacctctttccttgatgc

SEQ ID NO: 30247 - DNA, 429 bp, Zea mays
agcttctaaagggagaacacgtgataggtttgtctaacgttcaattcgaaaaagatagaccttgtgcagcttgtcaagcagggaaacaggtgggaggagcacatcacagcaagaatgtgatgaccacttcaagacccctggagctgctgcatatggacctcttcggacccgtcgcctatctaagcatagggggaagtaagtatggtttagttattgttgatgaattttcccgcttcacttgggtgttctttttgcaggaaaaatccgaaacccaagggactctcaaacgctttctcaggagagctcataatgagtttgagctcatagtgaaaaagataagaagcgacaacgggtccgagttcaagaaccttctagtggaggagttccttgaagaggaagggatcaagcacgagttctccgctctctaca

SEQ ID NO: 30248 - DNA, 162 bp, Zea mays
  unsure (1)..(162): unsure at all n locations
atttatcacttgngtgtatcttgtattgaatgcctagctcttgtaagtggttggaagggtgaacacttggatgacttgaatgtggggtggttgtgggtatttataaccccaaccaccaaactatccgtttggtggaggcttgtgtcgcatggcgcaccggac

SEQ ID NO: 30249 - DNA, 370 bp, Zea mays
agcttcagtcttagcgctagtctcggtcttatttagtcttagctagacagggtagtttgctatatcctgtgcatttatgtttgtcatgatgaactatgattggtttggatctttgtaatgattgtcacccgagtgtgggtatcccctgcattttggtttacctattatgttaataaagttagttatatagttgggaaaacctttattctactttcctctttttctgagaagctgtgtggcctgtgttggagatcagtgaagatgctcatctgttcagtgctgttgaggaattctattctcttttcttatgctgcaagatttgccagatcagttctgatgtgttggtgccgtctgcagatgtcacagaaca

SEQ ID NO: 30250 - DNA, 342 bp, Zea mays
  unsure (1)..(342): unsure at all n locations
agcagcttctgtagatcagtcgaagcccatgctcttatgtgaggacatagcagagcagagggtgctgttgggctctcaattatctgaagaacaggagaaaaccttgataaggttnttgttcaacaacaaagatgtttttgcatggtcagccaatgatctttgcggggttaacagggatgttattgaacactcgctcaatgttgacccatccttcaaacccanaaagcagaggcttcgganaatgtctgatgataaggccgaaggtgctcgtaatgaagtcaaaagactcctcagtgcacgagttatcagagaagtaaagacccagaatggctagctatactg

SEQ ID NO: 30251 - DNA, 280 bp, Zea mays
tgccaactcggcaattgttgatcacaccatcctgcatcttctgcggtgatactgacaactgaatctcgcacgctgtggattacagcatgacagaactgtatccatctcaaaccgcccccaaggacgcatcgccaacacgtccgtccgcgccggggcgatgaactccgggctcgcgcggtggacaaacctcgactccgtccgctcttgctcccggctgtcccgggcctgtccgcgacgctcgcgcgcttgcgcgcgcgaggggacaagaacccgggggcgt

SEQ ID NO: 30252 - DNA, 342 bp, Zea mays
  unsure (1)..(342): unsure at all n locations
tacaatacctttaatatcntaagttttcttatatntagattcanaggtanggtggggtggggttttggattacgtaccgactcctttgggcagaaagtcggggaagcgagaacgtagaaaatcctcagtctcccatgtagcctcctccactgaatggtgactccactgaaccttatacatcctgatcaatcttgcccgcattgatctctnctttngatccaatactttgacggggtgctcctgatangacaagtctggctctatctccaattctggntcaggtagcacttctgtgggttagcgaacacacttncatagctgagaaacgtggaatacatcatg

SEQ ID NO: 30253 - DNA, 459 bp, Zea mays
  unsure (1)..(459): unsure at all n locations
agcttctaaagggagaacacattntatgatttacaaatgttcattctgagaaagacaggatttgtagcgcatgccangcgggaaagcaggttggagcccatcatccacacaagaacatcatgacgaccgtcaggccgcttgagctactccacatggatctattcggcccgattgcttacataagcatcggcgggagtaagtattgtcttgtaatagtggatgattattctcgcttcacttgggtattctttttacaggaaaaatctcacacccaagagaccttatagggattcttgagacgggctcacaatgagttcggcttaaggatcaagaaaatatgacgcgacaacgggacggagttcaagaactctcatattgaaggctntcttgaggaggagggcatcaagcatgagttctcttctccctacacgccacaacaaaatggtgtagtggagagga

SEQ ID NO: 30254 - DNA, 473 bp, Zea mays
  unsure (1)..(473): unsure at all n locations
ntgcangagaatgagatgacatgaagctttgtggtgctctatagagtncaattcaattttattaactcaagctatcaatcttcaatgatctatatatccaagaatgacccacnagttatttgaattgttatgtctaaaactcatatcatctcangggaagatattgatgttgtaggaaataaagaattatcccgtgtggaanaatcaaggcctacaacatgaangaaagccaaaggatggtaacatttacgcttttaagtgcaagtatcttaaaataccatttcttatgtgtcttgtgtagtaacatagaaaaaggaagcacttcaaatgttttgtaaatatgtcaccattctttgaagaaattcctctcatatggtagattgcatattcatcatttctatactatggcaatctacatgccttaaattatttggtaaaacctcatggcatgctttacactaattatcctatta

SEQ ID NO: 30255 - DNA, 465 bp, Zea mays
agcttccttcaacattcttgtgccccttatgcatcctaagatagcaataggtgccactgggagttatgaagctagtcttccgcttgtcttccttcttcatccaaatttgatgatagcctgagtaacaatccaatagactcatgagctctgaagaagctgctacatctacaagagagtctattcttggtaataggaactcatcctttggacaggccttgttgagatctgtgaaatcaatgcacattctccatttaccattggccttcttcaccataacagtgttggctagccattctgggtatttcacctctccgatgacaccagcactaagaagtctctttacttcgtttcgagcaccttcagctttgtcttcagacatcttctatagcctttggtttttggcctgaaagatggatccacactgagtgaatggtcaatacatccctgttgacccatagagatcat

SEQ ID NO: 30256 - DNA, 366 bp, Zea mays
  unsure (1)..(366): unsure at all n locations
cactcncaaattagcatatatgtgttgacttatgttgatgatatcatagtaaagagcacaaagcaagaaaatcatgttgctgatttgcaagaaacatttgctaacttcagaagggtcgatcttaaactaaatccagagaaatgtgtcttcggagtgaagaagggcaaatttcttggttgcttggtatcaacaaattgtatcgaagctaattcaagtaagatagaagccatacttcggatggagccacccaagtcaagaaagggtgcctagaggttgacaaggaggctggcatcattgaaccagattatttcaagatcagcagagaggaacttgacattcttcgaagtgctggagtcagctggagtc

SEQ ID NO: 30257 - DNA, 474 bp, Zea mays
ttaagtcacctgcggcatgaagcttaacccaaaatcttcgtaagtgtttcactttaactgccaagtgtctatgaaggaatcttcaacaaaacacaataaccaacaagatcaatcacagagatggcacggtggttatcccgtggttcggccaagaccaacgcttgcctactccacgttgtggcgtcccaacggacgagggttgcaatcaacccctctcaagcggtccaaagacccacttgaataccacggtgttttgcttgctttactcaatcccgtttgcgaggaatctccacaacttggagcctctcgcccttacacttgaaatccacaaagaagcacagagcaagggagggattagcaacgcactcaagacaagaaacagagtgtcaacacgcacacaagtcgcaacaagagctcgcaacacaactcaatgaagtcacaactccactagagctctatatgctatcacaatga

SEQ ID NO: 30258 - DNA, 214 bp, Zea mays
  unsure (1)..(214): unsure at all n locations
ctcagcttctaagggagaacacgtgatatgtttgactaacgcgcaattcgtaaagatagaccttgtgcagctngtccagcacgtnaacaagtgggaggagcacatcacagcaagaatgtgatgaccacttcaagatctctggagctgctgcatatggacctcttcggacccgtcgcctatctgagcatatgaggaagtaagtatggtctaatta

SEQ ID NO: 30259 - DNA, 434 bp, Zea mays
  unsure (1)..(434): unsure at all n locations
agcttgacttccnctagttaagatgcatagatcatttctggagtgagagagtaactgtatgcatgtccattaagaatatgctaaaataccatgccccatctctgcatggcataaatatcaagcatgtgaacaacttaagagcaagaataaaaagatatccaaatggcagtggaaagatgattttaagaaaaaaaaaatctgcagggaaaaaacaaagccagtaatagccagaaaattctgcaattaatcaaagtgtagataacaagatacaagtcgaagcaacaaaggacacgcttcaaatctttaacagatgaccgccaggtccttgtacaataaatagctggattgtaaacaaaacagttatgtatttgggaaaaaaaaagatatggaaatgggaaaacaccgttaagttctcggacgttctctccatgacc

SEQ ID NO: 30260 - DNA, 520 bp, Zea mays
  unsure (1)..(520): unsure at all n locations
ctcaatctatcttngtgcttatcanatgtactntaacttatataatnggctcaactcanaatntaaacttttcattccctcttgcttattnntcttgaatttgttcatggggttcacttanggttcttaattanggttgcacattcttatcctttaagagactcaattgtcttgatcatgacactnttaagcatatacttggtgaattctttcttacttaagttattttgatgctcatgcttactttggttcacataaaataatggtccttggtttggctttttaagagaaaccctangtgacactggggtgtcacagccttccccncttaaaggaatctcgtcccgagattcgggccagagtcctttctaggtgaagcgaanggtgagactgatatgaaaagggtggngaattgtattattatggcaaaactgctcttcgaatgtcattctctttgcaacttcagaaagaagnccttttaagtttactttatagttacttcattctgaaataaatcata

SEQ ID NO: 30261 - DNA, 439 bp, Zea mays
  unsure (1)..(439): unsure at all n locations
nntgggtgctngagcangttaactcaatccttatctcaagctatcaatcttacattgactattcttttaagattggcccaaagatgaattgagttgttatatcactaacttcatattcatctctagcaagaacttgtgttgtagggaataaggattaacctttgtgggaatcaagcaaaaggcctacaaccaagtgatatccaaaggacggtaacaattaaatcttaagtgcacattggttttaattaagatattcctttgtgtcttttgtagccacatagaaaaaatgaagcacttgagaatgaacttaaaatattntaccttgtcnttgaaaagttccaatcatatggtagaatgcacagttatatttttatattttgacaatctacatgctttannatagtgtatgtatcttgtggcatatnttccatttattatc

SEQ ID NO: 30262 - DNA, 422 bp, Zea mays
  unsure (1)..(422): unsure at all n locations
agcttaaccttgtaacgaggatattctatctttgttccaaggtggatggtccttaagtctctntgaaatccttaaaggaaaatgcttaaaatatctgcaacatgctttcataagtgcataaactgtcttgagcatcactcatatactatgacacaatgcacttcactttctctatgatataaacttgttctcattaacctaattatgtgcacttggcatttaacgccaaaatatgtattcctctcaaggcacatatttagggggagaaatctatattatatagaactatgatcatgcttaattgacatatctcttgatcatatctctttcatcttggtacaaatgcatatatcctattattcccgtaccatgactaccactaatatgtgtccaagaatattactatgctaagtcgtacattg

SEQ ID NO: 30263 - DNA, 516 bp, Zea mays
  unsure (1)..(516): unsure at all n locations
tagtggcactaaactgtacancattttatgctttangctatcttctgcaacctaattacccttattatctatntcaaactctatattataaacaatgtattctaccatgcaaaataatattttacacggctatatataatctaataactataatcctaagactctatgcaagggacctaagatgtcgtctaaattttaaccggcctataacaccagccccgcatataaacaaagacgacagagataataagttaatgtgacttaatgtctcgtgtttataaatttagccaactaaattttacaccacataatctatactggaccccaattattatattagctcccatgtttcatacacacatctatagcttagtgtcacactacattctagatcaatttagcctttangctatctcctccaactaattacaccttatttctattttaactctatctattaacatttattctgtgcaaaaatattttacaccgcttatatatatatatatatatatg

SEQ ID NO: 30264 - DNA, 460 bp, Zea mays
agcttgtgaagattcttcattccaacatgtgctagtcggtgatgccagagccagcccatgttagtcttagcaattaagcaagtatcgagttcagctttatcaaaatctactaagtatagctgactctctaacactcccttaaattctactgaatcatcacttcttcttaagacagtaacacctatatccgtaaaaagacagttgtaacccattttacataattgcgaaactgaaagcaagttgtaatctaaagaatctacaagaaaaacatttaaaatggaatggccatgtgatatagcaattttacccaatcctttgaccaaaccttgatttccatccccgaatgtgatagctctttggggatcgtggtttttctcataggaggagaacatcttcttctcccctatcataatggttgtgcacccgctatcgatgatccaacttgagcccccggatgcat

SEQ ID NO: 30265 - DNA, 258 bp, Zea mays
  unsure (1)..(258): unsure at all n locations
tcttcaccaactcaagataaggataaggctcanaatgatgaatgagaaactcaagaaagtgagccacctcaagaggagagcaatgatcaagggggagatgcccatgatcaagatgaggaagatgaacaagttccaagatcgccacacccaagagtccaccaagcaatccaacgagatcaccccgtgaacaccatcctcggcgatattcanaagggggtaactactcgatctcgtgttgctcatttttgtgaacactac

SEQ ID NO: 30266 - DNA, 412 bp, Zea mays
agcttccttcgaaggatgttctgtcaaaaatatccctcgaggacaaaatgagcatgctgatttgctagctaagtcagcagcacaggggctgcccttaccttcggatgtgttcttcgaaacaataaaagcaccttcagtggaacttcttgaaagagcagtcctcaatatatctcctgtttatagtgaagactggagaactgagatcatctcttaccttcagggtaacttcctttcagatgacgaaacttataacaggaggatagaggcaagagctcgtccatatgtcatgatagaaggggagttgtacaagcatggagtttgtgctccattactcaagtgtttatctagagccgaaggcatagagttaatgaaagaaatacatgcacgcctgtgtggatctcacattggatct

SEQ ID NO: 30267 - DNA, 440 bp, Zea mays
  unsure (1)..(440): unsure at all n locations
tggacagtgctntgcgatggttcttgtggagctntcngtgcatgagcagctacngtcttagtggcaccttcgaaagtcaaaacatgttatgcagtcaaactggatttcagttgcacaaataatgttgctgagtacgaagcacttctattgnggcttcggaaactaagggcaatgggaataagaagggccatcctanaagctaattctcaagttattgctggccatgtggataaaagcagcaaggcatgagatccgaagcttgaaaaatatctagatgttgttcgaaggttggaagcttccttcgaaggttnttccgttaaaaatattccaagaggtgaaaatgagcatgcagatttgctagccaaataagcggctcangggcttccactaccctccgaagtatttnttaaacaataaaagcaccttcagttgagctcatg

SEQ ID NO: 30268 - DNA, 439 bp, Zea mays
gaccgcgatcttaagtcaccgcggctgcagctttcccttaattaacccttctcttattgttattcaaggaataacataaagaatgtagacatatgtataaaagcatacatgaaagacaaacaataaggaacaagtcatgttactcatcttcgtgattccacacttaacatttcattccttgcactgtatcaaataattacaaacatacctttggctgtacacgaattacagcttgaaggtactttgaaggctgagttagatgaagctctgagctttcaaaaggtgaatttatgcatggcattgttcctctatttacaggggagcggtacaactttgtatgaaattacatgtatgcccatgaagttacaaatatgatttacaaatatcacagaggcaatgtcatatttactagctcctttcttattgaacaagtcttctg

SEQ ID NO: 30269 - DNA, 304 bp, Zea mays
  unsure (1)..(304): unsure at all n locations
tcgccgagacaacatgatcagagaagtaattaaacagatatataatanagtagatcgaataaataaacaaaagaaggcgggtgggaaccgagagaagaggaaaagcgagatcaaaatgtagctagcgagcggtccacatttcgtccctgtgctgtgtccagcacgttagcgatatatagagaggtcagttacagaggaggagacgccacagctacagagtcagaaagaaatgcctgtggctgtggacttgtggtggacgcggacagacctggtggtgtcatgtgttgtgtgcagcgactccaca

SEQ ID NO: 30270 - DNA, 393 bp, Zea mays
  unsure (1)..(393): unsure at all n locations
agcttacctgtggcagtaaaaacattttataactcaatgaggcgttcaatcaaatagtttaacattaaaataagtatcagtcatttcattgcagtttaatgctaatattcctatatgtaagaagcatcaacatgtaaattgtgcttgtcctacaccgtttataaaatggtctaatggcattctgctgtactgcgtgataagacagattggggtattcaaacgaaacaattggtcacctcatgtgtatctctgctgttcgtcactggcttgctttcattgttctcaagaatgatgtgcttcaccaagntgtttggaacatncttcacaatgtgccacttgacacggaaacaaccagtccatttgtactgtatgcaatgctctactggttttcaa

SEQ ID NO: 30271 - DNA, 326 bp, Zea mays
  unsure (1)..(326): unsure at all n locations
tcaccgtaagccacaactcttcttcgagaagccatcgacttgcttccgctgtacgacaaccggatggcttgtctccgaagcgtacttattntataaataccgagtgaggcttgcatacttcactcaatcttgcctttacaaactccacaacaatgaacccctacttagaatcgaactttcttgttaggttgatggaagaaatggaagaggaagaagaagagttggagttggcgaggcacatgctcattatgaggcggcgtgcacgcaacgagcgtcgtcatggtggttccattccacggcgtgttcggattcatcgtgatcacatg

SEQ ID NO: 30272 - DNA, 422 bp, Zea mays
  unsure (1)..(422): unsure at all n locations
agcttctcctcaattggcgccactcctactctctctcgtatgtcatcattccggactcggtctctccttgtgtggccacatatccagcgcaacatacgcatctctgccacacacagttgttggacatgtcgtcttttagtgggccaacattctgctccatacaacatagccggccggattgctgtcctgtagaatttgccttttagtttgtgtggcacccgggggtcgcataagacacccgccgcttgccgccacttcaaccatccagctttaattctatgactgacatcctcatcgatgtctccatccttctgaagcattgatcctaagtcacgaaaagtgtctttcttgggtaccaccngtccatcaagactaaccatcgcatcttcataccccatggcactgaaatcacacttcatata

SEQ ID NO: 30273 - DNA, 219 bp, Zea mays
  unsure (1)..(219): unsure at all n locations
tcgcatctctgaactaactcggctgcgtcgntcttcgccgtctgccaatagaatcctgacctgaagaaccttccgactagtgttctggaggctgcatgtattccacattgccctgcatggacctncttcagaagttgctttccagtggacgggagaatgcacttcatgagaacacctgatgcaccccttctgtataatatctncccaatgagtgtgtag

SEQ ID NO: 30274 - DNA, 461 bp, Zea mays
  unsure (1)..(461): unsure at all n locations
agcttgacaatgaggagatggctcttatcattaacaactntcggcaaatccttaaacatagaaaggggaaggactacaagccctattccaagagggtgtgctacaggtgtggtaagtccggtcactttatagctaaatgtacatacacaagtgacagggacgacgacaagacaatgaataaaaagatggagaagaaaaggtactacaagaagaagggtggcgaggcgcacatgggacgggaatacgactccaatgagagctccaccgactcctcctccaacgaggacaccacanacatcgctatcaacaaaggccttctctctcccaacgtcggccataagtgtctaatggccaaggatggcaagaagaaagacattctaaagatacccncacatatactacatctgatgatgagggtagctctagtgatgataacgntgatttaacttctctcttttcca

SEQ ID NO: 30275 - DNA, 414 bp, Zea mays
  unsure (1)..(414): unsure at all n locations
ggtgaaggttcttcatccncacatgtgctaagcggcgatgtcacagccagcccatgctagtcttagctattaagcatgcatctagaccggcctcttcttttgcaaaatcgactaagtaaagtttgccgtctaatacacccttaaaagctagtgaaccatcacttcttctaaagacagacacatctacatttgtaaacatacagttataccccatgttgcataatggactaacagatagtaaattatatccaaggctttctactaagaacacattagagatagaatgctcatttgaaaatggcaatttacctaacccttttaccttgccttgattcccatcaccgaatattattgaatcttgggaatctttattcttgacgtaggaggtgaacatcttcttcttccccgtcatat

SEQ ID NO: 30276 - DNA, 423 bp, Zea mays
aacctatgcgtttatgccaagatattgtagatcagaaggtgctgctgggatcttaattgtctgaggaacatgagaaaaactctgatacgtttctattcaacaacaaagatgtctttgcatggtcagctaacgatctctgtggtgttaacagggatgttattgaacactctctcaatgtcgatccatccttcagacctagaaagcagatgcttcggaagatgtctgattacaacgccgaaggtgcttcaaatgaaatataaaaacatctcagtgccggagttatcatagaagtgaagtatccagaatggctggccacactgttatggtaaacatcgcattggcaatggaggatgtgtatcgatatactgatctctcaaggcttgcccgagagatgagttccactgcaatgatatattccctatt

SEQ ID NO: 30277 - DNA, 268 bp, Zea mays
actaccaccatcgcccactttagtgacccatccattaagttatacttgggattgaataattcaatggtaccttgttcaacaacggccttcaagatacaccctttgcttgccctaataatagatgtgttagtgtctttacacacgtatacatacccctaatgggcatacttttggcccgtgaggactaacattctatgtctatttctctctctaagtgccgcgttacgagaccggtgggtcactaagccgaccagtgaatgtgccgcgt

SEQ ID NO: 30278 - DNA, 442 bp, Zea mays
  unsure (1)..(442): unsure at all n locations
cccttcacgggattattgcagagatattgaataattntggaatctattntcaccaactaacccctaacgctatcgttaggcttaatgtttatatttgggcactccgaagccaggcggtggaaccgtttgcggacagcttttgccgaattcatgaactgcactatcagacaaaggctagaaaggatggattacatgacaactttggttgctataattttgcttatcggaaaacttcgaagtgtcctgtgattagctaccgaagcaaatgggcagcanggtggaaatcggaatggntctatngtaanggtgatgatgataaagagaaacttgtgcaaagcccactggaactgaccttcngagaaacccgcccccagtgccacatgttaccagaggggtccaactcataaagcaatgtacgaattcaaaatatatgcagaaaata

SEQ ID NO: 30279 - DNA, 489 bp, Zea mays
  unsure (1)..(489): unsure at all n locations
gccacaagaagcanaagaaagaagctcaaatgagagtgctacatgttggagtccaaggcccctacatcagatnggtcaatcacctttcacagatattcaatgaagttcttgatttttgcataaactatgtccaaaatgcacttttctctcacagctttaccatttttctccaagatgaattntcaggcctccatttatgctcttttggacatgatgtcttcaaattgcattgtagtagacctatgctcatactcatagtccatgatggtgtcgaacacttaatctccaaaataggtagaaatggttgttcggcaccattccctgtcaatatggggttcagatgagtcatatcaatggaatagaagtcaaggagaccccataagatgagcagacatgcaaacctaatcgacggacanaaaaggacgcanaagtgacagagtcatgagaatctntagtgggaactgaaatcctcttcaaagttctccactg

SEQ ID NO: 30280 - DNA, 237 bp, Zea mays
  unsure (1)..(237): unsure at all n locations
tgcaagcttgtgaacagtacaagtacagaagggagaatgctgttttcttcgatcaaccganacctatgcgtttatgcgaagatattgtatatcagaaagtgctgctgggatctcaattgtctgacgaacaggagaaaaacttgattaggtttctattcaacaacaaagatgtctttgcatggtcagctaacgatctctgtggtgttaacagggatgttattgaacactctctcaatg

SEQ ID NO: 30281 - DNA, 460 bp, Zea mays
  unsure (1)..(460): unsure at all n locations
agcttntaacaagcacaatgatctcaagcaagcacatgtgatgcttttatccatagaggatgaagcaaaaaatgacacccccctgaatatgtatttaatcttgtaagttgtccaaattggttttacctttttgttccttcagtatgattttcttgccccagtttgtgcctggttgacctgaatatttgtattccttgaaagcaattattgcttatctctgcatttaattttcacctttcattgtagatnttactgacccagacaacanaaatagcattgcttattatatggatacaagtacaaaatacgctttacttagtagccctttaaggaactacgctcttccatatgtgtgttgcaataacaatgggttcacaataaatacaaagaaacttgcaganaaatataatttttggaactgtgtagagtgcttttaacatgatatctgatatacaacata

SEQ ID NO: 30282 - DNA, 312 bp, Zea mays
ttaagtcacctgcagctgcaactgatggactatatgccattcatacgaagttgtccctctggaacagagtcatgcacagaacaatcttctttatgggcagcatactcttatgtgttcagctttcgaagataccttcgagttcttattcttgtaaagccaaacgtattgttgaaattgtttattatatgacaaggaataaaacttaacgtgaatatgtagaggagtgatatgacacgttctccattatctacatttttactcttgaagctattatatatttgcgaccttcatcttctccttcaataacatttg

SEQ ID NO: 30283 - DNA, 471 bp, Zea mays
  unsure (1)..(471): unsure at all n locations
agcttggaaaggttcttcatccncacatgtgctaaactgcgatgccacagccagcccatgctagtcttagcaattaagcatgcatctagaccggcctcctcttttgcaaaatcaactaaataaagtttgtcgtctagtacacccttaaaagctaatgaaccatcacttcttctaaagacagacacgtctacatttgtgaataaacagttatatcccatattacaaagttgactcacagataacaagttatatccaagcgactcaactaagaacacattagagatagagtgctcggatgaaatagcaatttttcctaaccctttcaccttgccttggttcccatcaccgaatatgattgaatcttggggatccttgttcttgacgtaggaggagaacatcctcttttcnccatcatgtggtttgtgcatncgctgtcgataatccagctagagcccncggatgcataaacct

SEQ ID NO: 30284 - DNA, 429 bp, Zea mays
  unsure (1)..(429): unsure at all n locations
agcttgagcagaactggcttcgtctggaacctttgtgaactagtgatcagcatgtccttcagcttctgccatgatgtgatggtgcctggccgaagagaggagtaccaggtttgtgccacattcttgactgccatgatgaaggatttcgccatgactgcagtattgcccccatatgaagatatggttactttgtagctcatcagaaactgtttcggatctgagtgcccatcatacatggagagctggggtggcttgtatgatggcggccatggggtatcttgtatttctactgacagaggagaagcatcatcaanagcaaaatttccatgatggaaatcatcatatcattcatcatcatcataggaattgtcctgacgaactctctgcattaaggtcttcggtcctggtcatcttgagtgagatgacgca

SEQ ID NO: 30285 - DNA, 337 bp, Zea mays
  unsure (1)..(337): unsure at all n locations
agcttactcctncctgngaagggcccttcatcatcttttatattttgaagcccgagacatacaagctggccaacgatcaaggcgaggtctacagcaacgcttggaacattgaacaactacgtcgcttttacccttaaaatgtttcaagtcgttcatgtatctcgcttttctttacatacataaataaagtctaaccatcaaggaaggatcagccttgcctcggcaaagcccaaccctccctcgggggctagaaggggggaaccctctctacgtcaaaattntccttcgaaaagtctttactacaacgtctttcgcgcttttcgactgcgtcgataac

SEQ ID NO: 30286 - DNA, 332 bp, Zea mays
gcctctatggttatatttatttcatattaattactatatccacctctaacgaactatgggtctagatgtatcttggtcttgcaagcgggattgccataaaactggtgtccacgctgaggtgagcggtacgggtgctgagtcccaacgggagcgggagaaccaccgttcagaaaacgacgttccgcgcgctcagcccgcagcatggcgatctcagcacgagccctactcagctcgtctaatgcatggtccacctccgtgtttatcacggcggctaggttgactgtgctgcttcacctatgagttgcctcaccgacaggtgagactatcactcc

SEQ ID NO: 30287 - DNA, 413 bp, Zea mays
  unsure (1)..(413): unsure at all n locations
tgatagtaactatgtgaaattcaaaagataacctgtgcgcttgcaagcaggcaaacaggtgggaagctctcatcacaccaaanatgtgatgaccacatcaagaccttttgagatgcttcacatggacctcttcggacccgtcgcctatctaagtataggaggaagtaagtatggtcttgttatagttgatgacttttcccgcttcacttgggtattctttntgcaggataaatctganactcaagggacccttaagcgcttnctaaggagagctcataacgagtttgaactcaaagtgaaaaagataaggagcgacaatgggtacgagttcaagaaccttcaagtggaggagtaccttgaggaggaagggatcaagcacgagttctccgctccctacacaccacagcanaatg

SEQ ID NO: 30288 - DNA, 366 bp, Zea mays
gtgcgccatggcgaacccctcgttttcagcccatatgcaaggccgaacaatcctgccgcccgtcggcgcgtggctacgtgtcattttccctccgatccaccgtgcccttcaccaaagacatccactttaggttcggtgtgtttccacatgcttggacttagtttaatttcgggttcgtgccacagccaccattcccggcccgcgcgccatggcgaaccacctgttttcagcccagacgcatggccgaacagccctgccgcccgtcgccgcaagcctccgtgtcgttatccctccgttccactgtgcccttcacccaagacatacacattagcttcggtgtctttccacacgcttggacttagctta

SEQ ID NO: 30289 - DNA, 419 bp, Zea mays
  unsure (1)..(419): unsure at all n locations
gtcacagctcaggccatgttccaatgcacgcaagaccatgaagaatagctccaggcgtatgtctgaaagttcttgcgactaagggcacaagcgcctacagtgcccaatgaaattgtcattgaggccatgatcaaaggtcttctgccaggacctactgcgcaatattttgccaggaagcccccacagactttgaagaagctgcttcaaaagatggatgagtacatccgggctgacaatgacttccgccaagaagggaggaggcttacaaattctctgagatgaacaggggcttcngaggaagaatccacccgaggcatgttaggtcaattcatagctccactcagaatgatgacagaggaagtcagcagtagaggccacaatatacttcacaatcttcggggcagcaacaaagctctttc

SEQ ID NO: 30290 - DNA, 486 bp, Zea mays
  unsure (1)..(486): unsure at all n locations
agcttctgtatttcaaaccgacttaaagatagaatgaccttttagtccattatggtctgagtcaatgttgtaaacttttatgaggggcataattgtaattcttcacaggctgtgtcctgtgtctataaatagtgaacagtattcctttactgttcacgcattctgggaattgcatcgcatcttccgggaacaaatcttttgccaggcanaggtataactgtattcaatgattcagtatatcaagcaaatatgatataatttctttatgattcattcatctctttatacccttcattttgtgttattttatacaacctattagaatttgaatttgattacgaagacatagtcttcgtaattatattctcatcaatcttcgtccaaggatcattatccttaagggaataaatgttcatggacgaaggacgttaacatttaacatttcatgttgccttgttcttaattcatagcacttaagaacaagtc

SEQ ID NO: 30291 - DNA, 404 bp, Zea mays
  unsure (1)..(404): unsure at all n locations
gctttgccatccctcgacanactntgcaaacactcttcccactttcccggtggatcaacttgcccaggagagcaagttccaacatttggcgcccaccgttcgtgctacgaaaaacaacccacgatggcccccaagcgagctagttcgaaggcagccccatccatcgaagaagcaacgaaagcagtgctactggcggagaaaaaatgcaaggccctcgcggacaacaccccccaagaggccttcgaagatgaggctgtcagcaaaagacagcgccaagaccatcccacccncgaaggcaccctacgcacctgcagctncagaggcgtaccgcangcaccaccaccaggttttgctccaccagagggcgaagacacaatagaggacggagaagtcatcggcatctc

SEQ ID NO: 30292 - DNA, 229 bp, Zea mays
  unsure (1)..(229): unsure at all n locations
atgctagtcttaactattaagcatgcatctagaccggccttctctttagcagaatcaactaaataaagttgtgcgtctaatacacccttaaatgcctaggaaccatcacttcttctaaagacagacacatctacatttgtgaatagacagttataccccatgtngcataattgactaacagatagcaaattatatccaagagactctactaaagacacattagagatag

SEQ ID NO: 30293 - DNA, 326 bp, Zea mays
acacattaatccttaatttcttttcccgtctcatggacaaagcatccttcctggatccaagtccatagactaacatatatcccgttatcaagatgaatacaatcaatatctgacctcgcgcgagtgctataaaaatcactcgacttctaccgagatcctgattagcaagcaactactcgacctagcatactagtattcatctcaaaaaggaatcctaagttcatgcaactagaggtttaagcaacccctacactttagtgcacattacaatcctacaagcattaagtggtagtaagtagcatataataatacgggtatgcataaaa

SEQ ID NO: 30294 - DNA, 460 bp, Zea mays
  unsure (1)..(460): unsure at all n locations
agcttgtcctcaaaatattactcccnctaaatgagtattctcctttagaaagaaatttctcccnctttagagacgaagganaactccccctgacagagatcttctacttaggaataagcatgtgaaaaatagaggtgcaagacaaaatctgaatatactaacttccctatgcatatgtaacagaatatgagttaactacttatgcatgtttagcaacatggaagtatatgatatgaaatatagtctaatcaaatattggagaagacatgtaaatgataatagatgtagtctcanaagataccgattgatattcaatggtgagcttgagaaacatgagagttcttggagatttgcagtggaagattgtgtctttctccgggacctcattntcttacatgagactatcacataaatagacttgaaacgtgtagtctanagtatagatataaaaacctccctg

SEQ ID NO: 30295 - DNA, 483 bp, Zea mays
  unsure (1)..(483): unsure at all n locations
agtcttggtaaaatcatgtctgcacacttattgttttatgggtggaccgatactagacaacgncatttgatcaattttctgtttaatattccaatatggacctaccttctatgttctggtgaacataaagagaggtatcccatgccatattnnnnacagatttgttgtggaagcaaattgacgggagtgggatacccactgtgtcctaacaatttggataccctaacaggaccatatgctcaccaccctcgtctactctagctgcacgccatgcttcatggcggctcaggtggcacgccggctccacctgactcccacgaccaatgatggcacaaccagtggatgtgccaacngcatgcatctgtcttacctcaaggtatgctgcgcgctcacgttcttcatcnacgacgagtcgntcacatcgacttcctcgtatcgcctttgagcgtgagccaatactcgagtgcaagtggttgcgcactc

SEQ ID NO: 30296 - DNA, 259 bp, Zea mays
agcttcatgaacagccaccttggatcgttacatgcatacagctcagccgaagctgcttcttgctgctggaccttcagcgaccaatcatggtgcctacatacggcgtagtgctcttcatattctaatgcgacgaaccaagaccctggtattcatacgatatctagtggcctctgtgataaggaataagccacgaagaggacgaaatcatcaatatctgtcgggctacttgaatattttctgccttatcgccgcagtaatc

SEQ ID NO: 30297 - DNA, 326 bp, Zea mays
accggatcttaagcacctgggctgcagcttggaaatcttattccacatgggctagtctgtgatgccagagccaacccatattagtcttagcaattaagcaagtattgagttcaactctgttaaaatcaactatgtatagctaacctcctaatactcccttaaatgatactgagtcatcacttcttctaaagacagtaacacttatatccgtaaaaagacagttgtagcccatcttacataattgagatacagaaagcaaattgtaatctaaagaatatacaagaaaaacattggaaatagaatggtcagatgatataacaatttta

SEQ ID NO: 30298 - DNA, 482 bp, Zea mays
  unsure (1)..(482): unsure at all n locations
acgtgaaaagtgccttcctcaatggaccgatcaaggaagaggtctatgttgagcaaccttccggctttgaagatagtgagtaccctaaccatgtttataaactctctaaggcgctttatgggctcaagcaagccccaagagcatggtatgaatgccttagagatttccttatagataatggctttaaagtcggaaaggccgatcctactttattcactaaaactctcgaaaatgacttggttngtatgccaaattatgttgatgatattatatntgggtctactaacgagtctacatgtgaagaattagtaggattatgacacanaaattcgagatgtctatgatggggggagtgaagtatttcttaggatttcaagtaaaacaactccaagagggcaccttcattagccaaacaaaatatactcaagacattntatacaangttgggatgaaggatgtcaagcccatcaagacacccatgg

SEQ ID NO: 30299 - DNA, 246 bp, Zea mays
  unsure (1)..(246): unsure at all n locations
gctgaacgtgcngtcactgatcttactctcgaattatatacgacgactaaggtgaccgcgctagctttgaacatgttcctggggctataccgtgaggatttggctactgacgcagacacctgattccgcgagcgccgagctagtaactaacagggggttgatcgattgagacgtcctctgagtgatggatacgtacgttacctacgtacaaggacacaaggtgcgtgatgaatgtgacactggaca

SEQ ID NO: 30300 - DNA, 384 bp, Zea mays
  unsure (1)..(384): unsure at all n locations
gcttgtgtcctggtcagtggacgtcctctgccaaatacacaacaattagagcggtctctaccaataatagatccgacgagaacaactgtgaccagacaaagcacacgctatgtgaaagggaattangcttacacctatntcctaaatgattttggtggttgaattgcccaacacaaataattggactaactagtttgctctagtgtataagctatacaggtgccaaaggttcacactcagccaataaaaggaccaagttttggggttcaacataggagcaagggataaccgaaggcacctctggtctggcgcaccggactgtccgttgtgccaccggacagtgtncggtgcaccaggggacttcatgctgaactcctcaccttc

SEQ ID NO: 30301 - DNA, 477 bp, Zea mays
  unsure (1)..(477): unsure at all n locations
tgcagcttcatttgcttgnttcaacttctatctctctcacacacacacgcacatgacaactgcgtcttagtttttnttattaaaaaaaagaacatgccagttctgtcttttcgccttgttatctgtcacaatgcactggttttcctaatcccgttaatccattgtttggttatcgtcatcccatatagattaagtgagactgaaaatgattttgacttgcttggaatttacgcctaccaaatttcatccaaaccacgttgattgagattaaaacgaacaggctctaattgatccagaggaggagttatgagaagttatggtcagcaagttccacaatgtggcagaaggaattgtttttatatattttgcgccagggggggtaaagaaccagatttgttctttgattaanatgtagctagcaggaccaagaactctggtntatgaaatgtagctgcaagcaagtaacagaagcaaatt

SEQ ID NO: 30302 - DNA, 424 bp, Zea mays
  unsure (1)..(424): unsure at all n locations
ttacaagcatgcaaagctactataacaacacttgttatggacagagtcttaccagagcgggctggccacggacgagctgttctcggcggcgcggctgaccgatttgtgggaaaacggcgtcgtggcgtgctcgggtgaaatagagggcggaacttggggctatacgaccgcaagggactctagttttaccatgcacaatcaatttgagaggagggggcagaggcagcgtgaatatggcttcgattcaactcactgtgtgtgtgatgttcatacctcgtcgtggaccacagggctatttatagccgcggcggtccggcgatcacttcatggccatggataaccttgttagcgcaagcttacacgttntgaagagatacagtgacgtataatcggggcatggacgacaccgtggcanaactggctg

SEQ ID NO: 30303 - DNA, 412 bp, Zea mays
  unsure (1)..(412): unsure at all n locations
agcttcggctatggttaaaatatttaacagcacaatattgcaatggcaatgaatgttgtggtaactcctcaccaacctgtctgtttatatagtgttgcatggggagaaggcgaaccgccataccgcctacactggttgagcggtggatcgtccgacgtccggaatattttaatcgtttctcggcaacaagctcagggaagggtgtttttggaccttcggcattccgaagccttcgtggtcgtggcagtatctcccaagttattgggcccacatgcacctgtccttgtctcanaaaccttagaaggctatgcatgtgcatcagataacttaagaggatccgtccgagtgtcccaaggacgtcggataaaccacttacaaccaagatcgctngaattagtaaacacaaatcaca

SEQ ID NO: 30304 - DNA, 427 bp, Zea mays
  unsure (1)..(427): unsure at all n locations
agcttcatctgaatccaaaccttcgacttgtgaataacctctggccacaagtcgagctctgttccttgtcaccacaccatgctcatcttgcttgttgcggaatacccacttggtacatacaacattntgattaggacctagaactaaatgccatacctcattcctcgngaagatattgagcgtctcttggattgccagcacccaatctagaactcttagtgcatcctctaccatgtttggctcaatagaggaaacaaaagagtaatgtttacagaaatgagcaactcgagatctagtgggtacccccttatgaatgtcaccgaggatggagttggcgagggatctctatgattgctcggtggattcttggatgtggcggcctttgtcctgaattcttgatcaatttcctggcttattctttcatctc

SEQ ID NO: 30305 - DNA, 438 bp, Zea mays
  unsure (1)..(438): unsure at all n locations
agcttgtgtcctagtcagcggacgtccctgcggaatacacgacaattagagtggtctctaccaataataaatccgacgagaacaactgtgaccagactaagcgaacacaaggtgatctatcgttgatgccacgtcgcccatgggatgggaggagcggattggagctcgcgttggagcagaagacgagtgagctaggagacgggctcccggtcccttttggcgacgaggaggttcagagttggctggacttgatgcaagttntatcaactagtgagcatccttatccggaggcgatcgccctaatcctcctcgccagtggcggtgcaccgactgaagaagcggacggagggtattgcacaatgacagggtttgtcgctatagcgacagatgcgagaacactgctgtgcgaacaaataggatagggatgggatatgatct

SEQ ID NO: 30306 - DNA, 465 bp, Zea mays
agctttaccaaatggacgtgttaagtgccttcctctatggaccaatcaaggaagaggtctatgttgagcaacctcccggctatgaagatagtgagtaccctaaccatgtttataaactatctaaggcgctttatgggctcaagcaagccccaagagcatggtatgaatgcctaagagattttcttatcactaatggcttcaaagtcaaaaaggccgatcctactttatttactaaaactcttgacaatgatttgtttgtatgccaaatatatgttgatgaatattatattgggtctactaacgaatctacatgtgaggagattattaggatcatgacacagatattcgagatgtctatgatgggggagttgagtacttcttgcgattcaagtgaagcatactcaagagggcaccttcattatccaaacgaagtatatttaagacattctacacatgtctgggatg

SEQ ID NO: 30307 - DNA, 396 bp, Zea mays
ccacatgtgctaagcggcgatgccacagccagcccatgctagtcttagcaattaagcatgcatctagaaccggcctctcttttgcaaaatcaactaaataaagtttggcgtctaatacacccttaaaagctaatgaaccatcacttcttctaaagacagacacatctatatttgtaaatagacaattatatcccatattacataattgactaacagatagtaaattatatccaagagactcaactaaaaacacattagagatagagtgctcatttgatattgcaatcttgcctaaacctttcaccttgccttggttcccatcaccgaatacgattgaatcttgggaacccttattcttgacgtaggaggtgaatatcttcttttcccccgtcatat

SEQ ID NO: 30308 - DNA, 368 bp, Zea mays
  unsure (1)..(368): unsure at all n locations
taatagcttcagttgaggatgcagtaagcaagcttcggaaattggtcaatatttgggcagcaaacatcgcaatagcaatgaatgctgtggtaacttcacacctacccgtctgtttatatagtgtcgcaggtgggaaggtgaatagtcaaggtcttccacaccggacaaacagccacccgtactcactgaacggtgggccatagagtccgagaaggtgaatcgccagggcgcgcgtaactgctgcaagatggngtcacctcgcgctcggnnatatttaatcgtttctcggcaacgagctcggngaatgtgntttttggatcttcggcatcccgaagcctagaagaatttttcatggatcaagctcgtta

SEQ ID NO: 30309 - DNA, 384 bp, Zea mays
  unsure (1)..(384): unsure at all n locations
gcgccattggcggccctatctttgaggtcgtcatttcgccgtccgcactgaccactacagcttgaagtacctcctcgactaacgactgtctacagtgtcgcagcaccagtggctgagcaagctcttcggcttcgacttcgaggttgagtatcgtccgggccgcctcaacgttgccacgacgccgagctactccagccagccgcaggggagccgggggcagcaacagccctggccctctctgggccttcgttcgccttcctcgangacatccaccgcgccacaacgacatcccctgacagcagccgcctatgccagcagctccaggacggtaccttgaccgccccatggtgcttggaggatgttatcatntaactactatcactt

SEQ ID NO: 30310 - DNA, 344 bp, Zea mays
  unsure (1)..(344): unsure at all n locations
gtttaaagatataccagaattttcttcaccagattactcccgaagccatcataagaatgagaatcttcgtatgggctgtgagaagtcaaggtttggaaccaagtgcaaaaggtttctgaagtatgcacaaacttttatatgagacgaaacccttgggtaaggagcagtatcancaacaatttgggtgctacagctntgttgctcgttcaggctcaatctgcccagtgccaacctttcngaagaggtggcctggagactgtatgaaagaatggttctatgtgaaaaatgaattaagggtgagagaagatattaaaaagatcatcatgcgccccatctggtcccgc

SEQ ID NO: 30311 - DNA, 491 bp, Zea mays
  unsure (1)..(491): unsure at all n locations
gcaagcttctaagggagaacacatgttgggacttaccaatgttcattttgagaaagtcanggtttataacgcatgtcaagcanggaagcaagttggtgcccaccatcgacacaagaacatcatgacgactattggtggccttcgtcctccaaaggtcctcaaaaacatgatttaacaatgttttccaagtgtaacatatgaacaggtaccttcggtctcgggttgaaagcatatacggaatggaaagcaagattggaacaaaggatggaaccagcgccgaatgtgcgcgcgagatagcttcngctcagtaacagaaagaggaactgacttaaggacgaaaaggctatctagtcctcgacagtgtggtcttaagtcaatagtgaatataaagggcatgaatgtaatttcacacatgctgcgttctgtgcctataaatagatgaacagtactcccatacttgtcacgctgactggtattcacttgtgcgtcac

SEQ ID NO: 30312 - DNA, 467 bp, Zea mays
  unsure (1)..(467): unsure at all n locations
agcttgatgccttcattctcaagatatttctccacttgaagattcttgaattctgatccattatcgcttcttatcttcttcaccttgagctcaaactcattttgagtccgccttaagaagcgcttgaggattnttgagttntagatttatcctcgatccttnggacttgattgcttcaatttgctttccaaacacctgtgctcatactcacaagaggagtgttagttcatagtaatgtgttgatcatttaatcgccaaaaacaactagaaatggcccaagaccatatttccctttcagtttgacactatttattntattgtactaacttatatgtangatatgacctagaatgtgtctgcaataagatacaatatgaaatatgttgaataaaaggtgtaattaataagaataaagctttaaaacttaaaataataattattgggaacaaagaaaaagatacaaacat

SEQ ID NO: 30313 - DNA, 476 bp, Zea mays
  unsure (1)..(476): unsure at all n locations
agcttgacaatgaggagatggcgctcgtcattaatatcttccgccaaatcctatagcaaaggagggggaaggactacaagtcccgctccaagaatgtttgctacaagtgtggtaagcccggtcattntattgctaaatgtcctatatctagtgacagtgaccgaggcgacgacaagaaggggagaagaaaggagaagaaaaggtactacaagaagaagggcggcgatgcccatgtttgtcgggaatgggattccgacgaaagctcaagcgactcctccgacgacgaggacgccgccaacatcgccgtcaccaagggactcctcttccccaacgtcngccacaagtgcctcatggcaaaggatggcaaaaagaagaatgtaaatccaactcctccactatatatgaatcttctagtgatgataatgctagtgatgaagangataatntgcgttccctttttgcaacctcaacatagc

SEQ ID NO: 30314 - DNA, 482 bp, Zea mays
  unsure (1)..(482): unsure at all n locations
gctatgaagatntttcattccaatatgggcaagtcgacgatgccagagccaacccatattagtcttagcaattaagcaagtgtctagttcaacattgttattattaaaatcaactatatataggtgaccatctaacactcccttaaatgctattgaatcatcacttcttctaaagacagtaacaccaacataagtaaaaaagacaattgtagcccattctacataattgagacacaaaaagcaaattataatctaaagaatctacaagaaaaatattggaaatggaatggtcacgggatatagcaattttacccanactctttaaccaaccttgtattccatccctgaatgtaatcgctctttggggatcttcatttttctcatatgacgagaacatccttntatcccctatcatgtggntngtgcacccgctatcgattatccaacttgacccaccagatgtataaacctacagaacaaat

SEQ ID NO: 30315 - DNA, 466 bp, Zea mays
  unsure (1)..(466): unsure at all n locations
agctntctcaccatatatagcatgcttaatgaaacttcgttgaatgataccaggtaataagaaaacttggtcatcaagctgactgttgaccttctgaccagtcgtcactaaagtaagtcggctgcctttctggtagatgtggataagtcggctttagaagcattagaaactatacttcaagagctntccaataagtactcatgggccttcatagctcttgggaatcaaaagatatgactgtttcttctggacggttctgttgcgctggactgactcggatatagcatctcttgctgattcgccctcgatatgatctgtcctctctctttggtgaacctaagtaatatcaatatacacgacttacgtagcatagtaatctcattagtggtaaatgagattcgtcgaacaccctgaatttgcggtataaatttctcgctatattacaattcaaggtacttccttttta

SEQ ID NO: 30316 - DNA, 438 bp, Zea mays
  unsure (1)..(438): unsure at all n locations
agcttctaaagggagaacacgtgatatgtttgactaacgtgcaattcgaanaagatagaccttgtgcagcctgtcaagcaggtaaacaagtgggaggagcacatcacagcaagaatgtgatgactacttcaagacccctggagctgctgcatatggacctcttcggacccgtcgcctatttgagcataggagggagtaagtatggtctagttattgttgatgacttttcccgcttcacttgggtgttctttntgcaggataagtctgaaacccaagggaccctcaagcgcttcctcaggagagctcanaatgagtttgagctcaaggtgaagaagataaggagcgacaacgggtccgagttcaagaaccttcaagtggaggagttccttgaggaggaanggatcaagcatgagttctcttgctcctacacaccacagc

SEQ ID NO: 30317 - DNA, 438 bp, Zea mays
  unsure (1)..(438): unsure at all n locations
agcttctaaagggagaacacgtgatatgttngactaacgtacagttcgaanaagatagaccttgtgcagcttgtcaagcaggtaaacaggtgggaggagcgcatcacagcaagaatgtgatgaccacttcaagacccctggagctgctgcatatggacctcttcggacccgtcgcctatctgagcatagggggaagtaagtatggtctagttattgttgatgacttttcccgcttcacttgggtgttctttntgcaggataagtctgaaacccaagggacccttaagcgcttcctaaggagagctcanaatgagtttgagctcaaggtgaagaagataaggagcgacaacgggtccgagttcaagaaccttcaagtggaggaattccttgaggaggaagggatcaagcacgagttctccgcttcctacacaccacagc

SEQ ID NO: 30318 - DNA, 491 bp, Zea mays
  unsure (1)..(491): unsure at all n locations
gcttgttatgactaacataacctaaagtctaaactgtttgtttacttgagttanaagatcatattacctatagcacaaatgtcatgtgattctgactattttaagaccaacaaaccatttggaagccaaacaaatccctgttcaatttgcctcanagcaacatataagaaattacatagtcagcttctgaatacgtgcactgctcttaaatgaagaaaactggagccaggcaaacaaataagtgaaactatacccacaaataacccagtgaaatcataaagctaagggtgcacatggatcggacacaatcgtatatcactaatattacatttgtttccagatttctattcggatttgaatatggatagtatcaactagctatgtcggataggatacaaatggatatcgacatcataaacagaattatttgttctgatatggatgcggtatcggatgtaaacatccagactcaaatacgaacggatctgaac

SEQ ID NO: 30319 - DNA, 397 bp, Zea mays
  unsure (1)..(397): unsure at all n locations
atataaagcatgcttcataccaatttaaattnttcattttctagttcatgctccgccaatattacatctagtttagctatgtgatcattttgttgttaatcatagcaatgtgaacatggatagcatcaacattaatgtctctacatctcctgcaaatagaaacatgatcaacagttgatgtagaggggttgcaaatatttaattcatcaatcttagcatgtacaataccatgcttattttgagatcgtaacaacatctttacaacattaaattcttatccttagaaattaattatcgtctcaatcttacgctagaaatgatcatcgaatggtgatctatcatcaagtacatatcattttagttgacagagatatacaaaattattctctcctacaat

SEQ ID NO: 30320 - DNA, 347 bp, Zea mays
  unsure (1)..(347): unsure at all n locations
ctaaccatgtctataggctctctaaggcgctttatgggctcaagcaagccccaagagcatggtgtgaatgcctttaagaattccttatagctaatggctttaaaggcggcgaggccgatcctactttattcactaaaactcttgacaatgagtttgttgtatgccaaatntatgttgatgatattatatttgggtctactaatgaatctacatgtgaagaatttagtatgatcatgacactaaaattcaagatgtctatgatgggggatgtgaagtattttctacgattccaagtcaagcaacttcaagagggcaccttcattagccaaacgaagtacactcaatac

SEQ ID NO: 30321 - DNA, 401 bp, Zea mays
  unsure (1)..(401): unsure at all n locations
accatttctcgtgatgtttntgaaaagtaaatgatctttggttatgttttccttttagcttgatttatgatgattgttatatgttattgagcggtgtttggttgttcttgtttgttgtgatgtttagatatcgatcagtagttgagaatcaaaatcagattgaggaagagtctcatattttctataagcaaggcaagttgatttctctctctgcatgtttctgtctgatcccatacaatatatttaataagagttacttttgtatatgtgtataatgtgatgggtttgtctaaataggattacctagaaatacccaccttttttcttgataacctcggttaatactgtgctagtaactgtctattgctaacttatcatacactgtcactttttaagatata

SEQ ID NO: 30322 - DNA, 263 bp, Zea mays
cttcttattcttgccaatatttataaagactacttcctaagcttcaacatattttacaaacccaaacataccgatgagccttcatttatgggagcatgacttcacccaaaactacccgctcaatcacgcctttaagccccgggaccatctggaacttattttcaccattatcatggccttctttagttaactgaagacactgctctctgatttctactcatagtggctctcgataagccattttctcctacgtgtcttgttgc

SEQ ID NO: 30323 - DNA, 490 bp, Zea mays
  unsure (1)..(490): unsure at all n locations
agctngaggttcttccacggataggaatagttcttgtttcttaactactagatcaaccactgaatatcacacaaacaaacaagaagaacaaacaccactcaataacatgcaacattcaccatacgtaaagctaaaagaaagcctaacgaanagagcgttcgcttttcaaatacgtcgcaagtcatggttataataagagggtattcttttcaaaaatgtgtgatctatactttataaaataatacatgagcttataaatatcttaagtaaaatatgcaaatattaggttcaccaatttaatcttttataaaatgtcatacgtgatatgtctaatattaaggggttataagatgataaaacacgttataacaatgataaacctttttaatattttagaaaagatatatgctatatctaatggtaatgggctactaatcacgttattaactatagaagcattatggagcatattattagtcattcacttatg

SEQ ID NO: 30324 - DNA, 352 bp, Zea mays
gtagcgcatgccaagccgggaagcaagttggcactcatcatccgcacaagaacatcatgactagtgacaggccactggagcttctacatatggacctattcggcccgatcgcttacataagcatcggcgggagtaaatactgtctaagtattgtggatgataattctcgcttcacttgggtattctttttgcaggaaaaatctcaaacccaagagaccttaaaaggattcttgagacgggctcaaaatgagttccgcttaaggatcaataaaattaaaagcgacaatgggacggagttcaagaactctcaaattgaaggctctcttgaggaggagggcatcaagcatgagtt

SEQ ID NO: 30325 - DNA, 410 bp, Zea mays
  unsure (1)..(410): unsure at all n locations
tgtgnggacttaatgggaattctgaatttcggaattctgaaattcagaccttgagccaaagatcagggatgttcaccttgatccctaactcgaatcctaatggcccaattaacaaaattgtgtctaactaacccctctgtcgtgtgccaagagatggcattgggacgcgagctctagaaacgacaaaaccctggattngcctcgggtttgagcagggagatagaccggatttcctggctccatatctctgcaaccattaggcaaaatcctatgacccccacacaagatctgtagcttgtatggaggagaagaggttntgtgcactgaccaatgcgagagcatgctcggatgagcgaccacacgcgctagaacttgtgcagaacgcacgggcacacgtgttcgaccctggt

SEQ ID NO: 30326 - DNA, 484 bp, Zea mays
  unsure (1)..(484): unsure at all n locations
agcttgcacncagatacattggtccattcctggtgcttgaacaatgtggaccagtggcgtaccgactccaactacccgaaacattgtctgttgtgcataatgtgttccacgtgtcacaattgaaaaagtgtcttctggttcccgatcgaaccattgaagtaactgatgttgtcctggaaccagatttaacatactcggaacatcctattcnagtcttggatcaaaaggacaggatcacccgaagaaagactctcacattctacaaaatacagtggaaccagcattctgaagatgaggctacatgggaaactcaagacttcttgaataagaagttcccaggcttcctagcctcatataaattgtaaagtctgtatagctgtgtaataaagaagtgacccccacatcacccctatcttgactagaaataaagaagataaatgtgatgtgtttccttaccattacctaccctatgaattttaatctc

SEQ ID NO: 30327 - DNA, 407 bp, Zea mays
  unsure (1)..(407): unsure at all n locations
agcttgcaacgtgtgcactatgagaataccttaattataacattggtgggctagggccgaaaacgagaggataatgttattattactgtattactatctaaattatgaattgtcatatatctaacattaaaggcaattagacatagcttacgagccggaacagctcgcttgaatatcacgagctacctcgagatcaagcccgcaattnttaagcttattttttagttctagtatgggctttggccccttcagctccagtttctttaaacgaagaaagagatccagccagcgcgatcctcgcgtctcgaggcttgaggcaccaacttgcagacttgcagtcttgtcttgtgattaataaccactgtcgtttgttgcacatggcgatgccgagcgagataaataaagcg

SEQ ID NO: 30328 - DNA, 421 bp, Zea mays
  unsure (1)..(421): unsure at all n locations
ttcaccccttttgtgggtttttggtgaattggataacaacacatttaaaggtctaacaagtttgctaagtgttgaacaggaaattcagtaagatgaacatacttgaatagtatataatgatcagtgaacacaggttcaacacaagattaaataaccagtgagacaatgcanatggatataatatggtctctatattggtttgaatatatggacaagacctgagaaatcactatgcataaatatgatcataatagaggttgaagtgattaagaggatcggtcaagccaaagtgaataagatatgaggaatcgtgaattggctcgaccatattactattagtcaatatattgcttctatgagaatcaaactagagcttgattgatcttagcatatctagatgacattgaagcaaggttcacaa

SEQ ID NO: 30329 - DNA, 464 bp, Zea mays
  unsure (1)..(464): unsure at all n locations
cgtcgatggggagcctacttgacgtatactcttctttcttctcctccgtcgcttagaatgcgacgggttgcacctcgggtgtggaggtgccgccttgctcaacaatttatttggagcctttgatcatcaactcaaagctcacaaactttcctatcacttcctcaggagacattagcttgtatctaggatcaccacgtattaattgaacttgagtaggattacaaaatatgagtgatctaagaataaccttgaccatttcatggtcatcccatttggtgctcctgaggttgtgcacttggttgaccaaggtcttgagccaattntacatngcttgtggctcctctccttggttgaggatgaatcgaccaagctccccgtcgatcgtctcccacttggtgatcttggtcacctcatcctcttcatgcgcggtctttcgcacgtnccaaaatgtcttggcactctta

SEQ ID NO: 30330 - DNA, 430 bp, Zea mays
  unsure (1)..(430): unsure at all n locations
tctcgatgatgtacgcctctagattgtccttgtcttctatagctattacttngggggaaaccgcattgaaaaagtaacacaagcgtgtgatgacaactttgacatgctcttgtttgagggctcttaccgcaattgggaggaacaccgtcatcatcacatgacaggcatgagagttgtagccaaatagagacaagtccttcatcctgactagtctgctgatattggatgagaaacctgtgggcactttaccccaccaaacatttgcaatctttgtttctcctcaactgacagttgagctagctgggggaggaaggcttcctttgccctatacctgatgaagctcggctgattgaaatcactnatcatgcggataagccgctttgctactcgatgccacaggttcatgatgctgcaaactttttgtcatgct

SEQ ID NO: 30331 - DNA, 475 bp, Zea mays
  unsure (1)..(475): unsure at all n locations
gctaagctacataagcagccattcctagcaaccatgccatggaaatntcctaagactcctgcctnctctccaataggttggccgagctcggtacaggtaactacaattcgttntcctttgtgaaggttccaaacatgtttaagtttgttcggaccacgacttattgcttcattagtgtgacctatgcagttttatgttagaaacaattaaaagaatgggtgaaactttaaaataaaatacaatttatgaagtgtaagaacctgcaacagaatcctctatatctgcatcatcaggagaagggtacactccagaagtagtctcaaaagatgttgtatctcttttatgatgatctgaaaacatataataatggagagattcagttgctgtccctagcatataaanaatttganagtggacatgtatcatattattagctgaaaatgagtcacagttatgtttaattccaaaatttata

SEQ ID NO: 30332 - DNA, 438 bp, Zea mays
  unsure (1)..(438): unsure at all n locations
agcttaccctcggatccaaagccccactcgtccgatttctgttacctgctccaccacgaatgccgcaggaggccactccgtcgactgtggcacacgtcagaaaggggtcgtctatcacctatggaagacttccacctcgccctaactcggctccgatctcaatatctgcatcaaaggacaccccaacgtcatcggatatagaagcgatgacgcatcccgtaagcagctnttccccatacttaagccctgtgacaaccactatggtatgggcaacccctcccctgtgggttcgggtatgttggcaaacactcaacctcaccctggctcttagcgggaaaaccaaccgattcaagtctatgatgaagtataacgccatactcgccatatggtacaaagactccttcctcagtgacaaggcgtttctcggctctatgtcat

SEQ ID NO: 30333 - DNA, 455 bp, Zea mays
  unsure (1)..(455): unsure at all n locations
cttcatccacacatgtgctatttggttatgccacagccagcccatgctagtcttagctattaagcatgcgtctagaccggcctcttcttttgcaaaatcaactaaataaagtgtgccgtctaatacacccttaaaagctagtgaaccatcacttcttctaaagacagacacatctacatttgtaaatagacagttatatcccatatgacataattgactaacagatagcaaattatatccaagactctctactaaaaatacattagagatagaatgctcattagaaattgcaattntacctaaccctttcaccttgccttgattcccatcaccgaatataattgaatcttgggaaatccttatcttgacgtaggaggtgaacatcttcttctccgcgtcatatggttgtgcatncgctgtcgataatcagcttgaacccncggatgcataaacct

SEQ ID NO: 30334 - DNA, 473 bp, Zea mays
  unsure (1)..(473): unsure at all n locations
agctngactttgagaaggcacttgataaactggagtatgctgctatcttagagatcttgagacacacggggttcgataataaatggatccactggatctctatgattcttggctccggatcttctgaggttcttttgaatggagtccctgagaaaagatttcactttctacgcggcgtcaggcaaggcgaccccctgtccccgcttatatttgttcttgttgctgaccttctacagtctattgtcaacaaggcctacgaaggtggtattcttcgtcttccattaccaaacaattgtggcacggatttccctatcatacaatatgctgatgatactattctcataatggatgcctgccctagacaacttttcgtcttaaagcaatgctcaactctttcgcggactccactgggctccatgtgaattaccataagtctaacatntacgccatcaacgtcacggaccagaaaatgg

SEQ ID NO: 30335 - DNA, 445 bp, Zea mays
  unsure (1)..(445): unsure at all n locations
ggatcttaagcgactgagctgcagcttttggcttcngtttgaaggacatgtttcattattttcgaatatgtctcaagacaagaagttagttgctgagacgaagctaaccgaagaggagaagctccttgaggagaagactgctggatttgtgaattatagcaaaacgaataccgagaagattacttaagaaattctggaaggcttgtctgaaaatactgatgatagtgacagctatgatgtggagagtggaggcgaagactcttaagatcggcccttgcgaccaagtcatgcagtcttcgggaaatcaactatcaaacagagtcatcttgataatatgagaggaaggtattttcgagatatgtctattgtgagggctgacgtagacagggccgttcctgctcctgaagaaaacgaagttgtgatcttctgatgcttcttcanagct

SEQ ID NO: 30336 - DNA, 441 bp, Zea mays
  unsure (1)..(441): unsure at all n locations
gcttgtcaacaatatanaaacanaagagagaaggcatttttgcagatcagccgaagcctatgctcctatgtggagatatagcagatcaaagggtactgctggggtcttagctatgtgatgagcaagaaaaaaactctgataaggtttttgttcaacaacaaagatgtcttcgcttggacaaccaatgatctttgtggtgtcaacagagatgtcattgagcattcacttaatgtggatccatctttcaggccaaggaagcaaagacttcggaagatgtctgatgataaagctgaaggtgatcggaacgaagtaaagagacttctcagtgctggtgttatcatagaagtaacatatccagaatggctagcgaacactgttatggtgaagaaggctaatggcaaatggagaatgtgtattgacttcacagattcngagctcatg

SEQ ID NO: 30337 - DNA, 441 bp, Zea mays
  unsure (1)..(441): unsure at all n locations
aaaaacaccacataaatgatatntaaatgtgtatccacatataaactacagctttataaacacacggtgtgcgtttataaattaaagtacgcattatcatagatgatactttaatttctaaatgtgtatccacataaatgatactttactttctaaatgatctttatattattgcatcggagtatgtgtgtctagagagctctaaatgtctatccatataaatgttgttgcatatttatgcactaaacccgacgccgttaggtcggtcagcagcttgcataaagcagccagtcaagctcatctattatataatggcagcttcagccagcaaccagaaggacagcgaaacgcctaactctaaacccggtaagtgcaaaaagaaaaaccataagagatgtctncttgacaatgacgtctctatcattattctgtaagtcgcga

SEQ ID NO: 30338 - DNA, 425 bp, Zea mays
  unsure (1)..(425): unsure at all n locations
atgaggtgtcatcatcatctgagctatcatctgaatcccattcaactatgtaggctttgccatctttcttcttattgtagaatttcttcttcttatcatctccatctttgcccttcttcttcttgttagggcaattcatggcgatgtgaccgggttccccacactcaaaacactntctatcattgaaggcatttcttcttgatgtttggcctcttctaggttgacccctcttcttcttcatgaatntgttgaatttctttacaaatagagccatatctccgtcactctcactttcattntcttcatcatcactatcttaattttcaattgccttcaagctttaactgtgagagcggttgattcattcttcactttctttgccaaacttatagcatcgacttgagatttcttgaatatatcttgag

SEQ ID NO: 30339 - DNA, 397 bp, Zea mays
gcttgctgcttatgcggtagcaatctaatatatttctaattaacttggtcaagagtctaagtgccatgtgtgtgttgaatcaaaacaaccccgcaagcctcacaagggctgctgaggcgagggagttggcacctttagaacttggtcattcttatctatgcgagatgaatggatatttgaccacaggtggtaaaagatactttctcacttttatagatgactccactagatattgctatgtgtatctcttaaaaacaaaagatgaagcattcaattattttaagacctataaagctgaagttgagaaccaacttgagaggaaaataaaacggttaatgtccgatcgaggtggagaatatttctctcatgtgttcgatgagttctgcgtggaacatgg

SEQ ID NO: 30340 - DNA, 449 bp, Zea mays
cattgaattaaagctttacgtttgttcattttgcaaaatttcaggtagatcttgattcaacccatgttgaacttggagacggagaggacactcaaggtgcatctcaaggtgcatttcatttgctctcaatctaatccttgctcatgtcccatcaagaacctatttgtttcctttcccctccttgattttttccgtctttgatcttaaatggtccatgatccactggtatcaagtcaccaggctctctctttcttccttctaaaacgttattttgatactcacagtttttgactaaattccacaacgagtgctataagaatataagtgtgccattatggaaaaaatgaagtagactttgttaaggcacatacttaaatgataattatattacaacacaattctatctgtaatatttaattgctaccgctgtcatgaaagttgtgaaaatg

SEQ ID NO: 30341 - DNA, 373 bp, Zea mays
  unsure (1)..(373): unsure at all n locations
cagacagatggtccaacagagagaaccaatcagattctggaggatatgttgagggcttgtgcttngcaagataagataggttgggacaagagattaccatatgcagaattctcttacaacaatagctaccaacccagtctgaagatgtcaccatttgaagcgctctatgggaggaatagtagaactccattgcattgggatcaacctggtgaaagacaggtgttcggtccagatattttgcttgaagccgaagagaacatcagaatggtctgagagaatttaaaggcagcacaatccatacagcgatagtatgccgacatccgaagaagagaactctattttgaagcgggagactatgtctacttaaggtgta

SEQ ID NO: 30342 - DNA, 100 bp, Zea mays
cgcgcgcactctcaagaaagaaaatcatttacgcccgcagcaaaaggccgaccaagggctaaaccaagggggctgtaagaaaaaccaaggaaatgggaag

SEQ ID NO: 30343 - DNA, 320 bp, Zea mays
  unsure (1)..(320): unsure at all n locations
agcttatgaagattcttcatcccaacatggtgctattttcggtgccagagccaacccatgtaaacttacaataagcatggtcgactcaccctatcaaaaactactaagaaagctgaacctctacacaccctttaatgctagtgaatcatcacttcttctaaagacagtgacacctacatcaagaaaaagataggcgaagcccatttgacatagtggagaaacaaaaagcaagttgtaatctaaagaatctacacgaaaaacattggaaatagaatgggcaggagatatagcaantttacccaatcacttgaccaaacctt

SEQ ID NO: 30344 - DNA, 428 bp, Zea mays
  unsure (1)..(428): unsure at all n locations
ttaagcgactgagctgcaactgatatgatactccacctgtgtcattttgcttatctggcccgggaacagcctgtttacctacctgaatatcatcgtagtaacttcctcatgtgaggaactgaggatgatgcgagctgagcttaaagtctaactattgctattcaactaaaagagcatgactagaagggtgcttgacagcgctcgtattgcatcttattatgatgccttaaatagattcgtgttcaaattgctacaagagtcatgagttgtgacttacctttagggcttgtgtgaaacgcagcaatcccctctaatccatatgtntgagaagggggttgatgtaggataattagttcaatttccactcctatacatatgaaggcctgatcgtctcgcctataatccatgtggattatgggtaatgagtc

SEQ ID NO: 30345 - DNA, 442 bp, Zea mays
  unsure (1)..(442): unsure at all n locations
agctttacgtctcaatttcaaaagagaactctcgttcattaaaaacagtgtagacaaattttacgcctataaaatgtatttcatcttataatttatctcttcatctatactaacatttcatgtcagcttagttattcaatactagactccgtttcgaatatttgtcgtccgccgcattattttttgaattaaaacgtgacaaaggaaaaaaaaacggagcgagtaactattaagactctcacaagatccccatgcatcatacatcgaggaatggccttatagctagctagggagcaaaaaggcttgcatggtcatgcatgcacacgcagtaaanaattcgtcatgaattgtgcctatccgatccgctcacatatatccacgcatgcacagtcgtacgtacagccgtggagcttatagggaccaatatatataaatggctcat

SEQ ID NO: 30346 - DNA, 229 bp, Zea mays
  unsure (1)..(229): unsure at all n locations
gagatagagacttgagctccatttgagtggngaactccgtgtgttgtgtttagaactcaagatgtgacttgtgtgcgtgattgtgctcgggatatgaatcttgtgtgtgttgctctccccttccttacttatgtgcttcttttgtgatcatcatagttagggcgagaggccccaagtcgggagactcctcgctaacgggagaaagactaagaaaggaacaactgtggta

SEQ ID NO: 30347 - DNA, 339 bp, Zea mays
  unsure (1)..(339): unsure at all n locations
acctaaagccactccgccgtcaggatttagtacaacaaatatccaacaaccgaggcctccttgtacaaagatccgattggtctgctctcgaaccaatataaccacccatgggaacatatacttggaaacacacgttanttctacaaacacacaacggatgaagatggggactaacaactctgagcaaatgctcatgaatggatgcttcatcaccaggagcaacatcaacctggtccttcagtacaacctgcatgacattctcttgatgtagttcactcgagcaaacacaagatagagctggattacctctgcatactcaaaagggccaacagactgcag

SEQ ID NO: 30348 - DNA, 447 bp, Zea mays
  unsure (1)..(447): unsure at all n locations
gcttcaaaggtgccatcctgaggctggattggtttctgntattataagagaattccgccagagaaaggcacttatcccaattcttaccatagtgtaagacacatgccctcaacatgtcctccagaatctgatttactctttctgtctgaccatctgtttgaggatggtatgctgagcttctaatcacggttgttccatgtgactnttgtagctgctcacaacgtgccacaaacagtgctcctctattagacacaatactcctcagaattccatttaaaagcactatttggtcaatatagatctctgcatatntatctgccttgtgggtggtatgcactggcaagaaatgagctgttttggttagcctatccacaatgacccaatagaatcgtggtgccgggaggtgtngggcaaacccacaatgaaatccatgcaaatgtcctccca

SEQ ID NO: 30349 - DNA, 301 bp, Zea mays
ctttcagcaaactagatgatgtcaggcagcgggtttacaggaaagcacaccatcttctcccttcacataactagcaccagcatggaaaaatatgtcaaaccaaaagtcatcctcttgaccttacatgtatgggactttcatctagagcgagtgtttgcatcattaaatttctttgaacttatttaggactctccactgttgtcttatcacctttctgtgtagaccaactaacaatttatttggccagagacttttttggataccaaatccatgaccctccagtccgtgaaaacctgatctc

SEQ ID NO: 30350 - DNA, 429 bp, Zea mays
acagctgggcttcaacagtctgccgcgatatcaatggaaacttaatccccgaaaatgcgtcttctgagtaccaacagggagaatactcgtggttattgtcagccaccggggaaattaagccaatctaaaaaagatcgaggctatcatgagaatggaagcaccacgctcacagaagaaggtacaaagacttaccggatgcatggcagctcttaacagattcatatcaaggctgggagaaaaaggcttaccattctataagttgctcaagaaggtagacaaatttgagtggacttagaaagctaggaagctctagacgcactgaagaaatccttgcaacaccggcagtgctatagccaccgtgccgagccacgccgagtcaagcagctaaagatctgttgtatacatttcttgacgactcacgtggtgagc

SEQ ID NO: 30351 - DNA, 492 bp, Zea mays
  unsure (1)..(492): unsure at all n locations
tgcaagctatgaagattcttcatcccacatgagctagtctgcgatgccatagccaacccatgttagtcttagcaattaagcaagtgtcgagctcagctctatcaaaatctaccaagtatagctgaccctctaacactcccttaaatgctattgaatcatcacttcttctaaagacagcgacatttacatcagtgaataaacagttgtagcccatttgacataattgggaaacagaaagcaagttgtatctaatgaatcaacaagaaaaacatnggaaatggaatggtcaggtgaaatatcaattntaccaagacctttgaccaaaccttgatttccatccccgaatgtgaatagctcgtggggatcttggttnttctcatatgaagagaacattctnttctcccggtcatgtggtttggtgcacccgtgtcgagtatccaacttgtgcccncggatgcataaacctacaaaacaagtttagttctttggttt

SEQ ID NO: 30352 - DNA, 375 bp, Zea mays
  unsure (1)..(375): unsure at all n locations
tcctaatgcatctagcttcattgttctctctactgtgacaacaatggggctattgcgcangctaaggagccaagaaaccaccatataaacatacacgtactacggaagtgtcacctcatacgggaattcgttaggcggggtgagataaagatatgcaaaatacatacggatttgaatgttgctgatcctttgacaaaacctcttccacaacgtaagcatgaggcacacatgagatctatgggtattagatatcttctagattaactctagtgcaagtgggagactggtagaaatatgccctagagataatcatagagatgagcatatttctttgtatccatgatatatatatatattgcttaattgaatatccat

SEQ ID NO: 30353 - DNA, 429 bp, Zea mays
  unsure (1)..(429): unsure at all n locations
gctttgctgtcttatgcggttagcaaatattaatttaattcctaaatttaacttggtcaaaaagtctaagtgccatgtgtgtgttgaatcaaaacaaccccgcaagcctcacaaggctgctgagtcgaggagtntggcacctctagaacttgttcattctgatctgtgcgagatgaatggagttttgaccaaaggtggtaaaagatactgtcggggaccataattaggggtaccctcaagactcctaaacctcagctggtaacccccatcagcacaaagctgcaaaggcttgatgggtgcgactaagtcaaggatcggtccattcgagggacgcaatcacacctcgcccgagcctagcctcgggcaagggcagctgaccccggaggatctacgtctcgcccgaggcccctctacagcaacggacacacc

SEQ ID NO: 30354 - DNA, 368 bp, Zea mays
  unsure (1)..(368): unsure at all n locations
ataaaggtataagggaatcggaaatntaataagggaaaccaaggtaaaaagacaagtaaaagtttcatactcaattaagtagttctctagctgtatctcgaaccaactcacgtccgcccttaacccaaattaggtaatgaatctggttcctatgcttcgggcttcggctgggacatcaactatatctgatgtcgaaagattgaaagtatgcttgttaaccatcttggtgtgagtgcattcagctatcataaatgcagcagttgtgcctcgagaagctaccagagcatagaaatctccgtgcccgcttataacttcggcgagggctctcactgtggttccaatatgaatnaaggccccggggatgtctt

SEQ ID NO: 30355 - DNA, 413 bp, Zea mays
  unsure (1)..(413): unsure at all n locations
tgatggtgagctccacaagcgcaaggaggtcgtgcactgtgttaccttacatgagatngatgtcatcaatagcaggtaccttcacacccatttaacagttctgacaaggaatcgactgtaaacattcatcatggacaatgctaatgggaatctggtcttgctaattgcaagactacagctagaaatcgcatgcccagtaacaataccatcacacgttattgatatattttataaacaatgttggagtataatataactttgcactacctgagttatgctgagatcaagtgatggtcccattttagctgcaaaagcttcattctattcctagaagaaagatcaatactaaggaagctctatcagggtcatgatcaagtattaatccanaacttgtcataggtgagctgacttct

SEQ ID NO: 30356 - DNA, 332 bp, Zea mays
agcttgctgaagaatcctccgagaagacaaagacactatatgtgctgaaaccaactgcgagcccttcgtcttctgctgttaaggtctcagaaatattgaaggtaatgactgagtcctttccattcacatcgctaagtcctttgagattggaactgaccaccctcttacagaaaaaggaagtatcttctgctgctgatgggagaggcggcggcgaaaagaaacaacgcatgatgaatatactacaagcaattgagcaaaccccgccttcggctttggcaatcaaagcttgcaaatcgaccgatgtaaagccactgctcagccgaagataaaac

SEQ ID NO: 30357 - DNA, 464 bp, Zea mays
  unsure (1)..(464): unsure at all n locations
agctttagcactttggcccgttcgatgtatctggtcctatgtgttaaaaccntaacccgtttcaccttcggcgtataagagatagccgaagcagcagccttcctcttctttccctgctttcgcgagggatagcaatagtctgggtaaaaaaagccaataacatcgaaaaccctatttaaccttttcttgcctcgccctccgaacgcagccgtcatggcatcatcttcagcccttgagtaggcaccaagtagctcaacgctagttgcttcgatggcatccagccaatcatcattcggctcatcgaattggctcctatacttgagtgtgtacttcagatagaccaaaccacctttgctagacccagcaacagtttccttcagcatctcccacccactcgacagcggccacactctataagtaatatgctcttggactaagtccctggtgcctatgtaggtacatac

SEQ ID NO: 30358 - DNA, 297 bp, Zea mays
tatttgtgttaatggttcacaatttcacatctattttatattgtcaattaagcctgcaaaatctgaatattcttaagcggttaaaccatacttaaaccctgtgaatctgtgttaatctaggtctcaggatatgatctatccctcagttgatacaatggagttctatagtgagaatcatctggcatgtggaagtgattgtgactatggtggctcagctgtggtacaattatgggatattgattctccagagtcttatttatctttctctgcaagtgactctgtatgtaccttctcatt

SEQ ID NO: 30359 - DNA, 300 bp, Zea mays
tttaaacacaatgacttcatcatccttcggctctggaaccacttcttcgccagcaaaacgaacaagcctactctcgacttctccaaagtaacccaattttttcattatcaccatatcatctgccgtcacagtagatttaccgaagtcaaggtgactaggtttttctgggatcaagatggggtaatcttctttgtcttcattaccacttccctctccaactgtgattccctcagcttcggcattcagagtaccttcggcaacaggctcttctgatacaacaagacccgactacctcatcac

SEQ ID NO: 30360 - DNA, 298 bp, Zea mays
  unsure (1)..(298): unsure at all n locations
tactatggnttggagatttttactttattttactatggnttggacactaaaaccttttagtgtcggtgtttaaggttagggtttaaggattggatttggggtctaggttaccataaaaacatgtgctatagcttacttgtggcaaaaaatgtcgtaacggcctctccggtctaaaacgtaggtggcaggtcggatacatgaaattggctctttggccacgaaaacctgtgctacagctcgtgggaggccaaggaccactttaaggtgctctgggaaccaaaaaacgggtggtggaaca

SEQ ID NO: 30361 - DNA, 300 bp, Zea mays
tgggctaccaccatgcatccagagtgtggaggagatccagcgtgaacatccatggaagtacaagagggagaccccgctcggacaccctcgggggctgggccatagtttgcactacccacttgagccggatcatgtccggcagtaccctcgggggctgggcagtggcttgcgcttcccacccgagccgaatcatccccggcaacaccctcgggggctgggtaagtgtcaacaccatccttgaggaccaagttctctgtagtagccgcctctaaggctgagggtccctcagttacttccatg

SEQ ID NO: 30362 - DNA, 278 bp, Zea mays
tctaaagggagaacacgttataggtttgactaacgtgcatttcgaaaaagatagaccttgtgcagcttgtcaagcaggtaaacaagtgggaggagcgcatcacggcaagaacgtgatgaccacttcaagacccctggaactgctgcacatggaccttttcggacctgtcgcctatttgagcataggaggaagtaagttttggcctagttattgtggataacttttcccgcttcacttgggggtccttttgcaggaaaagtttgaaacccaaggaaccc

SEQ ID NO: 30363 - DNA, 292 bp, Zea mays
tgactttcatattcttttcaccatctcttgatgggtccatcaaggttagtcaacaaagatctaggaacccaaatgtcctttgtgttagcacttagtaaactcattgcctttctagcacaagttgcaattttgggttgcctagttacatatgaaccaattgacaagctaggagtagaatactcactaatgggacaatcttcgcatagatgtcccttcttccggcatatgtagcaaaggcgatcttcatgttttgaagatttcttctttccttgtctctagctggctacatggg

SEQ ID NO: 30364 - DNA, 291 bp, Zea mays
tgagaatatatttacttccggcttcttcaatctaatgcagcatttgattcttcatctcccgtatgaggcacgaatgggggggccatgcagggacgttggtgctatcaaatcaagagatgtataaagactatttgaaagaaatgtataaataaatgcaaaattgaggcttccattatagaggcatacattctataggaggtgtcaaacttcacaacaacttactatggtgacaaactgtcgagcgtgaataatccaccccctcgttacaatgatgacgacaacgaggccaac

SEQ ID NO: 30365 - DNA, 289 bp, Zea mays
tctaattggagaacacttgataggtttaactaacgtgcaattcgaaaaagatagaccttgtgcagcttgtcaagcaggtaaacaagtgggaggagcgcatcacagcaagaatgtgatgaccacttcaagacccctggagctgctgcatatggacctcttcggacctgtcgcctatctgagcataggagggagtaagtatggtctagttattgttgatgacttttcccgcttcacttgggtgttctttttgcaggataagtctgaaacccaagggaccctcaagcgcttc

SEQ ID NO: 30366 - DNA, 290 bp, Zea mays
tctatagggagagcactttttttgactaacaaatgtttattttgagaaagacaggatttgtagcgcatgccaagccgggaagcaagttggcacccatcatccacacaagaacatcatgactagtgataggccactggagctccttcacatggacctattcggcccgatcgcttacataagcatcggcgggagtaagtactgtctagttattgtggatgattattctcgcttcacttgggtgttctttttgcaggaaaaatctcaaacccatgagaccttaaagggattct

SEQ ID NO: 30367 - DNA, 291 bp, Zea mays
tctagaatgaaatactattcgatttaggtccaatgacattatgacgagcgaggaaattaacgtcagcactgcgggcgtcacttctcgtcatggattacgcacgctaccttccatagccatgaattcccatactgtctcatgctttaaaagatattctttattatcactctctaaaacattttattctctatattttatgtatcagaaatattttctaaattctatcctctatattaacagtgttaccagatttcgtattctacactattttttcgtttttctaatacataa

SEQ ID NO: 30368 - DNA, 285 bp, Zea mays
taatttacctattccttgtttggttacctacttagctcgaatccagtcacattatctccattcaaggatacctcattgacgcattttgctgaataggtcatatgcgttgtttgaatgttgtgagcaccactaccgtaaccatggccattgcaagcgttgtcctcctgaaagtcgcctagagggggggtgaataggcaaatctgaaatttataaacttaagcacacactacaagccggggttagcgttagtaatagaaacgagtccgaaagagagggcgaaaacaa

SEQ ID NO: 30369 - DNA, 287 bp, Zea mays
ttatgaatgataccttcgtcattacattcaagcagcttcagccgaagcagtttcctttccgcgggaccttcggcgacgaagcatggtcccaacagtagccccttcgcggtgctagatcgtttttcgtaacgagcttgatccgtgaaaaaagtctcttaggcttcaggaagccaaaggtccaaaaaacaccttccctgagctcgttgtcgagaaacgatacagttttcgagcgcgtagcggtcccaccatgcggattcactattttggtttttgcggcccaccgtgca

SEQ ID NO: 30370 - DNA, 299 bp, Zea mays
tggcggagcttttgtatttaaacaatattttctagctttggtacctacaatcttctgtacttccccatttgtctgatgcttcagggagaagatcctagctttataaacttgtagatgcatgttatgcggccatgccataggatctgcggattaatagctcgcaatgatatactattgttcaattagccataggttgtttcgctacatgtatattgtaacaagtctttccttggatacccatcaacatgtatatctctggttaacttcaatctgtacttgaaattgtggtcctatagaac

SEQ ID NO: 30371 - DNA, 300 bp, Zea mays
tggccaaaataattcttattaaaccttaaacaagcttctcatgtggggactcaataggaaattctgaatttcagaattctgaatttcagaccttgagccaaaggtcaagcgtgttcaccttgatccctaactcaaatcctaatggccccattaacaaaaacgtgcctgactaacccctctgtcgtgtgccagatgatggcattgggacgcgagccctagacacgacaaaaccttggatttgcctcggatttgagcagagagacaaaccggatttccgggctccatatctctgcaacctgt

SEQ ID NO: 30372 - DNA, 299 bp, Zea mays
ttaattatgtcaaagtttttgttgtatcatacccaggttcaacttttccatttcttggcatagggtggtgtcagaggtccttactataagacaatgacaggaagctttgcaactcactgcatctgccaacacattggcttttcctgggtgataatggatttccaaatcattatctttaatgagctcaagccatcttctctgcctcatgtgcagttctgactgtgtaaaaatatatttcagacttttatgatctgtataaaaatggcaagtatttctcagcagataatgatgccatatct

SEQ ID NO: 30373 - DNA, 299 bp, Zea mays
tttaaagggagagcacattttaggactaacaaatgttcattttgagaaagacaggatttgtagcgcgtgccaagcagggaagcaagttggtgcccatcatccacataagaacatcatgactactgacaggccactggagctcctacacatggatctattcggcccgatagcttacataagcatcggcgggagtaagtactgtttagttattgtggatgattattctcgcttcacttgggtgttctttttgcaggaaaaatctcacacccaagagaccttaaagggattcttgagacggg

SEQ ID NO: 30374 - DNA, 300 bp, Zea mays
tgtgaagccaatcacaagtctattgaagaatgagactaaattcaattggtcttcaaagtgtaatgaagcttttgagcaattgaagatattattaaccactgctccggtattggctcaaccggacattaataagccctttgatgtgtattgtgacgcatcaggcagtggtctcggctgtgtattaatgcaagaaggctgagtaatcgcatatgcttcaaggcaattgcgccggcatgaggcgcattatcccactcatgatctggagctagctgcaatggttcatgccctgaagatctggcg

SEQ ID NO: 30375 - DNA, 291 bp, Zea mays
  unsure (1)..(291): unsure at all n locations
tgactttttccggntttacctctggaaagcagtcctacgtggccacatgagccgctgtgtatgacaagctccggcgtagccgccgcttggacgcagtccaaagcggctgcaccgtgttgtccatcgtcaagcagatggacctcatggtcgttaccaacgtcggcgactctcgggttgttctgggcaccgcatctaacgacggcgccatcacatcattcagctcatcatccatctgaagcccaacctgccatgtaagttgctactgatcgaccatgaattcttgtgcgctag

SEQ ID NO: 30376 - DNA, 292 bp, Zea mays
tctaaagggagaacacattttaggactaacaaatgttcattttgagaaagacaggatttgtagcgcatgtcaagcagggaagcaagttggagtctatcatccacacaagaacatcatgacaaccgacaggccgcttgagctactccacatggatctattcggctcgatagcttacataagcatcagcaggagtaagtattgtcttgttactgtggatgattattctcgcttcacttgggtattcttttttcaggaaaaatctcaaacccaagagaccctaaagagattcttg

SEQ ID NO: 30377 - DNA, 291 bp, Zea mays
tctattttgagaacacttgatagggctaaccattgtaactttcgaaaaagatagaccttgtgcagcttgtcaagcaggtaaacaagtaggaggagcgcatcacagcaagaatgtgatgaccacatcaagacctctggagctgctacatatggacctctttagacccgtcgcctatctaagcataggaggaagtaagtatggtctagttattgttgatgacttttcccgcttcacttgggtattctttttgcaggaaaaatctgaaacccaagggaccctcaaacgcttcct

SEQ ID NO: 30378 - DNA, 291 bp, Zea mays
tctaaagggagagcacattttatgattaacaaatgttcattttgagaaagacaggatttgtagcgcatgccaagcagggaagcaagttggtgctcatcatccgcacaagaacatcatgacgactgacaggctgctcgagctcctacacatggatctattcggcccgattgcttacataagcatcggcgggagtaagtactgtctagttattgtggatgattattctcgcttcacttgggtattctttttgcaggaaaaatctcatacccaagagaccttaaaaggattttt

SEQ ID NO: 30379 - DNA, 292 bp, Zea mays
tgaagccatggtaagtagcataggctaatagtatacaaattgaatcaagcctagctatgggtgcataggtttcaccgaaatccaaaccttcgacttgggagtatcccttggccacaagtcgggctttgttccttgtcaccacaccatgctcgtcttgcttgttgcggaacacccatttggttcctacaacattttgattaggacgtggaaccaaatgccatacctcattcctagtgaagatgttgagctcctcttgcatcgccaccacccaatccgaatcttgaagtgcttc

SEQ ID NO: 30380 - DNA, 288 bp, Zea mays
ttatcaaatggacgttaaaagtgccttcctcaatggaccgatcaaggaagaggtctatgttgagcaacctcccggctttgaagacagtgagtatcctaaccatgtctataagctctctaaggcgctttatgggctcaagcaagccccaagagcatggtatgaatgccttagagattttctcattgcaaatggattcaaagtcggaaaggccgatcctacgctctttaccaaaacacttgagaatgatttgtttgtatgccaaatttatgttgatgatattatatttgg

SEQ ID NO: 30381 - DNA, 284 bp, Zea mays
tgtattggttcttccaatcgccactgcatcagtggagaggtgcttttcagcaatgaaaattgtgaagacgatgttgagaaatcgtattagagatagatttatgaatgattgtatcatatgcttcgtggaatcaggatttctagccacaattccaattgatgatgtgatagttcgcttccataagatggaggaccgtaaccgtactaccgtagagaaaaaatataaaaggtatacaattattttgtaaaatcttattttgtcataatatggtgcttattatttta

SEQ ID NO: 30382 - DNA, 300 bp, Zea mays
ttctcgactaaatcggggacagggcctcatggacgggtgaaagtacgcgtaagcggcaaggccgaccgagccgagggattcccacgcctctgggatacggatacctcactcgtcccttccacgaaaagcaactctcgctcacacaaacatccctattaccgacagagtccagatgctcgaaacaagaggaaaaaaggacgcagcttcgcaagcgcggcgagggcgtgttcttctggcctcggcggccgcagaaagcgcacgctacaagatgacctgatcctgcaggcccgggtcttcacg

SEQ ID NO: 30383 - DNA, 299 bp, Zea mays
tcgtgaaaatattttcctaagctgctcttccgaagatcaatagtgtatttccttgcaacttagcatgattttcccctttttcaaaacattcttctgaagatcgatattgtggccccctcttgtgccatatgcaacatgatgtatgatgcttatgctatgcgaaatgatgcgatgatgttatgttatgtaaaatgatgtttattccgaaggtacagacacatcctgcgataaatcacataatctttttgaatcagtattgactttttgctataagcctcccttaggagcttcttcgcctt

SEQ ID NO: 30384 - DNA, 299 bp, Zea mays
tcttcagaagatggattattacatcctgtggtgtaactgcccgaattattccaacttaagtgcataagtcccgccttagaggctagaccacacttaaataggaataaaacgtcagtccctcggatctagtctgacaaggccactaacaggatcaagtaccacatactcactcaaaggtgaggcacagagcaaatacaataaagcattaaaccatatattaaagaagtgcataaggttattacaacgtcatcggagtttttcaaaggtagtaatcattgtcctggatgcagcggaaatta

SEQ ID NO: 30385 - DNA, 297 bp, Zea mays
tatctgagcgcctcccctcggtccgccgggggtaccttgggtttgctgcgacagttgctgctacttcgccgtttccaaatagctgcacgcgctgcacgggcgtgtgtttcctttgtttttaattgtttctcaattgtgtggcgtcagatatgtactgccgccgaactgctgtggttcaagcaatatccttttggatggaagtgaagagatgtgtttctgtccatcattcttcttctgttagtgtatgcataattggaaaaattaatggatcctttattcatcagcagttaatgatgt

SEQ ID NO: 30386 - DNA, 298 bp, Zea mays
taaggatatgctggtgacaagtttccatggctttcagatgaagccagtcacaactcaagctctctttcaatgtacacaagatcatgaggagtatcttcaagcatacgtccgaaggttcttgcgcctgagagcacaagcgcctacagttcccaatgaaattgtcattgaggccatgattaaggggcttcgcccaggacctactgcctaatatttttctagaaagcctccatagactttggagaagctgcttcaaaagatggataaatacatttgggctgacaatgactttcgccaaaaa

SEQ ID NO: 30387 - DNA, 288 bp, Zea mays
ttctcaatctatcttgttgcttatcaaatatactttaacttatataattggctcaactcaaaattttaaacttttcattcccttttgcttattttcttgaattttgttcatggggttcacttagggttcttaattagggttgcacattcttatcctttaagagactcaattgtcttgatcatgacacttttaagcatatacttggggaattctttcttacttaagttattttgatgctcatgcttactttggttcacataaaataatggtccttggtttggcttttta

SEQ ID NO: 30388 - DNA, 290 bp, Zea mays
tgaagccatggcaagtttcataggcaagtattatacgaattgactcaagcctagctacgggtgcataggtttcatcgaaatccaaaccttcgacttgtgaatatcctgtggcggaaccgcccgaattattccggcttaagtgcccaagtcgcacccttaagggcaacaacacacttaaacaggaataacccgtcagtccctcggatctagtccgataaagccacttaccaggatcgaataccactagctcactcgaaggtgaggcacagagaaatacaataaagcataat

SEQ ID NO: 30389 - DNA, 291 bp, Zea mays
tgccaattcttatcattacagcagcatttgccagcacagcaactgcagaccatacccataacgtggccatttgcgtgctgggtactggacatgattggacctttcaagaaagctcagggaggctacactcatgtgttggtcaccatagacaaattcaccagatggatagaatataaacccattgcttctctaacttcagccaaggtagtcgaattcatataaaatataatgttcaggtttgggataccaaatagcatcataaccgacctgggatccaatttcactagctct

SEQ ID NO: 30390 - DNA, 291 bp, Zea mays
tgtgaaggttcttcattcctacatgtgctaaacggcgatgccacagccagcccatgctagtcttagcaattaagcatgcatctagaccggcctcctcttttgcaaaatcaactaaataaagtttaccgtctagtacacccttaaaagctaatgaaccatcacttcttctaaagacagacacatctacatttgtgaataaacagttatatcccatattacaaagttgacttacagacaacaagttatatccaagcgactcaactaagaacacattagaaatagagtgctcga

SEQ ID NO: 30391 - DNA, 294 bp, Zea mays
tttcatagtcggggtattcgaaattcaaggtgtccattatccggttcaatcttcgtttcggccgggtaccaaaggctgcagtcatcaattgatcttctttcttggtataattcccaagtatttcgttgcacatggtctcaatcatatctagccattccttgcaaggctttttgaattgtttctcaaacttaaagcgacaagggagtcgtacaagctcatgcttctttcccacttcttttctcttcggcattcccgagccactagaagttgggtatgttttgtttgataggtact

SEQ ID NO: 30392 - DNA, 287 bp, Zea mays
tcagaccctctccactgatgaccgccacgcacggattcatgcttctgccgttgtgattcgtgctcatattgtttggatagcgctcagggtcacacaaatatcgtcgccgtggataactccggctagtaaacaatttcggccaccgtaccacaatcaccacgacggatgtggataagttcatcggtgatggccgcctgctagtcttgtgccacgtgctctggtacctccactgcatcgctgtgaccagtcataactctctgttgctcgccggagtaattgccacgata

SEQ ID NO: 30393 - DNA, 283 bp, Zea mays
tttgccgtcccagatccctagccagtcgtcgccgccggtcttcacggcgagtcccaggaggtcggcgaagcggcgcgcgtggaggttgcgggggtggatgatggagccgccggcctcgaagctgtcgcccgcgagagtgacggtgcccaggcggccgcccaccttctgacggcgctcaaaaacgcgcagctgcgctccaccgagggtgctggtgtagctggtgaggaagaaggcggtggaggcgtcgaagatgccaccgccgacggggaatcacggctggcgg

SEQ ID NO: 30394 - DNA, 299 bp, Zea mays
tgtgaaaccaatcacatgtttattgaagaatgatactaaatttaattggtcttcaaaatgtaatgaagcctttgagcagctgaaggtattattgaccactgctccggtattggctcaaccagacatcaaaaagccctttgatgtgtattgtgacgcatcagggagtggtctcggctgtgttctaatgcaagaacgcagagtgatagcctatgcttcaaggcacttgcgtcggcatgaggaacattatccaactcatgatctggagttagctgctgtggttcatgccctaaaaatatggc

SEQ ID NO: 30395 - DNA, 297 bp, Zea mays
tcaagtgttatatatatatatttgtccctgggcccacatgtcggggcccagtccctttgtgaatgccccccttttagctataaaaggggaggcacgcgatgctacaagggagaggtcactcagacctaactttaggcagacactcacaagttcatacaagctcccaagcaatacatcacacagtggagtagggtattacgctctggtggctcgaaccactctaaacccccgcgtgctcgcgtgtattgatccaccagtctcatagcaagcaaaacgcttaggcccctcctctcttta

SEQ ID NO: 30396 - DNA, 297 bp, Zea mays
tcctccagcattcttgtattccctcaggcatccgaaggtaacaatatgttccactaggggttatgaagctggtcttcggctcatcctccttcttcatccaaatttgatgatagcctgaataacaatccagcagactcataagctctgatgaagctgctgcatcaactagggaatctatccttggcaatggaaactcgtccttcggacaggccttgttgagatcagtaaaatcgatacacatcctccatttaccattggccttttttaccataacagtgttagccagccattctgggt

SEQ ID NO: 30397 - DNA, 300 bp, Zea mays
tgctacaagtcttctcctttttctccacagcaggaaccttactggaatactaccccacttaaaaagaatgagggtagaactcttgaatcttggggatttgaactccttgaagtaccacataacaagggtgttacgggtccttcttgctgctgttgctgcttgagcaggctgaggagggatgactggcacagggttgattctgggagaaccttcttcttatcttctcttcacttatcttcttttctcttctcacttttcacttttcattgcctctttctttctctttgctcttcccactgg

SEQ ID NO: 30398 - DNA, 302 bp, Zea mays
tgtccgtcgattccttgttgctcagaaacgaatcgcgatctaatcgcaacgcgaagcgaagacgaacaggcacaagcaaacaaacatatacatatgcataagaacattacaccatacaagataaaatgttataaaagcgagcaatataaaatagagagcgcttctacagttatgcgaggaaaagaaccgcgatagtcgaagctatggtcgaggggttagcatgtttacactaatcaaatgtaaattaatactactaattagttttgactaacttactattttaatagttgacagttaagcaa

SEQ ID NO: 30399 - DNA, 291 bp, Zea mays
tctttttttctttgcttaaaatcattgtcagctctgatgtatccatccattttctggagaagcttctccaaagtttgaggtggcttccatgcaaagtattgcaccgtgggtcctggccgtagccccttgatcatggcctcaatgacgatctcattgggcaatgtaggtgcttgagctcttagccgcaagaaccttcgaacatatgcctataaatactcctcctagtcttgcgtacactaaaaaagagcctaggcagtgaccgacttcatttggaaaccctaaaaactagcc

SEQ ID NO: 30400 - DNA, 290 bp, Zea mays
tctttttgttctcctttgagggcggaggcaccagaagggcagcttgacaggtctttgtttattttttcctcgcaatccgtgtccactcttctatggatgaggtggacaacggggttcttcgggtgaatgaattttccgctcctggcttgcaggaggtagtcttcgctcggagcgctggaggttgcgctatttcctgcttcattccgactttcccggagattatcgaggaaggttttctctccggtggatccgctatgcgatgtagagttccttcttcgtctgccacggat

SEQ ID NO: 30401 - DNA, 289 bp, Zea mays
tgtgatgattcttcatcccaacatgggctagtcggcgatgccagagccaacccatattagtcttagcaattaagcaagtatcgagttcaactttgttaaaatcaactaagtatagctgaccctctaatactcccttaaatgctactgaatcatcacttattctaaagacactaacacctatatctgtaaaaagatagttgtagcccattttgcataattgagaaactgaaagcaagttgtaatctaaagaatcaacaagaaaaatattggaaatggaatggtcaagtga

SEQ ID NO: 30402 - DNA, 289 bp, Zea mays
ttgcaggaaaaggagatttggggcgcttgagagagtcaattcaatttttattaactcaagctatcaatcttcaatgatttatatccaagattgacccaaagtcattttgaattgttatatctaaaactcatatcatctcggggaagatattgatgttgtaggaaataaagaattaattctatgtcgaaaagtcaaggcctacaacatgaaggaaagccaaaggatggtaacaattatgcttttaagtgcaagcatcttaaattatcatttcttatgtgtcttgtgtagt

SEQ ID NO: 30403 - DNA, 287 bp, Zea mays
tcacgggctactggcatagctagccgaagcactggcttgcccagaggatggctggagtgggctggccacgatggccgaagctctggcggcaatggcgggcggaattgagctcgccggagctaagggaaagtggctggccggtgagggtgagtgcggggcgaagtggggcgcgcctgggaaggctttataggcacggcgcggtgcacgggcggtcgtggaccggcgagtgcgcgcgggcgtgcactggaaggcccggtccccaaccggccgtaaaccgggggggtcac

SEQ ID NO: 30404 - DNA, 285 bp, Zea mays
tagcccgagatacattggaccgttctctatcttggcctgggttggcagcttggcttattgcttgcaattgtcggaatctatggcaggggtacatccggtattccatgtctctatgttgaggaagtttttgtgggatccagaccatcaaatcgagttggaaccgattgcagtgcagcaagatctgactctggagtgtcgcctggtgcgtatcttggagtcctcggagcgtgtcatgagaaggagaacaattaagtatgttaaggtcttgtggactaatcagtctga

SEQ ID NO: 30405 - DNA, 287 bp, Zea mays
ttctccagcattcttttcccctcagcatccgaaggtaacaatatgttccactaggggttatgaagctggtattcggctcatcctccttcttcatccaaatttggtgatagcctaaataacaatccagcagactcataagctctgatgaagctgctgcatcaactagggaatctatccttggcaatggaaactcgtccttcggacaggccttgttgagatcagtaaaatcgatacacatcctccatttaccattggcgttctttaccataacagtgttagccagccat

SEQ ID NO: 30406 - DNA, 297 bp, Zea mays
tattttcggggtcgtttttggcctcagatttcggcccgtgcgccatgggcgaacccctcattttcggcccagacgcaaggccgaacagccatgccgcccgtcgccttgcgcctccgtgccgttttccctccgttccgccatgcccttcacccaagacatacatattaccttcggtgtctttccacacgcttggacttagcttatttccggggccatgcccgaacctcggttttccgcccctgcgccatgggcgaacccctcgttttcggcccaaacgcaaggccgaacagccatgcc

SEQ ID NO: 30407 - DNA, 297 bp, Zea mays
ttggaaaaagataatattctgcttacattggtggataagataaaggaagacgaagctacttctaaagctcaagctgaggctcaaaagcgcgaaattgaggatcttcggaaacagctagccagagctaaagaagaacgcacacttgaagagacgaaacgagaacttagtgatcagtgggcaaatcatttaaaaagaaacgttgaagagcttcgtgcatccaagaaaaggtgctatgacaaatctatagaatgtgctaagaaaataaaatccagcttcgccagcgttggcgcattctcg

SEQ ID NO: 30408 - DNA, 293 bp, Zea mays
tggcctgcatctcggttgttgctcaagctgtgtgtcctgaccccccgcagggacttggaccacggctagctctcgcgggatctcaacgcgagacgcaggtgcaagggcgtcgtcacttcctggcatatcgaggtggttttctccgtcgtgatcctcctgatcgatgtggtagcactcgcgagttgggtcgcaaccctcgtcgtcaaggctgtgaccatcatcagagcagtcggagaggcagtggtcacatgcggacatgaagtcgcgcatggcaccgggatcacggagtccaa

SEQ ID NO: 30409 - DNA, 291 bp, Zea mays
tgtccaggcgcatctctccgacacgatgaaggccagtgaggttgagtggaggaagacggaggctggcctggtgaagcagctggaggaggtcagccgtggtaagatgctcgcggaggagagattgctgcaactgggcacctctcttgaggagatgaagaggaagcttgtggattcggagcaattggctgcgaggcatgaggcggagaaaaaacagcttctggggaggttggaggatgaaacgaggaaaggtgaggtggtacgtcagctccaaagggagattgaggagaagga

SEQ ID NO: 30410 - DNA, 300 bp, Zea mays
ttataggtaatagctttgcgctgcttcttagaggatctgccgaaggtgttctctttctttaagatcttcggctacgaaacatacccccaacagctacgagattgtcagctgtatgtcaagcttagcaagtgcgagttctggatcaatgaagtcatgttcttggggcaaattataaaccgagagggattggctgtatatctgaagaaagtaacagctatcttggactggaaagcaccaaaagatgtctgaggaatcaagagtttcatcggaatgggcgggtattatcggggtgtcattgaa

SEQ ID NO: 30411 - DNA, 290 bp, Zea mays
tagttttttatattgtttaagcgtaaatatatgtattgtagcaatggtgtactttatctaaatctgaaatattgtggtaagttcaactcaagaaggaggtaaccacactttcctggctctccaaccaaacatagaacgaagcagctcccttctgaagcactctctaactaaacaaaaaaaataaagtggctttattattgaaagttgcgtacagggggtgaataggcaagttaaaactttttcaacaaaaactataagcaaactgggtaaaaccagttcaacaggtgtca

SEQ ID NO: 30412 - DNA, 289 bp, Zea mays
tgtggtttatccaatgtaaaacaagcaccatctcttaacatagattttctatggacaaactcaacataagagatgacattagtagcacaagcactagtttcttatttagcaaccctttatatgtggaaggcaagcgagttgctaaaatagagaaacatcataatatggactaaatttcccttgagcccttaagcacaatatattttgaatgatatggataatatgcatggttattcaataaagtctaaagggctgacttaatccatgttatggggagtgtctaataaag

SEQ ID NO: 30413 - DNA, 289 bp, Zea mays
tgtactttgcctcaacatggcctgattggtgattggcgcaccgtttcagcgcgtctgctgacgcacccaccgtcaatccaccttcggtcatgccaactgccatatctgttcccgcggctgactgacccacgggccccatgcctggtggtttcgtcgggccacgcgcaggacgcctcgttgccgctgcattggtttaaaaaattaccttttgtcttctatggcggccccaaggaggcgcatgcggcggttcactctttccgcacccgaaatccggatcacaaactgtatg

SEQ ID NO: 30414 - DNA, 289 bp, Zea mays
tcatcattgtctattaagcttcggcttcgcgctctttagcttcgtcaacttgctcctcagcttcgtcatcctgtacatacttaagtattgtaagaattattcaagtttaaagggaaaggtaagcacaaggtatgattttgttaccggcttaagatgactttgagcttcgtcaccggctatgcttcatccacccttcggccatattaggttgataaacctgtttcctatgcttcaggcaagattgggaatatcaaccagatctgctggtgacaaactaaagttgggccta

SEQ ID NO: 30415 - DNA, 293 bp, Zea mays
tctagtcagataactttgtgtatagtcatggatcttttccatgtgcaagtggagctcactgcttgacatgttgctaataggtataattttgatagccttcctctttttcttcaacagagtcactaaaaatgtgtcaacgtttttagagatctagacaatagaccatcaaggctagcacgtttatgatcgacaacaatcttgaacacaacaagaaaattagctaacccaaaaaagtgatccatagaccaggtaagccgaaggcgatcctttctttgctggtcgactaccgaaca

SEQ ID NO: 30416 - DNA, 284 bp, Zea mays
tgtaaaaaatacaacatcggaggtcccccccttgatgatcataaggatgtggatagtagtgtccatgctgattcagatataaacaatgattatgacttcctgaatgttatggttttaagaaaaggaagaaaaattaagcatcgaaaaaacaacaaagaaaaaagcttctcctaaaattaggtatacacctaataaaaaatgggaaactgatgtttctgacctccccctagatccattctaatgataggtcttatctgaaactgtcaggggttgggaagggattc

SEQ ID NO: 30417 - DNA, 282 bp, Zea mays
tggtcattttattgctaactgtcccgacaatgatagtgatcaggatcaagggaacaagagggagaagaagaagaactattagaatgcaaagggcgaggcgcatctatgcaaggagtgggattcggattgctcctttttcgactccgacaatgaaggactcgccgccaccgcctttaacaagtcatccctcttccccaacgagcgtcacacatgccttatggcaagggagaaaaaagtatgtactccaaactctacttatgcttcttcaaatgaggacgaatc

SEQ ID NO: 30418 - DNA, 293 bp, Zea mays
tggagtggattgaatgctttgattgtatctttggagtgtttgcctttgctcttgtattgaatgagaagtgtaggaggcttggatggcttgaatggaggtggttgggggttctcttcctttcctctttcttatcatttctccccttttcttttctcctctctcctcctctctttttttccttcttttctctccttttcctcttcttccctctcccacccttcttctctccccttttctactttttttccttcatcctctctctcttcctccttccacttctctttctttccctc

SEQ ID NO: 30419 - DNA, 296 bp, Zea mays
tagccgctgctaaggctctggtgccatctgctagaggctgcgagcacatgcatttcggcgtgccaaagacttaaaagcatgcatgcatatgcaaagcatacacacgcaaaggccgccggcgggcaagtaggatctggttcattggcttgccttgcttgcggccggcgaccgagcgcggtgcctgaattgcaatcacggtggaaaatcgcatcgagaaaataggtagctacagacaagccatataagctagtggctgatcttgtcagacccgtgacttgaagcgcgcgcgccacaga

SEQ ID NO: 30420 - DNA, 298 bp, Zea mays
tgaaggtccagtgttaatcctcggatcaaggattgtagatatgaacagtgatgaggaatcggatgacagattgactgttctgttcccatataatatagaaatcaagccacctgaaaatgaaaaccaccttgtaagttggaactcccaattagaagaagacatgaagatgattcagtttcaagataaccgaaatcatattatggaagtgcttgcagaaaatgatcttgaatgtgatgatttaggttcgatttgcctatctgatactatgtgccttagcaagtatatagaggaaattgtg

SEQ ID NO: 30421 - DNA, 301 bp, Zea mays
ttctcgactaagtcggagacagggccttatggacgggtgaaggtactcgtaagcggcaaggccgaccgagccgagggactcctacgcctccgggatacggatacctcactcatcaccttccgcgagaagcagctctcgcccgcacaaacattcctgttaccgacggaaagaccagatgcgtcgaaataaggggaaaagagacgcagctttacaagcgcaacgagggtgtgttatctggcctcaacggccgcagaaggcacacgctacaagacgatctgatcctgcaggctcgggtcttcac

SEQ ID NO: 30422 - DNA, 289 bp, Zea mays
taaagctctggtaagtttcatagtcaagtaatatatgaattgactcaagcctagctacgggtgcataggtttcaccgaaatccaaaccttcgacttctgaatatcccttggccacaagtcgggctttgttccttgtcaccacaccatgctcatcttgcttgttgcggaagacccacttggttcctacaacattttggttaagacgtggaactaaatgccatacctcattcctcgtgaagttgttgagctcatcttgcattgccaacacccaatccgaatctcttagtgc

SEQ ID NO: 30423 - DNA, 288 bp, Zea mays
tgtgaagattcttcattccaacatgggctagtcggcggtgccagagccaacctaagttagtcttagcaattaagcatgtgtcgagttcagctctatcaaaatctactaagtatggctgaccctctaacacacccttaaatgctattgaatcatcacttcttctaaagacagtgacacctacatcagtgaatagacagttgtagcccatttgacacaattgagaaacagacagcaagttgtaatctaatgaatctacaagaaaaacattggaaatagaatggtcaggag

SEQ ID NO: 30424 - DNA, 285 bp, Zea mays
tgttctaggacccgtatccacttccacgtatagatcaaatcgtggattctacctccgggtgcgacctcttgtccttcttatatgcttactttggcttccatcaaatccagatgtctagggaagacaggaagcataccgcttttgtaacagtggatgggctttactgctatgtcgtaatgccttatggtatgaaaaacgccttgccgacatttgtgcgggcgatgagtaagactttcggcgacctgattagggacaaggtggaggtgtacatcgatgacatcgtag

SEQ ID NO: 30425 - DNA, 288 bp, Zea mays
tcgtcacttgaaagacaattgccttggaggaaagatattattttagttctccagtcttcactgtgtactggagaaatagtaagcactgctctctccatgagctcaactgaaggtgcttttattgtttcaaaaaatacttctgagggtagggggagcccctgagccgctgatttggctagcaaaactgcatgcccattttcacctcttggaatattcttgacggaaaaaccttcgaaagaagcttccaaccttcaaactgcatccagatatttttcaagcttcggatct

SEQ ID NO: 30426 - DNA, 294 bp, Zea mays
tagaagcactttcgtttcttattccccccgacgtgatcttttcctcacgcggttaagcgttataacgaggattagcctctgataccatgtgaaagttgcctagaggggggtgaataggcaagttaaaactttttcaacaaaaaactagaagcaaactgggtaaaactgaattgatctcgaaattcacccagttaactttggtaatgagatgttctagataatccacagggttcaaaatagtagatctgagaaggacacttctcaaaatccacacaccaaaaagatatgaacaaa

SEQ ID NO: 30427 - DNA, 286 bp, Zea mays
tgcactatggctgccaattccaaatcatgggtaggataattctgctcatgcggcttaagtaggcgtgatgcataagcaatgactttctcgttttgcatcagcacacaccctaagccttgcctcgaggcatcacagaagacgacaaaatcctgatgtatatctggtagtgtcaaaacgggtgcggtcgtgagcttctcctttatgatctagaaacttccttcacattttggggtccacacatacttatggtctttcttgaggagctcggtcataggtcttgctatgc

SEQ ID NO: 30428 - DNA, 282 bp, Zea mays
tgattgccgaaaattattgagatcacctgcaaaaaactgttgatgggcttcggcaatctaaagagaaatgcttctccactacaacccagtgttgcgaaaaatgaagaatatgttcaccactataggggccttctctagggagaaagtatttgcgcaaggtgacacctttggggcggttaagtggatcaaaggagaagtggaagccgtcgacgaagtcctatctactcgcggtgattattgtgcaagcaaaggggctcgcgaaatagcatctctgctcaaaaa

SEQ ID NO: 30429 - DNA, 280 bp, Zea mays
tgggaaagcttctccgctctctctgggaagccgttcacgggcttgggcgaggctgggggtctcatgggaatagctggccactgaggccttgctcgggcatggatggcgggcggtggaaaactccctggaactggagtttttgcttggggcgtgaggcgaaatgaagtgtgggctgttgcgcaccacaggtacttataggcaccatctggtgttgctaagagtaagacttggggacaagttccgagcgtgcacagagctctcatatggataccagagctcg

SEQ ID NO: 30430 - DNA, 302 bp, Zea mays
tatcttctaatgggacagcacattttgggactatcaaacgtttattttgagaaaggacaggatttgtatcgcatgtcaagcatggaaacaagttggtggccatcatccacatcataacatcatgacgactgacagaccactacagctactccacatggatctatttggcccgatagcttacataagcatcggcgggagtaagtactgtctagttattgtggatgattattctcgcttcacttgggtgttctttttgcaccaaaaatctcatacccaaaagaccttgaagggattcttgagac

SEQ ID NO: 30431 - DNA, 294 bp, Zea mays
tctaaagggagagcacattttaggactaaccatagttcattttgagaaagatagagtttgtagcgcatgccaagcaggaaagcaagttggtgcccatcatccacacaagaacatcatgacgaccgacaggccgcttgagctacttcacatggatctattcggcccgattgcttacataagcatcggcaggagtaaggattgtcttgtaatactggatgattattctcgcttcacttgggtattctttttgcaggaaaaatctcaaacccaagaaaccttaaagggattcttgag

SEQ ID NO: 30432 - DNA, 299 bp, Zea mays
tgagcttttgcaaatacatttacctttacaaaaacatttaaatgaagacatgaattaaaaaaataaatgcaaaggacacattaacattagacaaatgattgaatgactcaattcattgttgacatttcgatccctacacagctttggtggacgaaaatctgctcgcgttgaacaaggatcaaatgctgtctttggaaacaataatggattgtagaatacaggtacatgacgaaaccttaaataagcacattgctaatctgaaatgaaacgtcatccacaaatatgcaagccaatggatt

SEQ ID NO: 30433 - DNA, 302 bp, Zea mays
ttttcctatctctcggttgacggatttttttttgctatctacgagatagttcactaaggctgttatccacgctgacattaaacactaatgcccccttcgggtatttcagtttttgggcataatgctgagcttctcgttcttcttccttaaaaagtacctttctcgaagcatggcggatgatgtaatcaatgctctctttgaaagcttcgggagcaagagtagcaaccttttcaagcgaaaattgctctatggctttttcctccgttgccttttcttcaatttccgcaagctttatctcaatg

SEQ ID NO: 30434 - DNA, 290 bp, Zea mays
tattatagggagaccatttgataggaaagactaacgtacaactcgcacaagagcaaccttgtgcagaaacgttaagggggttaacaggcggggggagcgacacacagaatgaatgggatgaccacaagtagagccccggacctgctacatacggaccgcttgcgacccgacgcctatgtaacccataagaagaagtaacaatgggttagttatcggcgaagaactttgccgccttactcgggcgctacttttgcgcgaaacacctgaaacccgagggaccctcaagcgct

SEQ ID NO: 30435 - DNA, 288 bp, Zea mays
tagttggcggaaatttttttaccgatatctgggaaaatggtggccgagggatggcccacgaaattataaagaaaagcgaacaagatactcatgatgctagggaagtaacaaaggcagctgaaaagaccgaattcgagaggcagataggtattgtctaatggcttttaactttatgttttatttttacgacttcaaatttatctacgttttctatcgcagccgaactatctcctcccctggagtccttcgaaccactggccgaagcaaaggcaaaagaatcatccggac

SEQ ID NO: 30436 - DNA, 289 bp, Zea mays
tctatgggagaacactttttatgactaaccaatgttcattttgagaaagacaggatttgtagcgcatgccaggcaggaaagcaagttggtgcccatcatccacacaagaacatcatgacgaccgacaggccgcttgagctactccacatggatctattcggcccgattgcttacataagcatcgacgggagtaagtattgtcttgtaatagtggatgattattctcgcttcacttgggtattctttttacaggaaaaatcttcaacccaagagaccttaaagggattct

SEQ ID NO: 30437 - DNA, 289 bp, Zea mays
ttattaaatggacgttattagtgccttcctcaatggacccatcaatgaagaagtctatgttgaggaacctaccggctttgaagatagtgagtaccctaaccatgtgtgtaagactttcaaaagcactttatgggctcaagcaagccccaagagcatgggatgaatgcctgcgagacttccttattactaatggggatcctactctcttcactaaaactgttgcaaattactttgttatatgccaaatctatgttgatgatattatatttgggtctactaacaagtcaac

SEQ ID NO: 30438 - DNA, 285 bp, Zea mays
tcggatttccaacttttgaagacggactttcggtgctgtcaaagaacgatctggctgacagcctagcttacaacagtttaaaggtgcgacaaatggaattcttatatttttgttgaattcaaaatttttcgtttgtttaaaactattgacacagacatattcctgtctgcagggcctgatactcagcaatgccctcagagcacagaaagatgctgaggacgaaggatgtactatagccctgagcaaccttcgttccgaagtaattgaactgaggaacgaaagtct

SEQ ID NO: 30439 - DNA, 284 bp, Zea mays
tctaaagggagaacatattttaggactaaccaatgttcattttgagaaagacaggatttgtagcgcatgccaagccgggaagcaagttggcgctcatcatccacacaagaacatcttaacgactgacaggccactcgagctcctccatatggacctattcggcccgatcgcttacataagcatcgacgggagtaagtactgtcttgttattgtggatgactattctcgcttcacatgggtattctttttgcaggaaaaatcacaaaccccagagactttaaagg

SEQ ID NO: 30440 - DNA, 299 bp, Zea mays
tttacacacccaccaatgatttccccagcaaaagattattcataatgctgaagtattgataataataaccatagaaaccttcttcatcatgtaggcatgtagccactgagacagacacagctaatggagatgttacgttggagattctaccaacttgaatcctgcagcacatatggatgaatgaggaatctgtggttaaacaattagtgaaaaaaaaaatcgacggcatgtaatttaaagaacatctccatcaaatgtagcgatggatctgattctttttcagaggcttgtcacactac

SEQ ID NO: 30441 - DNA, 294 bp, Zea mays
tgacattactttggttcccttgttggaacccaatgccatccttaatggcagggcgtctcccattatggagcatgcttctagcaaatttgaatttttcattttctagctcatgctcggcaattttagcatttaatgtagctatgtgaccattttgttgtttaatcatggcaaggtgatcatcaatagcttcaacattaacatctctacatctagtacaaatagtgacatgctcaaccgtagatgtagatggtttgcaaacattcaatccatcaatcttagcgtgcatactagcat

SEQ ID NO: 30442 - DNA, 299 bp, Zea mays
tatctttgccgcggcatgcgctttcgacggcgtgaacaccaaggcgaggcgaggagaatagagagattgagagaaacgaggacgctaacagcggtgggttttaagggaggcggagctggcaactggggcacggcgcgagccgctcgctgtaagtggggccgcgcggggttggatggcgtcgcggggcgcgagccgtgcgatctataacgggcggcctccatggactcccgtgacgtgcaggggggacggaaaggttgtgttcgcgtctgacacacggatcggcctcacgtgcctagcca

SEQ ID NO: 30443 - DNA, 300 bp, Zea mays
ttatcaaatggacgtttaaagtgccttcctcaacggaccaatcaaggaagaggtctatgttgagcaaactaccggctttgaagacagtgagtaccctaaccatgtctataggctctctaaggcgctttacgggctcatgcaagccccaagagcatggtatgaatgccttatagatttccttattgctaaaggcttcaaagtcggcgaagccgatcctacactctttactataactcttgaaaatgacttgtttgtatgccaaatatatgtcgatgatattatatttgggtctactaacga

SEQ ID NO: 30444 - DNA, 311 bp, Zea mays
cacattagtgacctatgattctcagcttcgttttttgggcctttagttgaaatgaacgaatccgccgaatagtgccaaagagccttcggcattgtctgctcttttataggaacaagggacttagtacaagaacatatcgccttcatggtgtggccgcttgctgagaaatgggaaatgccacaagaaaccataaaagaggccgacgaaggtgagcttgtgagactgaagtacacgtttaaatttggagataaatttattgagccacatgatgagtggttgaaaagcattgacaatttaagtgatgagctact

SEQ ID NO: 30445 - DNA, 289 bp, Zea mays
tgaatgttcaaaatcaagaacttcaagtgcaacttgaaaattgcaagaacatcaatgccccctctttagtatttgaatctaagtctagctctaatgatgattcttgcaagcattgtgccaaatatcatgcttcttgttgtctaactaaccatgcaaggaatcatagcccacaggtgaaggtcaaagaaattttgaaaagatgctctagcaatgatgggttaaagaaagttgaacccaagtacaagtcccttaagcccaacaatggaagaagggggcttgggttcaactc

SEQ ID NO: 30446 - DNA, 292 bp, Zea mays
tgtagacataccttctacttctttacataagatacatcaaagatacttcgaaggctaagcagatcgaagcttaagacccctagaaatgtgaatttatacatgtcactattcatctatttatagggaagttgagcagcctcgtaagtaattaaaaatatgcccacaaagtttacgcacatgatttacaaatgatacagggcagtactatcttttctctttctttcttgctgcacaagcctttagcttctcttgcttcgtctgtgttcgaagccttctccatgccgaggctggg

SEQ ID NO: 30447 - DNA, 293 bp, Zea mays
tgcattgcatattcaaatctcttggatcgcacctagggcttggctaacctagttaagataaccgccaacaaagcgagtgaaaaagcttaactcgggctcaaacgtgataagtcttagttttaagcttttagtacttaaattcctacttactatgcaattgttggttcttgagaatatgcatgaggtactgcacttagggggagtattcaaaactcaaatcattcatgaaaacccctagtgcaaagccaaaatgcaaatctcatcgtttgcctattttctctaaaaattatcta

SEQ ID NO: 30448 - DNA, 290 bp, Zea mays
tgcctcgataacacttgagcactcgacaaacgctttgctgagtgtacccctcgacaaagaggtctcgatgaacagtttattggcaacgacctctttgccgagtactttatattgggcactcgacaaagtctttgccgagtgtcagctagcaatcaacaaagaaaagtcgttgtgacggcgccaagcgacggggacatagcctttgttgagtgccaggccagcaggcactcgacaaagcgagctccagtgggacccacaccaatttctatgccgagtgtttaaaatggcac

SEQ ID NO: 30449 - DNA, 98 bp, Zea mays
ttttatgaacttgtctttgtatcgaccgccgggggtacctggaccgactagtaactcgtcctctcgtgccccactccatatgggtctgtgtgaggctg

SEQ ID NO: 30450 - DNA, 287 bp, Zea mays
tattcgcccttctcttgcaaattcttacaatttgaacctgtgaaaaagatttactttcctcgtggcaaacgacaaaaccattacatgaagtttaaaaagtgttctttattacatgaaaaatgaaacttgaatagagaagacttctatcagagtaggatacttgtcaatagatgtgctttgactctggcacagtgctattaactgtgcgagcttcggactgttctctgaaatcccgttgattttgagtatattggcccccttctggctgctggccttgttgtaacggc

SEQ ID NO: 30451 - DNA, 156 bp, Zea mays
  unsure (1)..(156): unsure at all n locations
acacaaacatcccttgttccgacggaaagtccaaatgctcggaacaagatgaaaagagacgcagctttacaaacgcaacgaaggtgtgttttctggcctcngcggccgcagtatgcacacgctacaagataatctgatcctgcaggctcgggtctt

SEQ ID NO: 30452 - DNA, 331 bp, Zea mays
  unsure (1)..(331): unsure at all n locations
gaccttaaaatgaccgcagcatgcaacctgtgacatacatcaatcattatgatganggaccttggtagccaccatgccctctgtctcaaccacatacgcggacacggttgtagtttcttcacaatcgacagtatcattaactgatgtttgtgacctcataactaaacatcttgaatcatatttgaaaactgggaggaggctttaactataatgacctgctcaacatgggtcaccattgtaaagaccaccgggtttgtaccgatcattcaaggcccatcagaatgtacaaaacgagttcttaatcaccagcagtcttctttgcaaaagccat

SEQ ID NO: 30453 - DNA, 348 bp, Zea mays
  unsure (1)..(348): unsure at all n locations
actcagcttaccaatggacgtgaagagtgcctcctctactgtccaatcaanggagggaagtcatatgtttgagcaacacttccggcgtttgataatagtgagtaccctaaccaatgctatatgctctctatagcgctctatgggctcaagcaagccccaagagcatgtgatgaatgccttagaaaattacttattgcttatggcttcaaagtcggcaaggccaatcctactttattcactataactcttgacaatgatttgtttgtatgccaaatttatgttgatgatattatatttgggtctactaacgaatctacatgtgaagaattagtacgatcatgacacaaa

SEQ ID NO: 30454 - DNA, 399 bp, Zea mays
  unsure (1)..(399): unsure at all n locations
nagctggagcagaattgaccagaggtgtcctgctngctggccctccattatctggatacactcttctatcataggcagttgcatgagaggctggaattccatttgtctatgtttctgctagtgagttagttgaaccttttcgttggaagatgtgttgcccgtgtcacggaattgttcaaggaagccaaagaagctgctccatccatcatgtttattgatgaacatgttgcgggtggaaatagaggtagatagtttaacgatgtgagggaccaaactctaaaccagcttattgctgaaatggatggttttgactcggacatgaaagatattggcatggctgctactaacatgccaaaagcactggatgttgctctttgtcggcctggtcacttctcccaa

SEQ ID NO: 30455 - DNA, 421 bp, Zea mays
ctaagcttacaaggcaaatgcacaattagatgtggatctcattgaagaatcctggcgggaataccttgtcaaatttacaaataagaattggaatttcttactcaaatattctgcatcaaacctcttcgataccgtctttgcgcatactttcctatagaagtaactcagctctgcaaatatgctccaaagctcatccttaaaatagcctcgaaacatcacgggcatcagcctctccataataatatggtagtcatggcttttcaaaccgatcaatttaccggtcttcagattgactgtccgtttcagatttgccgcatatcgatctggaaatttcagattcttcaaccacctaaatatttctttcctttcatctggcttgaggcagtaaatcaactcgcggactactctcatgccctttatc

SEQ ID NO: 30456 - DNA, 432 bp, Zea mays
agctagacgcatattagacatctgttcaagaatatagcactacaaatatgagatgagtttggttgtgggtcacattaacataagcaaatgataaacgcatgaaagcatttcttctattataaaatatgttcccattgtaccttctttcctcggatgaccactctaagttcaccttggatcaccatgtattttgtacctccaacaaaaagacaagttggtgcaagagttttaggttcatcaaagtccagcaacttcctcatcctttaacagcaacaagcaggaaacatgaacatgagaactcagccagtcagtctaagagtgcttcatattatacagatcatagaaacttttaacagacgttcctaaaacaaaaaatgtgtctaaacaaacaccaagaacctgaaattacaacagaagcgcaccttttttgtc

SEQ ID NO: 30457 - DNA, 356 bp, Zea mays
tatgtggtaggttcgcaactcttgatgggtcctgtcttgctacttataataatattttggaacaaaaatacatgagtgatctcccttgcatttggatcccaacttactagcaactaccttttcattgttacatgaaaatacaaaagaagaggtgcatgcatgaaaaacagtagggggttcattgcacatgttcctacgcatatgaggcacaacatgatttctcctatgcctacttataccatgaaccatcgtatagctagaggcacacatagcatgtgaatcattgtaagcagtatgaacataactcttattggaatgagaatgactagcaattttgctatcataaaaaaaggcat

SEQ ID NO: 30458 - DNA, 417 bp, Zea mays
  unsure (1)..(417): unsure at all n locations
cttaagncgcctgagggctgccagctttagaggagattctcttcctatgtctcttcagcaacattctttaaacgatattctaaatataaagaacggtctctcgtcctccgttctctatatatagagattgtctctcctctctctcttctatccattttaatactttaaagaatagattcaacaaaactaaaatatgtacaacatatttaagagtgtgacaaatacatacatacaaaaaagtaaaaaatatgtctctaatataggtatttatgtatagaggtcgagatatagatgacgttggtgaagattgtcggctgttcgagaccggtgggtccctgtgccgacgagtgaatgtcgccgcgtgcccctacccatatgggtcgacgcgaggccgaacgcgaaagtgggaagtgaggt

SEQ ID NO: 30459 - DNA, 397 bp, Zea mays
tactcgctctgtataactgaatattattgtacttatgcctggggcaaagaacagtaccataataattttggctgctacagtttcgtatctcggtccggagcaagctgtcccgtaccaacctttcggaagagatggcccggcgattggatgacagaatggctttatgtgaaaaatgacctatcaccacgagaagacatctaaggtataattatgcgtcctatttggcaaagcttctgccttcggaggccgaaggtggaaatgaatgaagctgccgaataatgccagagggccttccgcgttatctgctcttttattggaacaagagatttattacaagagcatattgcctttcggatgttggcgcttgcggaaaatgggaaatgcctcagaaacgata

SEQ ID NO: 30460 - DNA, 441 bp, Zea mays
  unsure (1)..(441): unsure at all n locations
agctttagagacatttgaattgtctttgtaaataatatggtaatttaggaatcaaacattactctgtaaatttgttcataccttgcaatatatttttacctttccatccatgtgtgaattgctttgatgtggacgaaactcgcatcttttgagctgaaggagaaaaacaccttcccttattttcatacacaacgaagcgtatctttgcttctttatgctcatcgaagcattttcatcaaagccgaagcatctgtttgtactccatgttatgatgatgatgatcctacgaatgtctacatgaatgtgtgtgaatgcaatgaatgatgtaatgtaatgtgcaaatgaatgtccaaaacacgagcacatgaagccacatccagactatgcatcctcttaggaaccgtctttgagtcttaagctcttacatcccttanggacgtc

SEQ ID NO: 30461 - DNA, 284 bp, Zea mays
acatacttaaaggccacaatgaatcctgtatttttgtgattccaaattttcgtttgttaaacctattgacgtagacatatttctctgttgatggcctgatacttaacaatgccctcatggcacaaaaagatgctgaagacgaaaggtgttctatatccctgagcaaccttcgttccgaagttattgaactgaggaacgaaagtctcgaaaaagataaaattttgcactcatttgataataaaataaaggaggacgaagctgctttctaggtcaagcttgaactc

SEQ ID NO: 30462 - DNA, 424 bp, Zea mays
agcttgtctaccgtgtcactcgttattcgttgagccatcccatcagcgttaaggagtttgccacgccgtaagccacgtaaccgcgcgccaagcttcttcctcccctccggccgccaacgcatcgtggtcaaattgagagccaccgctctcggagtctataaattgagccccccctcggcttcgctatgtattttactagctatcgcacccgctcccacacccgattgtgcaccagctcgcctgaattttgcacttcccccaaatcggttctccgccgccgtagaagtgaactcaccgtcgccagcccaactccggtcagggcccgcccttttctttctcggttgaacattctcatgcctctgtgatgctccccgacccctttaattgaactagaccggcgcccatcgtcgggaacacgatcatg

SEQ ID NO: 30463 - DNA, 380 bp, Zea mays
aaaactaagcttgtactacgcggtagtaagcgtggcacccttatgagtattctccttgcgccgttacaccggtgactgctacggttacagccaccgtgttcttccctatctccggccgccaacacatcgcggtcaaattgagagctaccgacctcggggtctataaattgagcgcgtcctcaactccgtcaagtattcacgcagctactgcacccacctgcatcccataccccccaccagagaactcgaattttggatttcccccaatctgctcaagaacactgcgcagtttagcctccccgcgaccagcgcgattccggtcagtccgtgtcttctgttacccgttaagtattctcatgtgtctgcgatgctcgcgaccc

SEQ ID NO: 30464 - DNA, 373 bp, Zea mays
tatagccatggtaagatgcatatgctaataatatgcgaatggactcaagcccaactacgggtgcatatgtttcaccgaaatccaaaccttctacatgggagtattacattggccacaagacaaactttgttccttgtaaccacaccatgctcgtcttgcttgatgcggaaaaaccattttgtttctacaacactttggtttggacgcgtaaccaaatgccatacctcattcctagtgaaattgttgagctcctcttgcattgacaccacccaatccgaatcttgaatgctacctttacctgtgtggctcaatagacgaatacaaagagtaacgctcacaaaaatgtgcaacactacgatctattggttacccc

SEQ ID NO: 30465 - DNA, 418 bp, Zea mays
ccgggatcttaagcgacgctgcatgcagcttgcattgggttctatgaaatgtgactaaccttgtaggacccaacaagagttgggtacctaacacccaagcctaaatttgccttgcaggtttatgcatccgggggctcaagctggatcattgacagcggatgcacaaaccatatgacgggggagaagaagatgttcacctcctacgtcaagaataaggattcccaagattcaatcatattcggggatgggaaccaaggcaaggtgaaaggtttaggcaagattgcaatatccaatgagcactctatctctaatgtgtttttaagtgaggctcttggatataatttactatctgtcagtcaattatgcaatatgggatataattgtctatttacaaatgtagatgtgcctgtctttagaa

SEQ ID NO: 30466 - DNA, 434 bp, Zea mays
  unsure (1)..(434): unsure at all n locations
agcttcataaacagagttgcatcatatggtgccatcgctgntctctctccggtcacgcgtagtgttgattttaatcttcaattccaaaccgatggcacgttctttagctgcaataatgcgagcctggaaataaaaatgtaccttcctgcagcgtacagtgagtataaatctattctgtgatgctgatgcatgcaggctaactgctcctattaattagtagtagttaaccatatttgaccatgtttttaattaatacaaatgaatgtacattacgtctatctaaatatatcatggccagttgattaatccgtgcgtactaattgattatgcttggtcaacttttgcttccagcagcgggtcattattttgtccagtcgtaatcataactaatttgatagattgaactaatcccaattttgaagcatggcgagtga

SEQ ID NO: 30467 - DNA, 411 bp, Zea mays
tgttactaatgtgatggattattatgtgtatctcataaaactagaaccaacatagcctgcactcacatgtcatagaaaataggactatccaagcacaatttgtgtgagcatccatgacacaacatatatatagtctgatataattaattccttcaaaataaaaaaggaaaaaataaagtggttgttgatactgcaggatatctcctttagctaatgaggagtactaaaaagttgttgcactttcgggtggcgagaattcctcaatcataactttgacataattttaatccagatcacatatatagcatcatatcttaattattaaattattaatggtccatcatcgtattattaattcaatatgatattaaccatcaatcttaattattaaattaatctggagcgtacatt

SEQ ID NO: 30468 - DNA, 456 bp, Zea mays
cgggacctctaaggcacctgcagcatgcaagctttccatgttgtgcttgtacattccaatccgagcccgcatctgaccgtggtgaccgtcacaagttggtgttcttctgcagtccgaatccagcatgttcaaatccttttccctttcggtcttctccctgattcctaagcataacaagagtgcacgggtctccatggtctaaatatgatggacatgaactcaagagtgtaatcacctgatggttgagtttacgagcacgagcgcgagtaatgggaccagaaattggcacttgtattggtatatatgcatcagtagtgtggatgtcttcatcattctccccttcttgcatttgagtcgtctcgaataagctcaacttcctctcccatgtagggctttaaatctgcaatgttaaatgtggggcttaccccaaatctgcagcagatctagcctattgca

SEQ ID NO: 30469 - DNA, 445 bp, Zea mays
tgaaagacatgtctatgaaagcggagtaaaactctgaagctgcaaaaaagtcgttcctaagggagcgcagcgtaagttttctgctcaaaagtcgttcctaaaggaatacagagccaaaaattatgatccgaagctgcaaaaagtcgttcccaagggagcgcagcgtaagttttctactcaaaagtcattcctaatggaatgcagagccaaataccaccaatatataaggtgaagaagctcaaaagtcgttcctaaggggatctagagcttaaatgccaccgaaatagaaggtgaagaagctcaaaagtcgttcctaacgggatgcagagcttaaagactcaaaagtcgttcccaatgggatgcagagtcttgtgtggtataatgtgggcgcgtgcgtgtgtatgggtgacaatatcatcattttgcatcatatcatcatatcatt

SEQ ID NO: 30470 - DNA, 404 bp, Zea mays
cttcatcctcacatgtgctaagcggcgatgccacagccagcccaggctagtcttagcgattaagcatgcatctagaccggcctcctcttttgcaaaatcaactaaataaagtttgtcggctagtacacccttaaaagctagtgaaccatcacatcttctaaagacagacacatctatattagtgaatagacagttatatcccatattgcacaattgactaacagatagtaaattatatcccagagactcaactaaaaatacattagagatagagtgctcatttgaaattgcaatcttgcctaagcctttcaccttgccttggttcccatcaccaaatatgatggaatctggggaatccttattcttgacgtaggaggagaacatcttcttctcccccgtcatat

SEQ ID NO: 30471 - DNA, 377 bp, Zea mays
aaaatttcccaggtacataccaataatatcaacattttttttcacatttttcctgttacatagcaagacaaattcaatccaattttaaaaaactaatttaaaattttttaccatgaaaaaacaatatgtgcatacttaaatggtggaacagcatgtaaatggtatttcaatcctggtattaaggaagccgctccttattatcaaaggtatgtcctttctacaaataaataattcactatattatttcgcttttatacacccttttaagccaacatatactcaatcagatattgtcattacttgcaaatatatttctgtacagggttggatctcaaaaaataaaactacaaataccatcagagcatgaacaacaacta

SEQ ID NO: 30472 - DNA, 409 bp, Zea mays
  unsure (1)..(409): unsure at all n locations
ttgcggagcactcccgnatgaacgtccatggcagtacaagagggagaccccgcttggacaccctcaggagctgggtcacggtttgcgctggccacttgatccgaattatctcctgctaccccaccatgcgctgggcagtggcttgcgcttaccacctgagccgagtcatccccggcaacatcctctgtggctgggcaagtgtcaacaccgttcttgaggaccaagttctctacaggagccgcctctaaggctgatggaccctcagttacttccatgggaccaagatgatccaagttagtctcctgaccctcaagaccgcgttctaaggtcgatgtggcacgggatgacctcaccccagcatctagcgcatcagcacaaaccttcatcacacaatcattagttggctctg

SEQ ID NO: 30473 - DNA, 390 bp, Zea mays
  unsure (1)..(390): unsure at all n locations
tactaagctttaaaattcataacttctgttgagtatcctattntgttaaccaactttgtcagactctaaataatgtaacctacttaagaaaaataccaaacccctatgtactgtagaaaactataaggctctgatttaaatatagtttggccaaaagctcaataatagaaagaaaaatatgtgtactatttatctagggtttgaaaaatttggataagtttatatacacctactgacctaggtaataatgataaacctatctgtccaccccattaagttagtttctaccctttantttacattatgcttaagtttataaagaatagaaaatgtgacttatataatgaaccagacggcacccctatttttgtgtggatacttattcaatat

SEQ ID NO: 30474 - DNA, 422 bp, Zea mays
agcttgcttcggatgagggtttctttgtgacatccacggagaaagcagcttccgtctgtgccatggttcttacacaatcgcaacccgccttctccaggatggctgatatttcttttgcaccggagaacacgcagacatccccgcgatcacttaaaatttgttcaaaagctttggcctctccgcttatccattcgataacaccttcagggtcgcctcgtataaaattatcttcgttggaataagcgcccacgttggcgaagatagcctttatcttctccacgtagcccacggattttttgaagcatctttctttggatgcgcgaagttgttctactggttttctaaatagtttttccaatactcactaatatctcggttggcctctgtgagaccacatattttcttggcttccgccaactgtt

SEQ ID NO: 30475 - DNA, 424 bp, Zea mays
gtactatgactaatgttcttttcgattatctacgcgtgttccggaattcgtgggtggaccaatggtggctataatgtacgtgtggctgttgtactcaaagggtctttctattgctactagaaaaagacagcgccctatcgggcgctatattatgcatatatgcacaagtagatcagaaaatataccgcatacagtaagaaaaagaaacgacaaaattcagacgtacgaatctatcattggcatgttgattgcacgacagcgatgacctagacaatacgaaatatattacatgttacggtgatcaaagacacagtatgtttacatggctgatgcgcaccatatacatcatttataaacacattgtttgaacacaaacaccttatatgatcacaacatattgttgatccatacgaaattaatacat

SEQ ID NO: 30476 - DNA, 448 bp, Zea mays
  unsure (1)..(448): unsure at all n locations
agcttcatactgatatatattatgggatgaaattattttctaatgagcttaaagcatatttcatgtctcaagccgttgttaggcacgtactacactatttcttatacgcctcaatagaacagtgcagttgagcgttggaacggaactatatcccctctagggcatgttgcatgttgtctaattcaggtttaaattcgtgttttgggctgaagctaccatgccatgtgcacaaataaagagagaaaacccgtgtgcaagtggagcacttagctgatgcactagacgatattaataatgtncgtgtttcttctctctttgtgcttacgctgtcatcaggctatccgcactcatataactctaaatttctactctaaaaggaatattccgtccttgtcagcaaacttctttactctataccatanatctccgcagccacatttactctata

SEQ ID NO: 30477 - DNA, 371 bp, Zea mays
  unsure (1)..(371): unsure at all n locations
cttacaaatagtgctggacatccncaatgcgaagtgcttgtgcgaataaatcccttatccagcaactcttgcaattgcttcttcaattctgccaattcagcgggtggcattcggtaaggcctcttggaaattggagtcgttcccggttgcaactcgatggcgaattcaatatcccggtctggtggcattcttggcaattcatcaagaaagacatatgcatactcacagaccactgggatcttctttagaggtaactccgtcatagagaaagcacatgactgagtagaaccttgactaagcagaattaatgtgaagttcccgtagaacggagaattaactttcacggtacggctggctacatcaagcacaac

SEQ ID NO: 30478 - DNA, 437 bp, Zea mays
  unsure (1)..(437): unsure at all n locations
agcttgtggcgccctcgggcgtcttgccgtattctaaataccaagtctcccacctcgaagtctcatggccgaacccctcgggcgtgatagcgtcgcaaagactgctgataccgcgccgagtgtattaaggccacgtcccgagcctcttcgagctggtccagagagtcttctcggctggtctggttgctttggtcgtcgtacgcctttgtcctcggggaactgtattctaagtctgtgggcaagataacctcggccccatagactataaagaacggcgagaaactcgtggcccggctcagcgtcgtcctcaaactccagaccaccgagggtagttccttcatccatcgcttgccgaacttgttgaggtcgntgtagatcctccgtttaagtccttgcagaagcataccagttgcacgctccaccttgccattcgtcat

SEQ ID NO: 30479 - DNA, 429 bp, Zea mays
  unsure (1)..(429): unsure at all n locations
cttgagcttcggnttgaatgacacgttttcgtcatttctgaatataagatgtctcaagacaagaagacagttgctgagacgaagcttaccgaagaggagaagctccttgaggagaagactgctggatttgttgagtcaatagcaaatacaaatacaaagaagattactaaagagatactggaaggctttgtctgaagatactgatgatagcgacaactatgatgtggaaagtggaggcgaagactctgaagatcggccctggcgaccaagtcatgcagtcttcggtaaatcaactatcaaatagagtcatcttgataatatgagaggaaggtatttttgagatatgtctattgtgagggctgacgtatacaaggtcgttcctgctaccgaaaaaacgaaattgtgatctttcgaagactctttaaaact

SEQ ID NO: 30480 - DNA, 389 bp, Zea mays
agcttaaagccatggttagtatcataggccaacaatatacgaattgactcaagcctagctacgggtgcatatgtttcatcgaaatccaaaccttcgacttgggagtatcccttggccacaagtcgagctttgttccttgctaccacaccatgctcatcttgcttgttgaggaaaacccatttggtttctacaacattttgatttggacgtggaactaaatgccatacctcattcctagtgaagttgttgagctcctcttgcatcgccaccacacaatccgaatcttggagtggttactctaccctgtgcgggtcagtagaggaaacaaaagagtaatgctcacaaaaatgtgcaacacgagatctattatgtacccccttatgaatgtc

SEQ ID NO: 30481 - DNA, 423 bp, Zea mays
  unsure (1)..(423): unsure at all n locations
ntcaagaaacattctaagactcccagactctttctccacgcattngattctctggtttagtgatgtgagctccaattgagttgcaaactccgtgtgttgtgtttcaagctcaagtcgtgacttgtgtgcgtggttgtgctaccgatttgagtcttgcgtgtgttgctctccccaaccttactctgtgctttctttgtgatctctattgtaagggcgagagactccatactgtggagattcctcgcacacgggaaaagactctaaaggaaaagaccgtggtattcaagttgatcatcggatcacttgaaaggggttgagtgcaaacctcgttcattgtgacgccacgacgtggaagtaggcaagtgttacttaactgaaccacggcataaaaatcatgtggctcttgtgttgctttctctggga

SEQ ID NO: 30482 - DNA, 359 bp, Zea mays
  unsure (1)..(359): unsure at all n locations
agctnttgaacgtactattctcatgccgggaaaaatggtaaccggtgaacctagtacctgagtgaagccgggcgcggactttatccctcatgcgacctgagactgggtctcccatgctagctatggtgggtacaagtgcgatcactgcacgacggcagccggggtcagtggagcattgtatgcgaaggcagtgaggcctggacgcgaacggggaatcgatggggacggttgtcatgtgcggngtcggagtaccctgacatgccgtgtgtttaggtttaccttgcaaggataaaactcgattcaaatcgtctgcttctcgcagctaatgagactgcttgaccccttgtactacatcgagt

SEQ ID NO: 30483 - DNA, 424 bp, Zea mays
  unsure (1)..(424): unsure at all n locations
actaagcctgtcttcggctcatcgacacgtttgcatctatatttgatgatagcccgagcagcaatccaataagctcatgagttccgaagtggctgctgcatccactaaagaatctattcttggcaatgggaattcatccttcggacatgccttgttgagatctataaaatcaatacacattctccatgacagtattggccaaccactttgggtatgctacttctctaataacttcggcacttagaagtctttttacttcatttcgtgcgccttcggctttgtcatcagacattttccgaagcctctgctnttttggtctaaaagatgggtccacattgagtgagtgtcaatgatgtctctattgacaccgcagaggtcattggctgtccaagcaataacatctttgttgttaaacaaaaatctt

SEQ ID NO: 30484 - DNA, 421 bp, Zea mays
  unsure (1)..(421): unsure at all n locations
agcttgtggacccgtatcctatcaattggaattgccacctcacatgtcagcagttcacaatgtatttcatgtatctcagctacagaaatgtgtccgcctacccactgaagtgctaccggaaccagatcttgtgatagaaccagacttatcttatcaagagtaccccatcaaggtattggatcagaaggagagatcaacacgggcaaggtcaatcagaatgtataaagttcagtggagtcaccattcagcagaagaagctacatgggagactgaggattttctacgctcccgcttccccgactttctgcccaaaggagtcggtacgtaacccccaaaaccccacccccacctgccctttgaatacaattataagaaagcttagataacaaggatagtctaagttgtggatntagcttaaaaa

SEQ ID NO: 30485 - DNA, 442 bp, Zea mays
ctaaatgggagaatccaatagatatgctactgttacaatgaaagctacaatccttgataaaagtgacattatttaccaagttggattgaaatgtagtagcatgccttatgagaaacttgttctcatacatgagactatatgagggtctcattatccgagtaggtgttgttgttcttgatgtcctccctttttcatttgagtgtcctcccttgtagtttactctttttcctttcaagcttattgaaaatacttaagagagatgttaatggcacaagggagtatatgatgaatgatgatttctttaaatagaaaataaaaacgattcatcattcataagtcacatagatattgaagaaacttcttaacattagtgcacatctttaaaaaggagtatgcactatttaaacatttgatcaatcataggaattgtactttcttcata

SEQ ID NO: 30486 - DNA, 424 bp, Zea mays
  unsure (1)..(424): unsure at all n locations
gatcttaagtcacctgcngcatgcagcttttattcatttcattatgtctttgctnggtcagccattgatctctgcgatgtcaacagagatgtcattgaacaatcactcaatgtggacccatccttcatgccaataaagcaaaggcttcagaaaatgtctgatgatatagccgaaggtgctcggaatgaagtgaaaaggcttcttagtgctggtgtcatcatagaggtaaaatacctatagtggttagccaatactgtcatattgaagaaggccaatggaaaatggagaatgtgcattgacttcacagatcttaacaaggcatgcccaatagatgaattcccgctaccaagaataaactctcttgtaagcgcagcagcttctttagagctcatgagtctattggattgttattcaggctatcaac

SEQ ID NO: 30487 - DNA, 432 bp, Zea mays
cgatgtagcaacctcatgtgatgatttgattctttaatattcaactagtctacatgctgaattgtctgataaagttgaagtcctgactctatacaaccaaaaattgaagaattacttgactgatgcaactactataggaaaagttgctattgagaacaatgatttcaacaatgaattggcagtggataatcaaaggcttaagaatgatgtcaagaaactaaaaagtgaaaatgaacatcttgcaacaagtgtgcataagttcaacaagggtcaatacctccaaaatgagctgcttatgaacactgttatgataaataacaagagtggtattggatacaatgcttttgttgcaaagaaagctatcactctatacatgccatagcagactctcatgcctatcatattctttgagtgtggaaatgaatgtcattt

SEQ ID NO: 30488 - DNA, 224 bp, Zea mays
ggaacttaagcccctctgcatcatcatctttacttcacgctctaaaccccagctcgtagaatggactcatctttgcagcttactgagaaaccatattcccagttacttggcctaacacatttcattttacaaacatttgcaaaaacgattctattcaatcgcgcctttcggcaaataatgatagagagatccagcggcaaatgtatcacttaatgcaaaataga

SEQ ID NO: 30489 - DNA, 452 bp, Zea mays
  unsure (1)..(452): unsure at all n locations
tctccatccatagctgtggaactgattcattcttcttccagaccgcgccttttatatcgtgcgcaccttcatttcatagccaaaggttcctgtaacagtatattatacttggaaaacatgtntgttgtgtttttgaggaccttctgaatacgaatgcccccaacagtagcccctcgcagtattaatttgttcttgtatctaacaaattcagactgcgacgtgaacgaaggcctttatccgaatgtccgaaaaaacaccttcccttcgctagaatagcgaaagtcaatgacaaatggggcccgccaagttgcaatgcactatgcatataaatagaaacccacagcggcagcatttgtacgccatttctgtgctcgcgttattttctcaaattttaactcatgctatcagctctcgctagattatcgagcttcgtgatatacacaagtgcttgg

SEQ ID NO: 30490 - DNA, 79 bp, Zea mays
acactcagcacacattttctctccaactccgcggagaaatgcttataacattgtcgtaagactacttaattgacataaa

SEQ ID NO: 30491 - DNA, 430 bp, Zea mays
tctaaagggagaacacgtgatatgtttgactatcttgcaattcgaaaaagatagaccttgtgcagctggtcaagcaggttaacaagtgggaggagcgcatcacaacaagaatgtgatgaccacttcaagacccctggagctgctgcatatggacctcttcggacccttcgcctatctgagcataggagggagtaagtatggtctagttattgttgatgacttttcccgcttcacttgggtgttctttttgcaggataagtctgaaacccaagggaccctcaagcgcttcctcaggagagctcaaaatgagtttgagctcaaggtgaagaaaataaggagcgacaacgggtccgagttcaagaacccttaagtggagggagtccttgaggaggaaaggatcaagcacgagttctccgcgtcctacacacca

SEQ ID NO: 30492 - DNA, 428 bp, Zea mays
  unsure (1)..(428): unsure at all n locations
agcttccatatctagaacctgtttacgtacaagttatttagtgacagtgacaaacaagggactattcgatatggtctgctgtattttttaaagaacgataggaagtaaacatgtcacaaacctcatctctgaaatatgtattgtctgttatgtagcagaattcttctacttgtggtgcacatatctcctcgtattttctgaatttgaagttcccaacatgccaaatcagtacgctaacatcgtaatgacaactaaggataataaatggaaagagaagcagaatcttacgcagctataagcatgcatgcaacaccaagtcatttcgttgccagaaagataacggtcaatgtagttgactgtcaggtacaaagtatcaggaacaagacgatattcttcagcaacctgcatgangggaaaataatgaatac

SEQ ID NO: 30493 - DNA, 340 bp, Zea mays
tacataaacaccaagtatgctgggaccaaatctcaaacatatgatgtatagtggcacatgatcgaatgtcacatctttatatataacaggagttctatacaaaataaataattacattataaggagacaacggtccatcaacccatagttgactgggagacgacgacctatacctctcacgaactcatcgcagcatcctctatgagcatcatcctgcagtacctgttcttgacctgtggtgtatgtgagacagcaagagtgagctcacatacgttcatcgctcaacaagttgtggggaataatgtgcatgaactcgccaaagtgggagctcacgtgaagt

SEQ ID NO: 30494 - DNA, 399 bp, Zea mays
  unsure (1)..(399): unsure at all n locations
ccctccagtgacacttcgttactatctgtgagacaatacgaggcgttgaaaacttcctatcgttttgtaatggttatcacatgatactaatccatatctatgtgggaaagatggattagtaattagttggttcagtttaaaaagtttgtcggttaaatgaggttatatgttttcgtgatatgcttggctgccgggctgacatgcacctttttcgtgagttcacctgctcagcgagacaacaatgttgtctgtgattagttctaactagcacaagaatcattctgaggattgttattgctaaataggttcggctgttagatgtaatattgtccacctgttagatgcctgtnttgaataaataagatcattaaagtaatctgtgcatatgttaaatccata

SEQ ID NO: 30495 - DNA, 339 bp, Zea mays
  unsure (1)..(339): unsure at all n locations
acacctttctattctgggtatttttctctgatatactaaaaacttcagatacaaaatatactgggacctgtttcctggcttggccatcaagacttttcctggacaaatgctgcacttaccgctgagtgcgaatctgccacatataataataaaggagcctctggcataagtgaagttaatgctgttagatctattaaatactgcttcagctcttcgaaggccttctgctggattggtccccattgaaagacttcngctgacttcagcacttcgaaaaatggtaagttctctctgctgacctggatatgaatctattgagagatgccaaccttcctgtca

SEQ ID NO: 30496 - DNA, 442 bp, Zea mays
  unsure (1)..(442): unsure at all n locations
ancttcgacaccagctgcattttctgtgctgtcgccagacattctttcctctcggagtgcttacactctgtagaggatgacagtccgggcttctgcctggacttctccgggctgcgagatcctgagttcatgctacagttcctgtacgcatgtgatgagttactctccgacagctcggagggttatagcaccggtggggagagatatgactcgaccctggaatgccttcatatcaaccaagagatccttaacgaggaaaaccatctcggcatgcctcgggaaggtgactggccttccccgttcgtccgggaagaagtggagctatgccatgcccacatccctcctatgagccacgtggctctccttgagcagcttctggagctacacgacaagctcggtgaaaaacaacaactactattgtagctgcgacaaacactggaga

SEQ ID NO: 30497 - DNA, 415 bp, Zea mays
ctagctttctggaagcaggctgcccactcttccctttgtgtaacatgacaacttctctatttgctgattgtctttggttttgaacttaaccttatgttcatttgccaggatgacgctctccttgcgtaccaaactgcttttgatcttgctgaaaatgataaccacgctttcctcctatatgtgcggaatcaccttgatgcattgagttcacatacttctgtccatgtgtaccctgcgagcagactggttgtacaaagtaatcaaactaatgctgctacagaaccatctgaggatgtccatatgatggatgacataaccatgccaaatgacagtgctgccactatggatccataatgcagaacacattctgattcgctgacaaatcaatggtatattggcaggagagacatctatt

SEQ ID NO: 30498 - DNA, 393 bp, Zea mays
  unsure (1)..(393): unsure at all n locations
ntagggtaaaagtcatgatatgaccccaaaaataaagttgaatcacatttatacccctgtgataccagaaaccctaattggaaccctggaaaaccctgaaaccaaaccctatgggcttatgtgcaaaagtgatgaacctttggactaaagtgtaaaaactactatgtttaaacatataaagtcatttggttcacaaatatgtggacttgaaagccaaaccctaagttttgggtttatttgcaaaaagtaccacttgacctctatatagcctaagtctgaaatcagtgttgtgagcacaactttgagcctttgtaactttcaaagcatanggtttttgccctaggtcaccacatcaaagttgaagaccaaacataggagaacaactttgcttaa

SEQ ID NO: 30499 - DNA, 136 bp, Zea mays
cgctgtcacaatgaccgatccagaacataaaccctcaaaacacaggagttgagcgcgaaagaccgggccgaaaccgacccgctgcgcccacaaacacctgagaaaactggccccgcgccgtccacccgcgccagcg

SEQ ID NO: 30500 - DNA, 433 bp, Zea mays
acactattaatactaagcttcttgaacctctaggctaaagtgcatgaatgaacctatgtgttcgtaccgcacgtggtaacacgtctcatggcgatgaagtcaaaatacaccttctccatcaactgttacaatgattgtgtgaaactgattattgatatcatcccaaccgaatcataacatgttgaaagacttataccattgcaagaagctcgtagctggtctcggcgtgaactaccaaaagattgatgcttgcgaggacaattgcatgttgttctggaaggagcatgaaaataccacacattgcatccactgcagtaagtaagatatgcagtggtgctagatgaagatggaaacgaagttacgacaaatgtgccgatcaagcaactcttgtacatgcctataactccacggcttaagcgtctctttctatatc

SEQ ID NO: 30501 - DNA, 419 bp, Zea mays
  unsure (1)..(419): unsure at all n locations
agcttcgcacctctgatctatctctactgcatcactntntgccgtcggccaatagaatcccgacctgaagacctttccgactagtgtccgggatgctgtgtgtattccacattgtccagcatggacctcttctataagtcgcttcccagtagatgagagaatacatttcatgaggacgcctgatgcaccccttctgtatagtgtctccccaatgagtgtgtagcgagctgactgtctaacgatgcgctcggctgcatttttgtcgtctggttcctcttcattntttatatatctgatgatcggccttctccagtcatcaaagtctgactctggttgatgcacgatattacactcttctgcctgatccattgagatgcttggctgtggtatttcttgtacaaagactccaggtgggacct

SEQ ID NO: 30502 - DNA, 391 bp, Zea mays
ggctttgtttatatatctcccctttgttggtgatctctcacaaagtgatataagatgcccatgtgcttagtgtggctgtgttcaacaggatgatctgtcatatggattgaactctcattgtctcatatgagagggactatgctcaacttgtagacatagtcccttatattttggcctatccagagtatatgtgcacatcaatgtgcggcaacaacatactcatcttccgtgtatatagagctactgtattttatttctatgaagcacatgacaccattgatctccccagatctaacacatcccaaatgtactctctttatcaattttacatacaggatgtgggggatcataattcccaattcgaccaaagggagatcccttggggtaccat

SEQ ID NO: 30503 - DNA, 414 bp, Zea mays
  unsure (1)..(414): unsure at all n locations
agcttgtgagaaagaaagctatctaatatatattagggcctntagtccttatatgactaaagcccctttttggtccaacagctagggatatttggttctagttggtggcatcatttgggactaaaggtcaatttttatttatactactctattaagaacctaatgtgggcacccggtgctttcaccctccgcgctgacactctgggcctgtcccacgcgtcccgactcagcgtcgtgccctatgggccccatgcccagcgcctgcgcagcgctctctcagctactgcagcgcccgcacagctaactactgcgtctgtctagcactcgaccccgcccctgcaactaccacaccgcacaaaaaaataatgccccctgctccagaaatttaatgctaaccaccaaaccgcacgaatc

SEQ ID NO: 30504 - DNA, 394 bp, Zea mays
  unsure (1)..(394): unsure at all n locations
aaccgacgtatagatttaaagtcaaattagacctcgaagaattactatagagttattgttaaatgtaatgggtattaatgtaattttgcatgggctgcgacccgtgcctataaatatgtgaacagtattcccgtactattcacgctgacttggcactttgctttcgcatcgcacctgtattcacattccttcaagtcgaaggtatatttgtaatttactattatttacatgagtaatttaagtaaaaaaataaattaataataatgtttacagagattatgctatttcttatattctgagtttaaatattatttatcttttgctatgttcatgaaggtgttgccttcatgaccttcgtncgaaatccattatatccgaagggaaataatgattc

SEQ ID NO: 30505 - DNA, 414 bp, Zea mays
agctctatatggacgattatgtcgtactccggtaaattggtccgaacctggagaaagatctttcttcaggcttgatatggtgaaagagaccgaacaaaaggttcagagaatcattcgtaatttaaagaaagctcaagctcgtcagaaaaggtatgcagacaagcgacgacaacccttatactttctcgtgggagattatgtttacttgaaagtttcaccaatgaagggtgtatcatgattcacggttaaaggaaagcttgcaccccggttcattggtccattcccgatacttgaacagtgtggaccagtggcatatcaacttcaactacccaaaaccttgtgtattgtacataatgtgttccacgtgtctcaattaaagaaatgtctttgcgtttcagatcgaaccattgaagt

SEQ ID NO: 30506 - DNA, 437 bp, Zea mays
  unsure (1)..(437): unsure at all n locations
tgtggaggttcttcatacncacatgtgctattcggcgatgccacagccagcccatgcaagtcttatcaattaagcatgcatctagaccgacctcttcttttgcaaaatcaaccaaataaagtttgtcgtctagtacacccttaaaagctagtgaaccatcacaccttctaaagacagacacatctacatttgtgaatagacaattatatcccatattgcataattgactaacagataacaaattatatccaagagactcaactaaaaacacattattgaaagctctcttgtgagttttggtgtttggatgacaactcaattaaaggactaacaagtgtactaagtgttgaacaggtgcttatggtaaagcctacagggttcaacacaagtgaacaaatgtgatggtccaagaactagatatggatacataatggaca

SEQ ID NO: 30507 - DNA, 277 bp, Zea mays
  unsure (1)..(277): unsure at all n locations
agctagacattgtctccctttctgaagccaatgccatccttaatgcccgggcgtctcccactattaagcatactacgagcaaatttaaaattntcattttctaactcatgctcggcaattttaagcatctaatttgctatatgatcattntgntgtttaatcatagcaatgtgatcatgaatagcatcaatggtaacatctttacatctagtgcaaacaataacatgctcaatggtagatgtagaggggttgcaagaaattaattcaaccattttaa

SEQ ID NO: 30508 - DNA, 436 bp, Zea mays
  unsure (1)..(436): unsure at all n locations
tactcaacttgtngctctgacaatgtaacttgcgagtgttaaggtgacgaccacatccnctttcgaaattcaaagctcacatatactactgcaggttagtgatccgtggatgtatatccaaaagtgtatgtcgaaaacaatctcgtacaagctgtaaaaagtttccattgcctgtgaggctttcatttgtattataatggacgaatccctttgaggaacaaaatgcccttttgaaagccagctcgttaccctttgctatctacactgtgaaactgacctgtttttcagttatctctgttctttctctgattttccactcttttctatagtgttcttcagaaaactcgcacgatggctattttctgattatacaagtttcgttcactaatattttgtttaacaatataggtcatgtttgatacatgagttaattact

SEQ ID NO: 30509 - DNA, 432 bp, Zea mays
  unsure (1)..(432): unsure at all n locations
acccggatcttaagcaccgcagcagcagctttgctcagctcaacctggtttacaccccacaaattcaccggatatgcccgaaagaaaataaaaagatatacttcgaanattttcagcacctctacaacgaagctgctcaagggaaatcgcagtccagctttcaaaaagcttcggtacactacgacttcattctcttcagggtgtgggcaagttttttccccttcgtcggccctcacaatggacaaatcccagaaataccttcctctcatgttgacaagatgattctctttgatagttgatttaccatanactgaatggcttggtcgccagggacgatcttcggagtcttcaccaccactgtccacatcatagctgtcactgtcaccagtatcttcagacaaaccttccaaaatctccctggagaatttttct

SEQ ID NO: 30510 - DNA, 356 bp, Zea mays
actcagcttgcatacagctgacaatctcgtatcctctattgtaccttcctcaaatgctcctcatgctcttgctcattctgggaatatataaggatatcatcaatgaacactactacgaacttgtcgaggtagtccatgaacacattgttcatcaagtacatgaagtaagctggcgcattcgtcaatctgaatgacatgaccgtgaactcatacagtccatacttggtgatgaatgttgtctttggtatatccgaaggtcggattctgatctgatggtagcctgacctcagatctatctttgagaacacactggctcctctcaactgatcgaataaatcttcaaatctgggcaaggg

SEQ ID NO: 30511 - DNA, 358 bp, Zea mays
agcttactcttgtcagacctataccatataggccggaccgctatgggagtggagagatggcgatagtataccgtatccacctgaccagaggctggatggtggggtactgagctctccgttggcgtggacctgttctggtcttgaaaaaatcgtgggcgagtcgacatatgctttggtttagtgctacatatgccgcgtggttggagatccccagatggttattaatctattccgatcgccgaacttctcggatatgaagactggatcttcgaccttcagcgcatataacatgtgaaactaaagatgcttatataaatctagtatttgacaagtgaatgctctagattaagcacatcta

SEQ ID NO: 30512 - DNA, 376 bp, Zea mays
  unsure (1)..(376): unsure at all n locations
tatcccttcttgaagagaaacaacgtataattcttacatttgtgcaataagcataaagatcttgagcaatccattgaggaacatctagctactcatgaggttcttattgaaactcatgagaagttgaaagatattcatcccacccttcttcgtaaaaaatgaggctattgaaatagcaagcataagagttacttgaaaaatcattgatgaaacttcttctggtcctatgattattgctgctactaaccgtgcttgtagcattcatcatacatgagagacattatcactagtgatacctcacttactaatgaaaatgcaactcttangaagaaggtaaaatatctcactcatgccttaggcaaatcctatggacatg

SEQ ID NO: 30513 - DNA, 375 bp, Zea mays
tcgcatctctggactaactcggttgcgtcgctctttgctgtcggccaatataaccctgacctgaagaccttcccgactagtgttctggaggctgcatgtattccacattgccctgcatggacttcctccagaagttgcttcccagtggatgggagaatacacttcatgagaacccctgatgcaccccttctgtataatatctccccaatgagtgtgtagtgagccgactgtctggcaatgcgctctgctgagttcttgtcgtctggctcttcttcgttctttatgtacttaatgatcggcctcctccagtcatcatagtctgactcgggttgatctacgatggtgcactcttctggttgggctattgagatactc

SEQ ID NO: 30514 - DNA, 447 bp, Zea mays
  unsure (1)..(447): unsure at all n locations
agcttcgcaggaaaaggagatgatatgaagctttggggtgcttgagagagtcaattcaattattgttaaactcaagctatcaatctccaatgatctatatccatgattgacccaaggcctacaacgtggaggaaagccaaaggacggtaacatctatgtttttaagtgcaagtatcttaaattatcatttcttatgtgtcttgtatagtcacatagaaaaaaaaagcacttcanatatttttaaattatgtcaccattctttgaagaaattcctctcatatggtagaatgtatattcatcatttctatagcatggcaatctacatgctttaaattgttgaaagatcttatggcatgctttacactaatcatcctattattgccatgttctagatatagagagatatttcatgttcttaaaagaataaggtgtcacgtaaggaattca

SEQ ID NO: 30515 - DNA, 401 bp, Zea mays
cgaaatagaagagcttaaagagtatgccaaatcctgtgggtacaaaccaagagcactcctcttcggaggtattgatgacgaaaaattaaattgcatccgagatcaaattggagccaaagttatcggtactctgtcaaagagtatcggctttccgaagctagagacggacattatccgctaccgacgacaacatctcgttggtagtttattttattccaacttcaaggtgaactacttttcccttaacttttattgtttctaataatgaaaacatgtctaacgaaggttgttttcgtgcagagtatgcttttgagcaaagctttaaaaatgcaacaagatttggaagacaagaaacacgaagttataattgaaaatttagaaagcaaaataaaggagcaatc

SEQ ID NO: 30516 - DNA, 292 bp, Zea mays
  unsure (1)..(292): unsure at all n locations
gctatctgactttgcatttatctagcctggcccatcttttcttccttctctgcacctgttgatgaagcatctccatgtctctgatctcttggtctagctcatcctcttgcggtgtcnggctgacagccttcctcttttggcttcnggccctccgaagagagagagtcntcctgatggggtccagcggttgcagagctgcaggcccagttgctgaagctttctttggcgccatagcgaagatttatgatcgccgaagggtgtaaaaactcacagggtgtagtgagttcaccgg

SEQ ID NO: 30517 - DNA, 431 bp, Zea mays
agctagtacttcgcctcaacttggtttgactagcgcgccgtttctctgcatctgatgacgtactcaccgtcaatctgccttgggtcacgccaactgccatatctatccctatggctgactaacccgtggcccccatgcctggtggtttcgatgggccacgcgcggccccgaggaaggcacactacttgcgcgcgcggcggttcgctctttccgcacccgaagtcccgcgcacaaaccttatgacttgtggacctaggcccccgtgtcatagactaagtttgtcttctgcatcggctccaaggaggcgcaccacaggcgcgtgcggcggttcactctacaagcacgcacggcggttcgctttttccgcacccaatgttcagcgaacaatctgtatgacttgtggacccggcccccgtgtcatatactgggta

SEQ ID NO: 30518 - DNA, 292 bp, Zea mays
gttcttcgcagactgtctacagattatgcaatgtgtgcgatagtgccctacaagatcatatcttcaaacgacgcactcttagcagctgagacctccgaatgtgtaatgacaatacctgtctctttcgcaactgacggtgttttctgatctaaagctcttgacggtgacttgacaaatacatttgtcacaacaataattctttgtcactttgcctggagcactctgatgaaatatcaaggctacctgaccctctgaaaataccttgattgccggggccccaatggacttatct

SEQ ID NO: 30519 - DNA, 441 bp, Zea mays
agcttaccattgaatgggtactgatatagaacaacacctaggccatcaactattgtcttgaagttcaactcactcactgtagcatttagtgcattatcaaaacaattattgaaagcatgcacaatcggggaaacatctacatcggtatttagtaacatcacaacaatagtcattcagtttgggaaacatgttattttgaagtgaacagtttgggaatagccatgacttactacagttgacaacatatgaaatggatagcattacacttgacaacctacacaaacaatggcagaatccaatcaaatgaataacaaatgtttgaaagtttcttatgctccagaaaaaagattctcaacttacataaatgattaaatagatttaccagagatatccttcatttcatgcaagttagaggttggtcagctgctcctgatgcaactg

SEQ ID NO: 30520 - DNA, 453 bp, Zea mays
  unsure (1)..(453): unsure at all n locations
tagcctcggtcggaccaataccagaacagctcgcacgcactgggagtggagagatggcgagagtagcttgtaccctccgtggcaagagactggaagatggggtgctgtactctcggaaacatggcgggcaccatggcgagagttacgtgtaccaaccaagccaatggctggacggtggagtgctgtgctctcgggtcgcgtgaacccgttctggtcttgagaaccccggtggcgagttgacatatgcaagggttaagtgctacatatatcgtgtggttggagatccccagctgggtattaatcgattcggatcgccgaacttctcggatatgaagactggatcttcgaccttcagcgtagataacaagtgaaattaanattgataaaatgaagttagtgtagtacaagtgaatactctagaccaggcaaatctagattcaggaaaagtactta

SEQ ID NO: 30521 - DNA, 447 bp, Zea mays
  unsure (1)..(447): unsure at all n locations
agcttgcattgcatgtttattattctggtattgcatctagggcttgtctaacctagttgagataaccgcccacaaagcgagagaaaaagcttatctctgatcaaacttgacaagtcttagttttaagcttttagcacttgaattcttactttntatgcaattattggttcttgaaatatgcatgaggtactgcacttatggggagtattcaaaactcaaatcactcatgaaaacccctagtgcaaggccaaaatgcaaatttcaccatttgcctattttctctaaaaattatctagcctatggcaaaatattttgaaaattatgagaaaatatatgagggtgccaatacttgtcccaacaagtggttatttgtgtgattataagttgggatttggtttggttggaattaaatataaaaaatcanaaattcaaatcttcctctgctgg

SEQ ID NO: 30522 - DNA, 387 bp, Zea mays
tgaagcttctttcgaaggattttctgttaagaatattccaagaggggaaaatgagcatgctgatctactagccaagtcagcggcacatgggcttcctgtaccttcggaagtattttttgagacaataagagcaccttcggttgaactccttgaaagagcagtgctcacaatttctcatgtccatagtgaagattggaggactgagattatatctttcctccagggtaactgtctctcggatgatgaggtttataacaaaagaatggaagccagaacaagaccatatgtcgtaatagaaggggaattatataaacatggagtttgctccccacttctcaaatgcttatccagaaccgacggtatagaactgatgaatgagatacatgc

SEQ ID NO: 30523 - DNA, 310 bp, Zea mays
atacaagctggcctatgatctatgcgaagtcttctacgtcccttggaacatccgacagcttcgtcggttttaccctcaagatgttttcaagtcgttcatatacctcgggttctatacatatacaaataaagtctaaccgtcaaggaagggtcagccttgccttggcaaatcccgaccctccctcaggggctagaaggggggaaccccctctgcgtcaaaattttgcgcggaaaaagtccctctgccagaatatgtttcgcgcttgtcaacaggttcgatagcgggatcctgaaaacgacgagagtacacg

SEQ ID NO: 30524 - DNA, 430 bp, Zea mays
agcttcggagactctccccatcttcgaagccatgcaacgatcgggtctagtgacttcgggaaagatccctcatgatgatacagaacaagcaaaacaagcaatcgctgaagcagaggaagaagatattgaggaaactgattccgaagatgattatcgcattgccatgccaagcaagccgagccacttggacttcggaaaatctactgtttcgaagactgatctatccaagatggtaaaagcgggcttttttactgaaaatcaaaagaagttgttgcgcttcggcggagaagagactaccccgaagccagagaaggatgagattgttatttttaaaagttttctaaaggctggattaaggttccccctacatgggattattggagaggtactgaagaggttcggtatctattttcatcagctgacccctaac

SEQ ID NO: 30525 - DNA, 296 bp, Zea mays
catactcccaatgggatcgtcatcctccgacatgccatggtggttgccttcatcgagacccctctcgatcgatggatggtgaccatgtcgcgtcggggacagactgcaccgttatctcatgtacaatgttgacgctcatcaagtccttcgcgagagtgctggcgtcatctgtccgcttggggttggcatgttgcggggaaatgacactcgtcgttgtctcatgcgtgaggacaacgcccgacatgtcccccgctggggtgccagcgtcgtcgactcactcgacagccaacgagatg

SEQ ID NO: 30526 - DNA, 403 bp, Zea mays
  unsure (1)..(403): unsure at all n locations
agctntatcaaatggacgtgtaaagtgccttcctcaacggaccaatcaaggaagaggtctatgttgagcaacctcccggctttgaagatagtgagtatcctaaccacatgtataaactttctaaggcgctttatgggctcaagcaagccccaagagcatggtatgaatgcctaagagatttccttatcactaatggtttcaaagtcgaaaaggccgatcctactttattcactaaaactcttgacaatgatttgtttgtatgccaaatttacgttgatgatattatatttggatctactaacgaatctacatgtgaggaatttagtaggatcatgacacacaaattcgagatgtccatgatgggggagttgaagtacttcttatgatttcaagtgaagcaact

SEQ ID NO: 30527 - DNA, 418 bp, Zea mays
acatgtgctaatctgcgatgccacagccagcccatgctagtcttatcaattaagcatgcatctagatcagcctcctcttttgcaaaatcaactaagtaaagtttgccgtctaatacacccttaaaagctagtgaaccatcacttcttctaaagacagacacatctacatttgtgaatagacaattatatcccatattgcatagttgactaacagataacaaattatatccgagagactcaactaaaaacacattagatatggagtgctcggatgaaatagcaattttacctaacccttttaccttgccttgattcccatcaccaaatattattgaatcttgggaatccttgttttgacgtacgagtgaacatcttcttctccaccgcatatggtttgtgcatcgctgtcataatctac

SEQ ID NO: 30528 - DNA, 440 bp, Zea mays
agcttctaagggagaacatgtaatatgtctaactaatgttactttcgaaaaagatagaccttgtgcagcttgtcaagcagggaaacaagtgggaagctctcatcatgccaaaaatgtgatgacaacatcaagacccctggagttacttcatatggacctctttggacccgtcgcctatctaagcatatgaggaagtaagtatggtcttgttatagttgatgatttttcccgcttcacttgggtattctttttgcaggataaatctgaaacccaagggaccctcaagcgcttcctaaggagagctcaaaacgagtttgagctcaaggtgaagaagataaggagcaacaatgggtccgaattcaagaaccttcaagtggaggagtatcttgaggaggaaggaatcaagcacgagttctccgctccctacacaccacagcaaa

SEQ ID NO: 30529 - DNA, 358 bp, Zea mays
ctcagcttgcaatcttatgccaagagctataatttttgagcgggagcagttggccagagagcgtgtcaaatgagtttgcggtatgaccgtatttatacgccaagtgcgttgaaaattgaaagaccccgcttgtcagtgaatgttgctattctagcaaagggaaggtgttttttcagaccttcggcgtaaagccttcgtccatgtcgcaatctaaatttattattttaaacaaattaatattgcgaggggctactgttgggggccttctgcttccgaaggtcctcaaaaacaggatttaacagtatttctggagtataatgtgtgaacaggtatcttcggactcaatgcggcatctcaa

SEQ ID NO: 30530 - DNA, 441 bp, Zea mays
  unsure (1)..(441): unsure at all n locations
agctttctcaacctttcttgttacttatttaatatacttcaatttttataattggctcaagtcataattntaaatttttcatacccttttccttattttcttgaattttgctcatggggctcacttagggtttttattagggttacaacattcttacctttttgaaggacccatttgctttggtcatgatacttttaagtatatgcttggtgaattctttattgcttaaattaatttgatgctcatgtttactttggttcacataaaatgatggttcttggtttggcattttgagagaaaccctangtgacactggggtgtcacaaccttccccccttaaaggaatctcgtcccgagattcgggccagagtcctcccagggtgaagtgaagggtgagacttataggaatgggtgattattgntattattanggtgaaactg

SEQ ID NO: 30531 - DNA, 333 bp, Zea mays
ggacacttaaaactaagctatcaatcgtagtgcacaagagctaatattggtgagcgggagcagttggccagagagcgtgtcaaatgagtttgcggtatgaccgtatttatacgccaagagcgttgaaaattgaaagaccccgcttgtcagtgaatgttgctattctagcaaagggaaggtgttttttcggaccttcggcgaaaagccttcgtccatatcgcaatctaaatttattattttaaacaaattaatattgcgaggggctactgttggggaccttcggcttccgaatgtcctcataaacaggatttaacaatatttctggagtataat

SEQ ID NO: 30532 - DNA, 419 bp, Zea mays
agcttgcatgacttatacgttaatgccataaatctgactcatcagaaaaattaacagaattcactagtttattacacacatcatgcagtgataagcgaaacaaacctccacagtcatatcctttaccaacaaaagtaccatgtttcgacacaacacatttatttgactcaagaacaactttgtatccatctcgacatagcatagaagcattaacgagattcttcttgatagagggcacatgctgcacgctcttcaatggcaccgtctttcgcgaagtgaacttcataatgaccgtaccacaaccaagaacatgagcacgcgacccatttcccattaacaaggcgccagacctcccgacctggtatgaagtgaacatagaggcatcagcacacacatgaatgtttgcaccactatccatc

SEQ ID NO: 30533 - DNA, 413 bp, Zea mays
  unsure (1)..(413): unsure at all n locations
agcttgaacacatagctattgtcttanataatacaggatgttaggagaaacttanggcgtgattggttgtcgtgctcaccccgtccaagctcatgttgtgcgttgaccgcatgcaaaccggtgattggttacctgaacgcttggatgccagcctgcgcgtgtagatgcaacttgggtgttttttcatgtgtctgcttgcgcgcgtggagatgtggggagagagcttccctatccgccatgccgccgcgagcctggcacccgcgaacatgccaaccaaacatgacattattgtatatgacatttagttatggttcatgtttgataccaattaagaaaaagccttaaatactcatactttatagtgctgacaaagtgacatatttctacttcataatgtcttttagtaaacatat

SEQ ID NO: 30534 - DNA, 414 bp, Zea mays
  unsure (1)..(414): unsure at all n locations
tgttaataaaagaacaaagagtggagaanttgtgttgactacaccaacttgaataaggcatgtcgaaaagatccattctctctaccttgcatttatcagattgtggactctacctccgaatgtgacttgctctgtttctttgattgctattctagatatcatcaaattatattaaagaacaaacgcctaatttaagagggtcgcttgaaaaatagtaactataggcaattagcatttagtttagtttttacataataaagctgatgaaaatctttgcaagtggagcacttaaggaccgcttgcatataaatctttttgcaagcgtccatccatagttagctgcttgcaaaaattgtctaatcatataacttgaaaactaactaattaatttattaaaaacattagaatttgatc

SEQ ID NO: 30535 - DNA, 425 bp, Zea mays
agcttcccgcccaggcacaatgttgttggcgctgcgctaacacgcaatggaccgcggtggcggaaactctcccttccgcctacggttcacttggtgactgggtactcgtcgagatggttaagggagctagagtggccgggttatataggggcagggcgagtccgagcggagcagcaacgaggatctctgccggggagcttggagaccgaatcgcggacgccattggccaaacctgcgatttccgcgcggactctgttctatgacgcgctctatcctgggggacgaagcgcttgaccacttgggtcccgccgaggaggtccgaatccggtggcgagggtttcatgcggtgataacggtgggcgagagagcgatatgcacgcggcgcctgtacgaacgggccgagcttcgcggagccattccatgcc

SEQ ID NO: 30536 - DNA, 410 bp, Zea mays
ctcgttacgaaaaacgatctagcaccgcgaaaggggctactgttgggcctatgcttcgtcgcccaatgtcttctaagaagaagcggctttcggctgaagctgtttgtataaaatggccgaagggtcctcttcataaagcttcggtattacaaaccgacctaaagatagaatgaccttttagtccataaaggtctgagtcaatgttgtaaacttttataaggggcatacttgtaattcctcacaggctgcgccctgtgcctataaatagtgaacagtattcctttactgttcaagcattctggtaattgcaatcgcatctttcggaatccaacctttaccaaagcagaggtattattgtattcaatgattcatcatatcaaataaatatagtataatataattcatttatg

SEQ ID NO: 30537 - DNA, 314 bp, Zea mays
ctctcatcacaccaaatatgtgatgacgacatcaagacccttggagatgctgcatatggacctttttggacccgtcgcctatctgagtataggaggaagtaagtatggtctagtaattgttgatgacttttcccgcttcacttgggtgttctttttgcaggataagtctgaaacccaagggaccctcaagcgcttcctcaggagagctcaaaatgagtttgagctcaaggtgaagaagataatgagtgacaacgggtccgagttcaagaaccttcaagtggaaaaagttcttgaggaggaagggatcatgcatg

SEQ ID NO: 30538 - DNA, 442 bp, Zea mays
agcttgcgtcttattcctggtcctatgtgagaagagaaggggcaaacgaggaagagggatcccgaaggtgagcaatgacgtaccttgaatcccggtcgctgagcggctaattcgcgcgatagatgatggcctcggagaagaagagaacacacgcgtcgcttggcttggatcgttgagttgtagtcgatgtgcgagtggcgagtgctctggaaagttctcgggtcgttgagttgtattcgatgggatgggcaagcagccacgactccacgagagatttggaatattgctagcgagcgctctggaaatctctcgggacgagcaccggaagtccgtgggccgttgcccctagaggagccaattcgattatagcttgctagcactagcatgtcattgtcatctcgaatcccacaatacgtgggttgttaggaattgtctataaata

SEQ ID NO: 30539 - DNA, 318 bp, Zea mays
gtttgaagcttctgctatgaaaatagttttttattgtctccgaagatgtctgaagataagaaggctgctgctgagatgaagctgagcctcgacgaagagaaaaacttggggtttcttatagcgatgtcaaagaccaatatagaaaaaatcaccaaggagattctggaaggtttgtctgaagatactggtgacagtgacagttatgatgtggacagtggtggtgaagactccgaagatcgtccctggcgaccaagccattcattttatggtaaatcaactatcaaagagaatcatctggtcaacatgagaggaaagtat

SEQ ID NO: 30540 - DNA, 427 bp, Zea mays
  unsure (1)..(427): unsure at all n locations
agcttctgacttgtgggcctctctgtgtgtccggtgcacaccggacatgcactgtttgatgtccggtgtgccaacatgggcgattctgacttctgcgcgcgcagacggcgcatngaatgcgcggcagagagccgttggcgcggagccgaccgttgtcctggagttgcaccggacagtccggtgcacaccggacagtccggtgatttatagcggacgagccgttggctgttcccgaagctggcgagttcctgaggccgacctcctttggcgcaccggacactgtccggtgtacaccggacagtccggtgaatgttaaccgagtcgcccctggaattcccgaatgtgaagagtttgagtctgagtcccctggtgcaccggacaagtactgtgcactgtccggtggcacaccggacagttcggtgcgcca

SEQ ID NO: 30541 - DNA, 410 bp, Zea mays
tcatattcggctgcgttgttagaggccgggaatatctattggagagcgtacttaatgtgttcgcctccaggtgcagtgaagagaattcctgctcctgctccctgcagcttcaacgagccatcaaaatacattcgccatacttctgcgtgttctggattatacggcacttgctgttctgtccactctgatacgaagtcgaccagtgcttgtagtttgatggcagtgcgaggtctgaactcgatatcatgggaccccatctctcaagcccacttggctattcggccaatggcttccttgttgtgaagaatgtcccctattggaaaaccagtaactactatgactttgtggtgcgcaaagtaatggcgcaccttgcgggcagttagaagtaccgcatattataagcttctaaa

SEQ ID NO: 30542 - DNA, 440 bp, Zea mays
  unsure (1)..(440): unsure at all n locations
agcttgcgacattattactatttaaatggtctcgngttgnccgaaggacacactctaggtcatcatatggatgcaccacggatccatatcaagcgttaaatgtacatacaatctctataatggaccacacacgttcttttgaaaacaattcaaagaacttaaccaattcagattagattctaggataagagggacttaaaatctcattcccgatgatactcatccagtatccatcttatgggaaaacatgaccaatagaaatatccataacttttcatttcatcccaacaattgaatgaccatttcaatcttacccagcatggtaagcatcatcacatgaaatagtataacatatacaacacattgtatgggaggatgtatgtacaatacaatccataaaaatgtttccgagatacacatgcaatatccatcactatcac

SEQ ID NO: 30543 - DNA, 346 bp, Zea mays
catgcatggaagcaagttgttttcatcatccacacagaacatcttgacaactgacatgccactctagctcctacacatggacctattcggcccgatagcttacataatgatcggcgggagtaagtactatttaggttttgtggatgactattctcgtttcactcgggtgttatttttgcaagaaaaatctcataacccaaaaaccctgaaaggattcttgagacgagctcaaaatgagttcggcttatggatcaaaaagattagaagcgacaatggcgcggagttcaagaactcacaaatcgaatgctttcttgatgatgaagggattaagcatgatttctcttct

SEQ ID NO: 30544 - DNA, 433 bp, Zea mays
agcttattgtagacttattctactcaagaaagtaaaggctaagtcattctatgtcagagatctagtttgaaagacaattttccattaaggagtagggactggaagtttggtaaatgcttcccatgctgggaagggccctacaaaattacacaaggtactttctggttaaacattaaatgactattttctaaagcaatatcatcctagtgcatgtcaagatgcttataaaatcgatgttctcacatcgagttgtattgtgccagcgcttttggctagctaaactccaccaaaaggcaggagacatgtgttgagcaccatactatgcaccatgatggccggatggtccacgccccatacgatctgtggggtagcccggatgggctgtgattatattaatttaagcgagaggccttatttctttcatgaatatcct

SEQ ID NO: 30545 - DNA, 390 bp, Zea mays
tgcatacactgacaatctatagccttctttttctctcctcatatgctcctcatgctcttgctcattctgggaatatataagaatgtcatcaataaacaccaccacgaacttgtcgaggtagtccatgaacacactgttcatcaagtacatgaagtaagctggcgcattcgtcaaaccgaatgacataaccgtgaactcatacagtccatacttggtgatgaatgtcgccttcggtatatccgaatgtcggattctgagctaatggtatcctaacctcagatctattctatataacacactgccttctctcaactgatcgaataaaatcccaattatgggtagggggtacttgttcttgatatgaacctcattcaatgatctatagtcaat

SEQ ID NO: 30546 - DNA, 441 bp, Zea mays
agcttggagatggatcttattctaattgtaacgcggagcgaagacaaacagacacaagcaagcaaacacatatatgcataagaacattacaccatacaaatacaaacataataaaatatgcaaaacaaaatagagcgcgttaaaacagtcacgcgaggaaaaagaagtgtcgaactcgaagcgtcgatctggaagatatcgcgtttacgctacataaatattaagtaaaacatttaattcgatatgataaaatataaattataactgctatttagatctaattaaatccgctacgctaacagctgtcaaataaattagtaatttaattaacacaagagattctaagcgatgcgaatggacgatgcacgaaacaagacgacagcgtgcgaacgacgcgcggacacgcgcgacatcgcacgctgatgacacgaaacagcgcgc

SEQ ID NO: 30547 - DNA, 278 bp, Zea mays
atgagtcgattcacattatattatcccatgctgttcaccattccatcaagatgtctcaaatggacgtgaaacacacctttctcatcgggccaatcaaggaggatgtatacatggtacaaaccccctatcttcgatgatgacaggtatcccgaccatgtttataatctctttaatgcactctatatgcttaagcaagctccaagagcatggtatgaatgccctatagaatttcttatttctaacgctatcaacgtcgggaaagttgatcctactctttt

SEQ ID NO: 30548 - DNA, 434 bp, Zea mays
  unsure (1)..(434): unsure at all n locations
agcttgctctcattctcccgtaaatagccaagtttcctcatcataaccatgtcatcctctgttacagtagatttcccaaactcaatgtggctaggctttgttggactcagaatattgttatcttcttcactttcattgatactttcgcctctagctacaatctgttcagcttcggtattggaggcaccttcggcagcaacttcctctaacacaaccagatccgaccgcttcatcacttctgaacatgttgctgtttcggcggtttcggtctcctctccttcatgagataccctagcagtggatcttaccctgaccatttgtgtgtttaagttctttgagccgaagctgatcccaggtgactaagcgctcgcttgaaaatgcaacgcaagaaactttggctgtggctaanatttttaacagcacaacaacgtgat

SEQ ID NO: 30549 - DNA, 394 bp, Zea mays
tatgaaagatcttcattccaacatgtgctagtctacggtgctagagcctgccttattcttagcgataatcatgcatctagatcgacattctcttttgataaatcaactaagtagagcttgtcatctaatacacccttaaaggttaatgaaccatcacttcttctatagacagatacatcaatattcgtaaataagcaattataacccatatgacataattggcttacagacaataagttgtatccaagcgattctactagaaacacatttgaaatcgaatgctcagttgtgatggctattttgcctaagcccttaaccttgccttggttcccatctacaaagatgatagtgtcttgagaatccctgttcttgacgtaggaagtaaacattttct

SEQ ID NO: 30550 - DNA, 281 bp, Zea mays
cctttttgctcacaacttgacttggcgcatactcgtcacaccctacgtactgacttgcgtgacggaagtgaacccactagtgcatgtaacctacgtctctgactggatcttctggtggaccctacttgtatcaacttaccacccaaagtcatcgatctctggctcaataacttgggataacaataagttctacagtgtcacatcacatgggatgaacacctctaagcacttaccgggggagataggctaaccactctgcaacacctaaagcaatggggaac

SEQ ID NO: 30551 - DNA, 406 bp, Zea mays
tcttcgggaactgaacagttctgtctacgttgtcatccctcataatatacatatctcgaaaataccttcctctcatattatcaagatgactctgtctgatagtcgatttcccaaaaactgcatgacttggtcgccagggccgatcttcggagtcttcgcccccactttccgcatcataactgtcgctgtcacatcagtatcttcagataagccttctagaatctccttagtaatcttttctatatttgtctttgctattgattcaataaatccagcagtcttctcctcaaggagcatttcctcttcgctcagcttcgtctcagcaacaacattgttgtcttgtgacatcttctcttcggaaatggtgaaaatatgtccttaaagccgaaacttataaagtctaaaa

SEQ ID NO: 30552 - DNA, 356 bp, Zea mays
gcttgttaaagatatgtattctctgttgaatctaatcatcaatgagctcaattctattggcattaataagctaggtgatgcggacattgtgaggaagattatctcccgactaccataacaaagatatgggagcatcattaccattcttcacaacatggaggacttgagtacaatgaccctaaccatagtgatcggaaaaattgcggcatttgagatgtcaagaaaaatgggtcgacaagaggagccaacttcttcaagaccatatgcttttgcatgtgatgaaataaaaggcaaaaagaaggctcccactccaagttcctcaagtgaagaagaggaggaagaagacagtgatgatg

SEQ ID NO: 30553 - DNA, 321 bp, Zea mays
ttcacgccttttatataaagccgctggttcattgtgctaaatgatatcaattaaatggtatatcaattctataaattggatatagccataaataaatcagcaaaattcttttattttagatagaaaaaatgtttcttctatctaaaataaaagaatgtacccttctatccaaatccaatttgcatcgataaaataaatccaaattccagattccagcagtagatgaataattgcaaatttttgtgtgtacgacattagaataacttaaaaataactgacataattgtttatttttcctgatcagaataatacatgaaaaag

SEQ ID NO: 30554 - DNA, 405 bp, Zea mays
  unsure (1)..(405): unsure at all n locations
agcttgccgacctgtgctactagatgagcgcctataagtgcaaggagaagattgagaacgtgcacaattactacaagcgcacaaaggaaggccgcgccggcaggcacgacggcaagagctaccgcttcttctaggagctggaggcgatgcacgcagccgggccgcaggcgacaccacatcacttgccggcaggcagcaccgccccgcagttagacgccctcgccgcgccagtatccccgacgccccagcagcaggtgccggcatncagcgccggcccgccgttgcacgccttccccgcgccaatatacgcgccgtcgccgttgagttcaatgccactgctgacagggccgatgcagccagcacccatatcatctgcggccccaaaccccgcaccggaggatctgc

SEQ ID NO: 30555 - DNA, 384 bp, Zea mays
gacctaaacacatggatattagaaacatctgtttgtacacgatatggatctaccatctcatggcagtggttaccccttaatggctaagaaccatgcacgcatgtgcaaatggcgagctccatgagcacatctccagtgagtcctgctgatagccattcatatttaatcctaaaacggaaactctcatttatgaaaacaaacttctgcatttccaccaacatgcattgccatgtctgtagctgagcacatttgcgtacccctatcggctacacattgaaccatggaatcaatgaatacagctagtgacccatagggatcaaggtcaacctgacccatcatgtacatgacattaagacataatccaaataatgacaacccatatta

SEQ ID NO: 30556 - DNA, 251 bp, Zea mays
  unsure (1)..(251): unsure at all n locations
ccatatgaagatatgggtgcttcgtagctcatcanaaactgcttcggatttgaatgcccatcatacatggggagctggggtggcttgtatgatggaggccatggtgtagcctcagttctgctgacagaggagaagcatcatcaaaagcanaatttccatgatggaaatcatcataccactcgtcatcatcatatgaattgtcctggagaagctctctgcgttgaagtcgtcgggcctggtcatcttgggtg

SEQ ID NO: 30557 - DNA, 403 bp, Zea mays
  unsure (1)..(403): unsure at all n locations
cgtagagggatttactaactttcccaaaaatggtatttgtggtgttacataaacccatttatagaaatatggtttagttaatacttgtaacatagattataccatattaaattagttagggtctagattggattggatataactagattagactagtttaagctagatagatctaccagggtagggtataattattagaatatgttagaatcctttctgagataggatggattatatagtgtaggtagattataatctctatcggttaaaacacagggggttatgtaatccacggatggttaagaaattgcatatggtcaggttggactaaggctccaatttatatgaanacataattgtcagagtatgatccaatcttattttaccagtattatctaacatg

SEQ ID NO: 30558 - DNA, 447 bp, Zea mays
  unsure (1)..(447): unsure at all n locations
agcttgtgaagattcttcattccatcatgggctantcggcgatgccagagccaacccatattagtcttagaaattaagcaagtatcgagttcagctctgttaaaatcaactaagtatagctgaccctctaatactcccttaaatgctactgaatcatcacttcgtctaaagacagtaacacatacatctgtaaatagacagttgtagcccattctgcataattgagatacagaaagcaagttataatctaaataatctacaagaaaacattggaaatagaatggtcatgtgatatagcaattttaccaagtcctttgaccaaaccttgatttccatccncgaatgtgatagctctctggggatctttgtttttctcgtaagagaacattcttttctcccctgtcatgtggttcgtgcatccgctatcaattatccaacttgagctcc

SEQ ID NO: 30559 - DNA, 416 bp, Zea mays
cttgctagtgtgttattcatatgcttcctgcagtatatttatgttgcatcatatggactagtgcttccgttgctatgaattaaatggcatctattgtgttcattctgaaatagatagtcatgtggttaatggtgcttttaagattgctttcaattagtgtcttagtttgaattggtatcttaatgatgaatagtggtaggttgatatttctgtgatatatccactaaattgaatggtgtttaactctgattatgtgcatttgtgtgttatagcatcatggtttgattcttgccacaatgcatactaaaaagtgctaatgtgtagaaatgattctatttgcctaagtatgtgcacattggcgtctgatgccaaattatgtttttgaataagcacctattaggggacattcctatatc

SEQ ID NO: 30560 - DNA, 396 bp, Zea mays
gtgccttcgcctcagtgtaccacccactatccatctgcgtcgtggagcgcgccaatggcaagattttcacggcaatcaagaaaatgctcctcgacgacaagaagggtaaatgggccgacctgctacctgaagcagtctgggcactgaacacgaccgagtgtcgggcgaccagattcactccctttcgcttgctatacggatcggaggccatgaccccgcatgaaatgaaacatgggtccctgcggacaagcgcttcatcagtacccgacgtcgatgagctaacctccaaagatctcatcgacggagaccgtgtctttgccctccatgccctcaacatataccaagcccaaacgaatgcctggcgtgaccacgcagtcgtcccatgagaattcaacg

SEQ ID NO: 30561 - DNA, 124 bp, Zea mays
gtctttgaagtcctggctgtcaaattgtttggtcgtgtcaactgtgagctcggatggaactccgaatcaacaaacaatgttttgccagaaaaattctgagcaggctctatgttatcgtggatac

SEQ ID NO: 30562 - DNA, 392 bp, Zea mays
cgaacatgccatgttgtcatgttattatacaatcagaattatttatgttattacaattagaatcatttatgtttacaatcagaatcatatttacatgtttgcactatggtgaaggtgacgaagagtcaattgtgagccttatttatgtgattatatcacttctatgacaaaccaacttctactttttccaacgtgattgccctggaatccacagttgttgcaagtaggaatatgccaaatcgatcccatagacttgctatcaatgatttcaagttgcttggtcgcctgttcaaaccatgggaccgactaggcgactagtcgcgattatgcgatgactatggcatttattcgacccctatctgtccctgttcgtcctataccatgtatattat

SEQ ID NO: 30563 - DNA, 379 bp, Zea mays
  unsure (1)..(379): unsure at all n locations
atgtctgaagctgctcataaagctgctgctgagataaagctgagtcttgatgaagagaagaacttanggtttcttataacgatgtcgaagaccaacacagaaaaaatcaccaacgagattctggaagggctgtctgaacatactggtgacagtgaaagttatgatgtggacagcggtggcgaacactccgaacatcgcccctggcgaccaagccattcattttacggtatatcaactatcaaagagaatcatcttgttaacatgaaacgaaaggtatttcgggatctgtccgtgtgacgggcgactacgggatatacttgtcacaccccgaagagatgaagtcgagtgatcgaactttttgaagctggctgagatgcct

SEQ ID NO: 30564 - DNA, 360 bp, Zea mays
tcagtaacccataaatggctaggatcctatcttctgcgaagttgataactttgacttcgtctgaggtatcataaatggagggggaagcaccatataccattgttgtggcatcaatttctgaaatgacaaaggcgtcagtcgaatgtggctgaatatgaagtcgcccccgtagagagtgcctttgatgctgaagatgacaatactgaagatgatgacattgtgcttcggtcttacataccaagccatattgagtttggaaaatccactgtatagcctgaggatctggtcgtcttgaataagctcgggtatattggtgaaaaggacgatgacatgaattgatttgctggggcgaaaccattc

SEQ ID NO: 30565 - DNA, 433 bp, Zea mays
  unsure (1)..(433): unsure at all n locations
agcttctaaagggagaactcattntatgattaacgaatgttcattctgagaaagacaggatttgtagcgcatgtcaagcatggaagcaagttggagtccatcatccgcacaagaacatcatgacgaccgacaggccgcttgagctactccacatggatctattcggcccgattgcttacataagcatcggcgggagtaagtattgtcttgtaatattggatgattattctcgcttcacttgggtattctttttacaggaaaaatctcaaacccaagataccttaaagggattcttgagacgggctcaaaaagagttccgctcaaggatcaagaaaataagacgcgaccacgggacggagttcaagaactctcaaattgaaagctttcttgaggaggagggcatcaagcatgagttctctttctcctacacgcc

SEQ ID NO: 30566 - DNA, 433 bp, Zea mays
  unsure (1)..(433): unsure at all n locations
ctaaaagtgcaaattcattcgtaggcggtcgttcattntaatgcaaataaacaaagatttttgtgtaaagattatgggcaagcccacaaatgtcaatggttattgctgtaaagcacgcacctacccatataccctaacactataatgagaaatacaaatggcatagtggacatcaacggtccataaacttatctttatgtgccacccttggtcctaaaccttcaaaatgcaacgtacttatgcatgtttggttgcctacctcaattaccacactttgtctaactttctacctaatgtagttatcaattcgaacgactaaccttaaaaatatgtggccatttaccacaaacaaacatgcctacttgtccattaagccaaatatgagggaaatgattgtcttatttttccacaaaaggcttgcattatttatcaa

SEQ ID NO: 30567 - DNA, 327 bp, Zea mays
tattcaaggtttagatagaactaaagtagattaatcaatgaattgattgatgctttaaatgaaaagaatagactcttagaaaagcaagaagatattttgtatgaagaacatgataagtttattagtgtacaaaaatctcttgctttagagattaagaggaatgaaatgttgtcttctaaattatctgcttgtcatgaaactgtgtctagcttaaagagtattaatgatgatttaaatgctaagctagaagtagttaataaatctagttcttgtgtagagcatgttgtcatttgtaataagtgtaagggatttgatgttgatgcatgt

SEQ ID NO: 30568 - DNA, 413 bp, Zea mays
  unsure (1)..(413): unsure at all n locations
agcttaaagtagtatngtatttactcacaatataagtttgttgtgtaagattcacggaactatctagtgcattaatgataatagctatcacattactgtaaagttagacggatccaataaagttcctgtcaatacttacacaatacatatttgcttgtcattgattctaaatcatgtcacagcttttcatctttgttctatggtctcaataaattctcccttttcttctccaggctaagttggacatacttgtaaacccatcgaagactgttgctgactatagaacacacatcacgtgggtttttaaaaggttataaagggattcacatcactcattacttgatgttcaggtatattgtctctaacctatatgtattgtctatgaatatataatctcatggaaagtatattcc

SEQ ID NO: 30569 - DNA, 362 bp, Zea mays
  unsure (1)..(362): unsure at all n locations
tgaagccatggtgagtagcgtacgctaataatattcgaattgactcaatcctagctacgggtgcatatgtttcaccgaaatccaaaccttcgacttgcgaataacccttggccacaagtcgggctctgttccttgtcaccacaccatgctcattttgattgttgccgaacacccacttggttcctacaacattntgattacgacgtggaactaaatgccatacctcgttcctactgaatttgatgagctgcctttgcatcgccaccacccaatacaaatcttggattgcttgctctaccctgtggggctcaatagaggaaacaaaaaaataatgctcaacaatatgggcaacgcgagatcta

SEQ ID NO: 30570 - DNA, 428 bp, Zea mays
  unsure (1)..(428): unsure at all n locations
tcaagctgacattgcctccttgttggaagccaatgcaatccttaatgccacggcgtctcccattatagagcatgctcctagcaaatntaaatttttcattttctatctcatgctcattaattttactagttatttgtgctatgtgatcattttgttctttaattaaagctaggtgatcatgaatagcatcaacattaatatctctacatctagtacaaatagtgacttgatcaacactagatgtagagggtttgcaagattttaattcatcaatcttagcatgcaaaatggcgttctcatttctaagattggaaatagagatattgcaaacatttaaatctttagccctagaaattaatttgtcattttcaattttaaggctagaaagtgattcattctatttatcaatcttagcaattaaactagca

SEQ ID NO: 30571 - DNA, 398 bp, Zea mays
agttgtggagcgcgccaatggaaaaatcttcacagccgtcaaaaaaatgctcctcgacgaaaagaagggcagatggaccgaattattacccgaggcggtctgggcactaaacacgactgaatgcagggcgaccgggttcactcctttccgccttctatacggatcggaggccatgaccccacaagaaataatacatgggtccccacgaacggctccgtcagccgtccccgacgtggacgagccaacttcaaaggatcccatcgacggagaccgagtcttcgccttataggcactaaacaaataccaagcccagacaaaagcatggtgcgaccactcagtcatcccgagggagttcagcgaaagagacctcgtactcgtccgaacagctcggacagagt

SEQ ID NO: 30572 - DNA, 397 bp, Zea mays
ctcctgcgcgttctctgctacggctgctcctgtacgctcgtacaacagcttgccaagtccggcctctgcttggatctcgtctgtgccatggagctctcccctgccgcgcccagtccaagctcctcccctgccggcgtccagcacccggccggatctctgatggcgcgcgtgcccttctcttggcggcgctcactttctgcttctctctgtctctagctcgccgcagtgcttttcccttgctcccatggcgcgccggccgctcctctctgcccagcataacagcttctttctctgcttctcccagtcggccgaggccccgcccgtccgtgctccttcttctagctccagctcgcggcgttccctctgctgagccatggctgtcgtgcctccgctccct

SEQ ID NO: 30573 - DNA, 367 bp, Zea mays
  unsure (1)..(367): unsure at all n locations
ttcccgagcttcaattttagcatccatgatggttggtgttcagaacgcgatcanccaggtcattctgccgccgtgaccatgaacatgctccaattatggttgaatccttcaaattaagtgagggcttttgaccggatagactggcacacaacatctatgtacttattgactcttgttcgggccacccctgccgtagaattgcggctccagcccggtgctcgacgcggttccgccatggacccaacatggtgaagaagcaaaaaggaagggggtttttcgcaaaggtcagtgagatagtaactagtagccatggtttcttcaccaattatttaaataaccatgtgtcttcacgcaaaaaaactgacat

SEQ ID NO: 30574 - DNA, 319 bp, Zea mays
gtactggttattcaataatcactacctggaccacggcatcatgcctggactcataattaaccaatctgacacccaaaggacatgatgttctctccagaattaaatattcaacaacctgaaaaatgtactcttgcagatgtagtatttatctttggaaaatgtcagctttccattaattataagttgcaacaactcacctatgttcttttgagtatttggttgagtgggtcttccatacctgcaagagtgcgaatggatttcgcgaggactgatatctgtaacatgatgaaatattaacgcgaatcgtatgaaaattaca

SEQ ID NO: 30575 - DNA, 438 bp, Zea mays
  unsure (1)..(438): unsure at all n locations
agcttcanaattgtgggtatggatgcttgaatggtcagacatnttcgaagagtaatctgcttgctgcttacgatgaataacgtttgataacttgctcgacgtggccagttctggcatcttcctgtacgaactataagagctagtttagcaacctattttttcaattgattttcattttctaaagagaaattagtttattttcttttagtaaaatagaaatctccagagaaatagggttttcaaactagctctaaaaaataactgtgggaactatattttcccaatagattgttatttttctaagaaaaaataaactaatttttcttatagaatagacatctcttggaaaaatgggctctcaaactagacctaagatagccctaagaggaattatggtanatctcgcaaattaatacggtcatagctcanaataccctg

SEQ ID NO: 30576 - DNA, 380 bp, Zea mays
  unsure (1)..(380): unsure at all n locations
gcacatgcatgtctagaattccagatgtcctcgtttcaagctctntttcatatccttgtcaatgaagccttaacctattaattccccgggtttcctggagatctaaacatttttgtttctcatactagcttggtcatgttttttttcactacagtatgattcaattgcagagttcgttcttgcgtcaagctggttattaaatattcacctctctgttaattttttggttttgtctactatttgttgcaagcaatggaactgcactcgtgctcttcctctccccagtgtaagaatcaattcattcattttgtctctcagtacagtaagaaacaaaaataaaaataagttttaaaaaacatgcaacaatataatcatattac

SEQ ID NO: 30577 - DNA, 449 bp, Zea mays
  unsure (1)..(449): unsure at all n locations
caagcttgtattacaaaaatatacatgttatgacaaggattaataacttagatcacctaggtgtgcctgcactgggcactggcggcttgtgcagagcagcgcagtggggcttgcgcaagagagaggagggggccggcgccgtgggtttgtgtagggatggcaatcgggtgggtagaacgcggatatatggttcgcgtatccatacccacgagataaaaccaaacccatacccatacccatttacgctcgtgggtacggatctatatccgtacccgtacccgccgggtatccgttatccaacggatatccattacccgcccgtccactaaaatttcagcaacattccaacaacattctaacagaaatntatcacaatttaacattcctacaacctcaaataataattttagcaccaaacaattattctgtccaaatccctacaagcaatt

SEQ ID NO: 30578 - DNA, 404 bp, Zea mays
tgtgatatataaactatcgagaatatcaaaacaattatcgttatcaatgccagctaatatcaaacagtagaaaattattgggacttaactctcgcaaatctgtattttttcgttgtttttaaaataaatgtttgcttgtaggttaactttgaaattatggcatttttctggaagcctgatattataggacgacatgtgtttttatttttctcccctgaataacttgctaactaagggtgtgtgttttgctgttatctccttgatttggttattactgtgtactatttagcaatcggggatattttaccctttgtctcttgtttgggtaatggttgttactgtgtaaaatataatggctgtccttttgtcgatgttatggctttactgtcaagatgtacatgaac

SEQ ID NO: 30579 - DNA, 271 bp, Zea mays
catgaagattcttcatcccaacatgggctagtctgtttgccagagccaacccatgttagtcttagcgattaaacaagtgtcgagttcagctctatcgaaatctaccaagtatagctgaccctccaacactcccttaaatgctattgaatcatcaacttcttctaaagacagggacacctacatcagtgaaaagacagttgttacccattttgcataatcgagatacagaaagcatattgtaatataatgaatctacaagataaacattgga

SEQ ID NO: 30580 - DNA, 445 bp, Zea mays
  unsure (1)..(445): unsure at all n locations
agcttatgaagattcttcattccaacatgggctagtcggcggtgccagagccaacccaagttagtcttagcaaccaagcaagagtcgagttcagctttatcaaaatctaccaagtatagctgaccctctaacactcccttaaatgctattgaatcatcatttcttctaaagacagtaacacctacatcagtaaatagacagttgtagcccatttgacacaattgggatacagaaagcaaattgtaatctaatgaatcaacaagaaaaacatttgaaatggaatggtcaggagatatagcaattttacccaagcctttgaccaaaccttgatttccatccccgaatgtgatcgctctttggggatcttggttcttctcatatgaggagaacatccttttcttccctgtcatgtggtntgtgcacccgctgtcgagtatccaacttg

SEQ ID NO: 30581 - DNA, 437 bp, Zea mays
acgtacactataaaactaagctaaacttgtttgcatgatcactccttcatgtttcaagttgggtgctcgataatgaatgtataaatcatatttggagatagtagcaacggtggtaacaactgaatctcaagtgcatattattttcaaatcttatctcttttgtgacttgtgtagccacaaaggataaagaaacacttgacgataatcatcactcgttgattatgaaataaaggtccaattggaaaatgaatgaatattatcatatggtcaacaatccaaaattatgtgacgtattctctatctagttaatatggatttgattcttctatattagacactcaccataatatggattaagtcagccctttagaactcattgaacaaccatgcatattatccatgtcattcaaaatatattgggcatattggctcgaggg

SEQ ID NO: 30582 - DNA, 430 bp, Zea mays
  unsure (1)..(430): unsure at all n locations
tattgtctccagcacatctagtacactagccatcctttttctcttgtgggtcgctgctagacctttttgtgtctttggcacctccactcttgccgaagggcttagaacttctaatgttttcgtcccttcgatcctcggttcttcaattttgtcagtcttcggcattgcagctggctcttcaatcctccgtgtaagagcaggtcctttggcttcaatagctgaagaagtctcaccgccaaattcaggcactatggccggttcaatgtatcgcggtcggtgagtaaagaccttcaattttttgctcttcggcgcaggctcgcttggagcagccgaagcggcaacctttccagaagttgcaccctttcttttctgccctcgtggcaggtagcgatagtcatggtacacanaacccatatcataaaaaactcta

SEQ ID NO: 30583 - DNA, 371 bp, Zea mays
  unsure (1)..(371): unsure at all n locations
actcagcttctncatgcgtctcgagcccgcctccgctctctggcccgggccttctccgcgtccttcttcttcttcttctcctccacggcgacccgccgcgctgctcggtccaccgcatcctgcgggacccgtggcatggaaggcttgtgccaccccacctcctgaagaatggggaaaaccccaaccgtaagaaccaggagcaacccgatgcaagatgaatgaagaagcggacactcaccatagtcacgcacccctggtctgggcgcatcaaaagctgggagtaggcggtggggtccggcttccccaacacgacggacacccgcccgtggagggcgtcgaatggaagaggatcagatgacattcgcgagccc

SEQ ID NO: 30584 - DNA, 467 bp, Zea mays
  unsure (1)..(467): unsure at all n locations
ctcgacccggatctctaagcacctgaggctcaagcttataatattctagtcattcgctntagatcccacggtgagtagagcgtacccgttcacaatggctaggttataattgtggccctcggattgatcgggcgacgagggattgaggataccccttcgccacgtcctttttctaaagagtccctgcagtccactaaaattaagccgccatccatagatgtggtaggatccttacaattcagtccaaattgttttaatctcaaatgtcacacctggttttatagggcaaaccgaatgtgaaccatgtacgtgctatgatcagaaactcacatacacagttattacataattggacatcatcacacattactcaaagtaaatagcggaaagatactctattgcaataagatgtacaagacatccacagagtctaatacatagcctgtgatagaacctcccaagtcact

SEQ ID NO: 30585 - DNA, 338 bp, Zea mays
  unsure (1)..(338): unsure at all n locations
tcaaagccttactcatcaataaactctaccaattaacanaagctagctgcaaaatctaaaagtttaaaaatttaaaaggtcaaaggggcggacataagagtttataccttaaaatttgagtagaataagctcccagtaatgtgtcgtcttctatagttactgaagtctcgctcaagcttcagaaatcgaatagtctttgataaagtattaacaatctttgctccggcctggtcaggaatacaccccagaatctcttcgtctacaccgccaaatagcacagatctgggcttatatccgccatcaatggcgaattatttcaattcaaaaatatcatcatc

SEQ ID NO: 30586 - DNA, 326 bp, Zea mays
gcctacacctttctcctgatcattacctcttctgcggcatgtacagactctatgcaaggtcttgggcttccatatggcctggtatcatgaaagaagtcacccagaaatttcaagaccagaatgagtatgttgatccagtcatggtccacggacatctctgcttggcacgagagtcgcaatatatatccgggccgtcaacggtctcttatatgggtcaaccgcggcagggaagttattgaggatatggagtggatatgggatctgatcttgatactgcttgacaggtttgtgatgggataatattatgtggcgtattccacgtgcta

SEQ ID NO: 30587 - DNA, 341 bp, Zea mays
tgtcgagaccctcatcggtcagaaatacactgtttcgtgctaactgctcgagaataagctcttcatcaaagtctcccgcttgtgcgcgacgagccatcgcttgattcctggcatcttacttatccactggtggtgctgatgagccaccaaagttgttcaactgtagctagtcagtaacttcaccacatcattgactcgggaacagtacaccgtgaagattatggtcatttgcaaggatcgagttcttgagttcatgtactctctcttcccgctctaatgcttggtaacctagtattatatatgcagctgtatcttcagagaaaactgctgtctcatacaat

SEQ ID NO: 30588 - DNA, 425 bp, Zea mays
agcttatgatttatccaatttataacaagcaccatctcttaacataaagtttctatggataaactcaaaacaagagatggcattagtagcacaagcactagtttttttatttataaaccatttatatgaggaaggcaagtgagttgctaaaacagataaacctcataatatggactaagtttgccttgaaccctcatgcacaatatattttgaatgacgtggataatatgcatggttattcaatgaagtctaaagggctgacttaatctatattatggtgagtgtctaattataaaagaatcaaatccaaattaactagatagagaatacgtcacataattttggattgttgaccatatgataatattcattcatctttcaattggacctttatttcataatcaacaactgatgtatatcctcaa

SEQ ID NO: 30589 - DNA, 442 bp, Zea mays
taaagccatggtaagtagcatatgctaataatatgtcgaatgactcaagcctagctacgggtgcataggtttcaccgaaatccaaaccttcgacttgggagtatcctttggccacaagacgagctttgttccttgtcaccacaccatgctcatcttgcttggtgcggaagacccatttggttcctacaacattttgattatgacgtggaaccaagtgccatacctcgttccttgtgaaattgttgagctcctcttgcatcgccaccacccaatccgaatcttgtagtgcttcctctaccccccttatgaatgtcgccgaggatagtgtcgacggggtgatctcgttggattgcttggtggactctttgatgtggcgggcttggttcttcatcccccctggcttcatcatttgcatcttccccttgatcattgcgcgcttttt

SEQ ID NO: 30590 - DNA, 431 bp, Zea mays
  unsure (1)..(431): unsure at all n locations
agctagtgaagattcttcattccaacatgggctagtcgcggtgccagagccaacccatgttagtcttatcaattaagcaggtgtcgagttcatctctattgaaatcaactaagtatagctgaccctctaacactcccttaaatgctactgaatcatcacttcttctaaagacaataacacctatatccgtaaaaagacaattgtagcccattttgcataattgagaaactgaaagcaagttataatctaaggaatctacaagaaaaacactagaaatagaatggtcaggtgatatagcaattttaccaagtcctttgaccaaaccttgatttccatccncgaatgtgatagctctttggggatcatgggttttctcataggaggagaacatccttttctccccagtcatatggtttgtgcacncgctatca

SEQ ID NO: 30591 - DNA, 377 bp, Zea mays
tgtgaagattcttcatcccaacatgggctagtcttcggtgccagagccaacccatgttagtcttagcaattaaacatgtgtcgagctcagctctatcaaaatctactaagtatagctgaccctctaacacacccttaaatgctattgaatcatcacttcttctaaagacagtgacacctatatcagtaaaaagacagttgtagcccatttgacataattgggaaacagaaagcaagttgtaatctaatgaatcaacaagaaaaacattggaaatggaatggtcaggtgaaatagcaattttacccatacctttgaccaacccttgatttccatccccaaatgtgatagctcgctggggatccttggttttctcatat

SEQ ID NO: 30592 - DNA, 426 bp, Zea mays
cttatcagtcagccttctaacacatccagccccacgtcattttaagattcctagaataagttattgtcaaaatactgaagactgcgcagaagtcaaacagtcacacggaaatcagctctgcagatctcctgaagaggctccttcacattagcacgtgaaaatacttttgtttcgtgtttatacctcgcttaggctggttgttactagtataaataccccccccccctatgtctatgatgtaaggcagcttttgattatctaaaacagaacccctttgttcagttgtgtactaacaaatattgagagagatctctacccctttgctcttgtgaattccttcgcgggattgcagaagcggcggcttcatccgctcccaagtggtgctcctactcccttcgaagtctcctcgatagattgtaagctgtg

SEQ ID NO: 30593 - DNA, 335 bp, Zea mays
agcaaattataacaaccaaaattgtcatgcaatccatcttttctagccttcgtctgataatgcagttcgtgaactcgacaaaaactgtccgcaaacggctccaccgcttggcttcggagggcccagatataaacgctaagcctaacgatagcgttaggagtcaactgatgaaagtagataccaaacctcttcagtacctctgcaataatcccatgtagggggaatcttaatccagcctttagaaagctcttgaaaatgacaatttcatccttctccggctttggggtagtctcttctcccacaagcgtaatagcttcttctgatttcattgaaaa

SEQ ID NO: 30594 - DNA, 361 bp, Zea mays
agaccataccggtgacttggcccttcccatgcgggggactggatatgattggacctttcaaaaaagctcaaggaggatacactcatgtactggtagcaatcgacaaattcaccaaatggatagagttcatacccattgcttctttaacctcaactaaggccgtggaattcatacaagacataatattcagattcgggataccaaacagcatcataactgacctatgatccaacttcacaagttcagagttcttcgatttctgcgagcaaaaaagcattcagatcaagtatgcttctgtagcacacccaagagccaacggcaggttgagcgagccacaggatgatcttgatgcactcacgaa

SEQ ID NO: 30595 - DNA, 89 bp, Zea mays
tcacctgcatgcatgcaagctttgtgtggagttgggttatgtattcatctcctcacgtgtgctctaaagatgaatgctattacctcttg

SEQ ID NO: 30596 - DNA, 367 bp, Zea mays
aactgtacgtttgcgaactctattatttatccctttccaaattatactctattactactttgagcacaggaaatccatttcattctgaaaggaaacttactatggcccgtttgattcctttagttcatggaataaaatttagctatgagactaacatttaatctctacctttttggttctagggactaaaaatattcaaaacacatttaatgaatcataaaaggagcaaaatatctcttattattctcattagtgcaactgaaataaaagacggtcaaaagtacaatttatatgatttagttcattttatgcactcattaatggcctagagactaaaatattttaattcctatcttatttctatcat

SEQ ID NO: 30597 - DNA, 409 bp, Zea mays
  unsure (1)..(409): unsure at all n locations
tgccacttggaaattgccagaacatcaatggctcatctttagtgattgaatctaaatctaacttcctaaatgataatttttgccaacattgtgccaaatatcatgcctttttgtggctaactaaccatgccaggaagaatagcccacaagtgaaggtcaaaggaattttgaaaagatgctctatcaatgatgggttaaagaaagttgaacccaagttcaagtccctaaagcccaacaatggaagaagggggcttgggttcaactcatccaaggaaaaccctagcacaatgcataagggggtggagatcccccaagttcatagagggaaccaccctatatgatgccttggggaggattcactcctcanatgacaagtcaccctcagtaaagggtaacttgagttccacaa

SEQ ID NO: 30598 - DNA, 463 bp, Zea mays
  unsure (1)..(463): unsure at all n locations
tgacaacactatctgacattgtacataanatttctgatatcaagaatatttagttcattcctcaacatgcaaaagcgggtcttatcaagtggcttagtgaaaatatccgctaattgatcttccgacctcactccttctaaaatgatatctcctttagcaacatgatctctaaggaagtgatgacggatatcaatgtgtttggtgcgagagtgttgtacagggttattagcaattttaacagcactctcattatcacacaacaaaggtaccttttctataactacgccatagtctagaagagtttgtttcatatataaaatttgtgtgcaacaagcacctgcgacaatgtattccgcttcggcagttgacaaggcaacactattttgctttttggatgtccatgaaactagtgatctaccaagcagatggcatcccccaaaagtactttttctatgcaatttgg

SEQ ID NO: 30599 - DNA, 403 bp, Zea mays
  unsure (1)..(403): unsure at all n locations
agctntctcatgtttgagatgtttggagggaactttcgcgctacagaagaaggggcgcaagccnggaaggaggaaataaattaatttgttatagangggggnagnggagcactagtgccctcgagaagaaagttggaccttgtgtccatatcttttaggacagctcatgctttttcaaagtttttcattttccccttgttgttcatgagtgtatagaataagatccttgaaaaaaaatcctcttcacgcacatgacaatgatgttgtggaaaattgctaagtatatctagtaaagtagttctcagagaattgactntcttccacatcatctaatcaacatattctttatcacacttttgttcctaagtggnacatcgacataacttactcgggcatagacata

SEQ ID NO: 30600 - DNA, 334 bp, Zea mays
  unsure (1)..(334): unsure at all n locations
tgacatatcaaaagctnttgattccatcaattgtgcttatctgttagaggttctgagagctctatgtttttcccacaaatggagaaattggatcgcaacaatattaggatcttcctcctcaaaaatcatcatcaacggtcaacaaacaaatgcaattaagcacatgcgtggcgtccgtcatggtgatccgctatcgccgttcttgtttattctcgcaatggaccctctgcagaggatgattgagatggcggcagatgctgggctcctggggcgggttctgccaaataatgctaaacagcgatgttctctttatgcatatgatgcaggggtgttt

SEQ ID NO: 30601 - DNA, 435 bp, Zea mays
  unsure (1)..(435): unsure at all n locations
agcttcacgaatgataccttcgtcatcacgcacgagcagcttcagccgcagctctacatgaccttcggcgacgaagcatggtcccaacagtaacttattccaagttcatctcatgtactcttattgcctttgtattcttatttgaagattttggngaggcaatggggttctatggccaagattgatcccgttttggtgcttgatgcccaagggggagaaaataaggcctaagcaataaatggatcagctaccacttgagataatttgaaaatagtagaatagagcttttgggtttgcttttggtttgtcaaaactctcttgtcaaaaagtggcctcttgtggggagaaatgttgattatgggaatagggggagtttttgaaatctctgatcaatttctcttggatacctctctttatgtcttacaagagaggtga

SEQ ID NO: 30602 - DNA, 446 bp, Zea mays
aagcatttggttcgaactagatagtgtgtcctctctaacatctccgataccaaatggatggggcttatgtggatttggctgggctttggatgggtgcatcaagatgagtataatagcaggttggattgagaagataaacgcaaggcacatggactccggcgaggagcacagcgaccttgatcaccgggactgcacagatggtctgtcacggtgacctatgagttgcaccacaccagtacatgttcttggataatctccctagtacaaactaaggtctccttgtatattgcaggtggcctaacttccatctactaaacttaatgtgtaagcctaatctaaattgtaacaaactcagtagatgaaagtgcattcatcccttttgtgggtttggtgattcggatacaacacgttataggtttacaagttgctaagtgtcgacaaaaaat

SEQ ID NO: 30603 - DNA, 430 bp, Zea mays
agcttatcaagtctactttcatatggatccggaattatagtcatatctgttctgaggccgccgtaatcattgttttcttaccgagacatttcctgccttttctgcccatggtgctgtgtcaccctattttggcccaatgggtcgtgtatcaagttaagtccattatggacgcatcctcaggttgcagcacgaccccaatacccttgtggtcgtcctcccatgtttataaaccccctagccgccaccaaaaacagcgggtgttgtttatatcaaagttagctctcgctacttgcttgcaagcgcgcgtgctatttcatccgcccgtcttctttgtttcggaaccccaccatattggagtttgattcttaacctacattagatctggaaattcagacttgttcacttgtcttgctattcttcaatgttgcag

SEQ ID NO: 30604 - DNA, 439 bp, Zea mays
actgaaccgaggactcgcatcaccggaatatcgctatcgtgctcgccggagttcaaaaacccgccggcgcacgtggaccgggtaagcctctgcaccattttccaattcgttgcgcacatggcctctacatcaccccgtggagctcctcgtgcaccttaattgaactataccgtcgtggtttggccggaacatgagccgccgtcgacccccgccgcctgtgtttgtggccagtgtagcttcgaccacctccgacgctgacccgcacaccgacgtgaccgtcgtgacctcccggacgtcactgaccaccccgccggagctcttctgccgccggtaagcctcgccgccgtaatctatgccgcggatactggttaagtcagccattgagcgcgggttagatttctgtatgcccacgggaatttgtgcgatgtctgtgacccac

SEQ ID NO: 30605 - DNA, 396 bp, Zea mays
ctgcccacttgttttgttcttgcaaacatttttggaaattcttttcaaagtctttctgcaaatagtcaaaggtatatgaatatgattttgagaagcatttttaagatttgaaattttctccccttgtttcaaatgcttctcctttgactaaacaaaactccccctcaatgaaattcccctcttagtgttcaagagggttttagatattaattttgaaagaggtcataccaatttgaaattatatcaaaaataagataccaatttgaaaacttctttataccaattgaaagactacattgtttaaattggtggtggtgtggtccttttgctttgggataatacattctccccctttggcatgaatcgccaaaaatggatactttgtgagtgaaatat

SEQ ID NO: 30606 - DNA, 441 bp, Zea mays
  unsure (1)..(441): unsure at all n locations
agcttgtgaaagttcttcattctcacatgtgctaagcggcgatgccacagccagcccatgctagtcttagcaattaagcatgcatctagaccggcctcttcttttgcaaaatcaactaagtagagcttgccgtctaatacacccttaaaagctagtgaaccatcacttcttctaaagacagacacatctacatttgtaaatagacagttatatcccatatgacataattgactaacagatagcaaattatatccaagactttccactaaaaacacattagagatagaatgctcattggagattgcaattttacctagcccttttaccttgccttgattcccatcaccgaatataattgaatcttgggaatccttattcttgacatangaggagaacatcttcttctcccccgtcatatggtttgtgcatccgctgtcaata

SEQ ID NO: 30607 - DNA, 430 bp, Zea mays
tcagcttgagctgatatcttcatcttctcttacatctatgctcacaccctaaagcaaaggtgtgctccttaatgtggtctacaactttgatgtggtgacctaaggcaaaatctcttttgtttaggagttacaaggtctcaaagatgagcacattacactgaaattcagacttagaatataacctaattgaggtccattttgcatttaagtccaaaatccaatgtttggctttcaagtccacacatgtgtgaaccaaatgacttataatacttatgtgacttggtttttgcactttaatgcaaaagtggactaattttgcacataagtccctatggttgggatatatggttttcaagggtctaattgaaaattttggttcccacgggtgttaatatgattcaactttgttcttggggacattttatgactc

SEQ ID NO: 30608 - DNA, 399 bp, Zea mays
  unsure (1)..(399): unsure at all n locations
agcttcggtcgataccaaatccgagtccccatgaatgtttcccccaacttaatttggctcatgactgactaaagagctcttatcactgtggccgngagcagcgcggcaggaccgacgcgttcccggcgaccagaggctactccgtgcaaattaagggtttggcaggcatcacaacgatgtgagagtgctcaaacaagaaagcaggaaatggggactgaccgggaaagggctggcgaccgtgagctcggtttcacggtggcggaaatcggatttggggggaattccaaattcaagctctctggtgggaggtttgggatgcaagcgggtgcaatagctaatagagtacatggcgaagctgagggggggctcaatttataaactccgagagcggtggctctc

SEQ ID NO: 30609 - DNA, 293 bp, Zea mays
  unsure (1)..(293): unsure at all n locations
ngaacggagtataccctattgaccttgatacatcagtattgtggttacaaaccacctttattaattcgtctggccactttcctttangctgattgaaaattgatttcattattcctgttattatgattccatttgccctttctaccaacccatttgactcaggatgtcttactgatgcaaagtgtatttttgtaccaatttgactacaaaaggctttaaaagtctcgacatcaaaccgagttccattatcaatagtggtagccttcggcatcccgaagcaacagacgatgttt

SEQ ID NO: 30610 - DNA, 437 bp, Zea mays
  unsure (1)..(437): unsure at all n locations
agcttgtgtttacaagaaagaaagtgggagcgctgttgtatntctgatcttgtatgtggatgacatattattgattgggaatgacattcctatgctggagtccgtcaaggcttcactgaaaaagagtttttctatgaaggacttangggaagcagcatatattttgggcataaggatctatagagataggtcgaagaggcttataggattaagtcaagatacgtacattgacaaggttttgaaacggttcaacatggaacagtccaagaaaggtttcatacctatgtcacatggtaaacaccttatccagatgcaatgtcctgcgacggctaatgagcgggagcgcatgagtaaggtaccatacgcctcagcgattggatcaatcatgtatgccatgataagtacacgcccagattgttcatacgctataagtgcta

SEQ ID NO: 30611 - DNA, 430 bp, Zea mays
  unsure (1)..(430): unsure at all n locations
tcgacatctntgcttgtcccctcttcgtgagcccctggcgtccaatcagcgatgaaatctgctagtgcttgggattgaattgaagatctgtgcacgtagtcaatagtgaattcattaagctctgcagcccactttccaatccttccagtagcttctctattcttcatgatatccttcaggtgctgtgatgaaggaacaattatgtgatatgcttgaaaataatgccgaagcttcctggacgccattaacacagcatacaacaccttctccaattctgtatagtttttctttgataaactcaaaacttcggagacaaagtatattgggacttgctttttaacttgtccttcaagcttctcttgtacaacgccgcactcactgcagagtgtgaagctgncacatacnatatcaatggagccccctacaccgg

SEQ ID NO: 30612 - DNA, 436 bp, Zea mays
  unsure (1)..(436): unsure at all n locations
agcttaatgcccctaagaaattgtctaactttgttaaaggcaaagctcccatggttcaagataatgagggctatattttatatcctgttgattatcccgaacacaaaattaggagaagtcatgctaagaaatctcattctgtgtctcaccatgcttttatgtataagaatggggcttctagctctaggcattctactcttgttaaaatgcctaaaaagaaaactcctactgcatcaaatgagcctaacatttcatttaaaacttttgatgcatcatatgttttaactaacaaatcangcaaagtagttgccaaatatgttgggggcaaacacaagggctccacaacttgtgtttgggtacccaaggtgcttgtttctaacatcaaaggacccaagactatttgggtacctaagaataaagtctagattggtttgca

SEQ ID NO: 30613 - DNA, 416 bp, Zea mays
gacactttaatacgcagcttgtatatttcagattcgccctattcacccacttctatgcgactttcaataagtatgattattattgcacacttgtacttattacaacttaacaaatggattcttaatctcacaatgctattcttatatgcagtgcataccgtttttattggaaagggtttggcggcgaacatccagatgacaagcctaatttgtcaatatcattatttccatatggtggcatacaacctccatgtactgtcctgtgcggttattatgtatgcgaatggtgtcgtgtcacctttcattacatggtcaatcgtgaggatgtaagttcgctatcattgtctatgttgcaattttatgttatattgttgctcatcacattactcttagacatattgctttttggtttcatt

SEQ ID NO: 30614 - DNA, 417 bp, Zea mays
agcttgaagccatggtaagtatcatatgcaagtaaaatgcgaattgactcaagcctagctacgggtgcataggtttcaccaaagtccaaaccttcgacttgtgaatatcccttggccacaagtcgggctttgttccttatcaccacaccatgctcatcttgcttgttgcggaagacccacttggttcctacaacattttgattgggacgtggaaccaaatgccatacctcattcctagtgaagttgttgagctcctcttgcatcgccaccacccaatccgaatcttggagtgcttcctctaccctgtgtggctcaatagaggaaacaaaagagtaatgctcacaaaaatgtgcaacacgagatctagtggttacccccttgtgaatgtcgtccaggatggtgtcgatggcgcgatct

SEQ ID NO: 30615 - DNA, 346 bp, Zea mays
aagccttgggtaaaatttggtatgatttggagcatgtttggtacttataacccaaaaccctagttccgtgccctatgaacttcactatatactccaaaaaccctagtttcctcgagatccgtgaaggaaagttatattcaagacctaagataatatacttttgttatctttgcactttcatgagcattacatgagcattcatgattatatatggctgtatatagaaaatgaagaagagatagaagttgaagaagcaaggactacaccaccaccacctgaagaacctcatgcaggaaactgcttttactttgatatctgtggagcagagcctgactacctattacac

SEQ ID NO: 30616 - DNA, 428 bp, Zea mays
  unsure (1)..(428): unsure at all n locations
tgcaggcttatgctctgataccaattgttatantccgggttccacaaacaacccggaatgctactgaactacacttgcgacgtccatatataaaatttcggcagcatcctctttgcaagactgcataaaagagggggcaacagagtctaaacctatatcatgactaaaacatactaattattattaatcggctagcaaggaaagataaacatacgacctgaactgaattaaccagtgcgcacgaccatataaaaaataaacaaacttcctttgacaataagtctctaattaaatcatggctgcccctgggcaaccgtattgtgagagtgaaagtggacgtgctgctactccccttattcccaacatgtataaagtacctgcattgactaatgcaagagtgagatgacacattctcacaagtaaaatat

SEQ ID NO: 30617 - DNA, 411 bp, Zea mays
  unsure (1)..(411): unsure at all n locations
atgataaattcttcatcacgacacatgaaaagacgggaaggtgttttatcgccgacggctcctaacagggatgtacttaatgtttcatgcactcttgagaattccataacgaaaagagacttgtatattacattcacatatacaaagtgttacataaattacactttagatgattcttcccaatagcatctaatcttctctcaatactgcttcggcgggcccatctacaagatggtcaacaatcttgtcctagatactttcggccattcgtttaatttcttcgtcgaatttgatcccacactttctgagggaagagaacatctcttgattacttttacaaccctagagcaaagattggatanaaattacgacccattagagcgactaataggacctattgcctctcggtct

SEQ ID NO: 30618 - DNA, 377 bp, Zea mays
  unsure (1)..(377): unsure at all n locations
ctgcngcatgcaagcntaagtcaactcaagctttataacaccaatctcctttctagatttatgacattgatagcggaatttgaaacactaggccaaacaatcatgaatactttctcctctgataaagccatattgatttttgtgcactaactcaagaaatcattttctgtagcctattcgctaggatcttagtgatgaccttataagcacatttgcaaaggtagattggcctaaaatcattgggggattcaacggtattaactttaggcaccaacgtactgaaggaattattaatgggagatatatcaataattggtgctgtacaacatcttcacaaaaccacaaaacggcttgcttaattacctcataatattttt

SEQ ID NO: 30619 - DNA, 457 bp, Zea mays
  unsure (1)..(457): unsure at all n locations
cccttcagctttcttgctcaacaattntgattgagaaatattcttcgaatctaatcctgctatttcggcttcagcattcactaataaaccttcggctgtttgaagctcgaagtctttctttccgatggcaactgattgcccttttatcttgatctctaagttctcaattataacttcatgctttttatcctctaagtcctgctgcatttttaaagccttgctcaacagcatacttcgcggacaaataacctttcgtagaaaacatttatgttattacaaataataaaggttagacaaaacgttgttaccttaaaattggaataaaacaaactatcgacaatgtggtgtccccggtagcggcttatatctgcttcgagcttccggagaccgatactctttgatagagaaccgatactttcgcgccgtctgacctccgatgcacctaacctttcgtatc

SEQ ID NO: 30620 - DNA, 424 bp, Zea mays
  unsure (1)..(424): unsure at all n locations
agctngatgaaccttctcggataatcaatatcatggcttgtcgtctagttgcatgcaattcaagagatctctgtttgttttgattttgggttggtatccttggaaggttgaaagtagctccataaccatattaatagctgcttgcgtgcgtgagcttctttatatttttttccttttttatttaaattttgatattttttgttttttctagcattattcatgctagatggaaataaatagataaagattaaaaccctctaatataaattaatttttttctaagttttttcgaatcacataactcgcaatagcgacgaacaagaaatacaaaaatttcgacagaaattcaaatcgacttttcccaaaaaaaatctgggttcttattttaaaatcggttggcttaaatctgcccatgttcttaaat

SEQ ID NO: 30621 - DNA, 460 bp, Zea mays
acacaaaaactaactggatttccacgaaattgcagatttcttctccaacatgaaaagaacggaaggcgtttttttcgctgaaagctcaaaaaatggtatgtatgcaaaatttcatgcattgtaaagaactgaactataaatagattatatattacattcaaagttacaatacattacacatgttacgttccaaatgtttctacaatagcatttaatcctccctaagaactatttctgcagcttcgtttagtagctggtcgacaaccttgtccatgatggcttcggccatttctctaatttcatcgtcccccttcgagtgggggcccggagatacttcagtatgttctgagggaggagaagatacggctatattactattacaaaccgtgaacaaagcctggaatcaaaaatacaatagaacgaaaaccactaattaatacctatttgcccttccggctct

SEQ ID NO: 30622 - DNA, 365 bp, Zea mays
caagctggatccggtcgaactcatgtcccacccggagtcttcgtgcaagaaattctgcagccgagtatctcaatggatcaaacagaagagtgcagcatcataaatcaactcgagtcagattctgacgactggagaagaccgattattaagtttataaagaatgaagaagaaccagacgacaagaactcggcagaacgcattgccaggcagtcggctcactatacactcattggggaggaactgtacagaaggggcgcgtcaggcatcctcatgaagtgcgttctcccgtccaccgggaaacaacttctggaggaagtccatgcagggcaatgtgggatacatgcagcatccagaacactagtcgg

SEQ ID NO: 30623 - DNA, 418 bp, Zea mays
  unsure (1)..(418): unsure at all n locations
agctntatttgagattttttatatattattcacccctccccctagccatctagatctaattacatgtgtgttcatgaaaaaagctaaagagatggtcatgactcatgatctaagttaaccaatataatatcagactataacgaacaactgaaatatggaaggtgaatgaatgcataatagataaaaaagtagagggtaacgtgatgggaactgcccacacatacggcacggaggtacaaccgcctcagtaactcacgacacagttgagcgagcatttaatgcggcgacgctaccacactgtcgtgtgcctcggtaccgcatggggtagttatttgagcctacattacctgtcaaaagtttgtctatgcnctgcgcacagtaggtcatgcctcagccgctttacatgaaatgtgggcag

SEQ ID NO: 30624 - DNA, 435 bp, Zea mays
  unsure (1)..(435): unsure at all n locations
ctaagcttgcatctaaacacctttaaagctaatgtatcatcacttcttctaaaggcagatacatcaatatttgtgaatagacaattatagcccatatgacataattgacttacagaaagcagaatgtaaccaagtgattctactaagaatacattggaaatttaatgctaagtagtgatggctattttacccaaacctttgaccttgccatgattcctatctccaaagatgatcgtgtcttgngaatccttgttcttgacgtaggaggtgaacattttcttctcccctgtcatgtggtttgtgcatccgctatcaataatctagattgtgcccccagatgcataaacatgcaagatgatttaagcttgggatttaggtacccaactcttgttgtgtcctacaacgttagtcacatatgactttggaacccaaatg

SEQ ID NO: 30625 - DNA, 397 bp, Zea mays
  unsure (1)..(397): unsure at all n locations
agcttgcccccccgttaatcaatggcaattatgaggaaaccaactgagatatacatgaggaagacaggatatagggccagagcttttctccttgggttaacagcagcactcatgaatggataggcagcccaggagctccatgccaatgtgattgtcaccacgacaatcttaagtatcacgttgtccttcagcatgcaaagtagagcaccaacgtccagtggaaacaggcaataaccaagaagactaaggctttggaagaagatgatgtgtccaccctgaaaagcgattgaataaacaattgtagaactgctaggaaggtactttgattagcacagccacagagacaatntatctccaacagtcatgtgcatgtgtaaccgtgtttgtgagtagaaaa

SEQ ID NO: 30626 - DNA, 459 bp, Zea mays
  unsure (1)..(459): unsure at all n locations
ttaccanatggacgtgtagagtgccttcctcaatggaccaatcaaggaagaggtctatgttgagcaacctcccggctttgaagacagtgagtatcctaaccatgtctataagctctctaaggcgctttatgggctcaagcaagccccaagagcatggtatgaatgccttagagacttccttattacaaatggcttcaaagtcggcaaggccgatcctactttattcactaaaactcttgacagcgatttgtttgtatgccaaatttatgttgatgatattatatttgggtctactaacgaatctacatgtgaagaatttagtaggatcatgacacaaaaaatcgagatgtctatgatggcggagttgaagtattttctaggattccaagtcaagcaactccaagagggcaccttcattagtcaaacgaagtacactcaagacattctaaccaagtttgg

SEQ ID NO: 30627 - DNA, 410 bp, Zea mays
agcttgagacggggaaagagagagagaggagaacggcgcctggtagtgattaaaatctagtaggagacagcagtacggtggtttcggtatccatggcgggcgagcaagcatataaaaatgtgagaggctaccagtaccactaccataccacgcgctactcaccatggcggcagtgtcacagggtgggataaagcatccgtgctccgtctcccactcgccgagccggtggttataattgctggatggatggatggatggatgctgggtatttatagatgtgggccttccgtccacaaatcacaattcaagctttgtttatgtggtacgagtatcccttataggttgatggtcgcgggttaggcaatctgacagacagacagacagacagcaggggtgtccgtgtcgtgggg

SEQ ID NO: 30628 - DNA, 436 bp, Zea mays
  unsure (1)..(436): unsure at all n locations
tgaagccatggtaagtagcataagctaataatattctaattgactcaagcctagctacgggtgcataggtttcaccgaaatccaaaccttcgacttgggagtatcccttggccacaagtcgagctttgttccttgtcaccacaccatgctcatcttgcttgttgcggaagacccatttggttcctacaacattntgattaggacgtggaactaaatgccatacctcattcctagtgaagttgttgagctcctcttgcatcgccaccacccaatccgaatcttgtagtgcttcctctatcctgtgtggctcaatagaggaaacaaaagagtaatgctcacaaaaatgtgcaacacgagatctagtggttacccccttatgaatgtcgccgaggatggtgcaacggngtgatctcgttggattgcttggtggactctt

SEQ ID NO: 30629 - DNA, 258 bp, Zea mays
  unsure (1)..(258): unsure at all n locations
agcttgccgtctaatacacccttaaaggctagtgaaccatcacttcttctaaagacagacacatctacattngtaaaaagacaattatatcccatattgcatagttgactaacagatagcaaattgtaaccaagagactcaactaaaaacacatttgagatagagtgctcattagaaattgcaattttacctaacccttttaccttgccttgattcccatcaccgaatataattgaattttgggaatccttattcttg

SEQ ID NO: 30630 - DNA, 428 bp, Zea mays
  unsure (1)..(428): unsure at all n locations
tctaaagggagaacacgtaatacgtctaactaatgtaactntcgaaaaagatagaccttgtgcagcgtgtcatgcaggtaaataagtgggaagctctcatcatgcaaaaaaatgtgatgacaacattaagacccctggagttacttcatatggacctcttcggacccgccgcctatctaagcataagaggaagtaagtatggtcttgctatagttgatgatttttcccgcttcacttgggtattctttttgcaggataaatctgaaacccaagggaccctcaagcgcttcctaaggagagcccataacgagtttgagctcaaagtgaagaagataagaagcgacaatgggtccgagttcagaaccttcaagtggaggagtatcttgaggaggaaggaatcaagcacgagttctccgttcctatacacc

SEQ ID NO: 30631 - DNA, 67 bp, Zea mays
  unsure (1)..(67): unsure at all n locations
agctttaaggcctgtttgtatatgancctaccgcgccgcaaaccgccacacctgcagcggtcgattt

SEQ ID NO: 30632 - DNA, 406 bp, Zea mays
tcgatctaaaccggaatacacgtatctgtttcaaatcttggcaagtatagttagtacccgacggcgattgatggtgcacaggcagttgttcacgcgacgcggcggaagaagaacacaagcgagcgattcttagcgcaccgacggtaccccagtcaccgcaacaccacacatgtatttctcgcaaaaacacgaaaccccggacccgaattccgcagacggtgtgttctcggtgcgaggattcccggtggcggcccgaggacggcggcaaaaggaatttctctctccctcattgagctcaatggttggggcgcgacgagttggaaaaggggggaaccgcattcgaaggcgggtcttatagctcgggtgcttcgtccaacaaccccccacaaaaccgtggagtggggcg

SEQ ID NO: 30633 - DNA, 413 bp, Zea mays
agcttgcatttgggtcccaaaggatattgtaactaaccttgtaggacccaacaagagttgggtacataaaacccaagcctaaattgtcttgcaggtttatgcatctgggggctcaagctggattatcgacagcggatgcacaaaccacatgatgggggagaagaagatgttcacctcctacatcaagaacaaggactcctaagacacgattatctttggagatgggaaccaagaccttatgcagcgtgtcaggcaggaaaacaagtgggaagcactaatcacaacaaaaatgtgatgatgacatcaagaccactggagctactacatatggacctcttcggacccgtcgcctatctcaacatcaggggaagtaagtatggtcttggtattggtgatgacttttcccgcttcac

SEQ ID NO: 30634 - DNA, 329 bp, Zea mays
cagcttgtggtaagagcacgataggagcaactcccggacctcacgacagatggtcaaggaaccctctggttcaaggatcgcctgcgcgtgccagcgggagaaacacgagaaaccctgctcgatgaaacccacaactcagcttactctatccacccagggaccaccaagatgtacttagaccttaagaccaggtactggtggaaagggatgaaaagggaaatagcacagtatgtggcccgatgtgacacctgccagcgaacaaagaccgaacatcaaaagcctgcaggcctgctttaaccctcccatacccgaatggaatgggaaaaata

SEQ ID NO: 30635 - DNA, 430 bp, Zea mays
  unsure (1)..(430): unsure at all n locations
agcttatgaagattcttcatcttaacgtgggctattcggcgatgctagagccaacccatgttagtcttagcaattaagcaagtgttgagttcagctttattaaaatcaactaagtatagctgaccctctaacactcccttaaatgctactgaatcatcacttcttctaaagacagtaacacctatatccataaaaagacaattgtagcccattttacataattgagaaactgaaagcaagttataatctaaagaatctacaagaaaaacattggaaatagaatggtcaggagatatagcaatcttaccaagtcctttgaccaaaccttgatttccatccncgaatgtgatagctctttggggatcatgatntttctcgtaagaggagaacattcttttctccccagtcatgtggtttgtgcacccgctat

SEQ ID NO: 30636 - DNA, 441 bp, Zea mays
cttgaaagctggactacgatttcccctgagcgagtttgtcgtaaaggtgctgaaaatattcgaagtctatcttcaccaacttacccccgaggcaatcataaggctgaatatcttcgtgtgggccgtgagaagccaaggtctgaagcctgatgcaaaaagtttctgcaatatacacgaattatcatacgaaacaaaaccttggggtaaagaacagtatcacaataactttggctgctacaattatgtttctcggtctgggtcaagctgtcccgtgcccacctttcggaagagatggcccggcgactggatgacagaatggttttatgtaagaaatgacctgaaagcacgagaagatatcacaggtatagttatgcgccctatttggcaaagcttcggccttcggaggccgaacgttgaaatgaatgaagctgccgaagaatg

SEQ ID NO: 30637 - DNA, 428 bp, Zea mays
  unsure (1)..(428): unsure at all n locations
agcttcggatctcttgctatattacttttgtcgatatgaccagaaataacctgcgaatcagttntaagaaccgcccttctaattcccattgcctttaatttccgaagacccaagagcaaagcttcgtactcagcaatgttatttgttgcataacaagttttaactttggaaggtgcgaccaacacagcagctgctcctactccgaaggttccccaagaaccatcgcaaaatactgtccaaacttcggcatctttactcgtttcttcttcctgagcccctggagtccagtcagcaatgaagtctgccaacgcttgggactgaatcgaagatctatgcacataatcaatgcaaaattcattgagttccgcagcccattttccaacccttccagtagcttctctatttctcataatatcccttcatgggtg

SEQ ID NO: 30638 - DNA, 416 bp, Zea mays
  unsure (1)..(416): unsure at all n locations
cgacactaacatactcagtctataagatattattcaactaaagtatgaagatatttattatacgccaacgtatgaaaacttcctctccttcagtcgctttagtattctatccttagtgggatgtaccatagtataggttaaattcattgcattataaaatgttcaatagtgcatataatcttgacatcaactatatgtgtgcactaatataaaaggaatttaatttatccttttgcggttcaataatgatgatccatttgccatccacatataaggatcatcatttgtgaaaccctctctcgngttctttaatgctctctattctaagaggtacaacgagggccttccaagagctttcaatatggatttcaaattacaaaaaatgaatgagttcacgacacttggttggtgaaatc

SEQ ID NO: 30639 - DNA, 323 bp, Zea mays
agcttctaaagggagaacacgtgatatgtttgactaacgcgcaattcgaaaaagatagaccttgtgtagcatgtcaagcaggtaaacaagtgggaggagcacatcacagcaagaatgtgatgaccacttcaagacccctggagttactacatatggacctccttggacccgtcgcctatctgagcataggaggaagtaagtatggtttagttattgttgatgatttttcccgcttcacttgggtgttctttctgcaggataagtctgaaacccaatggaccctcaagcgctttctcaggagagctcaaaatgagtttgacctc

SEQ ID NO: 30640 - DNA, 437 bp, Zea mays
agcttgccaatacttgtcaaagcaacaacacctgccagcacagcaactgcagaccataccagtaacttggcccatcgcgtgctggggactggatatgattggacctttcaagaaagctcaaggaggatacactcatgtactggtagcaatcgacaaattcactaaatggatagagttcaaacccattgcttctttaacctcagctaaggtcgtggaattcatacaagacataatattcagattcgggataccaaacagcatcataactgacttaggatccaacttcacaagttcagaattcttcgacttctgcgagcaaaagagcattcagatcaagtatgcatctgtagcacacccaagggccaacgggcaggttgagcgagccaacggaatgatattggacgcactcacgaaaaaggtcttcgataaaaatgaaa

SEQ ID NO: 30641 - DNA, 377 bp, Zea mays
acataacggtatacaaagctctgagaaatactaactggatacggttatgttctcccattgatcaaggggaggaggtaacagaattcgtttccctttggcaagccattaacaacacgcatggcctcaatgattctgatgatacaatttcatggagatggacgaccgatgggcaatatacaacaagtagcgcctactagattcaatttgcaaccaattttagcaaaatgaagatctgtccaatctggaaagcaaaagctgagccgaaatgtcgcttctttgcgtggactcttttacacaaaagggtgttgactgctgacaatcttcaaaaaaggggatggccatcaaacccgatttgctgcttatgcaactcgtcacca

SEQ ID NO: 30642 - DNA, 301 bp, Zea mays
  unsure (1)..(301): unsure at all n locations
aaagaggagtagcacatagcactagtcagtaccattcttaaaacacatcttttgcaagcacgacaatggtgcgctcgaggaggtttataatgcgaacatttctggcagtatctcaaatcaccaccctgcaatgttctggtgtaagttagcacatagtcccctgtattagtctgatttagtcatatagatttctttttaacattcctgacaaaataaaattactacactaggatgacactgccgaccatgagatgaangataacagacaatatgcaaccaactgatgtgctggcaaagtggc

SEQ ID NO: 30643 - DNA, 395 bp, Zea mays
agctttgtcaatttttgagatattgatgtcaccaccagtgttggttatgccagatctgcagaggggatttgacatttattgtgatgcatgtggccaaggacttggatgtgtgctcatgcaaggaggacatgtgatcgcctatgcatctcgtcagttgcggaaacatgaattgaactaccccactcatgacttggagctggctgtcgttgtgcatgcacttaagatttggagacactacattatgggaaccaagtgtcaagtatacacggatcataagagtttgaagtatatagtccacccaaaggatctcaaccttacgtaacgccgttgattggagcttattaacgattatgatttggatattcaccatcacccgggcaaggcaaacttgttgc

SEQ ID NO: 30644 - DNA, 356 bp, Zea mays
  unsure (1)..(356): unsure at all n locations
gagagcacattgtacgactaactatgttcattctgagaaagacaagatttgtagcgcatgccaagcagggaagcaagttggtgcccatcatccacataagaacatcatgacgactgacaggccactggagctcctacacatggacctgttcccnccgattgcttacataaacatcggcgggagtaagtactgtataattattgtggaagattattcttccttcacttgggcattctttttgcaggaaaaatctcatacccaagaaactctanagggattcttgagacgggctcaaaatgagttcggcttgaggatcaagaatattagaagcgacatcgggacggagttcaagaact

SEQ ID NO: 30645 - DNA, 255 bp, Zea mays
  unsure (1)..(255): unsure at all n locations
cagcttgctncaggtctttcctgatctcacgagggtggagggggcgaaaaagacaaaagaaagattcattcgatcctgttgcaagccatgccaaacgctgcggcggcgcacgtaccgtagatcacgagaaacaagcgcgtccacgagaacggagcgcggtgcagaaaacaaaacaaaacataacagaacaaaaaaactttaactcacgcgcgagcgcgacggcctggccgcgccgatcggtggcgcgcacgcgtg

SEQ ID NO: 30646 - DNA, 361 bp, Zea mays
tcttgcgcaagatatacgaggcctgctgtcattctttaatgaagaacagtaccgggatagtgcatcatcagcgggatgctggacaaccggagagctgatgatccctgtacatagccaggcatatgcaactccgctgtagattctagtcttgataacaggattacatgcctttaatgcacagattacattcaacatgaaactgttgaactgtgtaaagcgagaaacaacttttgaacacaggagtccggagcttctatcgtgaaggcgtgggataattgccatttttttctatagaattgtctgccccacaattcttatttttcagttaccccatttgatctgatccgatcaaactttactt

SEQ ID NO: 30647 - DNA, 335 bp, Zea mays
agcttctcttcttcatgtgaggtaaggtcttcgctgatagtgactgtctgcttgggcgtggcctgatcgacggggacagtcttggtcccgtcttggctctgcagctgtgccttgtcgtgttgtttatcggttgggctggcgggcgcagggacctcgcgctgggtcgtgagacagtgcacgttcctctgaccaggcacgaagtcccgctctatgttgcgcgccgtctgttggttgccgtagaccgtaatagcgcctagcggtcctggtatcttcatacataggtacagcccgtggacggcagcttcaaacttattgatggagccccggcccatgat

SEQ ID NO: 30648 - DNA, 420 bp, Zea mays
  unsure (1)..(420): unsure at all n locations
cgcaacaatcgagcttgcattgtgagcacttggcacgttctatttgaaatagtgcctgcagataattactaagaagctntattacatatatgtgaattaacttacaattttctttgattttatataacttaaaatagtcataactattcaatggcacctaaatctttttttcacttatgtggataacagaaagaagactcaactgtcatagggtcctaccactaattcttaatctgtattcctggaaacaagctagaccacagaataaatcttcaaaatattttggtgacatttgaagccttccactgagccaagtaaaacaatattattgtgaccaaatattatttgtttataatanaaaaggaattacttctaaacacaaggaggtgttactcgcaaaagtcttgacaaagtttggac

SEQ ID NO: 30649 - DNA, 392 bp, Zea mays
agctctattctgtggactatgctataagccggctacgggaggtgtaccttatgcagttgatcatttccagcatttgcgtaatgaggactctagggagaagcctcgtagtgagaccctggccattcacctcggaagtgaatacgggtctagctaacccgagctagaagggaatcacgactcatgggtaaagatgtgccacctttgcagagtgtaaaactgatatatcagccgtgctcacggttatgagcagcctggactcctcacatgataattgaacttgaagatggaaataaatcgagatccgatgatctggccatggtttgcttaagtggtttcacttaagtgttttttgatatactcttatacctttgttaatgggaatattgggatca

SEQ ID NO: 30650 - DNA, 265 bp, Zea mays
  unsure (1)..(265): unsure at all n locations
agctngaatgccatatcaaattgcggccccaatatactttgtatccgaagttcttagtttatcaaagaaaaattatactcaattggagaaggtattgtatgatgttttgatggcctccatgaagctctcgcattantttcaagcttacaatataattgttccttcttcacaaccattgaaggatattatgagaaatcgagaagctattggaaggattggaaaatgggctacagagctcaatgaattttgtattgattatgcgcat

SEQ ID NO: 30651 - DNA, 339 bp, Zea mays
  unsure (1)..(339): unsure at all n locations
tctccaccatgtcgctgctagccacgttgctgcagctacctccatcaatgatcaaacgacattaacgctccttaatgacacactttgttngaaacaacgtatggcgctgattctactctgccttctccatttgtgcactaagcacacgctgtacaatgaggctctcataatgctctgcatcatctgcaccaatctgttctttcggtggttccttattgcctgcctcatcagccgcaagcaaagcaagtgtagcttcatccaaatcactagcagaggaatacccaccatcgtcttttaccaccaaaacacgctgattatgacaatcaccctgcacgtgtc

SEQ ID NO: 30652 - DNA, 419 bp, Zea mays
  unsure (1)..(419): unsure at all n locations
agcttagaaaagtctggtatttatctgtggtaatattccgccagtccaaggaaacttcggacctgatgaacagtggtcgggggtttccactccaaaatgtccttgactttgctggggtctaccgcaatccctctggcagatagtacttgtcccagaaattgaatttcctccagccaaaacgcgcattttctgaacttggcatacaactgatgttccctcaggcgcgttaacacgatccgtaaatgttgggcgtgctcctcttcattcttggaatatatcaaaatatcatcaatgaagactaccccaaacttgtctagctcgggcatgaacatcgagttcatcaaatatgtgaagtgggccggagcantttgtaacccgaaagacattaccaaatattcanacaatccataccgcgtagt

SEQ ID NO: 30653 - DNA, 406 bp, Zea mays
agaacacgaggagaagaaaaaactatagaaggcaagggcgaggcacatctatgcaaggagtgggattcggattgctcttcttccgactccgacaatgaaggactcgtcgccaccgccttcaacaagtcatccctcttcccaagcgagcgtcacacatgccttatggcaagggagaagaaggtatgtactcgaaactctacttatgcttcttcaagtgaggacgaatctagtgatgaggatgaaatagattattcttgtttatttaagggcttagatagaacccaggtagataaaattaatgaattgattgatgccttgaatgataagaataggcttttagaacagcaagaagatttgctgtatgaagaacatgacaaatttgtagaagcacaaaatctcatgctct

SEQ ID NO: 30654 - DNA, 433 bp, Zea mays
  unsure (1)..(433): unsure at all n locations
acctcatagtcacctgcggcatgcaagctttccacatatgacatgattcttgtttattgtaaggaaantaaagctcatattaaatgctctaacagtgttcctatgtggttcaacaaagaaagaacaaagagaagcgataggaggtgttatggatgcaatgagaagggtcacgagattggatcatgccctcacatgaagataatgaattttgcaccatcaagaaagatgaccattaagaaaggtgaaagcaaaacacaagtgtattgcaaggacaagcaccacatttgctacaattgtcgagaaaaaggtcatctattcaaggattgtcccatgggtaactttcctaagcctaacttgtcaatacattcaaatgtgcttaggagatccatatttgactcttgtgccagaaaggtgatgagttcactacattcta

SEQ ID NO: 30655 - DNA, 310 bp, Zea mays
agcttgaagccatggtaagtttcacaggccaataatatacgaatcgactcaagcctagctacgggtgcataggtttcaccgaaatccaaaccttcgacttgggagtatcccttggccacaagtcgggctttgttccttgtcaccacaccatgctcgtcttgcttggtgcggaacacccacttggttcctacaacattctgattaagacgtggaaccaaatgccatacctcgctcctagtgaagttgttgagctctcttgcatcgccaccacccaatccgaatcttgcagtgcttcctctaccctgtgtgg

SEQ ID NO: 30656 - DNA, 379 bp, Zea mays
tatagactctctgagatgactaggggcttctgagggagaatccaccctacgcatgtcagatcaatccacagctccagtcaaaatgatgacaaagtaagccagcttcagaggccacaacacacatcacagtcttcgggacagcagcaaagctccttcatgccaccagctccaaggggcataggcggcatgggcttctgacgaagacatggggatcagcctacgaaaatctattgcttattctatggagaggacaaaggccatactacaagaacgtgccatatcactattctgaagccaaaagagattgccgaagcagaacctcggcagaaatcagccgaagcacgttctacatactacttctgtgccactctccttacat

SEQ ID NO: 30657 - DNA, 359 bp, Zea mays
acgctcaagtgagatgaaggttctgttgaatcattctcaggctcaacttctccatttcttggcataacgtaatgtcagaagtcttcatcgtcaaacaatggcaggaagccttgcgacttaacgcatctgccactacattagccttgcctgggtgatagtgaatctctcattcataatccttaatcaggtcaagccatctcctctgcctcatattaagctctgactgggcaaagatgtacttcaaacttttatgatttgtataaatatgacagatatttcccaccaaataatgacaccatcattttagggcatgaacacatcagctaattccaggtatgagtcctcatgcgggacaactt

SEQ ID NO: 30658 - DNA, 231 bp, Zea mays
taccctgttccatattcagggcatgtggccacttaatatagttcttgaacttaaggcctacatacgcattctatccttaatatatctgggcggagcatcacctgtttctaacccaagcctcgatttaagtacttccatgcttaggaatgtttgtgttcctaacgatcacaagaagcctttccggaactttggaattagatccaccattgcttccaatgataatatttatgc

SEQ ID NO: 30659 - DNA, 330 bp, Zea mays
actcagctgagtagtgctcaacgaaacggaaatttttatcttggtttaaaagactctaatgttgtcttgggctatcaaagagtcagcactctccactaatccttgttggagcacccgtgcaagggtataaccctccttagtcctcacaagaactaagtgttcactatgagctaattcttcacctctccagcacagtgaatttctcacaaccatgtacaactctgagccaggtgactaacaaattctctaagatgatcaccatgctccaatcgccaccaagctgtctacgtgatgcccatcacaagagtaacaagatctaaactgtcactt

SEQ ID NO: 30660 - DNA, 414 bp, Zea mays
agcttctaaagggataacacgtgataggtttgactaacgtgcatttcgaaaaagatagaccttgtgcagcttgtcaagcaggtaaacaagtgggaggagcacatcacagcaagaacgtgatgaccacttcaagacccctggagctgctgcatatggacctcttcggacctgtcgcctatctgagcataggaggaagtaagtatggtttagttattgttgatgacttttcccgcttcacttgggtgttctttttgcaggaaaaatccgaaacccaagggactctcaaacgcttcctcaggagagctcacaatgagtttgagctcaaagtgaaaaagataagaagcgacaacgggtccgagttcaagaaccttcaagtggaggagtctcttgaagaggaagggatcaagcacgagt

SEQ ID NO: 30661 - DNA, 406 bp, Zea mays
  unsure (1)..(406): unsure at all n locations
tgaaagctacttgcgacggactccggtggaagacattgaacgttngctaaaagttggacagacacaggatcttctggcatgttggggagtattgactatatgcactagcaatgggaaagatgtcctgttggatggaaaggtcaattcactcgaggtggtcaaaaagtaccaactctgattctcgaagcagtgacctcacatgatctttggatttggcatgcattctttggtgttgctggttctaataatgatatcaatgtcctacaacactcatcaatnttcatctgagaacttaaacggcaagttgctcgggtgaaatatacngctaatgtggataaaaatgaccaacgttactgtctcgctgatggaacttatccggaatgggctattcttggtaactaatatt

SEQ ID NO: 30662 - DNA, 419 bp, Zea mays
agcttaatgagtttctggtgcttactcatgggaatcgtactatgttgcagtacgctcaggccttcaatgatctgtgtcagtatgcaggatatcatgcagacacggatgagaagaagagggacaggttcaggagggggctcagcactaagctccgcgaccgtctcaacaccgttagggccaacagttacaatgagttagtcaacatggccatttcccaggaagactgcatcacagcccgtcaggcagaaaagaagaggaagacccctgtggcaggaccttcagctcagcctcagcgcttcagaattgtatctgacactcagaacatggggcctcagcagcagcagggacgttgggtgatctgaccacagcagcagcagcaggcacccaaccgctctcagcccccagttcagaggaacaat

SEQ ID NO: 30663 - DNA, 391 bp, Zea mays
agctcgattagaggttttatttgagttattttggctaaactttctcaacctttcttgttgctcattaaatatacttcaatttttataatcggctcaagtcacaattttaaaattttcatcccctttttcttattttctttaatttttctcatggggctcacttagggttttcattatggttgcacattcttacctttttagaagactcaattgtttgatcatgatacttttaagtatatgcttggcgaattctctattacttaagttaatttgatgctcatgctctctttggttcacataaaataatggtttcttgcgttggtttttgagagaaaccctaagtgacaactgggtgtcacacttcgagcattatttccttacgatataatga

SEQ ID NO: 30664 - DNA, 415 bp, Zea mays
  unsure (1)..(415): unsure at all n locations
tnatgtgatgatgtggcgatcaatacagaacactcagaaaacttcatcgaagaattgcagctggtcttcaacagcctaaggcgataccggtggaagctcaacctagaaaaatgtgtctttggagtaccagcagggaagttactccgattcattgtcagctaccgaggaatcgaagccaacccacaaaaaatcaaggccatcatgagaatggaagcgtagcgatcacagaagatagtgcaaaggcttactggatgcatgacagccttgaacaggttcatatcgaggctaggcaaaaagggcttatcgttctacaaattactcaagaaggtggaccagtttcagtggaccacaaaagcacaggaagctcttgacgcattgagaaagttcttcaccaccctaccagtacctgagccac

SEQ ID NO: 30665 - DNA, 349 bp, Zea mays
  unsure (1)..(349): unsure at all n locations
agctttaattgtgtcaaagttccgtgttgtatcatacccaggttcaaattttccatttcttgacatagggngatgtgaggggtccttattgtaagacaatgacaggaagctttgcgactcaatgcatctgccaccacattggcttttcctaggtgataatggatttccaagtcatagtctttaattagctcaagccatcttctctgcctcatgttcaattctgactgggtaaagatatattctagacttttgtggtccgtatatacatgacatatattccccagcagataatgatgccatatgtngagggcatgaacgactgcagctagttccaaatcatgagttggat

SEQ ID NO: 30666 - DNA, 338 bp, Zea mays
ctagcttgtccactacagacatttatgatgattgcttcatggcacaaaagaaggaagcgttgttgtcatttgctcaaaagatacgaatttcatgcacaccagagcaattcgtacatggatgaaaaggcaaaaataaattacaaggtatggacaaacatacacagtactaagtttaattctcgattacacatttttgcaaagataatgcaaatatttcctaagctctatacccgaaggcttaaagggaatcttcatctcagcaaccttcggaatgtgctttggactatcaaccgtcagcaccatcaatctgcagacaaatgattatatatggggaaagt

SEQ ID NO: 30667 - DNA, 393 bp, Zea mays
agctttatatgggagaaattgtatgactcctctatattgggatcagactggagaaagatagttctttgggcctgagctaattcaagaagcagacgaacaagtccgtatcattcgagagaatttgagggtagctcaaaccacgcaaaagagctatgctgataatacaaggagaccactggaatttgaagaaggagattatgtgtacctcaaggtgtcaccacttcatggaatgaggagattcaagtttaagggcaaattgtttcccaactatattggaccattcttgatctttaggcgagttggggagatggcctaccaactcgagttacctgatagtctataagatgtgcataatatgttccacgtatcacaactgaagaaatgtctccgtgt

SEQ ID NO: 30668 - DNA, 368 bp, Zea mays
ttttataaaaacagactaagtgcggttcgttctgtcctttgcggcggaccgtccgtgacacctaaatgacactcggacagaaccaatgcaaaaacacatgtctctactgcggaccgtccgatggaagagcaagcaccgtttgagaccacgcgcggaccgtccggtaggtgaggaaccgaaaaacccgaaggtgacaggttcggtaaaatgaattatagcatcctcgcggaccgtccggggtgcacgaccggaccgtccgcgactgcctttatttgacatctgacgatgcattaaatgcaatgtagccattgatatagctgttactgctgaccgctgtgtttttcagccgtgatctagccaactaactt

SEQ ID NO: 30669 - DNA, 418 bp, Zea mays
agcttcggggcaacatcaatgttccttccgaccaccagccccaagaggcagaggcgccaggggcttcggcggaagattcggagatcaaccaagaagaatcttttgcttgttttgcggtgagaacaaaggccataccaccaggatgtgccatgttaccatccagaagcaaaaggaaatagccgaagccgcagcacagcaagctcagccgaagcaggtcatgcatactgcttcgtatcattcaccgtacatcccagaatatgtaggcaaccaccctgcagtttctgttgcttcgacgagtcaacctcaagtttcctggcaacagcctccgcctccacctccgttgaacaaggccagcagccagaagggagccagtatgctacacaccaaagggacttcagagagcagtccgaagctcgta

SEQ ID NO: 30670 - DNA, 360 bp, Zea mays
tacaagaaagctaagggcgaggcacaccttgttaaggagtgggactcggattgttcgtcgtccgactccgacaacgaaggactcgtcgccaccgccttcaacaaagcgtccctcttcccaaatgagcatcacacctgcctcatggcaaaggagaagaaggtaaactctcgaaaatccacttatgcttcttcaagtgaggatgagtctagtgatgatgatgaaataaactatgctagtttattcaagggactagatagaactaagattgataaaataaatgaattgattgatgctttgaatgataagaatatattgttagaaaagcaagaggatctcttatacgatgagcatgataagttt

SEQ ID NO: 30671 - DNA, 308 bp, Zea mays
  unsure (1)..(308): unsure at all n locations
agcttcggaatatcacgacttcattctcctcgggattcagacaagttttctctccttcgtcagccctcacaatagataaatcccgaaaatatctacccctcatattgacaagatggctttgtttaatgcttgattttccaaaacctgcatggcttggttgccaaagtcgatcttcggaatcttcaccaccactttccacatcatagttgtcactgtcaccagtgtcttcagacaaaccctctaaaatctccctaagaatcttctctgtatttgnctttgctattgattcaagaaagccgagaatcata

SEQ ID NO: 30672 - DNA, 352 bp, Zea mays
  unsure (1)..(352): unsure at all n locations
tcggactcctncctaaagtcgcactgctgttgggcgtgttggtgcccttctagctgctggcttcgggtatgagtangtggcaatggtggtggtagtgggagttggggccacgaagcttgtgaatgacttgccgaagcaacaaaggctgcaggttgattacccacgtattctggtatatatggagagtaacacgaagcagtatgtaagacctgctccggctgattctgtcgcgcctctacttcggcaatcccttttgcttctgaatagtgacctggcatgttcttgtagtgtggcccttgtgctcaccatagaataagcaatagagttttctgggctgatccggatacctttc

SEQ ID NO: 30673 - DNA, 415 bp, Zea mays
agcttatctcaacctgagaggaaagcttatcctaaaggggtttctttgagtcttaaggaagaatgtgttagtgttgttgataccacttatgcttcttattgtattatatggtgataaatgcaaaattagtgcttccgttgatatgaatcatttagtatctactgtgtttatcctgtaatagatattcatgtggttccggtgctttaaaatttgttctggggtatatctattcaattggtgtttaactctgattctgtccatttatgtgtcattcgcatcacggtttaattagtgacacaatgcatccaataggtgctaaggtatagtaatgcttcaaattagcctaagtatgtgcaatttggcatataaggccaaatctaagattttgatgtaagcacatatttagggggagcat

SEQ ID NO: 30674 - DNA, 437 bp, Zea mays
tcaaggacatggttaattgaaagctaatcaatccttaggttgctcatagtatgcgggacagtgaattataaagtaaatgggacataatgggtcaaaggacacttgccttcaccaaacagatgcccagggtcttcgatctcgtaaagctcgaagagctagatcacttggtcgccaaagctcgaccgtcgattcctcgaagctcggaaacgaaccatgatctaatcgcaacgcgaagcgcagacgaaccagtacaagaaaagaaacatatatatgcataagaacattacaccatacaagataaaacattataaaaacgtgcagaataaaatagagctcgcttctacgggcacacgacggaaagaaacgcgtctgtcggagctacggtcgataagttatcgcgtttacgctaaacgaatataaaataggacatctaattt

SEQ ID NO: 30675 - DNA, 430 bp, Zea mays
agcttgacattgtctcccttttggaagtcaatgccatccttaatgccagggcgtctcccactatagagcatgcttctagcaaatttaaattttttattttctaagtcatgctcattaattttagcagttaatgtagctatgtgatcattttgttgtttaattaaagcaaggtgatcatgaatagcatgtacattaacatctctacatctagtgcaaatagaaacatgctcgacagtagaagtagagggtttgcaaacatttaattcatcaatcttagcatgtaacataacattttcatttctaagattagtaataacatcattgcaaacatttaaatttttagccttagcaattaatttctcgttctcaagtttaaggctagcaaaagattcattcaacttgtcaatcctagcaattaaactagaattat

SEQ ID NO: 30676 - DNA, 452 bp, Zea mays
  unsure (1)..(452): unsure at all n locations
ttgacaagactggtatgaatctgcggtgatatttnttcgtccaaggaaactttcgacttgatgaacagtggttgggggttttcaactcaaaatgtccttgactttgctggggtctaccgcaatccctctggcagatagaacatgtcccacaaattgaattttctccagccaaaacgcgcatttgctgaacttggcatacaactgatgttccctcaggcgcgttaacacgatccgtaaatgttgggcgtgctcctcttcattcttggaatatatcaaaatgtcatcaatgaagaccaccacaaacttgtctagcttatgcatgaacactgagttcatcaaatatgtgaagcgggccgaagcatttgttaacccggaagacattaccagatattcaaacaacccataccgcgtaatgaacgccgtctttagtatatcttctgcgccaatatgga

SEQ ID NO: 30677 - DNA, 336 bp, Zea mays
  unsure (1)..(336): unsure at all n locations
agcttctcctggacaagtgctgcacttaccgctgagtgcgaagctgccacatataataacaaaggagcccctggcgttggtggagttagtgttgttaaatctatcagatattgcttcagttcttcgaaggctttttgctggcttggtccccattgaaaaacttcggctgatttcagcacttcgaagaatggtaaatttctttctgctgatctggatataaatctattaagagatgccaatctccctgttaatctttgggcccncttttttgtagttggtggctccatccgaattatagcttcaattttacttggattagcttcaattccctttgtt

SEQ ID NO: 30678 - DNA, 209 bp, Zea mays
atgaatcataggattggttcacaatccaataggatatgtcaatctctacttatttcgatgaagaaggcagtctataagatcacgagggaaaggtataaacacccaacaaactttactcgcagattctggtggaacatgtttatataactcctatttaaacaaggaatatgtatgtccataacaaccgataggtacctaacttactacta

SEQ ID NO: 30679 - DNA, 293 bp, Zea mays
  unsure (1)..(293): unsure at all n locations
tctccagccacagctctggagctagntcattctttcttcataccgcgccttcataccatgcacacctttatctcaaagtcgaagccttctgagacagtatgttatactggaaaatatgttatttaagcttttgaggaccttcggtagaagaaagcccccaacagaagcccctcgcagtattaatttgtttttgaatttaacaaattcacactgcgatgtgaacgaaggcctttaaccaaaggtgcaaaaaaacaccttcccttcgctagaatatctaaagtcaatgacatgtg

SEQ ID NO: 30680 - DNA, 417 bp, Zea mays
agcttataccacagataagtattgaagtgcagatataaagacgagtaagaaagagagtcaggatacaatacagaacagagcacacagacgcaaggatttatcccgaggttcggccaagcctaaaatgcttgcctagtcctcgttggagttagccacacctgggcttggagtctatctcaactccttcctccgtttgctcagatctgtcagtatgacagatagagcctttcactattgagtggggttacaacagaaccgcggctgcttacaaacttcttggcagcactccggcagagtaacgatacgctcaagaccttgctctagctcttagcagcactactcctctctctaaaggcttatagctgtgccttctacacaaactatagagttacacacaagagggagagcgagaattga

SEQ ID NO: 30681 - DNA, 437 bp, Zea mays
tcctaatcactacaggaattcacttaattcccgtcggccagaaaccgacgggaataagcatataccgacgggaattacgtaatttccgtcggtttagggcttattcccatcggttttcagccgccaggcgtcccttgtcggggatacgtttatcccgtcggcggccgacgggaattattaattcccgtcggccactaactagccgacgacaattaatgctaactcccgtcggttcaccaggccgacgggagttatgagttaattcccgtcggttcacagggccgacgggagttattagttaattcccgtcggttccccaggccgacgggaattaactgggccgacgggagttattagttaattcccgtcggttcccacgccgacgggaataactgggccgcgggagtattatttattcccgcggttgaccatagccg

SEQ ID NO: 30682 - DNA, 420 bp, Zea mays
  unsure (1)..(420): unsure at all n locations
agctcgctcataactcattgggtgtgtgcaagagcattacagagtcacgtgcgctactgtgctttgctgtgctccttgaaaagggtgatggcgatatgggcactaacgtgcagtacttctcagcaatggccatcatggagattgcccgtgtcgatgaacacagcctcgtgctgcgccaatcagcattcaaacccagttccccagcagccaaggctgttgttgatcaactgcttcgatgtgtccgcaggggtgaatacgatgcattgcttctcccatgcatcactgcccttggctgccttgcccgtaccttcacagcangtgagaccaggatagtgcctcctcttgtgcagcttctcgatgagcgtgagcctccagtcattaaagaggctcgtgctgcgctcacaaagtttgcatgcactg

SEQ ID NO: 30683 - DNA, 472 bp, Zea mays
  unsure (1)..(472): unsure at all n locations
cactataaatactaagcttctaagggagagcacatcttgggactaacatatgttcattttaagaaagacaggatttggagcgcatgtcaagcatgaaagccagttggtgttcatcatccacacaagaacatcatgacgactgacaggccgcttgagctactccacatggacctattctgcccgatcacttacataagcatcggcgggagtaagtactgtctagttattgtggataattattctcgcttcacttgggtgttctttttgcaggataaatctcanacccaagagaccttaaagggattcttgagacgggctcaaaatgagttcggcttaaagatcaaaaagatcagaagcaacaacgggacagagttcaagaactcacaaatagaaggcttccttgatgataaagacatcaagcatgagttctcttcttcctacacaccacaacaaaatagtgtagtagagagga

SEQ ID NO: 30684 - DNA, 312 bp, Zea mays
  unsure (1)..(312): unsure at all n locations
agcttgttgatggagccccggcccattatggcgttatatgggtacaacatgtcgacgatgtcgaatgtgacttgctcacttcgggcattgggtgctacaccgaaggagagaggtaactctattttgccgacagggaaggtgcccttgccactgaagccgtacagcaggttgtccgaaggcttgagcaggctgtggcttatgcccatgcgatcgaaggcatgaagataatattcgcctggctgccattgtcgactaatacttcatgcaagtcctagcctgccacgctacagtngataaccatggcgttgatgt

SEQ ID NO: 30685 - DNA, 411 bp, Zea mays
actcagcttgtcatacttatcaaaacagcaacatttaccagcacatcaactggcaaaccatacttgtaacatggccgttcgcgtgctggggactggatatgattggacccttcaagaaggctcaaggaggatacactcatgtactggttgctatcgacaaattcactaagtggatagagttcaagcccattgcttctctaacttcagctaaggcagtggaattcatacaggacataatattcaggttcggaataccgaacaacatcataaccgacctgcgatccaatttcactagttcaaagttctttgatttctgcgaacaaaaaagcatccagatcaaatatgcatcattggcacacccaagagccaatgggcaggtagaaagagccaacggaatgatattggaatcac

SEQ ID NO: 30686 - DNA, 353 bp, Zea mays
agcttcagccatggttcaatttttcagcagcacaacagcgcaatagtaataaatgttgtggtaacttcacaactacctgtctgtttatatagagctgcacgtgggaaagtgaatcgtcaagccggtcgcacacgctgaatagtcgcccgcacccactgaacggtggaccacagtgcgcgagaaggtgaatcaccagattgcgcgtacctgccgtatggtgggaccaccttgcactcggaatatttaattgtttctcgacaacgagctcagggaagggtgtttcggaccttctgcattccgaagcctaagagaatttttacgggtcgagctcgtcacgaaaacgatctgcccag

SEQ ID NO: 30687 - DNA, 429 bp, Zea mays
  unsure (1)..(429): unsure at all n locations
tctaagttcttcttgatgattctgacctttgtctctgcttcaagtaccaaatctggcccaaaaatttccctctctcctgcttgagaccaattcagcggggttctgcatcttctcccatataaagcttcaaaaggtgccatctttagactggactgatagctgttattataagaaaactcagccaaggaaagacacttgtcccaatcttttccgtagtgcagtacacatgcccttagcatatcttccaaaatctggtttacactttctgtctggccatcggtttggggatggtatgctgagcttcgtatgacatgggtcccaagtgattcctgcattgttcccaaaatcgcgccacaaatggtgctcctctatctgagactatagtncttggtatcccatgcaaacgaactacctggtcgatgaaatctc

SEQ ID NO: 30688 - DNA, 413 bp, Zea mays
agcttgatttatgataaactgtagcgagtgtcaagctcaataagaagaatgttcctaaagatgaagaaatcaacatgagcttggaaaaaggtaaaaattcaattagtcatgttgtttgcactaatcatctctccttgtcattcaagcacaaaaagggaagaggaaaaaggaggtgcttcaaatgcaaggagattggccaccttattgcgtcttgtccatacaaagacaagaatgaagggacaaggagttgctttggatgcaacaataaggaccacacgatcacttcatgtccggtcatgaagaatcaaggatgtgcatcctccaaggtgaccctcaccaacgaaaatgacacacagcaagcgtcatgtcaggttgagcgacgcttctgctacaagtgtggtgagcatggtcat

SEQ ID NO: 30689 - DNA, 316 bp, Zea mays
gcttctaagggagaacacgtgataggtctaacttatgttactttccaaaaagatagaccttgtgcagcttgtcaagcacggaaacaggtgggaagctctcatcatgccaaaaatgtgatgacaacatcaagacccctggagttacttcatatggacctcttcggacccgctgcctatctaagcataggaggaagtaagtatggtcttgttatagttgatgatttttcccgcttcacttgggtattctttttgcaagataaatctgaaacccaagggaccctcaagcgctttctcaagagagctcaaaacgagtttg

SEQ ID NO: 30690 - DNA, 288 bp, Zea mays
agcttgaagccatggtaagtttcataggcacataaaatacgaattgattctagcctagctaccggtgcataggtttcaccgaaatccaaaccttcgacttgtgaatatcctttggccacaagtcgggctttgttccttgtcaccacaccatgctcatcttgtttgttgcggaagacccacttggttcctacaacattttggttaggacgtggaaccaaatgtcatacatcattcatagtgaagttgttgagctcctcttgaatcgccaccacccaatccgaaattttg

SEQ ID NO: 30691 - DNA, 396 bp, Zea mays
  unsure (1)..(396): unsure at all n locations
taaactgttgggagaagatatacattccatttatacacttcaactcttctgtacattacattaaatgtgatgtgtgacattacagtctaagagttgttgggtctctgctaagcaggactcgtagtctagtcgatatacaatcgtctctccttccttggtctataaaagggaggacaagaacaatataggggaccggnggttcgaaaccaggaaccttgaaattgagacatacttataagggcagttcataaaggtgaactatggaccattaggctagaactcccactcgattcaaacacgaagggagagctacgaggtcattgtgctcaattgttagttgagctcgtaatcttattcccatttgtgttcatcaatccttcacactcaagagtatgt

SEQ ID NO: 30692 - DNA, 433 bp, Zea mays
  unsure (1)..(433): unsure at all n locations
agcttctaaagggagagcacattttatgattaacaaatgttcattttgagaaagacaggatctgtagcgcatgtcaggcaggaaagcaagttggtgctcatcatccacacaagaacatcatgacgactgacaggccactggagctcctacacatggacctattcggcccgatcgcttacataagcatcggcaggagtaagtactgtcttgttattgtggatgattattctcgcttcacttgggtgttctttttgcaggaaaaatctcacacccaagaaacattaaagggattcttgagacgggctcaaaatgagttcggcttaaggatcaagaaaattagaagcgacaacgggacggagttcaagaactctcanattgaaggcttccttgaggaggagggcatcaagcatgagttctcttctccctacacccc

SEQ ID NO: 30693 - DNA, 414 bp, Zea mays
  unsure (1)..(414): unsure at all n locations
tgtggaggttcttcatccccacatgtgctaagcggcgatgccacagccagcccatgcaagtcttagccattaagcatgcatctagaccggcttcttcttttgcaaaatcaactaggtaaagcttgccgtctaatacacccttaaaagctagtgaaccatcacatcttctaaagacagacacatctatatttgtaaataggcagttatatcccatatgacataattgactaacagatagcaagttatatccaagactctccactagaaacacattagagatagaatgctcattggagattgcaattntacctaacccttttaccttgccttgattcccatcaccgaatataattgaatcttgggaatccttattcttgacgtaggaggtgaacatcttcttctcccccgtcatat

SEQ ID NO: 30694 - DNA, 424 bp, Zea mays
  unsure (1)..(424): unsure at all n locations
agcttagtgcacagaccgtctgtgtttggtctggaccgtccggtcatcatgaccgatctaatagatctaacctaatagaactaatataatatatcttatctaatagattcgatatttcatctccaacggagtcaccaaaaagtgtgttgccacctttttggggccaaacactaatgatccctagatcccgctcgcggggaacgagatcctagggaacctctctgcgaggtggtagactatctacggtaggtcaccagtcgatccagggttggtcagaagacaaataacactacatgcagtagtattgaactccacctcttatgttggcaccttcttagggccaaataacaacaaaccctagtgccttcatgtgatgcacatgaccttgngtttagctctgcaaggtgccgcatggtccacgata

SEQ ID NO: 30695 - DNA, 392 bp, Zea mays
  unsure (1)..(392): unsure at all n locations
agctntagtttgggggatagatatcatcatgaaatatacatgtatatatagggaagttagttactttctgaggccatgccactcgagcttgcattgtctctggaaacttctgaagtcggcttgagctgtccggaggaggagctcgttgttgacgagagacatcctacatacaagaaagcaatgtttttttttgttccttttctctcaattttctgagatagatagatggatgcactggagtacctgtacaggaccttcccaatccacacgtcatcggcaccaccgtactgctccagatacatcctcgtctcgatgcgcggcaggctagcttttcacggcacgtccagtgcgtaagcgacctggcatgttggtctcacatatcatattcggtt

SEQ ID NO: 30696 - DNA, 365 bp, Zea mays
tgtctttgccttcgcctgctccttcatgtatatctagcggtatcctaagaaacaatccaagagtgacatgacctattaccctgctgttgaatcgataatcttgtcgattctagggaggggaaaatagtatttggggcatgctttgttgaggcttgtgaaatctatacacattcgctactagccgcttttcttcttgaccattactacgttggcaagccaggtgggggagtcaattggttcaatgacattggcttttagcatgctgtggagctcggcccttgttgcttccgctttctcgtctgacatttgaagagttcttgttttttggccggcccaatgatctatgcttagaccgcgctctatga

SEQ ID NO: 30697 - DNA, 402 bp, Zea mays
  unsure (1)..(402): unsure at all n locations
agcttcccaccgtgggaaggtatctggcgagggcacacttcgcccagcgcccagccatgcgccaaaggccataccccgaacgccacaaactcctcaaccaaatcgcgcccgctgctcaggccggcggcgcaccgaagggccccttcgtccgcatcctcatccgccacttcaaaaggcgggtatgctgagtaaaaatgcgagcacatctcggacacggggagccccggatggtcttcggctgtaccctccacgacgtagaaccaaaaatcctgccaattgccacacttgttgcgggcgcaaggaaccaactcaactacctgcatcgtggtcttgccggtcttcggcgtanatgtacaggacccaaactgggcaactttcacttcaatcatcctctttggcagt

SEQ ID NO: 30698 - DNA, 286 bp, Zea mays
catggggcgcatcattggctggcagaacattgaactcatcagtgacaggcctctggagaccatgctgaatgaattcaagcagttgaatacttatcggttcaattatggaggagtacaacaaagctaatgcaagataattatatgtaatgagttaaacatgagtgtatttcgagatgtaatttttaatgctttactgccgtagttaaatatataaatgtaacggtagttatgttgtaatgaaactcactaattatatgtaatgaccttttgttgcttcggtgtcatt

SEQ ID NO: 30699 - DNA, 300 bp, Zea mays
  unsure (1)..(300): unsure at all n locations
tgcccctatgacccacaccactctaaacacatgtgtgttcttgtgttcgtccatctcatcaagcaaacctttgggtgtgccctattcttaagattaagcaagngttttcctgcacccggctggagtttactctttgacaattgtcacgccacgcacgggggttaacttaacttttgcgcttgagttttcttctttgcatgaagcgttggatatgcgagcatctcaactcctcctcccatgactttctgatgtgggagggagtggcgtcctccatgccaccaatttgatccccctactcct

SEQ ID NO: 30700 - DNA, 404 bp, Zea mays
agctctagagactagagagagtgatttgttttgctcaattgagctcttgcgcttggatcgcttcttttctttcgcattctttcttgaaatcatactcacttgtaattgaggcaagacacaccaattgtgtggtggtccttgcgggaagtttgattcccaactgatttgagaagagaagctcactccgtcccagggactgtttgagagagggaaagggttgaaagagacccggtctttgtgaccacctcaacggggagtatgttttgaagaaccgaacctcggtaaatcaaatccgcgtgtcactctctttattcgcttgcgatttgatttgcaccctctcttgcggactcgtttatacttctaacgctaacccggattgtaagttgtgattaaattgaaatttt

SEQ ID NO: 30701 - DNA, 326 bp, Zea mays
ctatcaaatagacgcgagaagtgcctttctcttgtgccaatcaacgaagagggctatgttgagcaacctcccggctctgaagacagagagtatcctaaccatgtctataagctctctaaggcgctttatgggctcaagcaagccccaagagcatggtatgaatgccttacagatttccttactgctaatggcttcaaagtcggaaaggccgatcctactttattcactaaaacttttgaacatgacttgtttgtatgcccaatctatgttgatgacattatatttgggtctactaacgagtctacatgtgaagaatttagtaggat

SEQ ID NO: 30702 - DNA, 350 bp, Zea mays
  unsure (1)..(350): unsure at all n locations
aatataaatgccgaataaacttctgtaaccttgcacaaaccctgacacatatcatatctcctttattcgtgaactatgctgcttgctatgaacgaaactctacttttgagccgaacgcgaaaaacatcctaaccttctttctgtccacaaacgaagcatgaaaatttgctctctcttcgagctctttctcataccgaagcatctgtcttctgtggcatgatgacgatgatcctatatatgtctagacgaacgtcactcaatggaattgccatgatgtcacgtggncggtacatgaagatctgaatatattccaaaccatcactccagccgtcattcccttgcaaatgact

SEQ ID NO: 30703 - DNA, 253 bp, Zea mays
agcttcacttctgtggactaactcggctgcatcattttgtgctgtcggccactataaacgagacctgaagaccttccccactagagttttggatgctgcgtgtatcccgcactgtccggcatggatcctatctaacagttgtttttcagtgaccgaaggaatgcactttatgacgactcatgctgtgcctcttctgtacagggtgctcccaatgaaggcgtagtgggctgactgacttgcgatgtgttccgct

SEQ ID NO: 30704 - DNA, 417 bp, Zea mays
  unsure (1)..(417): unsure at all n locations
agctntgatcatcaatgataccgatagcacaagccacagatgactcgaagtagtgacgttctacctgaacttaaatcttgcgtccatcgcacacaccgtccgaagcccataacacgtacaacaaatttacatatcagagtgaggttcgaaacaccgacagtttgcgtgctaggtaggggcctgtgcgttcctgacgaagtttttccaagctctagatggctagcaacgacagcgacgcagtttggactcctggaacagccatccgttttaggagtctggatttgtcatcacaaagaacggagttaatcaaggcctcggaagccccgactctttcgctgagtgacctacttagtgttgccagaggtatcggtgacctcaatctcgccccctcaggaggagttcgggttggcacgttcc

SEQ ID NO: 30705 - DNA, 447 bp, Zea mays
  unsure (1)..(447): unsure at all n locations
tggatggtgtctagcgattggaaaaataatgattatagagatgaggaagacacaaattcacatacgattgtttgatagataggatatggtgggagaaggttgaaatggtgctgaaaactgtgacaccactatattttgtgcttcaatttgttgaccaacagaaaaatggaaccatttctagctttcttccaaaaatgttatctgcttaagctaagatctttgctaagttaaagcatgacaaaaatgtcaaaagagatttcatgaagaaagtgaatgaaataattaaaaagaaaactcagtatcttctcagtgatactctcatgcttgcaggtattatacctattacctatntacactctcacgtttgctgctagtatagtttacaatnttctgaaattctatctagttgtcatgcttttttgtggatgcctattgtaggggctacac

SEQ ID NO: 30706 - DNA, 432 bp, Zea mays
  unsure (1)..(432): unsure at all n locations
acgctttgtatcatattgncgtatgtgtntttgccttaaggacctttggcggngaagaagacccccaacagagggtgctctcctccactcggctggagtttacctccgacatatgcggtaacatccccatcgcattgatagatgggacatttgacggcttaatcgaggtgacttcactatttgagtgtgagaagaattgatttgtcgttgcttccccggagaagttgcatggcagtgtacatcacaaatcctaacccttcgttgactgggaatccttgatgcaactctatgtcgatctcacaacaaaggctatggctccactagctgctacataacatcatgatgttagacagtggaggtggccctcgccctaccctgtgtcctgtgatgggggatgtgaatggagccggtcacgacacctcaacatctatg

SEQ ID NO: 30707 - DNA, 126 bp, Zea mays
ggttacaaacattcaaatccccttgtgggaccctcaaggaacctgagcatggccacgcggctggtaacggatatcccagcgatcatctatatcctagaaggactttcattgcaccaatcccaaggt

SEQ ID NO: 30708 - DNA, 431 bp, Zea mays
agctttcccagcgatgaatcaaggtaaaaaaatgcttacttgagcaatccatcagtttgatattatttagattaaatgtttatcgtgcccaaagtgagttgaaactgcatgactgtaacagaagcttgggtatggaccaaagtagcatttacatcagttgattgacggttatgttatctatatgagtatatgttatatcttatgatttccatttgtatgtacatgtaatcatcagtttgatattatttaagattaaatgtttatcgtgcccaaagtgagttgaaactgcatgactgtaacagaagcttgggtatggaccaaagtagcatttacatcagttgattgacggttatgttatctatatgagtatatgttatatcttatgatttccatttgtatgtacatgtaatcagggagtcggaggagcatga

SEQ ID NO: 30709 - DNA, 351 bp, Zea mays
tctaaagggagaacacgtgatatgtttgactaacgttctattctaaaaagatagaccttgtgcagcttgtcaagcatgttaacaagtgggaggagcacatcacagcaagaatgtgatgaccacttcaagacctctggagctgctgcatatggatctcttcagacccgtcgcctatttgagcataagaagagagaagtatggtctatttattgttgaagacttttccgcctcacttggggattctttttgcaagaaaagctgaaacccaaggaaccttaaccctctcctcgaaaacccaaatgaatttgacctctactcgaaaaaaaatggaggaaaacgggccccaattta

SEQ ID NO: 30710 - DNA, 274 bp, Zea mays
aactccacttcgcgaaagaaaaaagactcttatgtgttgctatgtttaatctctcgcggacagaagacgcagctttttatgtttcgctatgtgagagaaaagctttggccaaaagaggaagcggccgcttaagcttccttgtgtacgaaaagaaaggaaggcgttttttctccttctgctcaaaatactgagttctgtcacatcaaagcgactccatcgaacggtgagaatatattacaaggggtgtgctcagatccttgtgaacagctcaatc

SEQ ID NO: 30711 - DNA, 422 bp, Zea mays
agcttcatttagtggttctgttcgtgatagctcgcctgcgccccggcaatttctcaccgcgcacctccttccgccgcggaaatcgtccttgtcgttgacaacgttgttccgaccgccgttcttggtgagcacactccccaatctccttgtgctgtggttctcccctcgaatcattgatcgaatcgaggaatagttgttagaatcgtatagcgcgcgcggggtccggcaatggggccgccgtgctccagcgagcgcgccgcggctcggtcgagttgacgacatgtgacctcgggccgttggatctcccagcgaccgcaccgattaggtcgtaagcgtaccgcttcatggagttaatcaaaaccatcggatggggatcggacgtgtgttcgtgcgcctcgtcattttaatccagtctgttgatc

SEQ ID NO: 30712 - DNA, 325 bp, Zea mays
  unsure (1)..(325): unsure at all n locations
gatggcagattacttgttacagactctgcgttgntactgtattcgtcccctgattattaagctaattattcgtctgaacaacatccctggtttggccactatgactcgcggataaaatggctatccagaaaagaaatggttaatcaaatgcttatcagaactgctggtcattatgcttatattgttggtgttttcacttacatattttgttaaggtcaccatttttgctctagtagcttgttgccagtcagttataagatgcttgctagctgcgtatgcttattgcttggntgtcaattacttctcatgtatcagctttttaatt

SEQ ID NO: 30713 - DNA, 382 bp, Zea mays
agcttaggatctttattctgctactcttgtcgatatgacccgaaacaacctgcgaatcagttttaagaatggaccttctgattctcattgcttttaacttccgaagacccaaaagcagggcttcgtactcagtaatattgtttgtacaactaaaatcgagtcttgccccataacaagttttaactttggatggtgagaccaacacatcggctgctcctgctccgaaggctccccaagacccatcgcaaaacaccgtccatacttcagcatctttatttgtttcttcatcctgagccgctgccgtccaatcgacgattaaatctgccaacgcttgagactggatcgaagatctatgcacatattcaatgcaaaattcattgag

SEQ ID NO: 30714 - DNA, 381 bp, Zea mays
  unsure (1)..(381): unsure at all n locations
ataccagaaaccctaattggaaccctggaaaaccctaaaaccaaaccctaggggcttatatgcaaaattagtccacttttggactaaagtgcaaaaaccaagccaaataagtatttgaagtcaattggttcacaaatatgtggacttgaaagccaaaccctaagttttggactcatttgcaaaaaggaccttgattttgattcctatgctaagtctaaaaacagggttgtaggcccaactttggggctgtgtagctntcaaaatagtgagaattcatgataggtgaccacatcaaagttgaagataaatcttatgggaacannacttgttaaggattcaagccatggtcttatgtgaaatttcgagaaaaacccaatcaaa

SEQ ID NO: 30715 - DNA, 355 bp, Zea mays
cgcatgcaagctttgtgcacacttttgttcttcagctcatcttatcacccgcggacggacggccatactgaaagaactaaccttattttataagatatgttgagagcctgtgcgttgcaagacaagtcatgatgggacaaaaggttaccttatgcagaattctcctacaacaatagttaccatgccagcttgaagatgttaccgtttacgcactctaccgacggagttgtacgactccgttgcactgggaccagcctgtagagagacaggtgtttggccccgacatcttgcttgaagcctaatacaatatcaaaatggtttcggagaaccttaatacagtccagtcaaggcagcg

SEQ ID NO: 30716 - DNA, 410 bp, Zea mays
taacatgcttgcttaagtgcattcttttcatttgcaagattaactatagaggctttcatactaactacctctttatctttattctctataggtatcttgactaaagatacttccttagtcaagacatctagcatttcatctttattgtgaagcaattcttgaagctctagggttctttccttttcaacgataagcaagtcttcttgagcatccagaagtgcctttcttttatctagcttctccattaatttggggataacattgttttcattcagcccaactcttaatcacttattttcatggcgattggcatcacccccacattggaaatcatactaataagggaccctatctcttttccctaggcagtcgagggatgagcccttgttgttgggaaacatccacccgcg

SEQ ID NO: 30717 - DNA, 325 bp, Zea mays
agcttcagcatcataagaacccattaacggtggaatagagaacttaatcttagcaaatggatcatggtctggttcacgattatgatgacgatgtctaccattacctcccataccttgtcgattacatgtgaggcgttgtcgcagcgatgcataaacatcatcgtcatcgtcgtcgtcgtccacaggagagtgagctggggctggagttggtggtgggggacgagcctccagtacgtccatgcgtgtaacaagttcagcaactcgtcaataagctgctcataggatgtcgaggccgagtcctggtattctttaaaagctttagaca

SEQ ID NO: 30718 - DNA, 365 bp, Zea mays
agcttcggagaatcgacgatctagacttggtgaaccactggtccggagatcaagctcttcgagttctacgaggctgaagatcctgagcatctgtttggtgaaggcaagtgtcccttaacccatttctgtcctactcattttataatttactccccgcatttacacaatttatacctaaggattgactagcttttgtttatcatgtccttgtttacctatgtgggttgggttattttggtttagctttatgctagtgcttcaccctaatcaatgaacatgatgagattatttatgatacgttggtttctcttttggttatgatgatgatactgtgacatttaacgggactcgaggggtttctcgag

SEQ ID NO: 30719 - DNA, 250 bp, Zea mays
tcatcgatcttcttctgtagatcggatagacgaatcatcttctccttcttcctctggacccgctgatggatgggtccacctcctccttctgaggcgttggacttgtagccttccttttttgactcctggcttcacgcagtgtttcctgattgacgtccaatggctgcagcgcagcccctatccctgaagctctctttggcggcatgatgaaggtcataacttgccgaaagtggtcgaatgagttcaccgg

SEQ ID NO: 30720 - DNA, 366 bp, Zea mays
  unsure (1)..(366): unsure at all n locations
agcttctccagagcgcccaggtatggatgtaaatattattacattttccaccgattgtactattgtcagcgacgatgaacctattgttgcatagtttgattttggtcctaaagaagccgcctttactaaaccaaaggaatcagtaaatcatttaaagcctctcttcgtgcgctgtcacattgatgggatactgattgctaaaatgttggtagatggaggggcggctttaaatctaatgccttattctgttattcattgtacagaanattaggtaaacaagatgacgaacttgtcaagaccaacatgaccctcagcggtgttggaactgatagntcgatcaaagccaagggagtcacattcgttgaa

SEQ ID NO: 30721 - DNA, 360 bp, Zea mays
tcagctccatctatgttatggattgcttttgagtcagtccagtttccttcggcccttctggcagcttcctgacttccatgaatagcgatgggtccttgatcggaaggtatcttcatgcaaaggtaagcaggatgaagaattgcttcgaaagcattaagggtgccacgaccaataattgcattgtaagggtactccatgtcaataatgtcaaacacaacttgctcagttctagtgttgttgatgaatccgaaggtcactagcatggtgatcttgcccagtgctacaatctgtcttcctccgaagccacagagaggatgtgtagcatcatgaatcttatcttctggctcttgcatttgtctg

SEQ ID NO: 30722 - DNA, 389 bp, Zea mays
agcttgtgaaaccaatcacaagtttatttaagaatgataccaaattcaattagtcttcaaaatgtaatgaagcctttgaacagctaaaagtattattgaccactgctccggtattggctcaaccggacattgaaaagccctttgatgtgtattgtgacgcatcaggcaaaggtatcggctgtgttctaatgcaagaaggccgagtgatagcttatgcttcaaggcagttgcgctggcatgaggaacattattcaactcatgacctggagttagctgcggtggttcaagccccaaaaatatggcgtcattatctattggaaaatatctgtcacatttatacagatcataagagcttaaaggacatctttacccaatcagagcttaacatg

SEQ ID NO: 30723 - DNA, 336 bp, Zea mays
  unsure (1)..(336): unsure at all n locations
tanggtaagagaaagttaggcaaganaaacttctatcccggatggtggatcttgatgcatctagagatctggtttgacttttatccttgacggggactcttttcctttccttgatgaggttgatcttcttcgtattggtgtcttgggtaagatagatttgtatgtaacacgtangtagagcagctggtttagtagatggctatgagtttaatgaggttagtcagaatctggtttggtcatttgcttctagacgggtgggataagttatgtaacctatcatgtatgtcaagttgttgggtatggccgaattgatctaagtcaccaatttagaagtat

SEQ ID NO: 30724 - DNA, 155 bp, Zea mays
gggaaaaaaacccagccacccacaagggaggaggtttcttaaaaccaactccctccgcccgttggagctactgatccctaaaagccgagggccatgaccgaaggatttcaagcaaaggtaacacgaagaaaaatgcttcaaagtataagggggcc

SEQ ID NO: 30725 - DNA, 411 bp, Zea mays
agctcgacaacatcatttggcatcttatataaaatttctgagatcaagtatatttaattcattcctgaacaagcaaaagcgggtcttatcaagtggcttagtgaaaatatctgctaattgatctttcgacctcactccttctaaaatgatatctcctttcgcaacatgatctctaaggaagtgatgacggatatcaatgtgcttggtgcgagagtgttgtataggattattagcaattttaacagcactctcattgtcacacaacaaaggtaccttttctagaactacgccatattctagaagaggttgcttcatatataaaatttgtgtgctacaagcacctgcaacaatgtattctgcttcgacggttgacaagccaacactatattgctttttggatgtccatgacac

SEQ ID NO: 30726 - DNA, 341 bp, Zea mays
atgccaacttaatgcccctcactataagatagtctaactattttaagggcaaaactcccatgccttaagataatgagggttacattttataccctgccggatatcccgagctcaaaattacgagaattcactctagaaagtctcactctggctctaatcatgcttttatgtataaaactgaggcatctagctctatgcaatcaacccgtgctaaattgcctaagaataaaactcctattgcatcaaatgatcataacatttcatttaatacttttgatgctacctatgtgctaactaacaaattacgcaacaaaattcccaaatattgttggggcaaacac

SEQ ID NO: 30727 - DNA, 64 bp, Zea mays
tgtaaaatctcgtctcaccaaacggggaagacacgagggctttttccagcggccaaaggaggct

SEQ ID NO: 30728 - DNA, 322 bp, Zea mays
catagggatgttgacagtgtatgcacacaacatatgagaggcaacccacggagtgtcacctcactagatgagaatgttgatgggcaagatactatcacattcggagaccactcacaaggaaaagtgcaaggacttgacaaggtggcaatttcaaatgacttatcaatatcaaatgttctgttagttgcacccttgagctctaatttattatcagtgggacaactatgtgaccttggacttcaatgcttatgcacttcatcagaggttattggaacaacaatacatgatgaattaatggttttcaaaggacttacatacacca

SEQ ID NO: 30729 - DNA, 350 bp, Zea mays
ataaaactccccgggaggatctccccagtgttaagtatcctcataccccgcgacttacagaacacgcttgaaggccctctttccaacactaaaaaaggtgggtcaaacaccctttagcaatgagcctcaccctttaaagaagaccatacactgggaaggccaatacccattaccagttctaccgccaaggttaaccacgctcactttaaaccttaaaagggtgcgcggaaaaaagaaaatttctaaacgttaacctggtgattcccacccaaacaagaaattggaacttcttttgccaggaggaacccttttcccccctggggtgggctccccgtctatcccagaccccc

SEQ ID NO: 30730 - DNA, 322 bp, Zea mays
agcttcgcaaagatgaacgaatatatatatttggagaatggagttagggttcaagcgagtcatgttgatgtgataaaaatcaacgataccacggaaaaaaggagatatgggaaggccgaggccgcgaacaaggaaaggagtgtaaaccactgactcgtgggtatcttcaattgggacagtggttccgtggcaagaacgccaagaacagagttcccgtggagggagaaccccgatggaaacaaggcggaaaagctcaacttcagaaatcacagacatatgggtacctgccaaaggtaactgactgttggggtcgatggcgggg

SEQ ID NO: 30731 - DNA, 448 bp, Zea mays
taaccccgatccaccagctcccctcttgaactgactggccatcatgcccaattggggctcactggacgacgctcagctcaagacaattcgaaggtatgtcttttttcctcgcctattatcctgtcatgcttgcaggactctatagcacactgcaaaccctcacaaagagcacactacgtaggtgcatgtgtactcactaagctagcattctcaagcaagtctattctagcatttctctccactagctcagtctgtaaaccaggacaagtctaacatgcacccaacaagctagacctaaactgaagctcatcgcgctcatctagtagggtggagtacttggtctagaaagatgtgatgttcgacatgtgtagagcaaatccaccacattcagtctcgtcagacaccacaacctgaagctctagtagactccagctccctaagtgtgctc

SEQ ID NO: 30732 - DNA, 411 bp, Zea mays
agcttcgcacctctgatctaattcggctgcatcgttcttcgctgttggccaatagaatcctgacctgaagaccttcccgactagcgttctggaggctgcgtgtattccacattgcccagcatggacctcctccagaagttgcttcccagtggacgggagaatgcacttcatgaggacgcctgatgcaccccttctgtataatgtctccccaatgagtgtatagtgagccgactgtctggcaatgcgctcggccgagttcttgccgtctggttcttcttcattctttatatacttaatgattggccttctccagtcatcagagtctgactcgggttgatctatgatgttgcactcttctgtttgatccattgagatactcggctgtagaattcttgccaaagactccggggg

SEQ ID NO: 30733 - DNA, 413 bp, Zea mays
  unsure (1)..(413): unsure at all n locations
ttactaaaacacttagagagtgatgaagaatgcacgattaaggaaaccaagcaacaagagcaacaaatgaaacatgaatcactttctctcaagtcactaatcactaatgatcacttgtctcaattgtggaacttggagagatttgaagccttgattgtgtcttggaatggattgctagctcttgtattgaatgtgaaggattggagtgcttgggtgaagtgaatggaggtggttggggttgtatttatagcctncaaccacttcctagccgttggtcctttcctgtcgaccgcaaacggtctgcgcccttggtccggacggtccgcccctgcacatcaatggctaaaatcgcaacagtcagcagtaatggctatactaacggctatagagcatntaatgcgtcgttagatgtc

SEQ ID NO: 30734 - DNA, 416 bp, Zea mays
agcttgtcacgcaggagctagagaccgcttgactggctgtttcagctttagaggacagctgcactgtcttgaaggctcatcgcgacaaggctatggataaagccgttcgcgctggacagatcctgatgaggagacccggcgtcgtggtgcctgacgatattgttgccaatgtcaaggctgcgcccaatgctgcaagccatccttctttcgttccacctatgaaagacattgccaacaaagatgtttcaatgcagtgatgtcttgcaaagcactcttttttatcgagtcagcatcttttttagaggatataatatgaattcttatgtgcatgtgacagttgtgttagaactcgaatattttgtgaacagggtgccataacacgcccaagtgccagcaagtaaaacattctttttact

SEQ ID NO: 30735 - DNA, 364 bp, Zea mays
cctgacaaacatgagcgggtctgatcactaatatgtttcatctagtaaatggccgaattggctcttacaactatggatacttctgtagagggataaaattacttacttacagcagaatttcatgattgctggttgagtagtttgggagatatcaaattttgaagttaactatgttgttgtctaaaacagattcagtcagttatcttgtcagatgttctaaaacttatagatggcagaatttaattatccattgaatacagaagttgtagagtattttgtgtagatactcctacagtatttgtttgatatcaccactattataactttaaagatacaaattaatcaacagctcttctgtttgcat

SEQ ID NO: 30736 - DNA, 376 bp, Zea mays
agctataccaaatggacgtgaagagtgccttccttaatggacctatcaaggaagacgtctatgttgagcaacctccaggctttgaagatagtgagtatcctaaccatatgtataaactcttcaaggcgctttatgggctcaagcaagccccaagagcatggtatgaatgcctaagagattttcttatcactaatggcttcaaagtcggcaaggctgatcctactctctttactaagacaattgaaaatgatttgtttgtatgccaaatttatgttgataatatcatatttgggtctactaacaaatctatttgtgaagagtttagtaggaacatgatacaaaaattcaagatgtctatgatgggggagttgactat

SEQ ID NO: 30737 - DNA, 321 bp, Zea mays
gacactaaatccctcttcttcggttggctttatatcgatcaatcgatcgcttgtgcggaaggagccggatcgagtggagtcacggagactgctagcttccattccaacaagaggttgaggtacacacgcacaggcacagcgtgtgcgtgacttggactaatcgctgtgaccggccggtgcgtggtggcatcgatctttagcttgcttgctgattccttctttcctcctgtagctagctagatactccgtggtcgtcgtcgtcgttggacgtacgccacaaaagggagctagagaagaataccgtacaactgctttcaacat

SEQ ID NO: 30738 - DNA, 373 bp, Zea mays
agcttctatggacgttaagcctgtgcaatgcttcttcttcacttgagcctagggagtaaccaagtgaaacataaagcatgactgattttgctcgatgccatttgatttctaatttgcatgaccaggaatcacccacactcaatgtgggaacagatacaaccccaaatgaatactggatctttcttatgctatcagcctcttcctttgactctttatcctcagacacagttgagacaccaagaagttcaacatgatgactttcagaatcttctgcttccctcggactcaacaacagaccaccacctctagcatcaatgagggtaattttcagttcaccagagtggactgcatgtccttttgactctatgatcac

SEQ ID NO: 30739 - DNA, 216 bp, Zea mays
tcattttatctgcggtatcccagtttaaaatatgagaattcatgcttcgaaaccccctaacgcttcacatcatgctcttatgtatataaatgaggcttcaacttttgggatcaaccatgtaaattgcctaaaaaaaatctccttttgctccaatgaacctaacatttatttaagactattgatgcatcctatgttttaactaacaaatcacgcaaa

SEQ ID NO: 30740 - DNA, 360 bp, Zea mays
  unsure (1)..(360): unsure at all n locations
agcctgtgaagagcactgcggtctgntctgctgactccccttatcatcattctgagtggagttgtggatggacctgacatgcctcggataggatcttcctccgaagcccctggtcatttcggaaaatctgaaggcctcctcccttctttggcgaaagtcattgtcagcacgaatgtactcgtccattctttggagcagcttcttcagggtctgaggaggcttcctagcaaagtattgagcagcaggtccaggacgaagtcccttgatcatggcttcggtgacaatttcattgggcaccgttggtgcctgcgccctcaaacgcaaaaatcttttaacatacgcctgaaggtattcttcatg

SEQ ID NO: 30741 - DNA, 378 bp, Zea mays
  unsure (1)..(378): unsure at all n locations
nttcttagcgtgctgccacattntgtgttgtggaagtacttgtatcactgtcgccctgggatggcggngggcagtatcagctggttggtggtgctagtttagagatgcgtcgcgggaggaagactgaatatcttgaaatccctctcaaagacagtatcaagggatggcgcttggagtggtttatttgtgagaaccatggaaattctctcccccctatgtcgggaagacagccggatgttcgcacttcaagttggaccgaatcccccactgatcaggaggtagctgaggcaggtgccttgctagctgaagttgggctactgaaggagaaaggtctgactgctgacgntgttggtgctgatttttgtttcaagaatattc

SEQ ID NO: 30742 - DNA, 383 bp, Zea mays
agcttgtggaggttcttcattcccacatgcgctaagcggcgatgccacagccagcccatgcaagtcttagccattaagcatgcatctagaccggcctcttcttttgcaaaatcaactaagtaaagcttgccgtctagaatacccttaaaagctagtgaaccatcacatcttctaaagacagacacatctatatttgtaaacaaacagttatatcccatattgcataattgtctaacagatagcaaattatatccaagagactctactaaaaacacattagagatagagtgctcatttgagattgcaaatttacctaacccctttaccttgccttggattccaataccgaatatgattgaatcttgggaatccttaatcttgac

SEQ ID NO: 30743 - DNA, 383 bp, Zea mays
  unsure (1)..(383): unsure at all n locations
ntanggtaaaagtcatgaaatgaccccaaatatatgcttgaattacccttatacccctaagataccaaaaaccctaattgaaaccctggaaaaccctaaaaccaaaccctaggggcctatgtgcaaaattagtccacttttggactaaagtgcaaaaaccaagccaaataagtttcttaagtcccttggttcacaaaaatgtgtacttgaaagcaaaacccaaggttttggacctaaatgcaaaatggacctcatttgagttttactctaagtctgaaaaatcagtgtaggggctcaactttggggctttgtaacttgcaaagtatagggtttttaccctangtcaccacatcaaagttgaagacccattataggagaacaac

SEQ ID NO: 30744 - DNA, 317 bp, Zea mays
  unsure (1)..(317): unsure at all n locations
agcttgcacttcacatntttataactatactgcctatgcaacctaccaactntttgcatatattttcgtaccatagaaagttgttctgtatagacaataatttctatttgatctgtcctcacatcaactttcacatgccttaggcatttgcaacctttttatttccaagttactatgcaaacaatatcgaggcacgactacactaccgaagaaatgtattgagattgtataagtacaatatcattctatggcttttgaatagtactacattggcatattattttcctttacagtagtagtgtcacacccggtttttg

SEQ ID NO: 30745 - DNA, 318 bp, Zea mays
  unsure (1)..(318): unsure at all n locations
tctaaagggagaacacatgatangtataacttatgttacttctccaaaagatagaccctgtgccgcttgtcaagtaagtaaacaggtgggaagctctcatcatgcccaaaatgtgatgacaacatcaaaacccctggaggtacctcatatggacctcttcggacccgtcgcctatctaagcatatgaggaagtaagtatggccttgttatagatgatgattatcccgcttcacttgggtattctttttgcaggataaatctgaaacccaagggaccctcaagcgctttctaaggataactcaaaatgagtttgagctc

SEQ ID NO: 30746 - DNA, 411 bp, Zea mays
  unsure (1)..(411): unsure at all n locations
cagcatccccacccttatcacattcaatggtttaacaacagcggtgagttcaaggtaacaaaaacagcaagggtgcatctttctattggctcttaccatgactttgctgatttcgatgtggtgagtatggatgcttactctcttttactgggacgtccttgggagtttgatactgacgctattcaccatggtagatctaataaatatactttcatgcataagggaaagaaaattgcgttgcttcctatgactcccactgaaatggtccactttgaacatgagaaaaagactaatgctaagcaaaaggtgctttgaactctgaaaatcagcaacctattaagctaaaaactcctactttgctagccacaaaatctgatcttgntgagttacatgccctctgtggactttgct

SEQ ID NO: 30747 - DNA, 387 bp, Zea mays
agcttgtgaagattcttcatcccaacatgggctagtcggcgatgccagagccaacccatattagtcttagcaattaagcaattgtcgagttcagcctttttgaaatcaactaagtatagctgaccctctaacactcccttaaatgctactgaatcatcacttcttctaaagacagtaacacctatatcagtaaatagacggttgtagcccatattgcataattgagaaacagaaagcaaattgtaatctaaagaataatagaatggtcaggtgatatagcaatcttaccaagtcctttgaccaaccttgattttcatccccgaagtgatagctctgggggaatctgttttcttcgaggagaaacatcctttctcccaccatatggtt

SEQ ID NO: 30748 - DNA, 326 bp, Zea mays
tcatatatatagggccaatatggcttgagtacaaggtcattatagatctaaaaagatatgcctagatacaatctctaacactcgcccgcaatcgcggcgggagaagcacgaacggaaagactgcaccgaaaatcagtaaaataactgaacaagccagcccttggtcatgatggcgggaaactgatgtgaggaccgcacgtggagcacccaaacttgacccaaggtgactttctcatggacaaagtgtatgtcaattggcagctgagattccaaaatggggtctggatgcaattgataaaatatgccggggctttctttggaggggc

SEQ ID NO: 30749 - DNA, 410 bp, Zea mays
  unsure (1)..(410): unsure at all n locations
agcttatgaagattcttcattccaacatgggctagtcggcggggccagagccaacccaagttagtcttagcaattaagcaagtgtcgagttcagctctatcaaaatctaccaggtatagctgaccctctaacactcccttaaatgctattgaatcatcacttctcctaaagacagtgacacctacatcagtaaatagacaattgtagcccatttgacataattgggatacggaaagcaaattgtaatctaaagaatctacaagaaaaacatttgaaatagtatggtcaggtgatatagcaattntacccaatcctttgaccaaaccttgatttccatccccgaatgtgatagctcgttggggatcttggttnttctcatatgaggagaacatcttcttcttccctgtcat

SEQ ID NO: 30750 - DNA, 292 bp, Zea mays
tcgacagagagcaacacaaaagaacaattcgtctatatgcttgtgataaagacagtggccgaagacagcggcttctgtcacaagccaaagggaagaagtagccgagtgatgaatgctggaattttgaagtcaaaacgaagaaagacactactgtctgataccatttgtaaagaattatgtaatgagatgggattattgtaatatgacaagctcggtcattttccctataatagatgaacagtacactggtaaagacctttaccagggctacccttccatagctaggctctga

SEQ ID NO: 30751 - DNA, 306 bp, Zea mays
aaaaactaaccttaggggaacaatttagactaccaagtttttttgaaaaacacgggtgtatcgcatgtcacgcacggaaacaagtttgtgttcctcattcacaccagaacatcatgacgactgacaggccactctagctcctacacatggacctattcggcccgatagcttacataagcatcggcgggagtaagtactgcctagttattgcggatgattattctcgcttcacctgggtattctttttgccagaaaaatctcacaccccagaaacttctaaaggattcttgagaccggctccaaaag

SEQ ID NO: 30752 - DNA, 314 bp, Zea mays
  unsure (1)..(314): unsure at all n locations
catgaagctttccacaggagggagttagcggnctcacgcgagcgctgttccgttctttccgcgcgggcaaccctntataagagggccctggtccttccttttatatgcgcacagagaggaaccacgtgcacaatgggaggtgtaacagtgtgctcacgtgtctagcggaagagagctagcgccctaagtacatgccatcgtggcagccggagaggtgttgggacacggttcgtgtggttgtcgggccgtccgacgagcgctcgtacatggcggaaagacaactgtcggggctggccagtccttgctgaccgcct

SEQ ID NO: 30753 - DNA, 338 bp, Zea mays
tctcctgtgcaagctccacactttctctatattgcgatgctgccacatacaatagtaatggagcccttggcgcacgtggagttaatgttgttagatcaatcaagtattgctttatctcttctaaggctttctgttgagctaagccccattgaaaaacttcggctgactttattgtttcaaagaatggcaagtttctttctgctgatctagatatgaatctattcaatgatgccagtctttctgtcagccggtgggcccccttctttgtgcttggcggctccatccgaaggataacttcgatcttgcttgggttagcttcaatccccctcgttgaaact

SEQ ID NO: 30754 - DNA, 412 bp, Zea mays
  unsure (1)..(412): unsure at all n locations
agcttcagtgacaggtgttgtttctctgcagccgctggacccaaatcaggagaccctttctcttcgagaggcccgaagccagaagaggaaggccaccagtccaacaccccaagaggacgagttggaccaagaaatcagaaatatggagatgcttcatcagcaagtgcaaaagaagaaggagaagatggctcgactagctgacctacaaaggcagattgacgaagccactgaagaagtacgtcaccttgctcaagacgagcaagacagaaggccccagcacagggagcttcatcaagagggcatgttcaacgacgatggatggtatgatgattntaatcatgatacctttacttttgatgatgcttctcccctagcagcagaactgcaggctatcccgtggcccccatcatac

SEQ ID NO: 30755 - DNA, 304 bp, Zea mays
acacgcttgccccagtgatcagctaagcatgtttgaatggctctctgataagtcgctccagcgtttttgaggccgaacggcatggaggtataacagaaagcaccaaacggagtaatgaacgctgttttttctttgtcttcctttgccaaactaatctggtggtatccggaatagcaatccaggaaagacaacacataacatccagcggtggagtccaccacctgatctatcctcgggagcccgaagggatccttctgacagtgtttgttgagatcagtataatcgacgcacatgcgccaatcca

SEQ ID NO: 30756 - DNA, 354 bp, Zea mays
agctacatcgtgttgttctgttcatatcttcacaattgagttcccacatacaaaaaggtaagaggaaattgacgggtcactcacagtgatataacaaagtaagttgcaaaatgcaactaagacaaacagccaaacaggtaatgcaaccacggaactctagtaatataacaaattgcaaaatgcaaatgagacatgtgaatgggcattatatagcaatcttttacatgaagtacaatacttttaatcaatttggacatgacaaagtttcaaataaattatctttccttcatttttcggagccaacaacaccttcgtttctttttaggcataaactctggaatttgaattggcttt

SEQ ID NO: 30757 - DNA, 312 bp, Zea mays
tcaggtgctgagttactggcccagatattctgctcagtatgagactttgagtttaaataccctgaactcacagtatggcagacgtgccctgatttatgttacttaaactaaggagcaagtacataacatgactatagacatatagagcaactaatgctacatgatctctgccaaaaaaaatccccatattttcttatgcatgtcaccatgcatgatacctctggtggagtgtatcaagtaaatcagcaatcatattcacttggaatccaatgcagtaactacagttaactaccattacaatcttgtctgtgc

SEQ ID NO: 30758 - DNA, 374 bp, Zea mays
agcttgcattgcatatttaaatttcttgtattgcatctagggcttgtctaacctagttgagataaccgccaacaaagcaagtgaaaaagtttaactcggcctcaaacttgacaagtctttgtttttaagcttttagtacttaaattcttacttactatgcaattgttggttcttgagatatgcatgaggcactacacttagggggagtattcgaaactcaaatctttcatgaaaacccctagtgcaacgccaaaatgcaaatctcaccatttgcctattttctctaaaaattatctagcctatggcaaaatattttgaaacatatgagaaaattatatgagggtaccaatacctggtccaaaaagtggtatttt

SEQ ID NO: 30759 - DNA, 214 bp, Zea mays
  unsure (1)..(214): unsure at all n locations
ataattttttattggttaagctttccatcttactaaataataggtcccttgaaaagtttcttccccgagcgttcgccaacctccagatcacccgcggnacgggctcgccgccccgcgggggctcacgccgcagcaggcaccgcccaccttaccgcacgtctgggcctccaccgctgctgcctgtcccgccttccttgcagaccgccacaccgcg

SEQ ID NO: 30760 - DNA, 380 bp, Zea mays
agcttatgtacattttatgtccaataaggaaattgtctacgcatttatttgcatgagtttggtcatggagtgataatggagaattcaactttggggtcatagttcactaaataagaacatggcctagttctgggtttatgcgaacaattaccaactttctatcaacacatcaagcacaagagcaaacacatataacaccttaacaggttacctaaagaacggaggacaactattttatcgaagttcacaatacaacattacaccacattatctacaatcaccggttattagaataaaagtgagagaagcattttgggtgtataggtgacaaacataatgcaacaatcaggatgcatgctcgtcctacacgttctcaccaa

SEQ ID NO: 30761 - DNA, 331 bp, Zea mays
tctgggtatgaagcacatactagagaagataatggctggattatccaaatgtttcaaggaagacgatcaaggggtgatattgtttaaaaaccgcataatagtgccaaagaacgaagaactccgccagcaaattcttgatgaagcacatcttattcgttattctattcatcccggaagcactaagatgtaccaagacttaaagcaacattactggtggacaaagatgaagatccaaattgcacgctatttggctaaatgtgacacttgcagacctgttaaaggcatacacatgaaaactgctggttcattacagtcgctaccaataccgaca

SEQ ID NO: 30762 - DNA, 363 bp, Zea mays
  unsure (1)..(363): unsure at all n locations
catgcaagcttctcctgtctggaatattctaccgnattcccaacagtcgatttagaatagttgtagatgaacttatgcacctgttaaatgatcaactaagcaaactggttagttcacaaggtttgtgatggtccgcaaacaccaaaatccattataggaaatattgagactatttcccttttagtacccttttcctttcacgaaggaaaaagtttttaatggggccgcacgttgtaatttttatcttttgtttagccctctgcaatacaaaggccaaattccccacatgtaaaatataacaccaggattcgcgccatctagtgcaaaaggtcatggataagctctaaatccttcctaggggga

SEQ ID NO: 30763 - DNA, 344 bp, Zea mays
  unsure (1)..(344): unsure at all n locations
gcttcgtacgtacgctcctttttctttctggcattccgtccaacagcgcgtgagcatgtaggctcatagtgtggcttcgcctgatggttggttcaacctggcgcggngtacgcgagtcagacgctcaactttgccgcgccggtgtatgtcngggatgaggtggttgctccagtcaaggcactcaacatcaggatgataggtacgacgaactgcagcacgacaagccgatatctgtatgcacctgcaagccttgctcacacctttgcattagtgaagacctcaacctaacttaactatcgtttgctctgcgcagcgtcaaattcgcaaccaaatgcttcatggac

SEQ ID NO: 30764 - DNA, 365 bp, Zea mays
  unsure (1)..(365): unsure at all n locations
agctttatcaaatggacgtgatgagtgccttcctcaatggaccaatcaaggaagaggtctatgttgagcaacctcccggctttgaagataatgagtaccctaaccatgtgtataaactctctaaggcactttatgggcttaagcaagccccacgagcatggtatgaatgccttanggatttccttatcactaatggattcaaagttggaaaggccgatcctactttattcactaaaactcttgaacatgactcgtttgtatgccaaaactattgtgatgaaattatatttgggtctactaacgaatctacatggtgagaatctaagttgatcatgacaacaaaattcgagatgtttatgatgggg

SEQ ID NO: 30765 - DNA, 61 bp, Zea mays
caactcccccacgcaacaaagcggaggtttttccgccacagggggaaggccgaaaaaggcc

SEQ ID NO: 30766 - DNA, 143 bp, Zea mays
ggaagaaggactggtacactcacaccgaacttttgtggctaatggtcaccgacataaaaggtcttaatcccacgacgtgaaaacaagtgtctgaccactgcatattgacatctattatttgaaaaagaaggtacgaaaaactt

SEQ ID NO: 30767 - DNA, 235 bp, Zea mays
  unsure (1)..(235): unsure at all n locations
tgctagagctcttgtaagtggtttgacacgtanaaatacttggatgtcattgaatgtggcgtggttggggtattatagccccaactaccaaaaatggtcgttggaaggctgcactcgcatggcgcaccggacagatctgtgcgccagccacgtcagtataccgttggggttcgaccgttgaagctctgacttgtggagccatacgctgtccggtggtgcactcgacaggttctgt

SEQ ID NO: 30768 - DNA, 444 bp, Zea mays
  unsure (1)..(444): unsure at all n locations
ctaagcacgagctcactgaaatttatcccctggctacgtatcccagcacccatctgtctacattaactgctctagatcgctcttctttgcaaatcactaagtaaagttgcccgctaatacacccttaaaggctagtgaacccttccctcttctaaagacagacacatctacattcgtaaataacagttatatcccatattgcatagttgactaacagataacaaatngtgaccaagagactcaacttaaaacacattggagatagagtgctcattagaaattgcaattttacctaacccttttacctcgccttgattcccatcaccaaatataattgaatcttgggaatccctattcttgacgtaggaagtgaacatcttcttctcccccgtcatatggtttgagcatccactgtcaataatccagcttgaacccccggatgca

SEQ ID NO: 30769 - DNA, 346 bp, Zea mays
  unsure (1)..(346): unsure at all n locations
agcttagcctcgaccggaccaataccagttcagctcgcacacactgggagtggagagatggcgggagtaacgtgtgcccacctagcaagtggctggatggtggggtactgtgctctcnggtcgcgtgaacccgttctggtcttgagaaacccggtgacgagttgacatatgcaagggttaagtgctacatatatcgtgtggttggagatccccagctgggtattaatccattcgtatcgctgaacttctcagatatgaagaatagatattcaatcctcatcgtagataacaagtgaaactaaagctgctaaaatgaagctagtgtaggacaagtgaatgctctata

SEQ ID NO: 30770 - DNA, 452 bp, Zea mays
  unsure (1)..(452): unsure at all n locations
agcttgcacacatagctcatttgaatacctttgatcatatctcatttatatgctatgactaatgtgtntcaagtttgtttcaaaccaagtcataggtatattgaaagggaattggagtcttctgcgaagacaaacgctatcactccgtaactcatacttcgccaccactccgagcaactctctcttctttgggggagaaatgagcatcaaagaaaaggactncatccttgggggagagagtaaaagctcaaacgcaaaaggacttcgtctntggtataatcttaactcacttatctatgaccaaaggggaagattgcacttcgacggctctaatgattccgtctttggcgattcatgccacagagggggagaaatgagcccacagcaataggaccgcaccaccaccaaattcaatacttattgcttccaaaagtattatcaatgggtatcta

SEQ ID NO: 30771 - DNA, 488 bp, Zea mays
  unsure (1)..(488): unsure at all n locations
agcttcatgatatntatntagttgtgatgataccatgctcattcatgtnagcaatattgtatccagtggcataactaaaacctaaagatccacaaaagcttctgtngacnaccaaagtaacaaatgctccaagcaattcgattaaaaaaacaaatgctccaagcatcagcttgtcgaatatagaagcgggctatccctagacatgctagcaaaatcaatcaaaatattttcagcaatcttctcggtactaagttgatatgtcagaagtataatctgatgtgggtaaattgccgcatataataattgtatctntagttatgacccgtcataaaagggcatctagctgagttggttagatagtaggtcccgagttcgactccccgtgggagcgtgattcaggctgggttaataaatcccctcgtttgtccagtgttccacaccaaagtacaggtctaaggctcggcctccgntgcagtcattctcatatg

SEQ ID NO: 30772 - DNA, 465 bp, Zea mays
  unsure (1)..(465): unsure at all n locations
ttcgcatcaggttccagaccttggcttctcacggcccacacgaagatattcagccttataattgcttcgggggtaagttgatgaagatagacttcaaacattttcagcacttctacgacaaagctgctcaggggaaatcgtagtccagctttcaagaagcttcggaacactacgacttcattttcctcaggggtcaggcaagttttctctccttcgtcgaccctcacaatggataaatcccggaagtatcttcccctcatgttgacaagatgattntctttgatacctcgattgccaaaagctgaatggcttggtcgccangggcgatcttcggagtcttcaccaccactatccacatcataactgtcgctgtcatcagtatcttcagacaaaccttctanaatctctntggtgaatttttctgtgttggtcttcgacattgctataagaaaccccaggttcttt

SEQ ID NO: 30773 - DNA, 438 bp, Zea mays
  unsure (1)..(438): unsure at all n locations
acacataaaaactcagcttaacaagnntaatctctaaagttctccttctatttattntattaaataaataaaactacatctacattagtccatatttattcataaaaattagaatgtgcagacagtaagtgaaaccattttatttaatatagaataattctatgaacattttgcaatttgaatcactaaatctggagttcatatgcaaaagttatgaaataacaacgttgggaattcaaaatatgaaattagggctacttctgtgaatatttaaaagtccagcgctaaatctgcaagattacaggggtctgcgcgcgaaaaccaacgacgactggttgatttcaagcaaacccagcgtctctttaataaaactaccgagcgaaggggtatccggtgaatctaaccgccagatctaaaaccaacgactgagattatatt

SEQ ID NO: 30774 - DNA, 444 bp, Zea mays
  unsure (1)..(444): unsure at all n locations
agcttatgaagacccaatataatggtttcatactctggtatgttgnttgtacactttgtggattctgatgtgaactttaggctggntgtgtatctgtacttggtgcccaaggacactaatatgaatgttgtgaatcttgctccttcatgaccccacgtgtcgtcacaatgaatggtccacacctgtctggaacttggtgtggatgggtcagtgaaccagtctagtcgactatgaattctggcaggacttgagacttgatggcacttcctgactcgaaggatatatgatactttgataattacatggcccattttcctattattgtggaggcctcagggttattggatatgtcaaagaggttgcgctctattagaactttgactttgtgtgcttcacagtaatgcttgagttttctagatgccatgagcaccgcataggctatct

SEQ ID NO: 30775 - DNA, 460 bp, Zea mays
  unsure (1)..(460): unsure at all n locations
agcttcaacgaatgcaagtccatccttcctttgatgcattatatacctatttctctctaccactgcctaagcctggattatgggatgggaatcgaattgcatggtaagcatgagagagcccgcattaactattacttccgttaaaagatatgggacaagtaaaaagggggtataagtgaaatgttntccaaaagagtgcgatgaagggtactcaccctcatcacctggtgaagtaggatgatcagggactccctggtttaggggagggcctaaggcgttggctcagctggtttaggcgtgagcagaaggatcatcctctcatataaggaccggtttgtcatctttcattacctgtactctcaaaaagtacaaccactcgaggctgtgtgggcagccactcaatctgaactcgtacggtcccaccccanggttatgaaggctggngtagcaccgggaggat

SEQ ID NO: 30776 - DNA, 390 bp, Zea mays
  unsure (1)..(390): unsure at all n locations
cgtatcttttgaggtctccctcnttgatataaagccgaaggtacctgttcacacattacactctagaaacactgttaaatcatgtttttgaggaccttcggaagccgaaggcccccaacagtagcccctcgcaatattaatttgtttgaaataataaattcagattgcgatatgaacgaaggctttatgccgaaggtccgaanaaacaccttccctttgctagaatagcaacattcaatgacaagtggggtctttcaactttcaacgcatcaagcgtataaatacggccataccgcaaacttatnttgcacgctttctggcaaccactcctgctcactcattttttagctcttgtgcactgtgatctgctaaagttttagctttgaagct

SEQ ID NO: 30777 - DNA, 404 bp, Zea mays
  unsure (1)..(404): unsure at all n locations
cagcatgtccttcaacttctgccatgaagtgattttgtcctagccgaagagaagagtactacggttgtgcaacattcttgactgccatgacaaaggatttcaccatgactggtgtattgcccccatangaagatatggttgcttcgtagctcattagaaactacttcggatctgagtgcccatcatacatggngagctggngtggcttgtatgatggnggccatggngtagcctgcagttctgctgatagangagaaacatcatcaaaggcanacttcacatgatgaanatcatcataccattcatcatcatcgtagaaattgtcctgacgaagctctctgcgttgaggtcttcggtcctggtcatcttgagtgagatgacgcatttcctcagtagcctcatcg

SEQ ID NO: 30778 - DNA, 188 bp, Zea mays
tttgaaaaacacgtcgaccacatataacccctcgtctgggcctagaatcgagcgcgacttttggggggcgattttcggctccatactggagcctcatgggccgccgcgtctcaattgaggggagccatccctgtacagtggactctcgagatactcacacggtgtatggcctggctgccgatacacat

SEQ ID NO: 30779 - DNA, 435 bp, Zea mays
tgcttcttgtttgctttccatcgcaccgcccgatggaagagtatatttaattcagttggagcttgcattcgaagaaactagcctctcatccgaagatatacccagggcactcgaatgtattgaaaatgaggttgatgtccttgatgaagtcataaccggccacgaagacttctgtgcgctggtagcttcttgtggtacagctgccgccttcataaaagccggatgttatcacgaaaaagctgtcaacacgccggaattcaatccttcatcataggatctggttgacattgcaactgaagcccgaagcatatggaatagatttattactcagatttgggctaagggcgggcgtgaatcgactgtagaccaagcctgaaagctgcttaacacgggatggaattttaccttgatcatctctagccaaatttctgatta

SEQ ID NO: 30780 - DNA, 80 bp, Zea mays
  unsure (1)..(80): unsure at all n locations
gtggttatcattatttaaccctattaagtgtctaatcatgctgacgtaanaatatcaaagttgtagaacactttttaaac

SEQ ID NO: 30781 - DNA, 480 bp, Zea mays
  unsure (1)..(480): unsure at all n locations
ctcagcttcttccacaagtcgcatcggagtgggcgacaagaaaatatgatgacgaaggtggtctactacgagaccaatacttcatcatcttccacatccggctccgacgcgccctccataacttctaagcgccatgagcgcaagaagtttagtaagatccccttacgctatcctcgcattcctaaccatacgcctttactttctgttccattaggcaaaccgccaacctttgacggtgaagattatgctaggtcgagtgatttgatgaaatttcaccaaacctcactccacanaagtatatggaatgtngttgagtttggagcacaggtaccatccgtaggggatgaggattatgatgaggacgaggtggcccaaatcgagcacttcaactcccaagccacaaccatactcctcgcctctctaagtagagagggggtataacaggtggcagggataaagagcgccaagggaagttgggat

SEQ ID NO: 30782 - DNA, 283 bp, Zea mays
  unsure (1)..(283): unsure at all n locations
acattttctgctatctaaaaaaatcaatgaggtaatgaacccactggtatgtgaaggtgaataaacctacgtgttctcaggacgaccgttgaaacgaagatgaaaaaaatactatataaaactaactgaggacacaaataactgaggacaaaaaatatctcgttactcatactggaatgcctggacctgaatatcgaggtccnaccctatacttctgtttggctcatcacactatttggcttgcttgatttgggaagggatccacaatattcatgatcttccc

SEQ ID NO: 30783 - DNA, 317 bp, Zea mays
  unsure (1)..(317): unsure at all n locations
gccacaccatacaacacttctcgctaccatatcctctggcatcttacctgcaaatcaacgggttggtactgttagagagctgaacgtctgtgatattcagtggttgggaaactgtgagaaccaactggcaccttgattctaacgctttacatcgaatttaggattctgttgctttgactgcagactgaactgtgtgtggcatctgaaattgctggccagtgttaagtttcaccttgagtcgtccaacctgatacgatgctcatgtcagtgcgcattctacaaccngcagttacatcattggtggaagtcattcctgc

SEQ ID NO: 30784 - DNA, 417 bp, Zea mays
  unsure (1)..(417): unsure at all n locations
agcttcacccacacattntgagcaatgtttattntgagccaaggagattaaaccctaaagacacctaagggcactagacttccaagcaagggatcaggggataagttaaccaaattgccacaacatgattctaatccttaaacaaagtttaagtaaaattgtaacctaccaaatgcagggggaaacattaccaaaagaccccttgaagaccacagtttcaccccttaagtagagagcacactagagctctctaatcttttgtaagtcaaaatttaaacctaatctaaagatcaaacatgttcacttagtaaatggcgccacaaccacttggtctgaataccaaaaaggtgtcataccacctaaggcaccctctggaaaagttgaaactgaccaatttctttgacagaattggattat

SEQ ID NO: 30785 - DNA, 434 bp, Zea mays
  unsure (1)..(434): unsure at all n locations
ggacacaaaaactcagcttacgacgactacaggaccatctttgtttgttaagatnaagcgacaaccgtagtcgtgaagccgtttacaaccactgtagtcgctgtaataaccgcctgtatgctcctagcggagctctgagcatagactgtccacaccctcactgcagcaacggctcatctctacgtcacaccggacggtccacggcgatgcagacgtcttcttctctacagagaaccctataactcgcctctcgggagggaccccatcaggcatgagagtctcaatggtgctctatggtcgacagtacaccctatgtgtccctaaacgacgtagagtcgaatagagatgaagaatagaggcaaggaatactaatggtagggctaatttattgctactcctaacgcaagaacataaaggccatactaataaactaa

SEQ ID NO: 30786 - DNA, 313 bp, Zea mays
agcttcgtagtgaagcaaccttggccaaatcgcctcgccaaccggccgtatcgcaggcgcattcaatgcaaggatcgcctgacatcttatcctgacacgcgtgcctcagtcggcaaggtgaagtgacagcagtcacttcgccctcccactgactgacctgacaggagaacagcgtcgctcgcccctctccgactgctgtgccacccgccagggtgaggctgtcagcagttgagtccagcctcaggcgcaacaggaagctccgccttgcccgaccttgggcctcggcctcaggaggaagtctccgcctcgcctg

SEQ ID NO: 30787 - DNA, 304 bp, Zea mays
tgatcaagctacacttcacactaagaaaagtaagaagtgtagtgaatgctttgaaaaggggcacttgattaggtcatgtccctatattaaagaaaatgacttggtattaacaaggatgataaaaaatgttctagatgctctgagaagggacatataattaagtcatatccctatgtaaaacagaaggcatagttttataaaataaaacatttactaaccatgtagcaagcaagagacaaggaaagaagaaatcttcaaaacatgaagatcgcctttgctgcatatgccgaaaaagggacatcta

SEQ ID NO: 30788 - DNA, 487 bp, Zea mays
  unsure (1)..(487): unsure at all n locations
agctagaccgtcaattccttgtagcttgtgaaaggatcgcagnctattcgcgacgcacaacgaatacaaacaggcacacataaacatatacttgcataagaacattacaccatacaagataacatatcataaaagcgaacaatataaaatagagacgcttctacggttacgcgtggaaaagaactgcgatagtcgaagctacggtcgaggggctagcgtgtttacactaagcaagtattaattagaatatttaattcgaagtaactatattaattgctatttatgaaatataaattaatactacttagttttgactaacttactgttttaattgtggataattaaatcaataactaattaactaacataagtgattataagcgaacgagttaatctcaacgcggataacgcgcgatacccgtgaacggcgcgggacacacatgaacggcacgcgacaacgtgtgcgaacaacacgcgcgacactcgc

SEQ ID NO: 30789 - DNA, 404 bp, Zea mays
  unsure (1)..(404): unsure at all n locations
agcttatgaagattcttcattccaacgtgggctagtcggcgatgccagagccaacccatgttagtcttagcaattaagcaagtgtcgagttcagctctattaaaatcaactaagtatagctgaccctctaacactcccttaaatgctactgaatcatcacttcttctaaagacaagaacacctatatctgtaaaaagacaattgtagcccattttgcataattgagaaactgaaagcaagttgtaatctaaagaatctacaagaaaaacattggaaatagaatggtcaggtgatatagcaattttaccaagtcctttgaccaaaccttgatttccatccccgaatgtgatagctctttggggatcttggtttttctcataggaggagaacatctttntctccct

SEQ ID NO: 30790 - DNA, 441 bp, Zea mays
  unsure (1)..(441): unsure at all n locations
cgacatggtanatggcctgaggcatggcacaaccgccgtgaagggcacaaactccggtaacggccgcttggccatgtcgctggcgcaagtatatgggtgacaacatggctatatggttctgagttcatccgaggtgaagatttttcctgggtgatcctaatccatgccacagagggcacgaatcgcggcgccggcgcaaatccgggcgcacgggtcaccgacggcaagggggatggacctatgatatttttgcgtactgtaccatcagagtctccttcagttgttctgacatagcttcttcagaggtgtttccttcaattttcgtgtaacatgttaccaatcggattacaacaaaggtgttaacttatgaacatgctttaattcgatcatagggactgtggtcattcactcactcgatcaagcaaaatcagctttaaactc

SEQ ID NO: 30791 - DNA, 416 bp, Zea mays
  unsure (1)..(416): unsure at all n locations
agctntgaagttaatatatcttcctttttcaaaaagtgtagataaaaaggatgatggggtgcaagccacgcagcagccgctggagctcacataagagaacactgaagcgaactagccttcaccatctcaagatgatgcaactggtaacaatcaagccacaacaaatggcaccgttagcaataatcctcccttgatcccttgaagtttgtatggagtaagaaaaaaaattaggctctgttcggttggttgggattggaggcccggattaattcctacccggattacttctctaatttatatatattttgataagctgtaatgaatcctgacttattccggtacaaccgaacgaacccttagagagagagtgctntgaagatctaggaccaggtgatctttatggctaacgatcatga

SEQ ID NO: 30792 - DNA, 382 bp, Zea mays
cacacactcatgatatatatgacacgttgacacgacaacttttattgtgaggtgtatggtgtaccacctacttaatctccatttaggcatggcccacgttgttgttgttcatctttcaagtggtggagacacaaaaatactctcttcaccacagggagtcctcacacaaaagctctcgcatgttgatcatgtcggaccaattaatgctcttcacaccttgctcaactagagatgctccttatgatattgcccatggcaggcacaacacccctccaaatacttctttggagccatgccaaactacacacgggcttcctgatatagaacaacagccaccacaccatctacgaggtggaagacttcataagtaataagaaccact

SEQ ID NO: 30793 - DNA, 428 bp, Zea mays
  unsure (1)..(428): unsure at all n locations
agcttataagcagtctttttgtagatcttatgaagatagagacgggttgatgcatgacaggcggtgttgaccgcctctgcccaaaagttgtcaggtgtcttgtactcatccaacatggttcttgcagcttcaattagagttcggttctttctttccacaacaccattttgttgtggagtgtaaggcaccgagaactcatgcttgattccctcttctcctaagaattcttcgacacctgtgttcttgaattccgtcccatgatcacttctcactntcttgattntgagctcaaattcattttgagctcgcctcatgaatttctttaaaatttcttgagtttcacctttatcacttaaaaagaanacccaggtaaatcgagaaaaatcatcaacaataactaaaccatacttactaccaccaatgctaat

SEQ ID NO: 30794 - DNA, 480 bp, Zea mays
  unsure (1)..(480): unsure at all n locations
ngcctttgaaaanaatgtaagatatgttattctctttctctttcttcatctccgatgttctgtaatgtctacaatatgggtgagacgttcctggtaaggtaagcgaaagataccgaacttgtcaagtagttcaagggcacctacagggttgtctgatgtctgtgagacaaagacaactgtaggtgggcctaattacttgggaggttccgtcacagcagtcctcgtcgccgaggctgctgttaccgtcggaacaaccggaaaagcagtattcgcatgcaatcatgatgtctcgcatggcactggggttaccaagtccggagaaatcccaacaaaaatcgggctcgtcatcttcctcggaacccgaaggaccgtatgtcgagacagctgtcagccggttccagagtgaccgcataccgtacccagcagctgttggactcgcctctgtgaaagcgttcaccgaagcaagtctcttggtggtcg

SEQ ID NO: 30795 - DNA, 424 bp, Zea mays
  unsure (1)..(424): unsure at all n locations
tgatttcatgaagagtgattacactttctaaaattaaccctcctttanataacccaatttggcaatcacttaaaactttatgaatgcagctagacaatctatttttcaggacttctgcaatgattttgtaacaaacgtttaggagacaaatagtgaaagggaagtaggcttacacctagttcctaaataattttggtggtngaatngcccaacacaaataattggactaactagtttgctctagtgtataagttatacagatgccaaaggttcacacttagccaataaaagaccaagaatngggttcaacanaagagcaaagggataccgaagtgtgccctggtttggcgcaccggacatgtccggtgcaccaccggacagtgtccggtgcaccangggacttcacgctgaactcctcaccttc

SEQ ID NO: 30796 - DNA, 396 bp, Zea mays
actcagcttctctaacaagtgctgcacttaccgctgagtgcgaatctgtcacatataataataaaagagcccctggcacacgtggagttaatgctgttagatctattaaatactgcttcaggtcttcgaaggccttctgctagattggtccccattgaaagacttcggctgactttatcacttccaagaatggtaaatttctctctgctgatctggatatgaatctattgagagatgcccaccttcctgtccatctttgagcccccttttttgagatggtggctccatccgaaggatagcttcaatcttacttggattggcttcaattccctttgttgaaccaaacatcctataaagtttcccttctttactccgaagacgcatttttctggattc

SEQ ID NO: 30797 - DNA, 442 bp, Zea mays
  unsure (1)..(442): unsure at all n locations
aatcatgaatgaagcattaatggtccacacggacaaccatcaaacattgtggtacgaaaccatcgattttggagagaaaccgcaatgatgaactaatcaggtttcggagtggggaaggatcccatgcataagtggggatggataanagagagaaacggtaacaatgaaggaggggagatgaacaggcgacataccgagagcacaactcctcgcgggcatgtgcggcggatgcggatacgggctgcgacatgagcggcaaggtcggcgacggtgtctagctctcggctaaggagaagccagcagcgccgaatgccttcatccctctgtacacgctggaggaggcgactgtnttcgaaagcagacgaagcctcaccggggcgggcgccgcaggcggcggcctcgccattggtgggtgccggctatgttggggggaaagggttct

SEQ ID NO: 30798 - DNA, 434 bp, Zea mays
  unsure (1)..(434): unsure at all n locations
tttgagaaaatctaagtgatcacggaatgtctgtgtgttcttcattgcnagaggaatttcagccatcctagagaatgctggttgcgaccatgtcaaaaccctggcccaggccgaagcttgcttctccgtggatgatacaaaagatcccacagctgaagcaagtgtaatgggaagaaaattatacagtgacatctggatatatggtggccgagaaatggctcatgaaattatgaagaaaagtgaaaaagatattcatgacgcccgagtggaagcaaacaagctgaggaagctgcagaacgtgaaagacgcttaggtattgtttcgtgacttttagcttcggcatatgctttatagcttcanactaattaacttnttctatcgtagctgaatatcttcgccatcggaccatttgatcctctggccgcctagagaca

SEQ ID NO: 30799 - DNA, 433 bp, Zea mays
atagctcaacctgacggttctgagttcagtgttgagaattgccttgtgttgggttaaccaattcatacccaaaattacatctatatcctggcctttcagaacaatcatgttagcagggaaagtccgtccggccattgttactggcacttcataggccacttctctagtaaaaatgtgtcccccaggtgaatgaattttaaatccctcttttgattcatggcatgcaatatgatgttgctccacaaatttcttgtaatgaacgtatgcgaagcaccagaatcaaaaagaataattgcagggtgactggccacgggaaacgtacccatcatcaccggctctccttccggtgtagtggccacttgggtgtagtatacacgccccgtcttctttgtatttttccccacagcatttcctttgggctgagctgatctcc

SEQ ID NO: 30800 - DNA, 369 bp, Zea mays
tactcagctagctgcgaatcaacaagctcagctcgaaccttcttctgatgaagaaagtattaaagtttcacaagttcatagttaaatggccagagtccgttctactgccagggttgagcgtgagggggactaaactgaagcttcggagactgtccctatctccgaagccatgcaacgatccgggctagtgactgtggaaaagattcctagtgatgatgcagaacaagcaatcgctgaagctgaggaagaagatattgaggaaactgatcccgaagatgaatatcgcattgccatgccaagcaaacccagccacttggacttcgggaaatctactgtttcgaaggctgatctgtccaagatggtaaaatc

SEQ ID NO: 30801 - DNA, 481 bp, Zea mays
  unsure (1)..(481): unsure at all n locations
gcttcaactctatgtctcttagctatttgatcttcgtcatgtgacattntaagagaattccaaatgtcacgggcatcttctcttccttgaactttccgatattcttccggacaaagacttcctttaattatgctcactgcttgagcattgcgatgaacctcttgcatcatttccggagtcatctcttctccttgggcgggcttatacatacctacattaacaatctcccaaagactaggatgcacaccgaataaatgcgacttcatctttgccgcccactcgtcataattcaactcattaagagttggtaacttccaagtggggcgcaagaaaagtgggaataaaatntctagagtagatcgattgaagcttatctaaattcgtacctttgcttttgggagatgatccatctgtgtagagacttaccttgctcaacaccttcgacaccaaaagatccactagatcgtcattgtatcaaatt

SEQ ID NO: 30802 - DNA, 411 bp, Zea mays
tcatgcaactgctgccagaaatgagaggtgaactgtctttctctgtctgacactatactcattggcacagcatgaagactaacaatccgagacatataccattctgccaatactgcactggtgtaataggtcttaacaagtattgaatgggctgacttggtcaaacggtccactactacccaaatggaatcggagccggctctagtgcgaggcaattcgactatgaaattcataccgatttcatcccatttccactgaaggatctgccacgggtgcaacaatccagctgggctctggtggtctgccttaattcttcggcgactatcgcacatatgcacatgctctgcgagtatcctcttcatttctgaccaccagaatttcttcttcagatcctgatacatcgtcttacta

SEQ ID NO: 30803 - DNA, 483 bp, Zea mays
  unsure (1)..(483): unsure at all n locations
agctngcaactaaacacaacagatctgatgtgtattagcgaatcaagaaataatcgaagcanaaaatctgtctgtgatgaccttgcaactaaacacaacagatctgaggtgtatgaggtaaacaatcaggccaacaagatctgaggtaaacaatcattctaaacaatcaggccaacaaatagaggaattcgagttgggccaggcaacagatctaggtgcagatctaggtaaacaatcattctaaacacaacaggaagatcaagaaatagaggagtgtgaggtaaagactggcctgtgtatgaggtaccagcgaatctaggtcaggcagcagatctaggtgcagggggagatgaccttgcaacaagaccgaaggattagtataatcgaagcaaaaaatacaagataatgtttaaagaacaacagatcgatgggggacaaacctgagaagatgaagatgcgaatgttgctgcngtgatctgatct

SEQ ID NO: 30804 - DNA, 478 bp, Zea mays
  unsure (1)..(478): unsure at all n locations
agcttagcctcgaccggaccaataccagtattatctcgcacacactgngagtggagagatggcgggagtaacgtgtgcccacctagcaagtggctggatggtggggtactgtgctctcgggtcgcgtgaacccgttctggtcttgagaaacccggtgacgagttgacatatgcaagggttaagtgctacatatatcgtgtggttggagatccccagctgggtattaatccattcgtatcgctgaacttctcagatatgaagattagatattcaaccctcatcgtagataacaagtgaaactaaagctgctaaaatgaagctagtgtaggacaagtgaatgctctatattaggcaaatctagattcaggaaaagtacttacacttgtgacgtaaaatttggcataaggatccacttactagtaagctttcttgcaaatggagtctntgaaatttagtaaactttaccttgattcccaac

SEQ ID NO: 30805 - DNA, 439 bp, Zea mays
  unsure (1)..(439): unsure at all n locations
tcngcgtcaagaattcagtgtgcacttcngatttttattcaatttctttggagttgtgcttgaagatttaattgtctctaaaacatctagcacattaaccatcctttttcttttaggggtcactgctggacccttatggctttttgttgcctcagtttttgccggaggactcaagacttctgatgtctttacttctttagtcctcgtttcttctattntttcagtcactggcacttcggccagcacttcaatatctggcaagggagctgtctctttagcttcagtggccgaaggagtcccaccgacaaatgcaggcactatggccggttcaatataacgtggccggtgtgtgagaacttttacccttctcctcttcngccccgctcgattgaacggcttgagcagttctttcgcgaagatgattccttctttttcaccc

SEQ ID NO: 30806 - DNA, 443 bp, Zea mays
  unsure (1)..(443): unsure at all n locations
agcttggacatatgaacttctagactttttatgtgatngtttggacctattatgcgatgttcgaacttgtgcatgtgaacttatggactattgtgtataaatatgtgtgaacttgtgtntgagacttgtttggacttgtgtttntgactattgggtatatatgtatgctggttataaaatataaaccctgttctagaggcttcccatacagggagggagccagaatatggtttatatttttaaaaataataatatgaacgtcagccaagccaatgtccttatgtctacgtcagatgtacgaccttcttacgtccacatggcaacgcccgcggatggccgggtgtccatttaagaacgtcngccacagtggctaacatacttaatgcattaagcatgtcggcccaccaacattattagggtcacgttgctcgctcatagagccc

SEQ ID NO: 30807 - DNA, 298 bp, Zea mays
  unsure (1)..(298): unsure at all n locations
acacgtgataggtctaactaatgttactttctgaaaagatagaccttgtgcagcttgtgcagcatgaaaacacgtgggaagctctcatcatgccaagaatgtgatgacaacatcaagacccctggagttacttcatgtggacctctatggacccgtcgcctatctaagcataggaggaagtaagtatgggcttgttatagttgatgatttttctngcttcacttgggtattctttttgcaagataaatctgaaacccaatggaccctcaagcgctttctaaggagagctcaacatgag

SEQ ID NO: 30808 - DNA, 459 bp, Zea mays
  unsure (1)..(459): unsure at all n locations
agcttcccnctggctcaacatgataatggcaacatcataatggaaaggtacttgttatcttctttttaattgattgattgatctctctttggcatacacgtacaagttgcatatactccggtagaccactaaacagctggttcttcattagttgagcaggacattntgtactgtatatattgactcgatgtaaccgaacacaaaattaaacaccgtaaccaaatgaatagaaaatgaaattctaatggtgcctacagctgctcagcagatcatgtatatgatcgcgcaaaatactattttgtattatagacttaagtgaagtttaaaatataaggtaggataagatgtttatagaagtctgctggagatagtcttatataatatatttattttggactaagtatttaatcanaatatgttatggtatataaattagagagaattatatctcgaacaaac

SEQ ID NO: 30809 - DNA, 484 bp, Zea mays
  unsure (1)..(484): unsure at all n locations
tgtgcttcaatcaagttcataagctcaaactactctatatattgaaggtgggcatgctngttttttacaatcttcacaacaatctgactacctattgtctacaaatggaagaaatcatcattcaaaagctacacaatgtatattgttccagggagcaacaaacccactactgcaaagcccatttgacatatgtagagttagttattttaatttagtaataattaatgcttgtagagtgacagtacatgtacatgcctataaattgcctattccatgtgtctagaaatagctcagttaaatatgccccattcagatcagaaattgngcatattctanggattgatatttctgcttcctcgtacgaaaccatggtgttgacatgtagcgaagccatgngttaaattgtggactaaatagcatctattattataatatatgattntatagcagataatatctacacatacgcgtttggatttatatc

SEQ ID NO: 30810 - DNA, 417 bp, Zea mays
  unsure (1)..(417): unsure at all n locations
agctntagcatctatagaatatcaatctgtattcatggaatgtttccagtgtgaaaagacagtttgcaaagcttgctgtgctgggaaaggggccttccttttgcttaacacctacagggagttgaagatatatggtgggagtcaaagtggtggctactcaacactcacaaatagttttgtgtgcaaatcgtgctgcagtgaaattatcaaacgtgcattgtatgtggattatgtccgggttcttcatagtttgcgcagaaaagatcgttcaaagaaagcagcactgagtgctgtgaatcangtctgccaactggagtacaagaaagcatctgatttatctcaaagtattcaatttggtcagagacaattgaagcagatccttgatggtgaagaatcccttgcagaattttcatatgc

SEQ ID NO: 30811 - DNA, 233 bp, Zea mays
  unsure (1)..(233): unsure at all n locations
gcccgctggaatatatcttctgagaaactctacctcgctgcaacatgacacccgaatgccaacacaacaagcaatgagtgaatctagaattattgcagagcatatcagcacatgggacctggttcaagagtttttagcattcaaaggttttcccaggttgtaagaatgggaaatgccgaagctacagggggaaaagagagaaggtgaactcgtacgnttaccttactatttca

SEQ ID NO: 30812 - DNA, 439 bp, Zea mays
  unsure (1)..(439): unsure at all n locations
gtttccctttgcacttcttttctttntggtcgcttaacaatccaatatccacatgaattcttgtggttctgggtcctggtccatggaatatgctctatggcacgtgctcaattcaatatacgctatatgcttactgtttggttgcttttcgcaggcatgatcaatcctgtgtgaagtgccattcggcttcatatgccaactttagctgatgaaactaagtccgtgaatttgggacgccggtaccanaggtggagcaagtgcgcgatacgattagctttgggataccaactaagcagtgagcatgcaggaacacattggtgatctttcgtcgtaacccctcatgtacatggcttttttgacgtgggataagaatggcggttgtgtttaccatggccattctatgcacgttatgaagctcaactgcacgatgctcttatat

SEQ ID NO: 30813 - DNA, 64 bp, Zea mays
cctgcaccggacagtgctttatcccaaacttacaggacagcgtggaactctctgattatcgcca

SEQ ID NO: 30814 - DNA, 224 bp, Zea mays
cagagctattctctttgtgtttcaacaagtgtgttgtggaacatgatgtctacagaaaacgggcctggaaattctctcctaatggtgggaggctatgtggatgatctaatcatctgtgggccatcagctcatatgagtactgaatttacgcaacaaatgatgcattcttttaatatgagtgatttggggcatctaacctactacttgggcttggcagtcacaca

SEQ ID NO: 30815 - DNA, 516 bp, Zea mays
  unsure (1)..(516): unsure at all n locations
acctatgatactcagctgngattatccgattaacacaagcaccatctcttatcatatattttctatggataaactgaacacaagagatgacattagtagcacaagcactagtttcttatttagcaaccctttatatgtgaaaggcaaacgagttgctaaaatagagaaacctcataatatggactaaatttcgcttgagccctcatgcataatatattntgaatgacatggataatatgcatggtctttcaatgaagtttaaagggctgacttaatccatattatggtgagtgtctaatatagaagaatcaaatccaaattaactagatagagaatacgtcacataattctggattgttgaccatatgataagattcatttttcttccaattggactcttacttcataatcaacaattgatgtataccctcaagtgctcactccttcttagtggctacacaagtcatataggaggttagaattgaaaatatatgcacttgagattaattgtaccac

SEQ ID NO: 30816 - DNA, 496 bp, Zea mays
  unsure (1)..(496): unsure at all n locations
ctatcanatggacgtgaacagtgccctcctcaatggaccaatctatgaagaggtctatgttgagcaacctcccggctttgaagatagtgagtaccctaaccatgtgtataaactctctaaggcgctttatgggctcaagcaagccccaagagcatggtatgaatgccttagggatttttccttattactaatggattcaaagttggaaaagtcgatcctactttattcactaatactcttgaaaatgacttgtttgtatgccaaatttatgttgatgatattatatttgggtttactaacgagtctacatgtgaagaatttagtaggatcatgacacaaaaattcgagatgtctatgatgggggagttgaagtatttcttangatttcaagtgaagcaactccaagagggcaccttcctaagccaaatgaagtatactcaagatatcctaagcgagtttggaatgaatgatgccanacccatcgaaacacccatgg

SEQ ID NO: 30817 - DNA, 480 bp, Zea mays
  unsure (1)..(480): unsure at all n locations
tctgaattatagaaaggagtgtcaagaattatggcactacattagcattattggattggatgcaccatgaactatattntcactttttcagaatatgctcatttggtgtcacaaatatttgtagctttttttataaactcggtcaaaaatgaaaaagttcgactggcaactttaggtattattcatttatcgaggcaagattggaaatgaaggtagtagttacttgaggttaaacttttaagtggcagccaatcagtaaagccgttgtatcaagggttttatgagttctaaatcctggaatatttgaccagtgttcaactttgtctccgatttcagttgaagcaaacagtgtttatccttgaactgcaaatgtgtaacaaaatatggagaccacgccaatgtcgctctatggctatcaatgttaggaaacctgagctcagcgtcagctatacattattcataatgtacatggactatgtg

SEQ ID NO: 30818 - DNA, 350 bp, Zea mays
  unsure (1)..(350): unsure at all n locations
agcgttagttctctatgatccgttttcagtaccatacacaactaagccactagatcataaatacangttaaaaataggatatnatggttttcttctagattatataagttggattatagtgaaatagtagaaagttaacacattactttagagacacaaataagctagtatttgagtatcttatttaagcttatcactagtacaaataagctcanagcctgcggcacgttcaacttttcactggcggtttccgttatcaaacgtcagtgaaagaaacaggtgggcccggctttaataaccgccagtggaaacctatttccactggcggttatcttaacacaaccgccagt

SEQ ID NO: 30819 - DNA, 470 bp, Zea mays
  unsure (1)..(470): unsure at all n locations
cctattatgtaggtcagtttctcggatggtaattttgattgctcttaaccttagcgatggataaagccttagtaattntctttattgttaaccaacataatgactaagttatattttgtagagataagacaaacatggtttagtagtattatggactctatttggttttcatggtgatgatataattggtatattcatgaactttatgatatatagacaaagtatattgatggtgttgaaaataaaaacaaagagcatgacctatnttgggatgcaagaaaagaattatgacttgagaaattcgaaaactaatgttccttaaattttagtggacaatagatgcttatcaccaaacaaagcctctnaaatatttatttgcaagttatactcactataatgctcgacacggtcgatgctttcaacaaaccatatcagtgctttgtggaagtatcaagaaattagagagaaac

SEQ ID NO: 30820 - DNA, 481 bp, Zea mays
  unsure (1)..(481): unsure at all n locations
agcttctaagggagagcatattntatgattaacaaatgttcattttgagaaagacaggatttgtagcgcatgccaagcagggaagcaagttgggactcatcatccacacaagaacatcatgacgactgacaggccgctcgagctcctacacatggacctattcggcccgatagcttacataagcatcgacgggagtaagtaatgtctagttattgtggatgactattctcgcttcgcttgggtattctttttgcaggaaaaatctcatacacaagagaccttanaaggattcttgagataggctcaaaacgagttcggcttaaggatcaagaaaattagaagcgacaacgggacggagttcaagaactcacaaatcgaaggcttccttgaggaggagggaatcaagcatgagttctcttctccctacacgccacaacaaaatggtgtagtggagaggaagaaatatactctattggacatg

SEQ ID NO: 30821 - DNA, 378 bp, Zea mays
  unsure (1)..(378): unsure at all n locations
tcttcatgcgattctcacttatatgacccacacgacagagccacatgtcggtaggacttaaatcattaggccgaggccttttatcactcatattacagataggcgcgtcatcaagatttaaaatgaataacccattcataatggatgcacaagccacaaacatgccattcttatagatcacacagccattgttttcactcgcaaatgaataaccattcttcatcaaacatgaaggagacataatgtttctactcatactangaactagataacaatttttaactccaaataaatcctgatgggaggtggagttgcatcgttccactgtcaacgcagcaactcttgcatgattgcctacccggaaatcaacttctcctc

SEQ ID NO: 30822 - DNA, 458 bp, Zea mays
  unsure (1)..(458): unsure at all n locations
agctntaacccctacgagaccttcctctgttttttctaaccatggtaaatgtaatatcgtatgtcatattctatgcatgtttaatctacttgttctcttgtatggtgtactgtttgtctcctaattngaatggatggatgtatgtatgtctgcactcgcatagagaacgatccggttgaagagcccgaagaacttgcaggagaagcccctgagccgcagtcggttggtggaggcaagtgtcccttgacctatttctgtcctattcattctttaattcacctcccgcattacacatttatgcctaaggattgactagctntgttatccatgtccttgattacctatattgggtggattattattgcttagtcttatgctatngctccactctaatcaaccaacatgatgagaatgatcaatgatacgctgttttcccncttcttattatgatgttatac

SEQ ID NO: 30823 - DNA, 500 bp, Zea mays
  unsure (1)..(500): unsure at all n locations
tctatagagagagcacattctatgactaacatatgttctatttgagaaagacagggattgtagcgcatgtcaagaagggaagcaagttggagctcatcatccacacaagaacatcatgacgaccgacaggccgcttgagctactccacatggatctattcggcctgatcgcttacataagcatcgacgggagtaagtattgccttgtaattgtggatgattattcttgcttcacttgggtattctttttgcaggaaaaatctctatacccatagaccatgaagagattcttgagacgggctcnnccccccctccgattgagaataaataatattanaancnacaatggaacngnnttcanaaaatctnnnnttgaacgaattcttgaggaaggcatcaancatgagttctcttctccctacacacctcaacataatggtgtattggagaggaagaatagaactcttttggatatggcaaggaccatgttggatgagtaca

SEQ ID NO: 30824 - DNA, 449 bp, Zea mays
  unsure (1)..(449): unsure at all n locations
agcttctcctcctcgctcagcttcgttctgcaacaactntcttatcttgagacatctcttcggaaatggtgaaaatgtgtccttcaaatccgaagctcagaagctcagaanacttaagaaacaaagcaactaatggaaagcaagagctaagaaagcaagcacagcaaagtaggagtatcagatgtgcttggggtgagttcctatttatacgcccagcgcgctccaagttggagggccccgactgtcattgactgttgctattctagcanagggaaggtgtttttttggaccttcggcttagggccttcgtccatatcgcaatctgaattncgtatttattctaacanattaaccttgcgaggggctactgttgggggccttcgtcttccgaaggtcctcaaaaacatgaattaacaatgtttctggagtataatacatgaacaggtacc

SEQ ID NO: 30825 - DNA, 426 bp, Zea mays
cgaagccctggtaagatgcatacgcaagtaatatatgtattggctcaagcctatctacgggtgcataggtctcaccgaaatccaaaccttcgacttgtgaatagcacttggccacaggtcgggctatgatgacaccacaccatgctcatactgcttgttgcggaatacccacttggttcctacaacatttttgttaggacatggaactaaatgtcatacctcattcctcgtgaagttggtgagctcctcttgcattgccaacacccaatccgagtctcttagtgcatcctctaccctgtatggctcaatagaggaaacaaaagagtaatgttcacaaaaatgagcgactcgagatcgagttgttaccccttatgaatatcaccgaggagtgagttcacggggtgatctctttgaatcgcttgatgg

SEQ ID NO: 30826 - DNA, 441 bp, Zea mays
agcttaaccttgtaatgaggataagctgcctttgttccaaaggtggatggtccttaagtctctttgaaatccttaagggtaaatgcttgagatatttataacatgctttcagaagtgcataaaatgtcatgagcatcacacttatacgatgacacaatgcacttcacattctctatgatatagacatgatctcattaacctaattatgtgcacttggcatttaagaccaaaaatttgtattcctctcaaagcacatatttagggggagaaatctatattatatagaattgtttaagcttaattgacatatccttttaatcatgtctctttcccttggtacatttgcatatttcttctctctatttatgccaaggctaagactaatatgttttcatgagcatctcatgtattaagtcttagattgaaagggaaatggagtat

SEQ ID NO: 30827 - DNA, 349 bp, Zea mays
  unsure (1)..(349): unsure at all n locations
ctccgcatctgaagcatgatcgcttccccttggttttattcttgctcgggtgtgcattgcgaccctttaacaccgtcttgaatctcttgataatgagggccatttcttcttcattaagaccggccgcctcaatttgcgccaccttgctgggtagcgcctccttgntccctgtggctttgagagcaaaaggttgcggctcgttgatcggtccattcaaggcgtcgtccacataccttgcctccttgatcatcattcgcccgctgacgaatattcctagtactttcttcggcgacatattggtgtacctgggattctaccaatattattcaccaaatgaggatcaagaacg

SEQ ID NO: 30828 - DNA, 478 bp, Zea mays
  unsure (1)..(478): unsure at all n locations
agcttatgaagattcttcatcccaacatgggctagtcggcggtgccagagccaacccatgttagtcttagcaattaagcatgtgtcgagttcagctctatcaaaatctactaagtatagctgaccctctaacacacccttaaatgctattgaatcatcacttcttctaaagacagtgacacctacatcagtgaaaagacagttgtagcccattttgcataattgagatactgaaagcaaattgtaatctaaagagtctacaagaaaaacattagaaatggaatggtcaggtgaaatagcaattntacccaatcctttgaccaaaccttgatttccatccccgaatgtgatagctcgttggggatcttggtttttctcgtaggaggagaacatccttttctcccctgtcatggtggttgtgcacccgctgtcgagtatccaacttgagcccccggatgcataaacctacaaaacaagtt

SEQ ID NO: 30829 - DNA, 486 bp, Zea mays
tactcatgctttagccaactactagccggcggtatcattattaattatactgagtccgaaagagatggtgagaacaaatcaacctaaaaatatagcgagcgacatggcgatttgctttaccgaaggttaattcttgcaaaccctattcccgttgaggtggtcacaaagaccaggtctttttcaaccctttctctctctcaaactgtcacctagaccgagtgagctctcttcttatttaaacaggtcacttagaccccttactaggaccgccacaacttggtgtctcttgctttgattacaacgtcttgagaacaccaatgaggaaaaagacagcgatccaataacaagagctctaagaacatgggcgagactctctctcttgtcactatttgtttggagtggattctgaacttgaagaacctctcattctattgaattgtgtcttgtattgactgcactcactcttgtattaatgagatgtctaaa

SEQ ID NO: 30830 - DNA, 452 bp, Zea mays
  unsure (1)..(452): unsure at all n locations
agcttggttgtttctgcgtccaggcgttgggccttgcatatgaggtcttctagatttggcttgacttccaggctaccagtgtctcacagacatgcatttagctgagctgattctttcttccaatcttccaaaaagtttgctcctttaaccccganagggtttctgctgagggcgtctgctaccacgttggcctttccggggtgatagtggatttcgaggtcatagtctttgatcaattcgagccaccttctttgacggaggttgaggtccggctgcgtgaagatgtactttagactcttgtgatcagtgaagatgtggcatttgttcccaatcagataatgcctccaaatttttagggcgtgcactatggctgccaattccaggtcgtgggtaggatagatctgttcgtgcggcttgagcacacgggatgcataagcaatgactttctcatt

SEQ ID NO: 30831 - DNA, 292 bp, Zea mays
tatatatgttggagatgcgatgtgggctattcatctttatggtgatttccatatttatcttgaaatgttggtcaagcacaaggtagtggagtcctaagcattggctgcgggatgttccttgaatatatcagcccagagaccatgctatcatgcagcaaaagttttgcccactactgggagatctactccattgtttcattacatggagattatctacgttgtgtacaccaacttttcaaaattcttggtacactttatgtgatacctgtaattctccacatataaagatatg

SEQ ID NO: 30832 - DNA, 245 bp, Zea mays
  unsure (1)..(245): unsure at all n locations
gacaatttttggatgattattcttcgagttatgcatttattaaagttatctgccatattaaaagaaaatataatctcgaatggaaaagaaaacagggttgcgctgaggcccctgngtttatctncctcttctctcaaaaatagtcctcggtctactattggcgtgggtcactgacatcgcacaaaaccctctagacctaaccgaaatctaacccgcgctccctgactgacttanacggtacccgc

SEQ ID NO: 30833 - DNA, 481 bp, Zea mays
  unsure (1)..(481): unsure at all n locations
tgcagctctatcgaatcatcttcttgctcatttttctaatatcacgaagagctcactggttaatctgattatttccgggttgggccttctgctagtgaacccttcattggttgaagaacaaaattcttcttttcaagaacagcttcatgatctttggttttgctctctaagacttcaattataaccttaattttcttatcttcaaagtcctgtcgcatccttaaggccttacttantagcatactctantccaaacaaccttcgtcagaaaatcaccttcatctgtaaacaaataaanagctgagggcaaagttttaccttgaaattataatataataaactaccgacgatatgctatcgtcggtagcgactgatgtcagcttcaagcttcgggaaaccaacactctntgacagagtgctgataaccttcactctagttcgatctcgaatacattctaagctttcttcgctaattccgctg

SEQ ID NO: 30834 - DNA, 435 bp, Zea mays
tcagcttctgcctgacgtaattgtccctggccggagagaagattccatgtctgggccacacatcggactgccatgacgaaggactttgtcatgacagcatcattacctccatatgaggatattgttgcctcatagctcatcaagaattgctttgggtccgagtgcccatcgtacatgggcaactcgggtggcttgtacgattgtggccatggaatatcctgcccgaggggatgcaccctcttgcctgagatgatcccgtggaaaggtgcggccccgggtcgaatctgagatcgcccgacccctatgagatctagagtgtctgcatagatgatgttgatgctactgcctccatccatgagcacctttgtgaggtgcctattgctgatgatggggtcgacaatgaatggatacttcctatggatcgggacgtggtct

SEQ ID NO: 30835 - DNA, 507 bp, Zea mays
  unsure (1)..(507): unsure at all n locations
actcagcttcgtttcagagcctntctaacgtttgcaggatgtctgaagataaaaaagttgttggtgattcgaagctaagtctctctgaggagatgcatctgggttatcttcaatcaatgtcgaagactaatacagagaagattactaacgaaactttggagggtttatctgaagatactggtgacagtgacagctatgatgtggatagtggtggtgaagactccgaagatcgaccttggcgaccaagccatgcggtttntggcaaatcaagtattaaagaaaatcatcttgtcaacatgatgggcagatatttccaggacttatccgtcgtgagggctgatgaaggagagaagacttgtcctactcctgaggaaaatgaagttgtggtattccgaagcttcttgacagctggactacgatttccttcaagcagctttgttgtagaggtgctgaagatatttgaaatctaccttcaccaacttaccccgcgaagcaatcataagaatg

SEQ ID NO: 30836 - DNA, 365 bp, Zea mays
agtggcttggtgaagatatccgctaaatgatctttaatattaatggaagaaatctcgatatcccccttttgttggtgaatccctaaaaaatgataccgaatggctatgtgcttattgcggctatgctcgacgggagtgtctgccatcttaattgcactctcattattacatagcaaagggactttggttaatttgtaaccgtagtccacgaaggtttgcctcatcaaagcaattgtctcaacagtgttctgcggcaatgtactctgcttcggcggtggaaagagcgaccgaattttgcttctgtgaagcccaagacaccaaggatcttcccaagaactggccagtccccgatgtgctcttcctat

SEQ ID NO: 30837 - DNA, 361 bp, Zea mays
  unsure (1)..(361): unsure at all n locations
tctcgtcgtgttgttctaacagccggacaggaccgccataccggccgcagagtcagcgacacagcgtcgtttcagagctaccttctgagttctgaatcatctgccttctcccgcctccccatccaaaatatccactgctgccggagccatgcctccgtcacaccggaacttccacttcttcatcacctccgtcctcgttctcctcgtcacctccgccgncgcgctattcgtctccacccccgtcaagctcacatgtaagtatgcctctgtcttccaccccaccgccgaacccctcaaacccccaaccctaacccgccctctcgcagtcacctcacaccctgcggccttcgtcaccctcccg

SEQ ID NO: 30838 - DNA, 361 bp, Zea mays
  unsure (1)..(361): unsure at all n locations
acagtaagctggattctgttgtagccaaatttccttttatctactgatggatttattcaaattttgaatattttaacattaaattttattttgttagttaccgaacanaatgatcatttgcttctggaaaaaattaacaagtntgtgcataaataaaagtataaaaagggggcttgtatagatttacgtagagagggagctcaatttgaatgctgctaacttttattgtgtagatctacatttcngaagatgaagatccccgtcaagttgatgcagagatcaaatctgctactggtaattatgctctatatgatggcttctttggtaaatccacagtgtgcccttctttaagatcatctac

SEQ ID NO: 30839 - DNA, 436 bp, Zea mays
  unsure (1)..(436): unsure at all n locations
ctcggcatagtcaactatttgtatatgtttatttctaacctagccaggaagattgatgctttcactactattcttagctcaaaaatgatgttgatttcacctggcggtagaacaacacgaagcatntgatcttattaaaaactatatgccttcggctccataattgaaagcaccgtaagcacgagtaccattcacgctatacatcgtcaccgaagataacgttatcggagctatttttgaccatgagactataggaaaggagcacgatgtgacctacttaagccgaaagctggtggatgccgaaacaaagtacaccttcattgagaaattatgcttatgcctaatttatgcaagcaccaagtgtaagtgttatctattgtcttagtcttgcgccgtctctggtcaaaccgatgtgattaaatacatgttgcaaacc

SEQ ID NO: 30840 - DNA, 377 bp, Zea mays
atctatgtacataatcaatgcaaaactcattgagttccgcagcccactttacaatccttacaatagcttctctatttctcataatatccttcaaaggctgtgaataaagaacaatcatatggtatgctcgaaaataatgtcgaagttacttggacgccattaaaacagcatacagcgccttctccaattctgtataagtttctctgataaactgataactttggaaacaaatgatactggagcctgctttttcaatagcccttcaagcttcttctgaacaaacgccgcacttactggagagtgcaaagctgacacatataacactataggaacgcctggcgcttgtggacgtaaagttgttaatatatcaaataccg

SEQ ID NO: 30841 - DNA, 347 bp, Zea mays
agcttctcgcctttctactgccgttcttgtatacagatatggcatggcatggcctggcctggtgcaccattctcttgggtgggagattaatacctgccaatcctttgtgtgcacacttggagaaagtggcgtccttgggctgggactcccaaccctgcattggattgggctgccagtgtcaagaaccaacatggaagagaatctctatctgcgattgcgactgctactgctatctagctatgcatagcagtcttgatcgagagcaccatacttgctacctacacctaccttggcgttggggaacacggtctcgcctctctcgcggacggaggacaggtacatgatca

SEQ ID NO: 30842 - DNA, 402 bp, Zea mays
  unsure (1)..(402): unsure at all n locations
ctcagcttactcatagcatactctgggcagaagcagccttcgttagaanacaccttagttggttaaaacaatataaagtcgaagaanagtctttaccttgaaattagaatagaataaactaccgacgatatgctgtcgtcggtagcggcttatatcggtctctagcttcgggaaaccaatactcttcgacagagtaccgataacctttgctccggtatggtctcggagacagcctaacttttcatccttaacaccaccgaagagtagtgcccctggtagatacctgcacgatatggcataggctcttaactcttttttctcagccatcgacaattcttgtccaattaaagtttgaaagttgagatcttcttcttccgaagcatcttcggctattatcttctc

SEQ ID NO: 30843 - DNA, 472 bp, Zea mays
  unsure (1)..(472): unsure at all n locations
agcttatcccaggcactgcctctatttctgagagagcctatcgagtgtccggaccagagttggtggaactcaagaagcaaattgatgagttgttagagaaaggctacatcagaccaagtacctcagcttgggcagccctagttctatttgtggagaagaaggatggtacgaagaggatgtgcattgattacagagctttgaatgaagtcactgtcaagatcaagtaccccctgtcccgaatcgaggacctatttgatcagttgagaggagccagtgtgttctcaaatatagatctgaggtctggttaccatcagctcagaatccgacattcatatataccgatgacaacattcatcaccaagtatgggcgatatgagttcatggttatgtcattcggtttgacgaatgcgccaacctacttcatgtacttgatgaacagtgtgttcatggactacctcgancaagtcgtagt

SEQ ID NO: 30844 - DNA, 468 bp, Zea mays
  unsure (1)..(468): unsure at all n locations
agcttcagaaaccagaagtaagctcataactactacctccgcaaaccaattctagagttgccctaagtctaaaccttttaagtttgaacaaatttatagaaaataacaccaaattgatataattagatatattcataattcgttcattnggtgtcgtaaatattgtcgtatttttctttaaatttagtaaaacttgaaaactttaacttaagataattctagggattaatttattcagggaaaggagtacattcgttcgatgagatataatgggcattaattacacaggtcagagtagatcaaattatgtgaccatacatcagagagcctgaattgtcgaaacaaagttgcatatgcccctgtaattactacatccgttctcgaatattngtcgcccgcttaattcattttaaactaaaacacccgacaataaaaagaacagagagagtngtgtttaaaggtatacac

SEQ ID NO: 30845 - DNA, 384 bp, Zea mays
  unsure (1)..(384): unsure at all n locations
tgaaagnaatataataatacaanttgtttgataattttacctagtgaatgcactatatgtgtgataaacatatgcaatgtcaatgcttatgatgccatgctcaagttgtaattatagtaacaccaggggtgttacattcttccccgcataaaagaatatcgttccgagattaaaatcctaaggtaggtaatggtaaaggaaacacatcacatatttattatttaagttatggtacaaggtatgggtaatgtgggggttacatttctattacacagtcacacagggcttacaatttacaagaggctataaagcctgcgaaattcttattgaagaaggtttgagttttccatgtagcctcatctttagaacgttggtttcactgta

SEQ ID NO: 30846 - DNA, 464 bp, Zea mays
  unsure (1)..(464): unsure at all n locations
agcttctaaagggagaacacgtgatatgttttactaacgttcaattcgaaaaagatagaccttgtgcagcttgtcaagcatgtaaacaagtgggaggagcacaccacagcaagaatgtgatgaccacttcaagaaccttggagctgctgcatatggacctcttcggacccgtcgcctatctgagtataggagggagtaagtatggtctagttattgttgatgacttttcccgcttcacttgggtgttctttttgcaggataagtctganacccaagggaccctcaagcgcttcctcaggagagctcaaaatgagtttgagctctaggtgaagaagataatgagcgacaacaggtccgagttcaagaaccttcaagtggaggagttccttgcagaggaagggatcaaacacgagttctccgctccctacataccacagcanaatggtgtggtagagaagaagaac

SEQ ID NO: 30847 - DNA, 376 bp, Zea mays
  unsure (1)..(376): unsure at all n locations
tacctttgctctcttctaactttgccttatagcnaagtagatagacttcgttcgatcatcttaacctagagaaccagctaacttcgatctccacatttagtctgcacattcacacaaagttaaccatttgtcttcgctacacctcttatttctttttaatanaaattacttctgaaaaaaatatcagggtagcacgtgaggcgcgttcttatggcccaccttctcattgcatatatgaatacttacttttatgcctcaaattagcaacctacttttgaagtcacatgctacagtaagcgaatgtaattcatctgatattagaggtaataatattgtaaataacactgccagatagatcaatggttgctatggagtt

SEQ ID NO: 30848 - DNA, 377 bp, Zea mays
  unsure (1)..(377): unsure at all n locations
gctgacagtgcagaacgtgaaagaacaacttgggtccattcaatgctcaccatgtgcgaggcatttacaactgagattacaatacgagcctncaaagtcaacggatataattgttgcaaataaaaagggggatatcgtggctgtaaatactaaaacctangacaagatttcctcactatacaggttctatgcacccgctgctgccttcacctcgataagttccaaagcagtagaaaggaaaaaaattgctggcctccaccaacagaccgagtttcgtggtgcctagaatgcaacagaacagaacagatatcttggcgctgtcatattgacaggggccgtatnttcgaccaccgatagtgaacctatccagaaagtag

SEQ ID NO: 30849 - DNA, 143 bp, Zea mays
aagaggaccaaagtacaatgcctagagggccagcataagactagaccagattgaaaacagtctagaccctactaacggcagcagtatggccaagacttgctagctgcaacacattttgaccaggacaatattaatgaaaagta

SEQ ID NO: 30850 - DNA, 346 bp, Zea mays
  unsure (1)..(346): unsure at all n locations
tcccactaccccgaaccttgtctgctgtgcataatgtgttccacgtgtctcagttaaagaagtgtcttctggttccagatcgaaccattgaagtgatagatggtgtccttgaaccagacttgacatattctgaacatcctattcgagtcttacatcaaaaggacaggattacccgaagaanaactctcaagttttacaagatacaggggaaccaacattccgaagatgaggctacatgggaaactcaagacttcttagataaaaatntcctaggctctttagcctcttgtaatttgtaagtgtaagacattgttgatataaaggagtgagccccaaacccacccct

SEQ ID NO: 30851 - DNA, 295 bp, Zea mays
cgagctgcactggaccaactagcattgaattattaattactgcctcagagcacaaccttgacgctaagatatgacacgtcgtttgctaacggcataaacctttatggttggaccatcagatgcctaatgtctaagcagaggccatgaccatcttaacatgcccgctgagactatcactagattaatagcgtgggtcagcctaaaatggcattttgtggaaatctctatttcaaataagctgagtctttcctgcaaactattagaagaatgctgctgttagtataataaatccttc

SEQ ID NO: 30852 - DNA, 421 bp, Zea mays
  unsure (1)..(421): unsure at all n locations
actcggtttcgtgggcctttcttctttgtcttgaagaaactggtttggtcagatctggtgtgatataataagtgggctgttagctacctcttctaccaggattntactaaatggtctgccatgggaatggattgggcatcaacgcgggctgaggcagggtgatccactatcgcctatgttatttattcttgtaatggatgtcttgaatctgcttgtgcagcgagcttctgaggaagggctgcttcaacctctctctacaatgaatatgcagcaccgtatctcgctgtacgcggatgatgcagagatatttctatgtccgactgcttcagacatcagtatgggtatggatattcttcatttatctggtacagctgccggtctaacgactaatatccagaagagtagtgtgttcacaatctgc

SEQ ID NO: 30853 - DNA, 453 bp, Zea mays
  unsure (1)..(453): unsure at all n locations
ctcactcgtaacggtctgtcatttgcttgccccaacacaacattttgcaaaaatttggatgtaccgagttattgaccaaaggctttgcttcaatccacttaagaaaatattccaccgccaccacgacatatttcaaattaccttgtgctggtggaagtgggcctaacanatccaggccctcatctttgcaatggctanggtggttgtattaactgaattaatggcgaaggttgtttttggtccctttgcacattttgacaattntcacacttttggaccagatctgctgcatccgaagctgccttcggccaataaaatccctgtctgataacctttcctagcataggcctagactcaatatgagatccacacaatcctgcatgtatctccttcattagttctataccttcgattctggataaacacttgagaagggggagcaaactccatgct

SEQ ID NO: 30854 - DNA, 372 bp, Zea mays
  unsure (1)..(372): unsure at all n locations
ctaacaagaatcanagactcctctttgcagagaagctttctatgagtggatccttaaagatccattcttattatcaggctaagtagttacctgcatctagaattcttctattctagatcaggcacttggtctatactagtcgtctatatcaacccttcagttcacttgatgctacttgtagggcagtgaccaagtcttcatgtccaagaagttacggagatccaaatcgattaatacccaactggggatctccaaccacacgacatatgtagcacttaacccttgcatatgtcaactcgccaccggttttctcaagaccaagatgggttcacgccaactgagagcacatatactccaccgtacagcctgttt

SEQ ID NO: 30855 - DNA, 440 bp, Zea mays
  unsure (1)..(440): unsure at all n locations
gtaccaaaaacccaaattggaaccctagnaaaccctagaaccaaatcctatgggcttatgtgcaaaattagtccactnttggactaaagtgcaaaaaccaagttaaataagtatcttaagtcctttggttcacaaatatgtgaatttgcaagcaaaaccctgagttttggacttacttgcaaaagagccacatttgaactcttntgactaggtctaaatntcagtgtaatggctcaactttggagccttgtgactttcaaactctagggtttttgccctatgttaccacatcaagtttttagcccaatcataggagaacaacttttcttaagggtgtgagctcagatgttaagaanaatccagagataattaagcctaaagtcaggctgtcaggctgactangtctgaaaatcagactgactggtggatgccctgaactt

SEQ ID NO: 30856 - DNA, 380 bp, Zea mays
agcttgttgttcgatttttttttaatattatcaaagctatatctatgaatatgatatgctaaatgacatcacagtaactttgtaatagtcatgaatattttaaataagacgagtcagttaaccttgggataataaaactggcgggtactataattaggggtacccagatcacacctctaaaaattactagacgcttaagtaagggaacatgtgcaaaacacactcccgaccataccaaggcaagggatccaaattccacctcgcccgatgctaactccaaacaggagacccgagtcatgaactcgcccgaggacaccctcgggcaggagacacaatcataaccgtgactctccccaggctagcttcgggcgagatgcata

SEQ ID NO: 30857 - DNA, 349 bp, Zea mays
  unsure (1)..(349): unsure at all n locations
tgttgcactcactttttacagagtggagtctgaaattaatgaacgatgagatgtgaaataacgtggccttgttctacctataagagtacgccgtctgtcttactgctgagaataaaagtaaccgactaacctggtcagacggacccaagaatcctgcacattttggagtacagaccgatggatngatcgcatcagactcgatcagggaatcaagtcngacaatatgctcgcgcttcggttgagctacggcatataacagtaatatgttggttgagacttgtttataccacaagaaccagttatgggaaccctttcgcatcactcgcacaaatccaatgaatccttatgc

SEQ ID NO: 30858 - DNA, 461 bp, Zea mays
  unsure (1)..(461): unsure at all n locations
agcttgcttacttggtaagatgaccaatgcgcccttcacgggtntaccggagaggacgttaggtttattggaactcatacatactgatgtgtgcggaccaatgagtacgacagctaggggaggattccaatacttcataaccttcactgatgaatttagtagatatgggtatgtctacttaatgaaacacaagtctgaatccttagaaaagttcatagagtttcagaatgaagtagaaaatcagcgtggcaagaaaattaatgcactgcgatcagatcgtggtggagaatatttgagtcatgagtctagcaatcatctaaagagttgtggaattgttccacagcttacgccgtcttgaacgcctcagaggaatggcgtgtctgagcaacgtaatcggactttattggatatggttcgatcaatgatgagccagtcngacctacctttgtcgtttggggata

SEQ ID NO: 30859 - DNA, 414 bp, Zea mays
  unsure (1)..(414): unsure at all n locations
tgtgaaggttcttcatcctcacatgtgctaaacgattatgccatagccaacccatgctagtcttagcgattaagcatgcatgtagaccggcctcctcttttgcaaaatcaactaaataaaggttgccgtctagtacacccttaaaagctaatgaaccatcacttcttctaaagacagacacatctacatttgtgaataaacagntatatctcatattacagagttgactcacagacaacaagttatattcaagagactcaactaagaacacattagatatagagtgctcggatgatatagcaattnttcctaaccctttcaccttgccttggttcacatcaccgaatatgattgaatcttggggatcacttgtcttgacgtaagaagagaacatcctcttctcccccgtcatgt

SEQ ID NO: 30860 - DNA, 463 bp, Zea mays
  unsure (1)..(463): unsure at all n locations
ctctttctttgatacttctgctttttgttaccttccncactactanctggtcaaagtatggaacactttgtaagctacaaattcttgaattaagtcacgtgtcccaatttgactattcacaatattgaatgccagaaatagcttgctttacaaccccatacattctgcagatcgaccttttcatagcgaagctcacctttagcggccttataacaatatctttgatctcatcccaattccccacgtcggtctggatataaaaccactccttcgtccaatcgttaggccaattagacttgtacgctagaatgtgaaatatatcgtctttccagtatgcgaagtcgtaacagcaaaagttgttgtatgttctatctaagacctgtcctcttgtgaagtgaactcgtgcactctgtaaagcttctgcatcagtttgcacgtctgattcgtacaccatatgagacac

SEQ ID NO: 30861 - DNA, 325 bp, Zea mays
agctggtgaagagtcttcattccaacatgtgctattctgcgaagccagagccagcccatgttagtcttagcaattaagcaagtgtcgagatcatttctatcaaaatctacataagttagctgagcctctacactcccttgatgctattgaatcatcactttctctatagacagttacacatgtattcgataaagacaacatgcacccattttaattattgcaaactgaaaccatttgtactctatagaatctacaaaataaacatttgaacagggatggtcaggtgatataactattatacccaaaccctgagacctaaccttga

SEQ ID NO: 30862 - DNA, 346 bp, Zea mays
ctgctgtaatgaagcttagacttgatgaatataagaacttacggtttcttatatcaatgtcgaataccatcacacataagatcaccacggaaattctggtagggctgtctgaagatactggtgaccgtgaaagttatgatgtggacaccggtggctaacactccgaagatcgcccctggcgaccaagccattcagtttatggtaaatcaactatcacaaagaatcatcttgtttatataagacgaaggtatttccgggatctgtccattgtgagggcggacgaatgggataagacttgatcacaccctcgagaaaatcgaagtgtggtgtaccgaagcttcttaaa

SEQ ID NO: 30863 - DNA, 411 bp, Zea mays
agcttagtccaacaaatattacattaatattttggcacatattttacaatatctattcttcttctctcaaaactttgtctgcagcttcggccagaagttgagtaacgacttcgtccataatggtttcagccatgctaataatttctaatgattcttttgcctctgctttggccagtggctcgaagggctccaagggaggagatagtttggccatgctaaataagttcgaattcagaagaataaaaaattaaagttaaaagctattaagcaatacctattcctctttcgagttctcgcagtttttcaactgccttcgttgcttccctagcatcgtgagtatctttttctcttttctttattatctcgtgagccatccctcggccaccattttcccatatgtcagtaaagaat

SEQ ID NO: 30864 - DNA, 382 bp, Zea mays
  unsure (1)..(382): unsure at all n locations
agctttgagtgattcagaggccgctgctttcttgggccctagacaaagttgtntgctccccttagcgttcgtaggaaaggcaaacttcattctacagactgagagatgaatctgttcagtgcttccagccttcctgtgagcctctgaatgtcttttgttgattgcgaaggctgtatctccatgaggtagcccaatattttgccctgacagacaccaaacacacacttttctggatttaggcaaagccttgctttgtgcattcttggaaacgtttccacgaggtcagcgatgtcatcctcctcatttctgcttccgatgacaatgtcgtcgaagtaggtaaacacattgcaccccagctgctcttcgagtactaacctgggta

SEQ ID NO: 30865 - DNA, 451 bp, Zea mays
tctgcctatctcccgacagacagatatattcttgctgtcaggaagacagtacaagaagacttcttctccactgtcattaaatattaatgctcccttcggatatttcagcctttgtgcataatgctgggcctcttgttcatttttgtctgataattgtttcctccaagcacgacgaaaaatataatcacgaatcttggcggatgcttccggggcaacagcactagattcttcaatagctggctcatggaatctctctgtctcactcttcaaagtttttgccggctctgacggtccagcttccgctgatatctcttgatctagagctgtaaaccagagattcagcttttgttcctgagtacagggactttcttcttagtgtgctcgaagattgatcgtttccatacgttagcacattaccatttctttcttattgagtacagtgcactcttta

SEQ ID NO: 30866 - DNA, 449 bp, Zea mays
  unsure (1)..(449): unsure at all n locations
agcttgtgcanagcctgctgtaattaatcttctgagaaacccgacctcgctgcaacatgacacccgaaggtccaacacaacaagcaatgagtgaattcagaataattgcagagcatattagcacaagggacctggttcaagagtttttagctttcaaagttattcccagtttgaaagaatgggaaatgccgaagctacagggggaaaagaaagaaggtgaacttgtacgtttaccttactatttcaagtttaaaaagtactttaaaacaccttgccaagagtggctagatacaattgaagtaatgtgcaatgaaatacttggcaattattccaaaaaagaagatcaattgatgaccgcagccttcggcacccgtccgaagcgaatgttaaatcgagtgttggacgccttgggctttgattaccctgattatgaaaatctgaacataggt

SEQ ID NO: 30867 - DNA, 431 bp, Zea mays
gatcacgaagctatgtgcagagaaggttcggcatggcaacagaaaacgggaaccgacttaaagatgacaaggctattcagacctcaatgggttactatagagtcattagcaaatgtaaagggcatgggtgtaattttacatgggctgtgtcccgtgcctataaatagatgaacagtgctcccgtactgttcacactgacttggcattcgctttttgcatcacgtcttgtatcttacttaccgtctaaccgaaggtacatttatagcttgttattctggatatgataacgcaaataagaataaattgataatgatatttatattactcttcatattttgcatatgaactcctccttattatctatggtgcttacgaaagaatttttcttcatgaaccttcgtcgaaatacattatatccgaaaggacataat

SEQ ID NO: 30868 - DNA, 477 bp, Zea mays
  unsure (1)..(477): unsure at all n locations
cggtcttagcactcgctcactaagctcttgtttgataagatagaatttgctagaaatagggcaaatgcagggtgataaacttgctttggtccctaagacattgtgactaccttgtaggacccaacagagttggttcctaagcccagcctaaattgcttgcggttatgcatccggtgttcaagctgattattcgcagtggatgcacanaactcatatgaccggaggaagaagaagatgttcaccttctacttcaagaacaagggatcccaagattaataattttcgtgatgggaaccaacgcaaggtaaaaggattatgtaaaattacaatctcaaagaacactctatttctaatgtgttcttagttgagtctctgggatataatttactatctggtagtcaattgtgcaatatgggatataactgtttattcacaaacatagatgtgtctgtctttagaagaagtgatggttcattt

SEQ ID NO: 30869 - DNA, 427 bp, Zea mays
  unsure (1)..(427): unsure at all n locations
acgcagcgttagttttgagctcacaagtcggtcctaatggaatgcataacctaaattgccgaaactacaaaaagtcggtcctaatggagcgcagcgtaagtttctctgctcaaaagttgttccaaagggaatgcacatccatataccgccgaaatataacgcgaaaaagttcaaaagtcgttccttatgggatgccaaacgtataccgtcgaaatataaggcgaacaagttcaaaagacattcctaatgggatgcacaacttatatcatcganataaaaggttatgaagctcaaaagtcgttcctaacgggatgcatatcttgtgtgttccaacgagagtgtgtgtcttccgcatcctcatcattatgcatcatatcatcacatcatttcacataatgtcacatcatacatcatatcttatcaatga

SEQ ID NO: 30870 - DNA, 359 bp, Zea mays
gaattggtgataacgccacatcatagagaaagaagtgcaactttctgccaagggccggactgtacgctctatgggggcggactattcgtgcaaaatgttcggacagtccccgccacttgacagacggttcgtgaccgctaagggtaatttgctataaccctagtcgcctatccattcaatcgaggattaacagaaatatccaccaaaactcgtcaatatttgcccacattacaatgagtacataccagtccaccatcatatttgaaatccactgtcattctagatcaagtgaaatacaagaatccctatttgataatcgataaatcctgagatttgaatactggatgaaacctattgta

SEQ ID NO: 30871 - DNA, 207 bp, Zea mays
  unsure (1)..(207): unsure at all n locations
tggcgcacatgtcgacgacgatcatgggtggtgcaacataaccatcggcactgtgtctgcgtgacgctcgagggtgaactgcgtgtccgcgggattagtaggaagcggcgcgtgcaggtgagccaccagaggcgcggtggcggcgttgtgcgcagaggagcancgcgcgcccgggccacctgtggtggnggagaggcanctcgtggt

SEQ ID NO: 30872 - DNA, 337 bp, Zea mays
cttgttgagcaatctcccggctttgaagacattgagtaccctaaccattgattataagcgtctctaaagcgccttatgggcttaagcaagctccaagagcatggtatgaatgccttagagatttacctattactaatggcttcaaagtcagaaaagccgaatctacactctttactaatactcttgaagatgacttgtttgtatgccacaattatggtgatgatattatattcgggtctactaacgagtctacatgtgaagaagttagctggatcatgacactaaagttctagatgcttatgatgggggaggtgaagcactttttacgatttaagtg

SEQ ID NO: 30873 - DNA, 503 bp, Zea mays
  unsure (1)..(503): unsure at all n locations
ntatcanatggacgtanaaagtgccttgctcaatgggactcttcaaagaagaggtctatgttgagcaacctcccgatcttgaagatagtgagtaccctaaccatgtgcataaactctcaaaggcgctttatgggctcaagcaagccccaagagcatggtatgaatgcctgagagattttcttatcactaatggcttcaaagtcgaaaaagccgatcatactctctttactaaaactcttgcaaaggatttgtttgtatgccaaatttatgttgatgatatcatatttgggtctactaacaaatctacctgtgaagagtttagtatggtcatgatacacaaattcgagatgtctatgatgggggagatgaagtattntctaggattncaagtcaagctactccaagatggcaccttcatctaccaaacaaagtacattcaagacatacttaacaagtttggaatgaatgatgcccagcccatcaagacacccatggcgacaaat

SEQ ID NO: 30874 - DNA, 68 bp, Zea mays
ttttttgtttggtcaggatagttattttaaaatctgtgcccgaaaaagaattggaagcttgcccaaaa

SEQ ID NO: 30875 - DNA, 334 bp, Zea mays
  unsure (1)..(334): unsure at all n locations
cagcatttgccgtatgacgactatacggagaagtcttgtagtgagaccctggccattcacctcggcagtgaatacaggtctagctaacccggactagatgggaatcgcgactcatgggtaaagatgtgccacctctgtagagtgtataactgatatatcagccatgctcacggttaatagcagcctggactcctcacatgataattgaacttgaagatggagatatatcaagatccgatgatctgacaatggctcgcttanatgggaacactgtaatgttttgatatactcttgtacctttgcttaatgggaatacttgggattcacacttatt

SEQ ID NO: 30876 - DNA, 438 bp, Zea mays
  unsure (1)..(438): unsure at all n locations
ctctaagacacctgcggcatgcaagcttatcttcttagcatcccatccatattatagtcgatccaatcatattttggatgcttcttgggcgcctcgtttagtgcaaactgatcctagactccgaggtggtggagacaaagttgatttgaacttggctccctcttgtcacaaacatcctagcttcttctccttgacatcttggccttctccaagtcattgttggttctctccaaggttcctagagaatcaactcttagacatgtgctcgtgttatcggcccatacattgtttgtatgggagtgatatcctcgtcattctccccatcttgaattggagtcatcctccactcaggcggggatcaagggggtggcaancaacactactgtatataagaccttcagatctcaaaacaggcattgcagatgtctaccatattct

SEQ ID NO: 30877 - DNA, 463 bp, Zea mays
  unsure (1)..(463): unsure at all n locations
ctcagctatgccnacagcgacctcttgtgcnaacgctgctcttagtgcaccaatttcttgctctgatctatggccatcttcgccccagtcaagcaattttactagaagatggtaacatttgacaatcagtgttgagaaatgtaagttaagatggtaaacacaaagttgatcatgtgaacgtgcattttactccatatctgttataacttatgaatgaaagcatgattgcccaaggatggacaaagcgcattccaaaactcacaagtgtaggttagcacttgatggggaccaaaggtagcacattcttgacgaataggatgcactttgttgcgcatggcaaacaataatttgtaaagggtcaaacttaccatccttgtatgcatggtgtctaaaatggaacaatgagacacctaatattctagcatgagcatgaagcacacaccgaagtaaagcgtgacagctg

SEQ ID NO: 30878 - DNA, 383 bp, Zea mays
  unsure (1)..(383): unsure at all n locations
agcttagccatggcaattctatgtgaatttagtgcctaccaatcattnttagccaaaagggtgaactaacaattaaatgagtgcttgcagatttttgggacagcagcacaacaggtacttgtttaatcataacctttcaaatnataatcccaacatagcaaactatgactttcctgaaagcttaaatgttctctacaactttggtattttcaccttaacaagatcaacacttagcatggttaaaagtgctaccacaacagatctgtccagattgggccagatcagacttgtgatttaaaaatcataactaagattcagacattcaaccaagcgttgtagactttcggaaaataataaatgttctacaattattataacatcgt

SEQ ID NO: 30879 - DNA, 387 bp, Zea mays
ctctttcttcttttcgtccgatgccttaaatgcaacggattgcacctcgggtgtggatgtggcgccttgatccaagttgacaatgtgtttggagtctttgaccataagtaacaagcttactaacgtagcgatcacctacttgggagacactagcttatacctaggattctcacgagttaattgcacttgaggtggattacgaaaaacaatagatgttagaattacctttaccatgtcatggtcatcccacttagtggctccaagttgcggacttgtgtcaccatcaccttgagccggatgtcattgcttgtggtcttatccttgtgatgataacccgcgattatccgtcattgttccgctggtgagcttgcgattcatcccttatgt

SEQ ID NO: 30880 - DNA, 355 bp, Zea mays
caaagacacacacgaacttcaagatcaacgtctgaactcatgcaactgacgcgtgcaacaaccgaaacaggcttccaactcacatggagccacatctgaataggttaaaccaccagcagacgacctgccaagcatctttgatcatactgaacgcacagtcgacgctcttgaggaagacatggctgggcatggagacatctgcgctccgctagcttctccgagcacaactcgagctattatgaacgctggttgcatgcatgggactcttcgaaacaggacgaacttcagctaatccacccacggacttgaatgactacctcggcctggccaaagcatgcgaacacacaccaactca

SEQ ID NO: 30881 - DNA, 481 bp, Zea mays
gcttccagccctcggacctggcagaacttcactgttatgttaagatcgacctcaccggacttcgggcggcggcctgcacgcgtagactgtgcactccggtgagccattcttcaattcctcgcgtccacccctgtcttgatccctggtgaagctctgtgacccgtttgattggtcaatctctccatggataggccggactcctcgccgctgacgagctccccctactgcgcacgcggaccgaccgactccgaccatcccccacggtgacccgcacatcgtcgtgacccttaagacctcccctacaccctcggtcaccttaccggagcaatctcaccgccggtaagcctctccgccctttcatccgtcgcgggtcctgtttaattagtgggaatgacctcaggttacgattagaagaatccgcgggtttctgagatgacagtgctcattgaatagtacccatggactatctggtatgaaactt

SEQ ID NO: 30882 - DNA, 419 bp, Zea mays
  unsure (1)..(419): unsure at all n locations
aactagtcaagcatattntggtatctctattttcgatgggtccatcatgagtagtcaacaaagatcnaggaaacctagacagttctttgtgctagcactangtaaactcattacctttctagcacaagatgcaattttgggttgccctagttcatgaaaatttattgacaagctatgaaaagagattgntaccaatgggacaatccttgcattgatgtcccttctttcggcctatttagcatacgagatccttaagttatgaaaatttcttcattccttgttctctcttgctacaaggatagcaaatattcttttcaacatatgccttnttgttcaatgggacaaatttaatgagtgttcttctctgactttaaaaaaggtatattcctgtataatcagccattttaaataaggcatga

SEQ ID NO: 30883 - DNA, 318 bp, Zea mays
cgactgacctctgccttttcttgtaaactggatgttgtaacacagcagcttccctgtagcttggttgtgttcaatatattaagcgagatctacttgcttggcattctcatggcactctatcgtgattccgcatgcacccatattctttcaccgaaagcctaataaatagaacagcaccaaattaacttcgtgcaattctaatcattattgctcgagttctaacaacatgctgatatattttacagacacgcgtatctgatgtcatatatctcgttgagaatagattgacaactcagctcacgtatatgttgcctctca

SEQ ID NO: 30884 - DNA, 467 bp, Zea mays
gcagctatgaaggtcttcatccacatgtgctagacagcggggacagagccaccccatattactcttagcgattaagcatgcatctagatcgacatgctcttttgagaaatcaacttaatagagcttgccatctaatacacccttaaaagctaatgaacgatcatttcttctaaagacttatacatcaatatttgtgaataagcaatgataacccatatgacataattggcttacagacaacaaattgtactcgagcgattctactataaacacatttgaaattgaatgctcgtcagtgatgactattttgcctaagcccttgaccttgccttggttcccatctccaaagatgatagtgtcttgggaatccctgttcttgacgtaagaggagaacattttcttcttccctatcatgtgggttgagcatgcgctatcgatgatccagcatgtgcccccggatgcataaa

SEQ ID NO: 30885 - DNA, 455 bp, Zea mays
  unsure (1)..(455): unsure at all n locations
tatatatatatatcttntacataccttattatgacatgttatnngattgncatcttccatcccatcgctagcattaattgtattcaactcttcttcctggtacaaaataacatgttacttatgcataatttatgttacaaatagtataacactaaaacatctgcaatattattaccttgtcttcctcattatcactaacatctgttgactcattacatccaatatctagctccaatcggcttagaacgacatcgagctcattcaacacatccatcgccttatcgtaccctgcttttgacatacacgcctgacgaactactttcatagttttcgttaacaacattatctgtctgtatgatttaagaactccatcgtcnccccctgaagctcttatcaattctttcaaacggaacaatctttcttgatgagacagtgtacctttgccatatatactt

SEQ ID NO: 30886 - DNA, 456 bp, Zea mays
agcttctcctgtacaagcgtctctcttaccgctgagagcgaagctgtcacatataataataaaggagcccctggcattggtggaatcaatcgtgttagatctatcaaatactgtttcaattcttcgaaagccttctgctgggtcggtccccattgaaagacttctgccgacttcagcacttctaagaatggtaaatttctctctgctgatctggatatgaatctattgagagatgccaatctttccgtcaacctttgagcccccttcttgtagttggtggctccatccgaagtataacttcaatcttacttggattggcttcgattcccttagttgaaaccaagcattcaagagatatctacttcttcactacgaagacacatttttctggattaaccttaagccagcttgcctgaaattgcgaaggtctcctcagatcaccatgtattctcctgc

SEQ ID NO: 30887 - DNA, 365 bp, Zea mays
  unsure (1)..(365): unsure at all n locations
acaactctagtcgatatgacccaacacaacctgcgaatcagtgataagaatgcgccttctgattctcattgattttaacttccgaatgcccataagcatggcttcttactcagtaatacttgcagcactactaaaatctagtctcgctgcataacaagttgtaactcttgatggtgagaccaagacagcggatggtcctgctccgatgtttcccaacacccgtcacanaacactgtccatacgtcggcatccttatttgtttcttcatcctgagcccctgacgtccagcatcaattgaaactgccaacgcttgagactggatccgatatctatgcacattatcaatgcaaaattcattgagctct

SEQ ID NO: 30888 - DNA, 380 bp, Zea mays
agcatacactttaccccgtaacatggtttacccttcatcggcgagaacttcatgtagacataatctccaactggaaagtacaacggtattcggtgcgtgtctgcgcaactctactgacgagcttgagctttcttcatattatgagatatatcctgagcttcttcttcggtctcttttaccataacaggactgaagaagctcctttcacctgattcacaccaatttaacggagtaccacatcgtcgtccatataaagtatcgaagggtgccatcttaatacattcttgatagctatattatatgagaactccgtcaatggtaaacaatcatcccatttctgtggagattccaaagcacatacccataacaatatatcaagt

SEQ ID NO: 30889 - DNA, 359 bp, Zea mays
  unsure (1)..(359): unsure at all n locations
tctatgctaataatcacagaaagctaangtatggtcatatatatatgatcctctaaagttaaatgcctaaatagcactctctactacattattatttgaaaatgtcaacagcagatctcatattttcctaagttcttattaacaaaacattagttatcccaagggttggggtgtctttaccgcggggttatttctgtagggtttttctaagttctccttgtttcattagaataaaaggcatattactaagtttatactaaaccagggtttgatagaattctctagtgaactcattgaataagtaccttaacaaataacacgggtgccctctggttcattatttgaatcacattttctat

SEQ ID NO: 30890 - DNA, 117 bp, Zea mays
tacttcggcatctttatttgattcttcatcctgagcccctgacgtccagcagcaatgaaatctgccaacgctcgagactggatcgaatatctatgcacataatcaatgcaaaattca

SEQ ID NO: 30891 - DNA, 350 bp, Zea mays
  unsure (1)..(350): unsure at all n locations
tatcctttggctacaagtcagggctttgtttcttatcaccacacccatgctcatttttgcttggtgcgaaatacccacttgggacctaccacattttgattatgacgtggaactaaatgcccatacctcattcctcgtgaagttgttgagcttctcttgcattgcagcacccaatccgaatcttttagtgcatcctccaccctgtattgctcaatagaggacacanaagagttatgctcaaaatatgtgcaactcgagatctagtagttacccctttatgaatgtcaccgtgaattgagttcacggtgtgatctcgttgaattcttggggactcttggggtggcggcctt

SEQ ID NO: 30892 - DNA, 389 bp, Zea mays
  unsure (1)..(389): unsure at all n locations
atataatatagatttgttccccttaatatgtgccctgagaggaatatagattttggccttaaatggccagtgcacataattagattaatgagaacatatttttatcattaaaactgggaagggcaatgcgccataaaagtgcgatgctcatgacagactatgcacttatgagagcattgtgaaaatattttaagcatttaccctttaggatttcaaagagacttaacgacctctcaccttttgaacaaaggagctaatctcgtacaaggtaagctgtagctctttgacataaaatacttctttacttttacaagatgccgaatgatggtngaaagttaactatgttgaactgggctatgatgacatgcttttcttctttatacagatat

SEQ ID NO: 30893 - DNA, 440 bp, Zea mays
  unsure (1)..(440): unsure at all n locations
tgggtgggtggcttgccggtacagcatgtcaattattttctacatatgggaggaaggcgaccgacngtatggctgacatgagaccctgtctaactcatgtttcttncttccttccctcatcagccgtcccgtcgatcgggcaaataaagttgcgcctagggaggaaggaaccangcggcatgctgcccgtgccgacgtggatcgggccagagctaggtaagtgcacctgtgggctgtggtcggcatgcgatcgaatgtgagtgagcccgtgagccccgcatgcactgacggagtcactgccgactctcgtcgtccgatctctttctactgtggacgaatgggtgcgtgcagcctatctgtctatgggaagcgagaggtggccccggactgggttgagcaccttgtgcgcaaaagcatggtggcgtctgggccggctgcat

SEQ ID NO: 30894 - DNA, 447 bp, Zea mays
  unsure (1)..(447): unsure at all n locations
ctacatcttgtggagttggtcctaagcctaaaccacgaatacgacctctnggttctttctctccaaaaacatgtgcatataaatcaccatcttcaatacttctgtccttcagttctgggttctcagcaacagcttcttcaaatttattcttaagaggaccacacatatattatattttgttcacttatatnttaattattacacanatcaagaatatgtgtgtactcacaatgaatatttctgctccaggtagaggcacaatatccccttctttgttcttacgcgtgtgtgttctaacatatatttcatctcttctcgcacggcgtccttgttgctcggcctacaagaaaacatgatttggtccagtcattgactagaattttcataaattaaactaatgaatatacacactagtgattataattttttaccagttcatgccccaca

SEQ ID NO: 30895 - DNA, 435 bp, Zea mays
actaagctaagcctggaagttcataggcaagtatatgtgatattgctcaagcctagctacgggtgcataggtttcaccgaaatccaaaccttcgacatgtgattattccttggccacaagtcgggctttgttccttgtcaccacaccatgctcatcttgcttgttgcggaaaacccacttggttcctataacattttagttaggacgtggaactaaatgccatacctcattccttgtgaagttgttgagctcctcttgcattgccaacacccaatccgagtctcttagagcatcctccaccctgtatggctcaatagaggacacaaaagagtaatgttctcaaaaatgagcgactcgagatcgagtggttatccccttatgaatatcaccaagacttgagttgatggggtgatctctttgaatcgcttggcggac

SEQ ID NO: 30896 - DNA, 298 bp, Zea mays
  unsure (1)..(298): unsure at all n locations
cttcagagcatcgtatcccactttatgtcccaaattagatgattactaacaccacttcaccaatggaactattggtgattattgcgaagacatgggcatcaatctttgctttgcctcaccacgcaaaccctaaaacaatgggcaagccaaaacagtgaatggtaaaatcctctgaggcctcaagtaatagacatatgactacctcangtaatggcaccaggtggaatcaacacctcaagctagtcctctagacaaatnggactaccacaaaccatgccaccaagaaaacaccattctt

SEQ ID NO: 30897 - DNA, 369 bp, Zea mays
  unsure (1)..(369): unsure at all n locations
cgtgtgggatccncactggtgttctctttccgggctggcgatccgtcaggggctcctatcaagcatctgtgccatattgtggggtttggcggtgaggacggactatatctgcgaccgtaatccttcaccgacgtcgtgacttcaccgcgcgccgtaacccgagctaggcactgccagaacctgtgtaagaaatcgctcttcgagttcgccatccacttaatttcaattcgcacccgagatacataggaaccgtgtaccgattagtgttgtaggcatctcagccatggcgggccaccgtatcgctaggcacgatcgccggagttggcagcaaggtagaagaacgctccctcaccgttgatgcgaggatgg

SEQ ID NO: 30898 - DNA, 459 bp, Zea mays
  unsure (1)..(459): unsure at all n locations
gtgtgcccgatccggatcgtgtcatttgttggttgtatangtgtgttggctcatgcgaatcactgttgatgtgcttggttttgcaagagatccatgcagtgctcgtggtcctggtgctcttcgtagtgaaagtgtgatgatcaattccagctagaattctattgcgagcttattntctgagtagcatgcttggatttggtgttaaaattggtgggagtagctattctgttgctctaaaatgaggattgcaatgctgttatgcgtgccttcatatcttgtatgttacacggattaagactttgggtgtttcttctatcttttgcattctataaaccagtcaacctgcgacttgagatgttaaacttgatgtctcagtaaattataaaacaaaacggtcacatttgtacgcgattgcatggagtgcctttgcggtatatatagatctgctatgacgttaca

SEQ ID NO: 30899 - DNA, 413 bp, Zea mays
  unsure (1)..(413): unsure at all n locations
nagcttatctatgctatacttgttgtgttcttgaagatgcgccactattntnacgcacacagggtcgtggtggtgaccttcttaccttttagggccatcctccacaactctaacgccacatgcaacatcgctcaaggggccacggatcttgctgatttccaactggacttccagcctcccacgctgtgaagagccacgttctagctgacttcatcgtggaatggaccccttctccgagcgctccttggggtctggatcccgattcggaccccacacctgcggagcctgtggctctattttcaccgagccccactgacgctcttcttcacggaaccgcccatatcacggtggcggtgctggagtggtcctcgtcgacccatgctgagaacaagtgaagtacatggtgcaccttg

SEQ ID NO: 30900 - DNA, 405 bp, Zea mays
  unsure (1)..(405): unsure at all n locations
agcttatgaagagtcttcattcctacatgggctantcggcggggccaaagccaacccatgttagtcttaacaactaagcaagtgtcaagttcatgctctatcaaaatctaccaagtatagctgaccctatagcactcccttaaatgctatggaatgatcacttcttctaagacagtgcacctacatcagtgaatagacaggcgttgcccatttgacgtaattgtgaaacggaaagcacattgtaatctaaggaatctacaagataaacattggaaatagaatggcaggagatatagctatattaccaagacctttgaccaaaccttgattatcactcccgaatgtgatagcacgttgggattcttggttattctcgcaagaggagaactttcttttctcccctgt

SEQ ID NO: 30901 - DNA, 289 bp, Zea mays
caggcctgatatggttaaagaaatggaagaaaaagttcaacgaattatacataattcgaaagaagcacaagctcgacaaaagagttatgcagacaaacgacgccaacccttgtactttcaagttgaagattatatctacctgaaagtatcaccaatgaagggtgtatctcgtttcggtgtaagggaaagcttgcccccagtacatgagtccgtcccattcttgagcaatggggccagtggataccacttcaactacccaacattgctggggggacatgtgttcatgtat

SEQ ID NO: 30902 - DNA, 404 bp, Zea mays
  unsure (1)..(404): unsure at all n locations
gcatcggcttgagaattctcgaatatatcttgaagaagaatttcccccaatacttctgttggagaagatgtagatagatcacttcttactaacattgtcacaatggtctcatatttctctgaaagtgatctaaggaacttatgagtgaaatccacattcggtacataaaaccaagtcccttgagttcattcactatctcatttaaccggttgaacatatcggatacactcacatcttctntcataatgaattgctcaaactttcctttgcacacatatagcttggcactcttcacaattgtagttccttcataaatttccattagcttaatccaaatctcatgagcagttgtgagatnctcgatatggttgaactcatntatatcaagagcatcatacaataca

SEQ ID NO: 30903 - DNA, 317 bp, Zea mays
cttctcagtatatcatgcgccttaccacgaatttctctttgtgaacacattctgcgaagctcaatactgtgtccccttcttgatccacatgcaatatgaagaatgacgcttatgctatgcaaaatgatgtgatgatgttatgttatgcgccaatgatatttgtgccgaaaatacacacattcctactatagagcacacaatctttttatatcagcgctgacttttcgctgcaagcctcccttatgagcttcttcgccttttacttcagcggaaacagcggctatttttcgcttgaagcctcccttatgagcttcttc

SEQ ID NO: 30904 - DNA, 424 bp, Zea mays
cgtgggctagtcggcggggccagagccgacccatgttattcttagcaattaagcaagtatcgagttcagctctattgaaatcaactaagtatagctgaccctctaacactcccttaaaagctattgaatcatcacttcttctaaagacagtaacacctacatccgtaaaaagacagttgtaacccatcttgcataattgagaaatagaaagcaagttgtaatctaaagaatctacaagacaaatattggaaatagaatggtcaggtgatatagcaattttaccaagtcctttgaccaaaccttgatttccatccccaaatgtgatagctcattggggatctttggttttctcgtaggaggagaacattcttttcttcccagtcatgtggttggtgcacccgctgtcgatgatccaacttgagcc

SEQ ID NO: 30905 - DNA, 455 bp, Zea mays
  unsure (1)..(455): unsure at all n locations
aggacctataaaactcagcttctaaaggaagcacatttagactaaccatgntcatcttgagaaagacaggatatgtatcgcatgccaagcatggaagcaagttggcactcattatccacacaagaacataatgacgactgacaggccaatggagctcctacacatggatctattcggcccgatcgcttacataagcatcggcgggagtaaatactgtctagttattgtggatgattattctcgcttcactcgggtattccttttacaggaaagatctcaaccccagataccttaaaaggattcttaaacaggcttcaaatgagttttggcttaagatcaagaaaatatgaagcgacaacgggacggagttcaagaactctctaattgaaagctttcttgacgaggaaggcatcaagcatgaagtctcttctccctacacacctcaatcaaatggc

SEQ ID NO: 30906 - DNA, 415 bp, Zea mays
  unsure (1)..(415): unsure at all n locations
agcttcttccatcttggttcttggacactcgcatgatcttcataggtatntaatgagtcttgtaatgtattggcttgaggtgttgatcttctcgaacaccacattgccttcatccaagtctatgttgcatcctttgaactatatccacaacacttagcaaaaaaaatgttagttaaaatggttatgtngatcatcaaacaccaaatccaataattaaatgggctttcatccactttccctacaccacagtagccaacatagattgtaataaggcgtcattgcttagtgagggatttaagagttggatctcacatgattagaggactcattagtgtaaccaagagtaattagtgtgcatccattgatatcgttggacttgtagagtcaagtgagattttcacttgtactcttgatg

SEQ ID NO: 30907 - DNA, 378 bp, Zea mays
aagctcaaaagtttgagagctatcaatcgctagtaagcaaaagttgaaaaattgaggaaataaagggaaataaggcatgtggcacaagcagtgcgtcaagtgcagaccgtgcgatttcctatatatacgcctcaggcactccaacgtggagggccccgctttatattgactgctgctattctaccaaagggaagtgtgatttttcggaccttcggcttagagccttccgccatgtcggaatctgaaactgcatttctacaaattaatatcgcgaggggctactgttggggcccttctctttcgaaagtgctcagaaacatgaatttacaatatatcccgagtataatatatatgaatagataccttcgtacttggatc

SEQ ID NO: 30908 - DNA, 451 bp, Zea mays
agcttagtgcccccaaaagatagtctaactttgtaaagggcaaggctcacgtggctgaggataacgagggttacattttatattctattggctatcctgagcataagattaggagaattcatgctacgaagtctcattctgtttcccatcatgcttttatgtacaagaatgaggcatctagctctaggcattctacccatgttaaaatgcctaaaaataaaactcctattgcatcaaatgaacctattgtttcatttaaaacttttgatgcttcttatgtgcttactaacaaatcaggcaaagtagtttccaaatttattgggggcaaacacaagggctccaagacttgtgtttgggtacccaaggtgcttgtttctaatgtaaaaggacccaagaccatttgtgtacctaagaacaaggcctaaacttgttttgttggtttatgcattcg

SEQ ID NO: 30909 - DNA, 391 bp, Zea mays
ggaaccgagggcgcgcgtcaccggagaggtcaaatctcgctcaccggagttcaagaactcgccggcgcacgtgaaccgggtaaaccccttcaccatttcccgattcgttgcgcgcacggcctctgtgtcatcccgtgaagctcctcatgccctttaattgaacttccccgccgtggtttggccggagcaggcgtcgccgtcgatccccgccgcctgcgttcgtggccaggggagctccgaccacctctgacgccgacccgcgcatcgtcgtgaccgtcgcgacctcctgaacatcaccgaccacctcgccggacctacctcgccgccggtaagccgcgccaccctttcttttgcacggccactgtttcaataaaaggagggactgctggtg

SEQ ID NO: 30910 - DNA, 266 bp, Zea mays
agctttatgttgacgaaccttcggggatctgatacaaacagcttcagccgaaagccgcttcttcctagaagaccttcggcgacgaagcatagacccaacaacagccaaccttttccaaaatagacacggccccgcgggcaccggcaaaagcacaaaaatcccctgtcactaagaatctcctcaaaggctttggtgtcacacccggatttaagggataaagccgggtgcatttcatatgtgcgccaaagaagaacatcacatataat

SEQ ID NO: 30911 - DNA, 297 bp, Zea mays
actcaagcttgaaagatgtggctaagatattttttaaaattccgaagctcagaagtctttcctaaaaaaatgcagagccaaagatcataatctgaagctgcaaaaaagtcgttcctaagggagcgcagcgtaagttctctgctcaaaagtcgttcctaaaggaatgcaaagccaaaaagtatgatccgaagctgcacaaaagtcattcctaagggagcgcaacataagatttctgctcaaaagtcgttcctaagggaatgcatagccaaataccaccgaaatagaagttgaagaagc

SEQ ID NO: 30912 - DNA, 264 bp, Zea mays
agcttttttttattcttcatcccgggggggggagtttacggagccagagccaacccatgctagtcttaacaataaagcaggtgtaaatttcagctctttgaaaatctaccaagtatagctgaccctttaccacggtgttaaatgctactgaatcattacttcttctaaagacagtgacacctacatcagtaaaaagacagttgtagcccatttgacataattgagatacggaaagcaaattggtatctaaagaatctacaagaa

SEQ ID NO: 30913 - DNA, 297 bp, Zea mays
actcaagcttatgaagagtcttcatccttttatgtgctagacatcggtgccaaagccagcccatattagacttagctattaaacatgcattctagatcggcattctcttttgaaaaatcaactaaatagagcttggcgtctgatacacctttaaaagctaatgaaccatcacttcttacaaaccctggaccttgccttagttcccatatacaaagatgatagtgtcttggaaatccttgttcttgacgcacaaagtgaacattctttctcccctatcatgtgggttgtgcatccact

SEQ ID NO: 30914 - DNA, 253 bp, Zea mays
agctttcattgcatgtctaaaattcttgtgttgcatctagggcttgtctaacctacttgagataaccgccaacaaagcgagtgaaaaatcttaactcgggacaaacttgacaagtcttagcttttagcacttaaattcttacttgttatgcaattgttggtttttgaaatatgcatgaggtactgcacttagggggagtattcaaaactcaaatcactcatgaaaacccctagtgcaagcccaaatgaaaatc

SEQ ID NO: 30915 - DNA, 251 bp, Zea mays
agctttatggtaaaagtcataaaatgaccctaagaataaacttgaatcatatttatacccctgggataccagaaaccttaattggaaccctggaaaaccctgaaaccaaaccctaggggcttatgtgcaaatttagtccacttttggactaaagtgcaaaaaccaagtcagataagtttcttaagtcatgtgggtcactcatatgagaatttacaagccaaaccttaagttttggaccaaattgcaaaaat

SEQ ID NO: 30916 - DNA, 290 bp, Zea mays
tggtgccaatggagaagcatatatccctgaagtcctggctgtcaaactatttgccattatcgactgtgagctcagacgggactccgaattggcagataatgttttgccaaaaaaatttctgggcagtcttccacgttattgtggatactgcccttgcctcaatccacttggtaaaatactcgacggcgacgaaggtgaacttgaggttcccttgggtcgtgggtagtggcccgacaatgtctagcccccagcgttgaagtggccatgtgtgggcgatcagctttgtgaat

SEQ ID NO: 30917 - DNA, 263 bp, Zea mays
agcttgtgcaaattccactcgagctaactttcggagaaacccgacctcactgcaacatgacaccagagggtcaaactcaacgggcaatggatgaattcagaatcattgcagagcatattggtaccagggatctggttcaagaattcttagcattcaaagtcttccctactctgaaaaaatgggaaatgccaaagttaaagggggagaagaaggaaggggatcttgtccggcttccttaccacttcaaattcaagaaatatttt

SEQ ID NO: 30918 - DNA, 294 bp, Zea mays
tcatcggcatagtgccgtttttagaaattgaagggaagtaaagggtggttttctacctcaacaggtatctcctcaatgccaaactatgtacatagagttggagagactgtacttactgaaagggaaatacgcccttgggccatttctagttgttttgttgattagatgctcaacacattactatggactaacaactccacatatgagcataagcacatgtatttgaaaggcaaattgagagacataggaaaagtgcattttggtgtatattgcaaatcctattgcattgaagga

SEQ ID NO: 30919 - DNA, 264 bp, Zea mays
tttctttcttcatgccttccggcgttttggtgcatcgcaggaaccttactggaacactaccccacttaaaaagaatgagggtaaaactcttgaatcttggggatttgaactccttggagtacctcataacaagggtgttacggggccttcttctgctgttgctgcttgaccaggctgcggagagatgactaacacggtgttgattctgggaaaaccttcttcttatcttatctttactattttcttttctcttctcactgcctc

SEQ ID NO: 30920 - DNA, 295 bp, Zea mays
aatctcagctttgccttacaattttttttcattctcaattttaaggctagagagagatgcattcaatttgtcaatcttagtgtcggcgtttcgaacccggggggtccctggaccgacgagtaaattgtcgccgcgtgccccaccccaaatgggtcggcgcgagacggagcgcgaaggggggaagaagccccagggagacaggcgtgagaagtgaaacccgcggccttcgtgtttgtcccgcgcccaggtccggtgcgcttgcaatagggggttacaagcgtccacgcggggggga

SEQ ID NO: 30921 - DNA, 263 bp, Zea mays
agctttaagccttcaaactgtgtctagatatttctcaagcttcggatctcttgccttgcaactcttgtcaacatgaccagaaataacttgagagtcggttttaaggactgcccttcttattcccattgccttgaactttcgaagccccaaaagtaaagcttcgtattcagcaatattatttgtacaactgaagtcaagccttgctgcatagcatgttctgactttggaaggtgcaactaggacagcagccgcacctgcaccga

SEQ ID NO: 30922 - DNA, 290 bp, Zea mays
ttggatctcttgccttatatctcttgtcaatatgactagaaataacttgggagtcggttttaaggaccgcccttcttatccccattgcttttaacttccaaagccccaaaagtaaagcttcgtattcagcaatattatttgtacagctcaaatcaagccttattgcataacatgttctgactttggaaggtgcaactaagacagcagccgcacctgccccgaaggttccctaggaaccatcgcaaaacactatccaagcttcggcatctttatttgcttcttcttcctga

SEQ ID NO: 30923 - DNA, 251 bp, Zea mays
agcttgtctgtcggaatcgaacgaagctccagcttgaagcctgcttcgtcagaaaaaacttcggaagaagaaagtatcaaatttccacaaattcataattaaatggccagagtgcgttctaccgccagggttgagcgtgagggggacgaaactgaagcttcggagactgttcccatctccgaagccatgcaacgatccgggctggtgacttcggaaaagatccctagtgatgatgcagaacaagcaatcgc

SEQ ID NO: 30924 - DNA, 287 bp, Zea mays
tgtgaagccaatcatatgtttattgaagaatgatattaaattcaattggtcttcaaagtgtaatgaagctttttagcaattgaagatattattaaccactgctccggtattggctcaaccggatattaataagccctttgatgtgtattgtgacgcatcatgcagtggcctcggctgtgtgctaatgcaagaaggccgagtaattgcatatgcttcaaggcagttgcgcggacatgaggaacattatcctactcatgatctaaagctaactgcggtggttcatgccc

SEQ ID NO: 30925 - DNA, 251 bp, Zea mays
agcttatgaagattcttcatcccaacatgggctattcggcggtgccagagccaacccatgttagtcttaacaattaagcatgtgtcaagttcagctctatcaaaatctactaagtacagctgaccctctaacacacccttaaatgctattgaatcatcacttcttctaaagacagtgacacctacatcagtaaaaagacagttgtagcccatttgacataattgggaaacagaaagcaagttgtaatctaa

SEQ ID NO: 30926 - DNA, 286 bp, Zea mays
tgaacacatgggaaggttttttgttgtcctcaaaaccgggaggttgttcaacatacactagttcactaatcttaccatttaggaaggcactctttacatccatttggtagagcttgatattatgtgcacaagcataagcaagtagaatccggattgcttctaatcttgctacgggagcaaatgtctccccaaaatccaatccttcaatttgagtatatccttgtgcaactaatcttgccttgtttcttactaccacaccatcttcattgtgcttgttgcgaaacac

SEQ ID NO: 30927 - DNA, 259 bp, Zea mays
agcttattaagggcgagcacatcctaggattatcacaagggcattctgagataaacctgatctgttactcatgctcatgctggaaactgattggcactcgtgatcctgatgacatcatcatgacgactgccccgcccatggagctcttacacctggttttattatgcccgaggggttacattgtcatcaacgggagaaaggactgaataatttttgtggaacaatactctcgctgtatttgcgtaacttttttgatgga

SEQ ID NO: 30928 - DNA, 289 bp, Zea mays
tgtagagaaccctgtttttttatcggcacgaagactcattgtgcattggtcacacatccggagttaaatggacttgttgaaagagctcatggcattataacgatgggaataatgaaggtaatcttcaatcatcccagagggaattggtcatgtgaattgatcaaagcggtgtggagccacaacccagcaaattttatggcaacggcttttacaccatacaaactattgttcggtgaccaaccaataaccccaaaagaagctaaggcaggaccactaagaacatttgctt

SEQ ID NO: 30929 - DNA, 264 bp, Zea mays
tttctttcttgtataaatcttcgaagtccactgaaggactacgacaaccaagaggagatacaaacacaacatcgtcaatctcctctgaagtgttagaaataacaataacctcccatgtaggctcggacattagaacttgtgcaggcacctagaaagtttgttagttgcaattctcttgccctctcagcaaaagtcctcaaaagaaactttccccaacctgaagttacccgaacctgctctaaatctttcgagacatctgcactg

SEQ ID NO: 30930 - DNA, 284 bp, Zea mays
tgtttggcataattgaacgaagctccatcttgaaacctgcttcggagaaaaaagtattaaagtttcacaaggttcatagttaaatgggccgagtccgttctaccgctagggttgaacgcgagggggaggaaactgaagcttcggagaccgttcctatctccgaagccatgcaacggtccgggctagtgacttcggaaaagattcctattgatgatgcagaacaagcaatcgctgaagcagaaggagaagatgctgaggaaactggactcgaagaagattattac

SEQ ID NO: 30931 - DNA, 266 bp, Zea mays
agcttttttttatataaaatcaccataaagcaaatctcgggggtgaatcttctcttcataacttgatgttcatgagtgtaaaccaacagaccgggtttataagggcggaccttaccgggctggcgtacatatatgtgctacctagttacaaaggaagaaaactgtgatggtgacttatttgtgtgccaaatttatgtcgatgacataatatttggttctactaaccaaaagtcttgtgaagagtttagcagggtgatgactcaaaa

SEQ ID NO: 30932 - DNA, 292 bp, Zea mays
tcgcacctctgaactaattcttttgcatcattctttgctgttggccaatagaatcctgacctgaagaccttcccaactagtgttctggaagctgcatgtattccacattgcccagcatggacctcctccagaagttgcttcccagtggccgagagaatgcacttcatgaggacgcctgatgcaccccttatgtacaaggtctccctaatgagtgtatagtgagctgactgtctggcaatgcgctctgccgagttcttgtcgtctggttcttcctcattctttatatacttaa

SEQ ID NO: 30933 - DNA, 264 bp, Zea mays
agcttcttttgggagaacacgtgataggtctaaccaatgttactttcgaaaaagatagaccttgtgcagcttgtcaagcaggtaaacaagtgggaggagcacatcacagcaagaatgtgatgaccacatcaaggcccctggagctactgcatatggacctcttcggacccgtcgcctatctaagcatagggggaagtaagtatggtttagttattgtggatgacttttcccgcttcacttgggtattctttttgcaggataagt

SEQ ID NO: 30934 - DNA, 301 bp, Zea mays
atactcaagcttaacacttgagagacaattttttttgggacttgctttttattttgtccttcaagcttctcttgtacaagtgtcgcactcactgtagagtgcgaagctgccacatacaatagcagaggagcccctagcgtgggtggagttagcgtcgttaggtctattaagtactgctttagctcttcgaaggctttctgctgagctgatccccattgaaagactttggccgacttcagcacttcgaagaatggtaaatttttctctgctgatctagatatgaatcgattcaaaaatgtca

SEQ ID NO: 30935 - DNA, 255 bp, Zea mays
  unsure (1)..(255): unsure at all n locations
agcnntttgctaccaagagatcaaactcttccagttctacgaggatgaagaccctgagcatatgtttggtgaaggcaagtgtcctctgacccattatgtcccatttactttataattcactgtcccgcatactatgaacaacctaaggattgactagctttctatttacctggtccttgattaccttttgggctactatggttagattcatgctattgctttactttaatcaatgaacatgatatgaacacttac

SEQ ID NO: 30936 - DNA, 288 bp, Zea mays
  unsure (1)..(288): unsure at all n locations
tctttaccacgcgcccgtgtatttttttatagagangagcaatgtgtcttctcctcagttgtctttgcttcttgttcccacagaatttcttttgtgacactaaaacttgttgctcaatcaatgattggctttcttttgagcaacaggggttagcacatggtgatatacaattcaaatgcgcacacgagcgagaatgaggttcacatgaatttaagtttgcaattataacctcatgagcaacattaagcatgatatggtcatcaactaatttattatgagaatatgaca

SEQ ID NO: 30937 - DNA, 253 bp, Zea mays
agctttgatgcagtccaaaaatctgaaggatgccgaaaatgactctggatccagcaagagcaacatcaatgtcatcttgaaataactttcttgaaataacttatactctatatatctagatgcatagcaaaagctatgaatctagaaaagccagaatatcataatttagcacgatgagaatatggaataccaaaataaccctttgaaaaaaatagatatctaaacatgctagcaaaaatattttgctagatga

SEQ ID NO: 30938 - DNA, 294 bp, Zea mays
gcttgttagcaacatgagagcaaattacgacccttggtttgcagagtttttgttgcgcataggcggtggaactgaggacacaaatagtgacggcgacattcatcttcctgacgatgtgtgtgtgccttatagtgggagtgacagcgatcttgacaacctaatagacttcgctttcccaaatctcaacgaaaatatgtcggattccacctacatcacttcaagggcgatactgtcaacacggaacgactgggtggatatgataaatgttaagatgattgatcgttttcaagggga

SEQ ID NO: 30939 - DNA, 266 bp, Zea mays
agcttgactttgtctccctctagcaagccattgccgaacctcaagcccacgggtacccgactccagagggtgcttctcaccgggcaaaggatgacattctatatattgtgcaccttaatggtaccagggatctgggctatgaaatcatatcgttcttagattaaccttctgtgaacataagggacatgcccattaatatcggggagtctaatgacggggaactcgtgcagctcacttgcaagttcagggtctgtaaaaattttatc

SEQ ID NO: 30940 - DNA, 293 bp, Zea mays
tgatcgggacatgccctattatgcattattataggccatcaagggttgccacctatctgaacttggggagactgtgagccaacctatgtcccctaaccatgtagagacagcacgaactgaactggaaatacactcctgcaccataatttctgggacagaagattacatgcataacacattactatgggctaagaactcgtcatcttagcatatgatcatgtattggagaggcgcacattcacacttctgagaatagcttgtggatatgtattgttcaccctattgcgacgaag

SEQ ID NO: 30941 - DNA, 263 bp, Zea mays
tttcttattacataatagtgccttcatcgcaacctttgaaagacataatgaggaacagagaagctacaggaaggatcagaaaatgggctgcggaacttaatgaattcaccattgattacgtgcacagatcctcaattcaatctcaggcgttagaagacttcattgatgattggacgccaggggctcagggtgaagaagtgacaaaagatgctgaagcttggacaatattttgcgacggatcttgggaatcttcggtgcaggag

SEQ ID NO: 30942 - DNA, 289 bp, Zea mays
tgacaacaccattttttttcttaaataaaatttctgagatcaagtatatttaattcattcctcaacatgcaaaagcgggttttatcaagtggcttagtgaaaatatccgctaattgatcttccgacctcactccttctaaaatgatatctcctttcgcaacatgatctctaagaaagggatgacggatatcaatgtgcttggtgcgagattgttgaacagggttattagcaattttaacagcactctcattgtcacacaacaaaggtaccttttctagaaccgcgccat

SEQ ID NO: 30943 - DNA, 259 bp, Zea mays
tagcttaatagataatgatgaagcttgaatagatagctgtggaaaaaactctaagaactcttgtaataacctttgtaaagaatattataatctaagaattagattttactctgtaaattctatccataccttgtaatatatttttacctttccatcaacgtatgaagtgcttcgatgtgaacaaaacttgtacttgcattgaattgctttgctatggacgaaactagcattttttgagccgaaggcgaaatacaccttt

SEQ ID NO: 30944 - DNA, 289 bp, Zea mays
tgtgaaaccaatcacaattttattgaagtatgatactaaatttaattggtcttcaagatgtaatgaagcctttgagcagctgaaagtattattgaccactgctccggtattagctcaaccggacattgaaaagccctttgatgtgtattgtgacgcatcaggcagtggtctaggctgtgttctaatgtaagagggccgagtgatagcctacgcttcaaggcagttgcgccggcatgaggagcattatccaactcatgacctggaattagctgctgtggttcatgccctg

SEQ ID NO: 30945 - DNA, 250 bp, Zea mays
ttttttattgtccatccatctacacgaccactcaaataatttagcacatacagccaaccaaacaccattcaacacatgcagccctacttcagacagtcagctaaatttagtctcaatttattcgaataaaggtttgagaaaaaggaacatatatagaatgaagctaattatgaccccatactggtcaaagtgcttaaacgaccaaacaacccattggatacatttgacctggccgcgatacaataaatgt

SEQ ID NO: 30946 - DNA, 287 bp, Zea mays
tctaaagggagagcacattttatgattaacaaatgttcattttgagaaagacaagatttgtagcgcatgccaagcagggaagcaagttggtgcccatcatccacacaagaacatcatgatgaccgataggccacttgagctactccacatggatctattcggcccgattgcttacataagcatcggcgggagtaagtattgtcttgtaatagtggatgattattctcgcttcacttgggtgttctttttgcaggaaaaatctcaaacccaagagaccttaaagggat

SEQ ID NO: 30947 - DNA, 249 bp, Zea mays
agcttttttcaaaaacaaaaactctatcctactctttacaaaatctctcaagtggtagctgatccatttatcgctttggcctttattttctccccctttggcatcaagcaccaaaacgggatcaatcttggcctcttaaccccattgcctcaccaaagtcttcaattaagagcaaatggcaataagatttcatgagatgaacttggaattagttaccctctcatcggagtgcagtggaagtctttcatg

SEQ ID NO: 30948 - DNA, 254 bp, Zea mays
gagactcctcggtcttttcttccgtcggcttgaccgcaacgggttgagcttaggatgtgtcgccaagctcgttgattttcctcgagccttctataatgcactcaaaacttacaaaatgcccgatgacttcctcgggggtcattttagtgtatctaggattgccacgaatcaattgaacttgagtgggattaagaaaaataagagatcttaaaataacatttaccacttcgtggtcgtcccacttcttgctcccg

SEQ ID NO: 30949 - DNA, 259 bp, Zea mays
agcttctaagggaggcttacagcgaaaaataaacgctgattccgctgaaagtaaaaggcgaagaagctcctaagggaggcttacagcgaaaagtcaacgctgatacaccgaaaagtaaacggtgaagccaaaaagtaaacggccaaaagatttgaatcattcccaaggggatgaagggttatgattatggtttttgaatatgtgtttcgatattcatttgcatgatacattacatcatgtcattttcattcataaacat

SEQ ID NO: 30950 - DNA, 301 bp, Zea mays
cgacctctgaaactaagcttataaaaatttttttctgaattggcgaaggtgctatatgttgtgttgatggcctccaggaagcttcggcattattttcaagcatatcatataattgttccttcggcgcaacctttgaaagacataatgaggaatagagaagctactgggaggatcagaaaatgggctgccgagctcaatgaattttctattgactatgtacaaaggtcctcaatttagtcccaggcattagtagatttcatcgctgattggacgctaggggctcaggaagaagtaacaaaag

SEQ ID NO: 30951 - DNA, 248 bp, Zea mays
agcttaatactttggagacaaaatatactggaacttgctttttagtttgtcctgcaagcttctcctgtacaagcgccgcacttactgcagagtgtgaagctaccacatacaatagcaaaggagcccctggcgtgggtggagttaacgttgttagatctatcaggtattgcttcagctcttcgaaggctttctgttgagctgatccccattgaaagacttcggctgacttcaacacttcaaagaatggt

SEQ ID NO: 30952 - DNA, 281 bp, Zea mays
ttgtcttttgtgtatggacgacgtgcggttttaggctagggacagggagttgtagcgtcactaaggtgccagtgtcagaatgcctggtcccgaggttgagctgcgccaaaaccgtgtcaaatggatttggtttgagttcaaattttcccagaatgtgttcaaggtaatttggcacgactttgatatttggatcttctggctttgagtttggaaaagcagagaacacagatgatctttgagaagaggtctgaaattcagaaattcagaaatctgaatttctc

SEQ ID NO: 30953 - DNA, 263 bp, Zea mays
agcttttgagtctatttgcacgcggttgttggctccaacgggaaaataaccagtcaatgcctacaggtgcatgccaggcaatagatgaagaagtgaaacaattaacctggagatgactcttgacgtgacatatggtgagccccctggcgcccatggcccatgaactgaagaatgagctttggtgtagcctctgcgatttattacaccaccaaaacaacagttagctaggctgttgaaaacgcgattggaagtaggagaaatac

SEQ ID NO: 30954 - DNA, 293 bp, Zea mays
tcatcacacccttcggctcatactgtttcgtacggatgcctaaggggttcaagaacgccggctcaaccttttcttgcctcaccaagaaagtccttgaaaaccaagtaggccgcaacatcttcacttacgtaggcgacatcgtcgtcgcaagcaaaagcaaagaggaccacctggtcgacctcgcagagacattcgccaacatgcgcgacgcaccactccggctcaaccctgagaagcgtgtcttcagggtacgccagaggaagatacttggttacctagtatcgcaccgaggg

SEQ ID NO: 30955 - DNA, 261 bp, Zea mays
agcttctttgggagagcacattttgggactaacaaatgttcattttgagaaagacaggatttgtagcgcatgtcaagtaggaaagcaagttggtgttcatcatccacacaagaacatcatgacgactgataggccgcttgagctactccacatggatctattcggcccgatagcttacataaacatcggtgggagtaagtactgtctagttattgtggatgattattctcgcttcacatgggtgttctttttgcgggataa

SEQ ID NO: 30956 - DNA, 288 bp, Zea mays
  unsure (1)..(288): unsure at all n locations
tgcgaagagtattgnggccttttttgttggctccctctatcatcactttgagtggagttatgaattgacctgacgtgcctcgtatgaaatcttcctccgaagcccctggtcatttcagagaacctgaatgcctcctcccttctttggcggaagtcattgtcagcccggatatactcgtccatcttctggagcagcttgtccaaagtttgtggtggcttcctggcaaagtattgcgctgaaggtcccggccgaagtcccttaatattggcctcaatgacaatttcattg

SEQ ID NO: 30957 - DNA, 255 bp, Zea mays
agcttatcaaaatagaatagcggcaagaggccgtccatatgtaataatagaaggggacttatacaagcatggagtctgttctccattactcaaatgtttatccaaaactgaaggtataaagctgatgaaagaaatacatgcaggcctgtgtggatctcacatcggatctaggcctttgttgggtaaaagaatttcgtcaaggattctattggacgaaggcaacttcggatgcagcagaattagtccaaaaatgcc

SEQ ID NO: 30958 - DNA, 292 bp, Zea mays
atgaatgtggggaggaagttctttatttgcaacctgaaaattgcgggtaacatcaatgacttatctttactgattgaatctaaggctagctcctcaaataataatttttgcaaacattgtgccaaatatcatggatcttgttggctaactaaccatacaaggaagaatacccgacaagtgaaggttaaaggaatattgaaaagatgctctagcaatgatgggttaaagaaagttaaacccaagttctagtccctaaagcccaacaatggaataagggggcttgggttcaact

SEQ ID NO: 30959 - DNA, 254 bp, Zea mays
agcttgggctaccaccatgcaatcggagcgcggagaagatcctgcgtgaacatccatggaagtacaagagggagaccccgctcggacaccctcgggggctgggctatagtttgcgctacccacttgagccggatcatctccgacagtaccctcgggggctgggcagtggcttgtgtttcccacccgagcctagtcatccccggcaacatcctcgggggctgggcaagtgtcaacaccatccttgaggaccaagt

SEQ ID NO: 30960 - DNA, 291 bp, Zea mays
tctaaagggagaacacattttatggctaacaaatgttcattttgagaaagacataatttgtagcgcatgccaagcaggaaagcaagttggcactcatcatccgcataagaacataatgacgaccgacaggccactggagctcctacacatggatctattcggcctgatcgcttacataagcatcgacgggagtaagtactgtctagttattgtggatgattattctcgcttcacttgggtattctttttacaggaaaaatctcaaacccaagagaccttaaagggattctt

SEQ ID NO: 30961 - DNA, 268 bp, Zea mays
gaagctttattccatctatgttatggattgcttttgagtcaatccagtttccttcggcccttctggcagctttctgactcccatgaatagcgatgggtccttgatccgaaggtgtcttcttgcagagataagcaggatgaagaattgcttctaaagcattgagggtgccacgaccaataattgcattgtaagggtattccatgtcaacaatgtcaaacacaacttgctcagttctagtgttattgatgaacccgaaggtcactgacat

SEQ ID NO: 30962 - DNA, 304 bp, Zea mays
actcaagctttatgaataattagaaatttttcctgtctgcttaaaacgaattaaaatcaatagcaaattcatttttaactcaatcaaatgattttggtctcaattaaattatattcttgaaaaataattccaaaaatattgtatgccatgttttcatgtgtgttgtattgtttcttattcttacccatgtttgttgtgtgaatgcgagtagactgggagattttgaactgcatctaggggcccacttctgaggacccccagaaccctgaagaaggcaagtattccatgatcctatatcctatta

SEQ ID NO: 30963 - DNA, 259 bp, Zea mays
tttcttttgctatggtcaattttttggcagcaaaacagtgcaatagcaatgaatgctgtggtaacttcacacctacccgtctgtttatatagtgccgcaggtgggaaggtgaatcgtcaagtcttccgcaccggacgaacagtcgcccgcacccactgaatggtgggccacagaacccgagaaggtgaatcgccaggacgcgcgtacccgttgcatggtgggaccatttcacgctcggaatattgtgatcgtttctcgg

SEQ ID NO: 30964 - DNA, 288 bp, Zea mays
tctaaagggagagctctttttttggctaaccaatgttcattttgagaaagacagggtttgtagcgcatgccaagcaggaaagcaaatggtgcccatcatccacacaagaacatcatgacgaccgacaggccgcttgagctactccacatggatctattcggcccgattgcttacataagcatcggcgggagtaagtattgtcttgtaatagtggatgattattctcgcttcacttgggtattctttttgcaggaaaaatctcaaacccaagagaccttaaagggattc

SEQ ID NO: 30965 - DNA, 257 bp, Zea mays
agcttgaagccatggtaagtagcataggctaataatatgcgactcaagcctagctacgggtgcataggtttcaccaaaatccaaaccttcgacttgtgaatatcccttggccacgagtcgagctttgttccttgtcaccacaccatgctcgtcttgtttgttgcggaagacccacttggttcctacaacattttggttaggacgtggaactaaatgccatacctcgttcctcgtgaagttgttgagctcctcttgca

SEQ ID NO: 30966 - DNA, 289 bp, Zea mays
ttggccccacctgcatgctcgcatcctcccctgaggtgggctcgggggccactgtcggtaccttgaaactagggtactccttactactatatgaagacccagtacccacatggctatcttcagtcatgtggtaaaggagctgtacgcgggaccacaccatggcttgccccagcctcaggcgactactctaggccagcaacagcgcctgaccccaccacctgggtggccctggggcgccacatggccagagaaagtgatatactccaaggcgtcaacagtgagtccagac

SEQ ID NO: 30967 - DNA, 250 bp, Zea mays
tgcttgctctgtgaggaattgggccttccttcagcttccacatcctgctttgaattcaagagtccttcttttcttgaattggtcggtcagtggtttgttttctgggcctgaatctcggattgaccatttttgtcgaaaatagccatgaacgaccattttcaataataccgaaggctaacacgtacagatttttgaccaagaaatggtctccaccagaaatccaagaatgtgatctatggctaggaaacat

SEQ ID NO: 30968 - DNA, 290 bp, Zea mays
ttggggcagcaacattttttatcctcggcccccagctccaaggggcagaggcgccaggggcttcggaggaaggtttggggataagcccaggaaaatttacttcctattctacggtgaggacaagggacatactaccaggatgtgccatgtcactatccaaaaacagaaagagatagcagaagttgtagcccaacagagccagccgaagcaggttatgcatactacttcgtaccactcaccatacatcccagagtatgtgggtaaccatcctgcagtttctgttgcttcgg

SEQ ID NO: 30969 - DNA, 251 bp, Zea mays
agcttcttgggcccagttgccaccgccaccaccgctagcacctactctggtccgcagtcagcagccagaagggcatcaccacgctcaacaacagcgtgattttcaggaggagtctgaagctcgcacagtcaacaacactgtacccgagtcgaagcacacttactaaaggatatcctaacctgatgtattttcgttttgtttgtcattttattctctcgcatgaaaacaattcacagaggtttaatctccaa

SEQ ID NO: 30970 - DNA, 288 bp, Zea mays
ttagaatgttttagcttttttttgatgtccaaatctctaatgtaaggtgggctaaaggttaaagccaactttagaccacctgatgcatataaggaagaagggtccacatgcaccattctctgtggcatagcaaaatcgagctcgatgtccttgaagattgatcgagataatattagtcagtactgaatttaattttaatgacaagtttgtaatgggtaggataataagggatatgttacaggttgttggtttcttggatgaatatgctgctgcatagggttaggcctg

SEQ ID NO: 30971 - DNA, 262 bp, Zea mays
agcttctctttgtcgtcatcaaccttgacatagaaccactccgacttccagcctgctgcccatttgctccggtagctgattacaggaaactttgtggttttccgataggcgaaattatagcaaccaaaattgtcatgcagtccatcttttctagccttcgtctgatagtgcagttcgtgaactcggcaaaagctgtccgcaaatggctccactgcttggcttcggagtgcccagatataaacactaagcctaacgatagcgt

SEQ ID NO: 30972 - DNA, 293 bp, Zea mays
tgtgaagattcttcatttttcttgggctagtcggcgatgccagagccaacccatattagtcttagcaattaagcaagtatcgagttcagctctattaaaatcaactaagtatagttgaccctctaataatcccttaaatgctactgaatcatcacttcttctaaagacagtaacatctatatccgtaaaaagacagttgtagcccattttacataattgagaaacagaaagcaaattgtaatataaagaatctacaagaaaaacattggaaatagaatggtcaggtgatatag

SEQ ID NO: 30973 - DNA, 255 bp, Zea mays
agcttcgtattttggtacccaatttgaattgggtcctttgagattagtagtaagagccttgggtacccacacattccttattgtggcctttctctttctgtaggcatccaaatatacttgacaaccatcttactatggttccaagttaatatgtaaactcatacataagagttagagttaagaataggaacattttctccttttcttgatacatcattgtgttgccttcttgatgatgaacctagcttgacattg

SEQ ID NO: 30974 - DNA, 279 bp, Zea mays
ttagtgtttattgtagagtgatttgttgtgttcttttgagctcttgcgcttggattgctttcttctttctcattcttttcttgcgatcaaaacttaattgtaaccaaggcaagagacaccaattgtgtggtggttcttgccgcgaatttttgttcccggttgatcttgaaagagaaagctctcttggtccaagggaccgttttagacaagtaaacgggtgcaagaaaccctcttcttttgaccacctaaacggggatctcgtttgcgagaacccaactt

SEQ ID NO: 30975 - DNA, 254 bp, Zea mays
  unsure (1)..(254): unsure at all n locations
ttttttttctttattccagngtacccaggaccacgaagaataccttcaggcgtatgtccgaaggtttctgtgtctgagggcacaggcgccaacagtgcccaatgaaattgtcattgaggccatgattaagggacatcggccnngaccttcatcgcaatactttgccaggaagccaccacaaactttggagaaactgctccagaagatggacgagtatattcgagctgacaatgacttcggccaaagaagggagg

SEQ ID NO: 30976 - DNA, 283 bp, Zea mays
tgccttcgcttttttcttttatccgcagaccaacggggtcggggagcgtgccaatgggaaaatcttcacagctatcaaaaagatgctcctcgatgaaaaaaaaggcagatggaccgatttattgccggaggcagtctgggcgctaaacacaacccaatgcagggcgaccgggttcactcctttccgccttctatacggatcggaggcaatgaccccgcaagaaataaagcatgggtccccgcgtacaagtccgtcagccgtccccgacgtggacgagccaact

SEQ ID NO: 30977 - DNA, 261 bp, Zea mays
agcttgaaaagtatctagatacagtccgaaggatcgagtcttccttcgaaggtttctctgtcaaaaatattcctcgtggagaaaatgaatacgctgatctattggctaagtcagcagcccaggggctgcctataccttcggaagtattttttgaaacaataaaagcaccttcggtcgagctccttgaaagagcaatccttaatgtatcccctgtttatagtgaagattggagaaccgagattatctctttcctccagggta

SEQ ID NO: 30978 - DNA, 286 bp, Zea mays
tcacaacaaaccaatacatatataaaagaaagggttcaaaacaaaggagcaaagttaaaccgaaggcagccctggtctggcgcatcggactcttcggtgtaccaccggacagtgtccggtgcaccagggaatccaactccaaacttgccaccttcgggaattcggggaggccgctccgctataattcactggactgtccggtgtgccaagcggagcaacggtcgtccgcaccaacggtcatcttcaacgctacagtgaaacgctacagtgcgcgactgcgcccgca

SEQ ID NO: 30979 - DNA, 260 bp, Zea mays
agcttattttataacctagtgcatatgatttgatcacatctgttatacttttgatcattgaatatcttcaattgatacttatgttgcttagtgcttcatgtactatcaatttctgtctctcatgtatatgcactaagttaaaaggagagtttaggataaatttatgcaatttgtgatctacttgatgtgtgataataatgatttatttagagaaaaggatcactagctggagaattctctcttgtgcaaaaataattcta

SEQ ID NO: 30980 - DNA, 293 bp, Zea mays
tgtagagtaagacagatctctttagttttttttttaatggtgcttcagcttcacaaaaattattggtcaaacaatgacatgcattttgtattttcagttaaaaacaattgttttttccatttcatgttgtatttaagcttagctacatttgctgcaggtgtttaacaaccacactgaaaatacaaatttaggtactgatatgttggatcaagcagcactaatcattaaaaagtgtcatggacttccccttgcaatatctgcaataggtggattcctagctaataagcccaaaa

SEQ ID NO: 30981 - DNA, 255 bp, Zea mays
agcttttttttgtaacgaggataagctgcctttgttccaaaggtggatggtccttaagcctctttgaaatccttaagggaaaatgcttaagatttttataacatgctttcataagtgcataatctgtcatgagcatcacacctacaatgcactttactttctctatgatatagatttgttctcaataacctaatcatgtgcacttgccatttaaggccaaaatatgtattcctctcaaggcacatatttaggggg

SEQ ID NO: 30982 - DNA, 291 bp, Zea mays
tctgtgacttggaaatatttttaattttcttacgagttttccatacacggggatatctcggtcttggacccctggcaccacaaacctgttgcacaattgcaattaatataggaatctgattggccgttccgccagcactaagcataccgcatgcgcacagtagattaagctcaccactacacaattaaactttatatgatgtcgaacaggcccctcctttactgaagcaaatgcaggcgaccagtagttcctcaagcaaaacattctttaatatatattagcgaaaaacta

SEQ ID NO: 30983 - DNA, 255 bp, Zea mays
agcttggttattttattgctaactgtcccgacaatgatagtgatcaggaccaagggaacaagagggagaagaagaagaattataagaaagcaaagggcgaggctcatcttggcaaggagtgggattcggactgctcctcgtctgactccgacaatgagggactcgccgccactgcattcaacaagtcatccctcttccccaatgagcgtcacacttgcctcatggcaagagagaagaaggtaatcactcgtaatg

SEQ ID NO: 30984 - DNA, 288 bp, Zea mays
tgtggcgccctcgggcgtcttgccgcagccgaagcaccaagtctcctacttggaggtattggggccgaacccctcgggcgtggtagcgtcgcagagactgctgatatcgcgccgagtgtagcaaggccacgtcctgagcctcttccagctggtccagcgagtcttctcggctggtctggttgctttggtcgtcgtacgcccttgccttcggggaaccgtattctaagtctgtgggcaagatagcctcggccccatagactagaaagaacggtgagaaacccgtggccc

SEQ ID NO: 30985 - DNA, 273 bp, Zea mays
agcttttttccctaagtgatatatatatagggtgtgtgtgtgtctatatttgtgtgtgtgagagagagatcaaatgagaaacttataccttacagatgtatatcagtaccataaaatacatatcaaaaataaattaaatttcaaaatcaaacattgttggggggttttgttgtcgaaggtcctcaaagtgtaatattgttaattaagtatatttcaggtgctctcaaaggatggtgaaatttaactttgtcacggttgatacatgaagaaaac

SEQ ID NO: 30986 - DNA, 297 bp, Zea mays
ttgggcatattgaagactgttaagatattcccaacagaaactaacattgcagactgtatatgttacggagagctgaatttaacaggttttgatgttaaaaaggctcttgaacttgccattcgccatgaagctgtcgttatgaagaaattactaaacgacatgccgttatttgttgcaaaagacgagagcctctggaaatgcgtgaacgtaacaaataccaaatcaaagaatcccatagaggagctaggaacagtttataactacatttcatctccagacggccgctctgcaatgatg

SEQ ID NO: 30987 - DNA, 257 bp, Zea mays
ttttcttttcattatattgctaactgtcccgacaatgatagtgaccaggatcaagggaataagagggagaaaaagaagaactataagaaggcatagggcgaggctcatcttggcaaggagtgggactcatactgctcctcgtctgactccgacaatgagggactcgccgccactgccttcaacaagtcatccctcttccccaacgagcgtcacacttgcctcatggcaagggagaagaaagtaagcactcctaatac

SEQ ID NO: 30988 - DNA, 289 bp, Zea mays
ttcatccttcttctttattaacagtgctggacatccccaaggcgaagtgcttggacgaatgaatcccttatccagcaactcttgcaactgcttcttcaactctgccaactcagcgggtggcattcggtagggcctcttggaaattggggccgttcccggttgcaactcgatggcgaactcaatatcccgatccggtggcattcctggcaattcatcaggaaagacatctgcatactcacagaccactgggatcttcttcaggggtaactccgtcatagagaaagcacat

SEQ ID NO: 30989 - DNA, 258 bp, Zea mays
tttctttggctcgcgacgaagcagaggaataatgatgatgaccaaaggaggaaaagaccacctagtcctttataacttgtatttcgatcatgtgtaaacattgaggacacaaatgtacttttacccgggctgcgtcccgtgcctataaatagatgaacagtaacaccatactgtcacactagattgtacttttactctctcgcatcctcgccttcaagcaagcccaaggtatcaatgtaatattaacattgttgatat

SEQ ID NO: 30990 - DNA, 289 bp, Zea mays
tgcagagaatgcgcctgtggcacctgagaagcagttcaagattggggttgggaaccttatggccatgcagcatccgaatatagtcaggatactcggctactgccgtgaaccgcaaaggaaagtgattgagcagagtggaagatacattattgtagacgtggttgagagcttactgtactatgaatacgttcctaatggaaaccttgaaaagtatatttccggtatgtgtacatatttgttttgacatttgattgatttactggtgtagattttaaatgctatcaggata

SEQ ID NO: 30991 - DNA, 253 bp, Zea mays
tttcttccaaccaacgacgttgcctaaggttgagatccttctgagtgaatatatacttcaaactcttatgatccgtgtatacttgacgcttagttcccacaatgtagtgtctccaaatcttcagtgcatgcacaacggcagccaattccaagtcatgagtggggtagttcaactcatgtttgcgcaactgacgagatgcataggcgatcacatgaccttcttgcataagcacgcatcccaatccttggccaca

SEQ ID NO: 30992 - DNA, 289 bp, Zea mays
tgtgaagattcttcatttcaacgtgggctagtcggcgatgccagagccaacccatgttagtttagcaattaagcaagtgtcgagttcagctctattgaaatcaactaagtatagctgaccctctaacactcccttaaaagctactgaatcatcacttcttctaaagacagtaacacctacatccgtaaaaagacaattgtagcccattttgcataattgagaaacagaaagcaaattgtaatctaatgaatctacaagaaaaacattggaaatagaatggtcaggtgat

SEQ ID NO: 30993 - DNA, 252 bp, Zea mays
agctttttgcacacacacttgaagttcagctcagcttaccacccacagacagatggtcaaccaatcagattctggaggatatgttgagagcttgtgctttccaagacaagataggttgggacaagagattaccatatgtagaattctcttacaacaacaactaccaagccagcctgaagatgtcacagtttgaagcactgtatggaaggaattgtagaactccattacattgggatcaacctggtgaaaggc

SEQ ID NO: 30994 - DNA, 289 bp, Zea mays
tctgcaacatgcactaattgttatacgagacaaaaccctggggtaaagaacaatatcacaacaactttggctgctacagcttcgactctcggtctgggtcaagctgcccagtgccgacctttcgaaagagatggctaggcgactggacgacggaatggttttacgtgaaaaatgacttgaaatctcgagaggatataaagaagatcattatgtatcccatctggcaacgcttcggcctgcgaaggccgaaggtggaattgaatgaagcagccgaagaatgccagagagc

SEQ ID NO: 30995 - DNA, 262 bp, Zea mays
aactttgtcccccgtctgctgaaagtagggccttgcattgccccaaccaagataaattgcttgtgtcaactcgcatcaccagctggatccggggcacgcggcatcacttcactagttggttaggatcactagtccaaacaccgtcactaatgcaatttatgcttttctgcttgaaactttttggtactagctacaactactggctttactgactttgtcaagtgtgtgaagcaaacttacctttcattttcatgagcttagt

SEQ ID NO: 30996 - DNA, 290 bp, Zea mays
tcctggaagccatcttatcagcttacaacaccttctccaattctgtataatttttctttgataaactaagaacttcggatacaaagtatattggggcttgctttttgatttgcccttcaagcttctcttggacaagtgccgcacttaccgctgagtacgaagctgccacatataacaacagaggagcccctggcgttggtggagttaacgtcgttaggtctatcaaatattgcttcagctcttcgaaggctctctgctgaactggtccccattgaaaaacttcggctgac

SEQ ID NO: 30997 - DNA, 254 bp, Zea mays
agctttcctgcacttttaaatattgtaggattgcaagtatcatgcaactgtatttctacattttttctgttcatgcattttgtcaatcttgcgttcaaaagggggagaggcagggtgcatttctaggatttttaggagtctagaccaaaattcaaaatcgggaatctaaaattaaagaatttcaacttatttatttctaatatgactaaacaataatttaagatttatgtgcgttattcgttcttttctggcgg

SEQ ID NO: 30998 - DNA, 284 bp, Zea mays
tattcctccctgggaagggtcgttcatcatcgctaagattttgaagcccagaacatacaagctggccaacgatcaaggcaaggtctacaacaacgcttggaacatccaacagctatgtcgcttctacccttaagatgtttcaagtcattcatataccccgttttctttacatacataaataaactctaaccgtcaaggaaggatcagccttgcctcggcaaagcccgaccctccctcgggggctagaaggggggaaccccctctgcgtcaaaattttcctcgga

SEQ ID NO: 30999 - DNA, 249 bp, Zea mays
agcttgggtaacactttggtcctaggcattacttaactcactcatgcttccaaggtcttaagtactccctctcctccaagttttaaccacatgtgataataggtatatgtgccatcaggaagccaacaccttggtaacacctggggtgttacagccccccccccccttaaaggaatctcgtcccgagattttaggtagagttccttggaggggtgccgtgaaggtgtgttggtgtgctacccttccctt

SEQ ID NO: 31000 - DNA, 284 bp, Zea mays
tacccgactccttctccaccggcacaatattggagacccgttctgcgtatctacaaggtctaataaaatcagcttctagcagccggtggatttcgtccttgatccgtgggagaaggtctggacgaaatgttctaggtttctgcttgaaaggtctgaaaccggacttaataggtagtcgatgctctacgatctctcggcttaatccaggcatctcagtgtaattccaagcaaagcaatctgaatattccttcaatagaccgatcatctcattcctaggattggtc

SEQ ID NO: 31001 - DNA, 259 bp, Zea mays
agcttgaaggccaagtcaagaaacaggctccaatatatttcgtatccgaagttcttagtttatcaaagaaaaattatacagaattggagaaagtactgtatgctgttttgatggcctccaggaagcttcgtcattattttcaagcttataacataattgttccttcttcacaacctttaaaggatattatgagaaatcgagaagctactggaaggattggaaaatgggctgcagagctcaatgaattttgtattgatta

SEQ ID NO: 31002 - DNA, 291 bp, Zea mays
tctaaagggagaacacattttgtgactaacaaatgttcattttgagaaagacagaatttgtagcgcatgtcaggcagggaagcaagttggagttcatcatccacacaagaacatcatgacgactgacaggtcgctcgagctcctacacatggatctattcagcccgattgcttacataagcatcggcaggagtaagtactgtctagttatagtggatgattattctcgcttcacttgggtgttctttttacaggaaaatctcatacccaagagaccttaaagggattcttg

SEQ ID NO: 31003 - DNA, 257 bp, Zea mays
agcattatcttatggacgtgaaaagtgccttcctcatcggaccaatcaaggaagaagtctatgttgagcaacctcccggctttgaagacagtgagtaccctaaccatgtttatagactctctaaggcgctttatgggctcaagcaagccccaagagcatggaatgaatgcctaacagatttccttattgctaatggcttcaaagtcggcaaggccgatcctacactctttactaaaactcttaaaaatgacttgttt

SEQ ID NO: 31004 - DNA, 274 bp, Zea mays
tttttttttcgccaagggcaacgctcccatggttcaagacagtgagggctatattttatatcctataaactatcctgagcacaaaattaggaaaattcatgctaggaaacctcatactatttctcaccatgcttttatgtataaaaaataaggcttctaattctaggcattctactcatgttaaaatgcctaaaaataaaattcctaatgcatcaaatgagcacaacatttcatttaatttttttgatgtttcctatatgatcacctaacaaat

SEQ ID NO: 31005 - DNA, 255 bp, Zea mays
agcttctatgggagaacacgtgataggtttgactaacgtgcaattcgaaaaagatagaccttgtgcagcttgtcaagcaggtaaacaagtgggaggagcgcatcacagcaagaatgtgatgaccacttcaagacccctggagctgctgcatatggacctcttcggacctgtcgcctatctgagcataggagggagtaagtatggtctagttattgttgatgacttttcccgcttcacttgggtgttctttttgca

SEQ ID NO: 31006 - DNA, 291 bp, Zea mays
taccactgtctctggctgtctttctgttgggcacggggtcaggtggctttgggagctacctgtttggcatgagcgagacgatcgccagccaggcggccgaagaaaacaatgccgggaacgtgaaggagcccaggctggcgtggatgatcggcttcctgttcctcgttagcttcgtgggcctcttcgctctcttccccctcagaaaggtttcctgcctctgaactgtggtcgctcccggctcctcctttgcatcacagactgaaaagttcgaaaaatcttaaactgacaaga

SEQ ID NO: 31007 - DNA, 251 bp, Zea mays
agctttctttatatttgataaataagattttgaatcctatgatatagtttcctccccctaaatatgtgcatttcagaaaataccaattttgtactcaaatgccaaaagcacatatttgggtcaaagagtgaagacaacttacatcatactagtcaaagagtgaagacaacttatatcatactattcttagggtgctttgtgtcataaataaacgtgatgctcatgacatattatgcactcatcaatttcct

SEQ ID NO: 31008 - DNA, 290 bp, Zea mays
  unsure (1)..(290): unsure at all n locations
tgttagagaagctganggtggtttaactttgnnacaatcccattatgtggaaaaggtattgagtcgctttggttttagtgactgtgatcctgctccaacaccttatgatcctagcatgctattgagaaagaatcggagaatagcaagggatcaattgacatactcccagatcattggatcgctcatgtaccttgcaagtgcaacaaggccagacatctcttatgccgtgagtaagctaagtcggtttgtgtcgaaaccaggagatgatcattggcgtgctcttgagagag

SEQ ID NO: 31009 - DNA, 263 bp, Zea mays
agcttgcatacacatcaacccttctactgttttggagcaagtctactacaaagtgggctaattcactaaagaaagtctttgcacctcatacatgtccaatatgtctttttaatagtgtttctggacactactttgaaaaggggttgtagacttgtagtgttgcacaaaatcttctgaacccaacatgatcaaccatagaaagtggatactcatgcacacagatcattagcgcaagttcttttctagcaactacttgatcaaaa

SEQ ID NO: 31010 - DNA, 296 bp, Zea mays
cttggagggctaagcagtgttttttgaatatgatatatggggactgggagtctgggtacgagcagctacctgttcttttaaatgcaatgaaggcggtcaatccatgcatgcattatgagtacatccctaaaccaaatgcatggattgatgggagacagatattcttccatgcgttctggtgcttttcccagtgtgtggatgccttccggcattgtcgtcctgtcttttcaattgtcgagcttggatcctgcacatgtttggttgtgtcctcttcccagacgccacaggagactgtg

SEQ ID NO: 31011 - DNA, 298 bp, Zea mays
atactcaagcttgtgtagggatcctttcttatatgtccaacaaatgttactttcgaaaaagatagaccttgcgcatcttgtcaagcagggaaacaggtgggaagctctcatcatgccaaaaatgtgatgacaacatcgacacccctggagttacttcatatggatctcttcggactcgtcgcctatctaagcataggaggaaataagtatggacttgttatagttgatgatttttcccgcttcacttgggtattctttttgtaagataaatctgaaacccaagggaccctcaagtgct

SEQ ID NO: 31012 - DNA, 256 bp, Zea mays
tttcttattaagattcttcatcccaacatgggctattcggcggtgccagagccaacccatgttagtcttagcaattaagcatgtgtcgagttcagctctatcaaaatctactaagtatagctgaccctctaacacacccttaaatgctattgaatcatcacttcttctaaagacagtgacacctacatcagtaaaaagacagttgtagcccatttgacacaattgggaaacagaaagcaagttgtaatctaatgaa

SEQ ID NO: 31013 - DNA, 287 bp, Zea mays
  unsure (1)..(287): unsure at all n locations
tcctatgggagtaattatttaagaattntattggcttgtatatttagcgataggtgatgtttggatctatttattttggaagaattgaaatctattcaacagagtaacctatttggcttgaaatttaatatttcactattttctaaagtttagatacaagtctatcttaaatttatagggtggaagatagaaattgattttatgtatcactagactgtacttctactctacaattataacactcttcgactcatttccttgtaatagaaatatagtatacaaatatc

SEQ ID NO: 31014 - DNA, 254 bp, Zea mays
tttcttatcaaaagaaatttctagaatcaagaatattgagctcatgcctaagtctggtaaaagattgttcatcaagtggcttggtaaagatatcggctaattgatctttagtattaatgtaagaaatctcgatatcccccttttgttggtgatccctaagaaaatgataccgaatggctatgtgcttagtgcggctatgctcgacgggattgtcggccattttaattgcactctcattatcacatagcaaaggg

SEQ ID NO: 31015 - DNA, 289 bp, Zea mays
taaccttgtaacgatgattatctacctttgtttcaaaggtggagggtccttaagtctctttgaaatccttaagggtaaaagcttaagattccaacatgctttcataagtgagtagtctgtcatgagcatcacacttttattatgacacattgcacttcacagtttctatgataaagatatgttctcattaacctaattatgtgcacttggcatttaaggccaaaatttgtattcctctctaggcacatatttaggggggcaatctatattatatagaactgtttaagct

SEQ ID NO: 31016 - DNA, 252 bp, Zea mays
agcttttccgccgacgagaccgtcagcgccacccgcagaccgacctccagctctttggctttaatatctggttcacgtcccccgtgaggggacgcgaacgagagccttccagcggtagcgtctgtcctgggtccgtcgctgctgctgcagaggtcgccggcgagtcacctgggattttgtcgtcccgcaggccctccaatgtggggggttgttcgtacctgtgggagtggaaccaaagttccgtttgtaatg

SEQ ID NO: 31017 - DNA, 289 bp, Zea mays
tctaaagggagaacacgttttatgtttgactaacgtgcatttcgaaaaagatagaccttgtgcaacttgtcaagcaggtaaacaagtgggaggagcacatcacagcaagaatgtgatgaccacttcaagacctctggagctgctgcatatggacctcttcggacccgtcgcctatctgagcataggagggagtaagtatggtctagttattattgatgacttttcccgcttcacttgggtgttctttttgcaggataagtctgaaacccaagggaccctcaagcgcttc

SEQ ID NO: 31018 - DNA, 262 bp, Zea mays
agctttttcgatggttaaaaattttggcagcagaacagtgcaaatagcaatgaatgctgtggtaacttcacacctactcatctgtttatatagtactgcaggaaagaaggcgaagcgccaggatttttacaccaggcggaaacccgcttgcactctctgtgcagtggaccgcagagaccaaacagtaactctgcaaggtgggaccgctacgcgctgggaaattgaatcgtttctcgacaacgagctcagggaaggtgttttt

SEQ ID NO: 31019 - DNA, 290 bp, Zea mays
tagcagttggaggggattctccctggggcaccggacactgtccggtggcacaccggacagtccgatgcgccagaccagggcagcctcggttttctttgctcctttgatttgaaccctttcttttatatttgtattggtttgttgtgaacctttggcacctgtggaacatatactctagagcaaactagttagtccaataatttgtgttgggcaattcaaccaccaaaatcaattaggaaaaggtgtgaccctatttccctttcaataagtattggactgatgttcaagga

SEQ ID NO: 31020 - DNA, 252 bp, Zea mays
agcttttggctcgagcttgtgaggagattagttgcgacataaacgaccctagaatatcaattcagggtttgttgtcccatattacatatggaacagttgtccgacggttgatctccattacctcagaagatgattgggtgatatatttaagaattgtgaagacgatggttccaccatgtttggatgtggttgttcaaaagttacctgttagtcattgcgatggtccagtcgggttatctccacaaatgccaa

SEQ ID NO: 31021 - DNA, 284 bp, Zea mays
tgccgcagttgtggcagctcgtcgtctcgtgccggcttcttgttgccgacggcgccgccttgggcacctccacgtgcaccaccctcagcatgtcctcgcgccccggcctgggcgcctccacgcgccttgcgcggcttgccgcgtttgcggcctcgtgtcgaggaggactcccccttcttcttgtcaccctggcaggcctcccactgctcccgagtgagatgtagcttcccgcctatagtgataggcccagagagagcctgtggttcgtcgccgtcgaccacctt

SEQ ID NO: 31022 - DNA, 252 bp, Zea mays
agcttctaaagggagaacacgtgataggtttgactaacgtgcatttcgaaaaagatagaccttgtgcagcttgtcaagcaggtaaacaagtgggaggagcgcatcacagcaagaacgtgatgaccacttcaagacccctggagctgctgcatatggacctcttcggacctgtcgcctatctgagcataggagggagtaagtatggtttagttattgttgatgatttttcccgcttcacttgggtgttctttt

SEQ ID NO: 31023 - DNA, 285 bp, Zea mays
tgaacatatggttgtagcttcaaatagacccaatctcccaccacaaacatgcgctcagaacgtcccttgtcagcttgccttttcatgcacaacttggcgcgttctaaatgttgtcgaaccaactcagacatgagatgcttgctgctcagccaagaagcaagatcagaagaactaaccatagtggagtcggtaatgccaaagtcccgcagtcgggttccatataatgcttcaaaaggagaaatgccagtagaagagtgtggagatgaattataccaaaactgcgcc

SEQ ID NO: 31024 - DNA, 257 bp, Zea mays
agcttttgcaatgttcatgagttaatatatgagacgaaaccctggggtaaggagcaatatcataacaactttggttgctacagcttcggtgctcgttctggatcaagctgtcctgtgccaacctttcggaagagatggcccggggaatggatgaaagaatggttctatgtaaagaatgatttgaaggctcgagaagatattaaagatatcatcatgtgtcctatctagcagcgcttcggactccggaaaccgaaggt

SEQ ID NO: 31025 - DNA, 267 bp, Zea mays
ctgggaagggtcttcatccccacatgtgctaagcggcgatgccacagccagcccatgctagtcttagctattaagcatgcatctagaccggcctcttcttttgccaaatcaactaaataaagtttgccgtctaatacacccttaaaagctagtgaaccatcgcttcttttaaccacagacacatctacatttgttaatagaccgttatatcccatattgcataattgactcacagatagccgattatatcccagaaactccactaaa

SEQ ID NO: 31026 - DNA, 255 bp, Zea mays
agcttatgtgttcatcatgcttactgcgacgagggcagcatggaggatagaaaaggcttgctggcattggaccagggatgatggcaaagctccacgcgagcagaggctttgggtgtcgatgaggctcgcccgcgactcctagtgacataggggtagaggggaagctccttgagctcccacctagccagagacgagaacgatagtggcataatggtgaagcaaagcttcgtcggcgacaatggtatctagaggggt

SEQ ID NO: 31027 - DNA, 289 bp, Zea mays
tattgtttgatatccacattttttggaagatgaaactctgttgtcaatttcaaatttattttttctatggatgtgtctgtatggaattacctgattttgcagcctgcaattgataggtatcgacgatgagacggagcgtctggaccagtgaagccccacgacgacgtatcaaccaaagccctcccgcatgacgatggcggtgaggtcggtggcgtcattgaggggcatgttgccggtgacaagggcacttgcacccaacgatccattacttagtgcccgcttttgttta

SEQ ID NO: 31028 - DNA, 241 bp, Zea mays
catcgggggggctcgggtcttaacatgaatgaacgcccgggaccccttccttcaatgttacctccggcagccaaaaattggcgtacccgtcgaaagggaacggtggccacctggtcttcaggggcagcgaagggatgatcctggctatgttggcgttaagagtcctccatggtgatgtttcttcttgtgcattgatctctgactgcctggaaacccatcatcgtccaattgcttgctgcac

SEQ ID NO: 31029 - DNA, 289 bp, Zea mays
tctgccctctctgcctctctgatctggtggcctgaaagaactttgttgtgcccctgatgattgagagctgtgctgttgcccttgggtatgattccccctgtcgtcgcttgaactggggttatggattgtcctgacatgcctagggtggagtcttcctccgaagcccctggtcatctcggagtatttgtaggctccttccattctttgtcgaaagtcattgtcggctctgatgtactcatccattttctagagaagcttctccaaggtttgtagtggctttcttgcaaaa

SEQ ID NO: 31030 - DNA, 256 bp, Zea mays
agcttgatcttgcacgttgtgcaaaggaagcaatgaaagacaaccctgatgcatttcgcaagggcaaatggccccgttgcactcagtagtctaggtgtttcatttgaagttatgtaataatgaacttattattcggtattatgtattgtcgaacaatgatatttggtaatgaattaccttcaaattgatgaaaaacgacataaatacacaattgatgaaaactacatttaaagcaattgttgaaggcgacttcaag

SEQ ID NO: 31031 - DNA, 290 bp, Zea mays
tttaggttttcttaacttaatttaagttttacccctttaatcactatttagggttaagtcctttaaccagggtcctatttgtaaaactttaaaacaacacaacttgtttgaaatttttgcctagtgaatgcattctaggtgtatcaaacatatgcaatgccaatgcttatgatgccatgctcaagttttagttatagtaacaccaggggtgttacataactggtgtttaatactttacatccaacaccaactatgcttgtactgtccttttatgtgctcatgaattgatt

SEQ ID NO: 31032 - DNA, 266 bp, Zea mays
agcttgaattatccactacacaacttttataatcaccaagaattgattctatgctgaactgaatcaaacaattcagttttcgaaatctgttctgtcagtggacagaacacagcaaccagtttttaaaattcataactcttaaactgtcagatctatggttgtgaaattttaacacaagcaagatcagaaaagcatctacaactttcttataacgactatgatcagattgcaacattatcttaagcaaacaattcaatctctgaaat

SEQ ID NO: 31033 - DNA, 268 bp, Zea mays
ttagtgactattgagagagtttttcttgtgttctttcgagctcttgcgcttggattgctttcttctttcttgattctttattgcgatcaaactcacttgtaattgcggcaagagacaccaatcttgtggtggtccttgtaggaactttgtgttccaagtgattgagaagagaaagctcactcggtccgagggaccgtttgagagagggaaattattttaatacactcagtttttttacaacttgttggccagtttttttttccacaat

SEQ ID NO: 31034 - DNA, 253 bp, Zea mays
ttcttgcacttacgaccaaaccgcacccgcatccatatcacattcaatggctcaacaatagtggtaaggtcaaggtaaccaagctggtacgaattaattttgctattggttcatatcgtgatgttgttgactgtgatgttgtgcctatggatgcttgtaatattctgctaggtagaccatggcaatttgattcagattgtatgcatcatggtagatcaaatcaatattctctcatataccatgataagaaaat

SEQ ID NO: 31035 - DNA, 286 bp, Zea mays
tgctctatgttatttggttttaccatggcaatttgataaggacaccgtgcatcatggtaaaacaaatcactactcttttatgcataatgagaagaagcttgtattgcaccccatgtcccccgatgctattttgaaggatgaagttgctagagcttgcaaagagaaaaataaatctgttcataataaaaatctaggtgctgcaaaggagttggtacaacataagagtgacaattctaaatctactcaagtgaggaagacagaaatacaactgaaaagtgcttgtttt

SEQ ID NO: 31036 - DNA, 253 bp, Zea mays
agcttgaaggccaagttaagaggcaggccccaatatatttcgtatccgaggttcttagtttatcaaagaaaaattatacagaattggagaaggtactgtatgctgttttgatggcctccaggaagcttcggcattattttcaagcttacaacataattgttccttcttcacaacctctgaaggatattatgagaaaccgagaagctactggaaggattggaaaatgggctgtagagctcaatgaattttgtat

SEQ ID NO: 31037 - DNA, 287 bp, Zea mays
tctaaagggagaacacattttgggactaacaaatgttcattttgagaaagacagggtttgtagtgcatgtcaagcagggaatcaagttggtgcccatcatccacacaagaacatcatgatgaccgacaggctgcttgagctactccacatggatttattcggcccgatcgcttacataagcatcggcgggagtaagtattgtcttgtaattgtggatgattattatcgcttcacttgggtattctttttgcaggataaatctcaaacccaagagaccttgaagggat

SEQ ID NO: 31038 - DNA, 255 bp, Zea mays
agcttgtatattattcatcaaaacactacggatattgttgtgacaaataaaaattcttcttcacgaagcatgaaaagaagggaaggtgttttttcgtcaaagactcaaaaacggtacgtatgtaaaatttcatgcatcgtaaagaattgaacaataaaaacaggtatattatattcagggttacaagatgttacacatgttacatttcagaagtttttacaatagtacttaatcttctctcagaacaacttctgc

SEQ ID NO: 31039 - DNA, 289 bp, Zea mays
tggtgccaatggagaatcataaatccctgaagtcttggctatcaaattgcttgccattgtcaactatgagctcggacgggactccgaaccggcaaacaatgttttgccagaagaatttctgggcagtcttcgatgttatcgtggatactgccctcgcctcgatccacttggtaaaatactcgacggcgatgaaggtgaacttgaggttcccttgggccgtgggtagtggcccaacaatgtcaaggccccagcgctgaaggggccacgtgtgggcgattagctttgtgaa

SEQ ID NO: 31040 - DNA, 254 bp, Zea mays
tagcttatttcattacttttcatttcttgcaggaaccgcaaagagtcttgcataatgtgccaagagtgcatccaccacaatcaggtgggaaaataaagaaatcaactaaaaacctttgtcaatatagcgatgagtccttaaatggttcaggaagtttggattgttgtcatcaaggccagtcaggaaggcgaaaaaatcaggattacaccactgaccctggaaggaacgatttgcctattgctgctcatggacca

SEQ ID NO: 31041 - DNA, 290 bp, Zea mays
tgtgagctgcgaaggcactgagctgagcaaaagtgatgccgcttagatgtcatgactcgcgagagatgatgcaatgcaggcaactgtagcgatcttctccatttctgacatttgaagcttggttgttgtaccattggagttaagtgctgtacgcgtccacgccagtcctgtatcgacggagtcacggagcaagtgttggacttcactacttcagtctctgttgatatagagtatatttttgatacggaacggtcgggagaggcctagtttgttttaggttccacatgttt

SEQ ID NO: 31042 - DNA, 302 bp, Zea mays
aacagggtattctttagagacagaaaggaagcatgctttctttactcccatggttgaaatatatgatgcaacacatataatactgcctagaagcatacacacttggcaaagctcagactaacaccataccccttaggataagctttcctcatacgttgaaataaactctaatacacaaattttccccctttgacatcaaacaccaaaaaccatactcaagccagaacatatgatgatgtcaagggacagcagggtgctaaagaggaaaacgactatcaaaactcccccttacttattgagca

SEQ ID NO: 31043 - DNA, 291 bp, Zea mays
tctaaagggagaacacgtgataggtttgactaacgtgcaattcgaaaaagatagaccttgtgcagcttgtcaagcaggtaaacaagtgggaggagcacatcacagcaagaatgtgatgaccacttcaagacctctagagctactgcatatggacctcttcggacccgtcgcctatctgagcataggaggaagtaagtatggtctagttattgttgatgacttttcccgcttcacttgggtgttctttttgcaggataagtctgaaacccaagagaccctcaagcgcttcct

SEQ ID NO: 31044 - DNA, 250 bp, Zea mays
agcttcagcagaatgacaacaaaggttctccattctcagataggcaggaatgtactaacttatgttgatgatatcattgtaaagagcacgaagcaggataaccacattgctgatttacaagagacctttgctaattttagacaggttggtctaaagctgaatctagaaaaatgtgtcttcggagtaaagaaggggaaatttcttggttgcttagtttcaacaaagggaattaaggccaacccaagtaaaa

SEQ ID NO: 31045 - DNA, 282 bp, Zea mays
tcatatcatttttttctcctgcaaagctttgtcaagcatgttttggtgcccatcgcttgatgggtccatcaaggttagtcaacaaagatctaggaacccaaatgtcctttgtgttagcactaggtacactcattacctttctagcacaagttgcaattttgggttgcctagttacatgagaattaattgacaagctaagagtgggatagttaccaatgggacaatccttgcattgatgtcccttctttcggcatatgtagcataggcgatcttcaagtcttg

SEQ ID NO: 31046 - DNA, 254 bp, Zea mays
agctttaaccattagttggaggttggaacctgtttgctgtagtttccataaagtaagttgtgaatggagaacataagcatcattataggactgtaaatgtcataaaagagtagcaaacaatcatacaagtgcacacagaagagcaccaggagaaaaagaactaaacctgtgctggaaagctgcatagttttccaaaagtacaatatcaacatatttaggttccacttgagcaattttctccagaatgacaaaca

SEQ ID NO: 31047 - DNA, 283 bp, Zea mays
tggacagtacatcagccgccgtgttccgatctctttctatatgatgaaactccagaccttcgaatttatcttctagctttcggacggcggcgcagtatcttcccattgaatcacttgaacaatcccattccttgtttatctgactgatgactaccagagaatctccgtacaccatcagtctcttgacacccagtgatatggcgatgtttaatccgtgtatcaaagcttcatactcggcagcattgttagaggccgggaatagcaactggagagcatacttgag

SEQ ID NO: 31048 - DNA, 256 bp, Zea mays
agcttctaaagggatagcacattttgggactaaccaatgttcaatttgagaaagacaggccgcttgtaggatctaggacaccggctagagggggtgaatagacggttttgactaaaataaaaaacactagagaaatttaatcaatatgacaagaggtatagattctctagtgacaacaagtaagcaatctatgaaaaacaactatggtaattgtatatgagaaagacaatatgcaaaatactaattacttgcatgg

SEQ ID NO: 31049 - DNA, 286 bp, Zea mays
tcctcccttctttggcgaattttattgtcagcccggatgtactcatccattttctgaagcagcttcttcagagtctggggggtttcctggcgaagtattgagtcgtaggcccaggtcgaagacctttgatcatggcctcaatgacgatttcattgggcaccgtgggcgcttgtgctctcagacacaagaaccttcggacatatgcctgaaggtactcctcatggtcttgagtgcactggaacaaagcctgagcagtgactggcttcgtctgaaacccttgaaagct

SEQ ID NO: 31050 - DNA, 259 bp, Zea mays
agcttggtcattttatcgctaactgtcccgacaatgatagtgatcaggatcaagggaacaaaagggagaagaagaagaactataagaaggcaaagggcgaggcacatctatgcaaggagtgggattcggattgctcctcatccgactccgacaatgaaggactcgccgccaccgccttcaacaagtcatccctcttccccaacgagcatcacacatgccttatggcaagggagaagaaggtatgtactcaaaactctac

SEQ ID NO: 31051 - DNA, 290 bp, Zea mays
ttgtcttgggtggactaatgccagaataagataacacgaaatgggcgtggagcggtggcgaaagtatcgtgtaccctccgtggcaagagactggacggcggagtatctgagctctcggtttgcgtgaacctgatctggtcttaagaaactcagaggcgggttgacatatgcaagggttaagtgctacatatgtcgcgtgatcggagatcctcagctgagtataaacgattcggatcgcccgtcctccacggttatggagacttggccactgacttacacgtaacactcca

SEQ ID NO: 31052 - DNA, 293 bp, Zea mays
tctaaagggagagcacattttatgtttaaccaatgttcattttgagaaagacagggtttgtagcgcatgccaagcagggaagcaagttggtgcccatcatccacataagaacatcatgacgactgacaggccactggagctcctacacatggatctattcggcccgatcgcttacataagcatcggcgggagtaagtactgtctagttattgtggatgattattctcacttcacttgggtattctttttgcaggaaaaatctcatacccaagagaccttaaagggattcttgg

SEQ ID NO: 31053 - DNA, 267 bp, Zea mays
agcttgtgttacccgttgcctatcaattggaattgccacctcacatgtcagcagttcacaatgtgttccacgtatctcagctgcggaaatgtgttcgcctacccactgaagtactaccggaaccacacattgagatagaaccagacttgtcctaccaaaagtaccccgtcaaggtattatatcaaaaggagagatcatctcgggcaaggtcggtcaaaatgtacaaggttcagtggagtcaccattcagcaaaagaagctacatggg

SEQ ID NO: 31054 - DNA, 299 bp, Zea mays
tactcaagcttgaaggacaaactaaaatttttttttagtatatttcgtctctgaagtattaagcttatcaaataaaaattacacagaattggagaaagtgttgaatgctgtgttaatggcatccaggaaacttcgacattattttcaagcttaccatataattgttccctcgtcacaacctctgaaggatattatgaggaacagagaagctactggaagggttggaaagtgggtcgtggagctcaatgaattcaccatttactacgtacacagatcttcaattcaatctcaggcgctag

SEQ ID NO: 31055 - DNA, 249 bp, Zea mays
tttcttttgccctaaaacaagaggatgcaacaaagttcgcagtgctttacagaacgcttctgcgaatcacttgaagaccacactacttatgagaatgattcagcagaaacggttgcaaaaatgtcgcacttcatacataacgttctgctgaaacgattatgttgtggtgccttggtgatggcctatgatgatgtgcgatctattcattgagcaatagctaacataaaattagtaaatactaatgtgatt

SEQ ID NO: 31056 - DNA, 286 bp, Zea mays
tgtagagcaatccttttttttttggagtagggtattacgctctggcggcccgaaccactataaactctcgcgtgttcatgtgctcggtgattgcttagccggacaggcaaaacgcttaagccccttcctcatcttaggattaagggcgggtgcactccgccacccggacggagaattccctctccgacatttagcgcgccaggtagggggctaggcattaggtttttgcttgtttcctcgctcagcatgatggtgcaaatcgtggagcaccgcgccgaggcttcaa

SEQ ID NO: 31057 - DNA, 250 bp, Zea mays
agctttttggaaaaacagaccacgcgcggaccgttcggactttgcgacggaccgtccgcgacacctggatgaccctcttacttaaccaatgcaaaaatccaagtctacactacggaccgtctagaggaaaaacaagcaccgtctgagaccacgcgcggaccatccgacctcaagcgcggaccgtccggtaggtgaggaaccgaaaaccccgaaggtgacgggttcagtaaaatgaattatagcgtcctcg

SEQ ID NO: 31058 - DNA, 287 bp, Zea mays
tactcccccctgggaagggccgttcatcatcgccaagattttgaagcccggaacgtacaagctggccaatgatcgaggcgaggtctacagcaacgcttggaacatccgacagctatgtcgcttttacccttaagatgttttcaagtcgttcatatacctcgttttctatacattcaaaaataaagtctaaccgtcaaggaagggtcagccttgcctcggcaaagcccgaccctccctcgggggctagaaggggggaaccccctctacgtcaaaattttcctcggaaa

SEQ ID NO: 31059 - DNA, 256 bp, Zea mays
agcttgagtcgattcttctgcaaagaattattgatgcccaaacgaatgataagggtatgaaacatattcacgagacaatagaagccagcaaagctaattgcttcagaaaggatgatcaaggcatagtatggtttaatgatcgcatagttgtgcctaaggatgccgacgtccgccagcaaattttggatgaagctcatcttagtcgatatcccatttatcccggaagcactaagatgtatcaagatttaaagcaaca

SEQ ID NO: 31060 - DNA, 290 bp, Zea mays
tgtgaagattcttcattccaacatgggctagtcggcgatgccagagccaacccatattagtcttagcaattaagtaagtatcgagttcagctctattaaaatcaactaagtatagctgaccctttaatactcccttaaatgctactgaatcatcacttcttctaaagacagtaacacctatatccgtaaaaagacaattgtagcccattttgcataattgagaaacagaaagcaagttgtaatctaaagaatctacaagaaaaacattggaaatagaatggtcaggtgat

SEQ ID NO: 31061 - DNA, 257 bp, Zea mays
agctttatcaaatggacgtgaagagtgccttcctcaacggaccaatcaaggaagaggtctatgttgagcaacctcccggctttgaagatagtgagtaccctaaccatgtctataagctctctaaggcgctttatgggctcaagcaagccccaagagcatggtatgaatgccttagagatttccttatcactaatggattcaaagtcggaaaggccgatcctacattcttcactaaaactcttgaaaatgacttgttt

SEQ ID NO: 31062 - DNA, 288 bp, Zea mays
ttgcctcgggcagactattaccagaataagacaacacacagtgggagtggagagatggcgagagtagcgtgtaccctccgtggcaagaggctggacggcggtgtatctgtgctctcgattggcgtgaacctgatctggtcttaagaaccccggtggcgagttgacatatgcaagggttaagtgctacatatgtcgtgtgattggtgatccccagctgggtattaatcgattcggatcgtcgttacttcttgtcggggaccataattaggggtacccttaaggctccta

SEQ ID NO: 31063 - DNA, 257 bp, Zea mays
ttcttatctttattttagaaaaggggagaaataattaacaaaagggggaatcataagaaaaacataagatgtagaaagttgatgagtgcatactatttcatgagcatcatgtttattttatgatacactgcaccatatgaatagtatgatataagttgtctccatactttgacccaaatatgtgcttttggcatttgagtacaaaattggtattttctgaaatgcacatatttatgggaagaaactacatgggattc

SEQ ID NO: 31064 - DNA, 302 bp, Zea mays
acagtctataagactcccgctatacataattagttcggacttagcctaagagcaagccgttattttccaacatatacaacctgctttgatgtgacggtgcattctaaatctccctgaaatcgtaacactcagtggtcttccctctttaattatactcgtttaatgaaaaagaattagcctagactgtctttaactaacggatttcagttgatacataacctagcgtaactgatattgcgactaaatattttaacaactcattattatgaactgaaatgaggacactctcccagattagatgc

SEQ ID NO: 31065 - DNA, 247 bp, Zea mays
agcttgtggaggttcttcatccccacatgtgccaagcggcgatgccacagccagcccatgcaagtcttagccattattgatgcatctagaccggcatcttcttttgcaaaatcgactaagtaaagcttgccgtctagtacacccttaaaagctagtgaaccatcacatcttctaaagacagacacatctacatttgtaaacaaacagttatatcccatattgcataattgactaacagatagcaaat

SEQ ID NO: 31066 - DNA, 278 bp, Zea mays
tcgatcgccaaagatcccatctaaccggaacattgaacgcgtcgctgctcttgaagcgctccaattcgccgccagagtcgtctgtctgtgggcttatatagagtaatgtagagagaggcacacacataatcagatcaagaagcacagacaaagctgtcaggcgaggagttaaggtctgtccataccagatggcagcggaggaatcgtcggctgcgcgcgatccatggcgcgtcgcggactcacggtgaatagaaccttggcactactaccgccaggtc

SEQ ID NO: 31067 - DNA, 254 bp, Zea mays
agcttcaactccatctatattgtggatcgcttttgagtctgtccaatttcccttagcctttctggcagcttcctgacttacatgaatagcaatgggcccttgttccaaaggtatcttcatgcatagatatgttggatgaagaattgcttcgaaagcattaagtgtcccacgacctatgattgcattgtaggggtattccgtgtcaacaatatcaaacacaacctgttcattccttgtattggggacaaatccga

SEQ ID NO: 31068 - DNA, 286 bp, Zea mays
tctatcaagaagggccgttaccaaatgctgaactgaagaaggtaattccagtttcatgtttctaattctgaacaagtgtagctgtgagcctgtgacttttatcaatttttgcaagcacaaggaaaaaaaagcaggatttcagtagtcatttaaacagaatcaggtatttcttgttctgttcattatatatctattattcacatatgaaaaatcttaaggtggttcaagtcagaacagtccaaaaaattccagtggccactctttcatcatcaaaatttttgactgg

SEQ ID NO: 31069 - DNA, 253 bp, Zea mays
agcttggtcattttattgctaactgtcccgaaaataatagtgaccaggagcaagggaaaatgggaagagagagaacaagaaggtttacaagaaggccaaaggcgaagcacaccttggaaaggagtgggattcggattgctcttcgtccgactccgacgacgaaggacttgccgccactgccttcaacaaatcggctctcttccccaacgagcatcacacgtgcctcatggctaaggagaagaaagtaagtact

SEQ ID NO: 31070 - DNA, 288 bp, Zea mays
tctaaagggagaacacgtgatttgtctaactaacgtgcatttcgaaaaagatagaccttgtgcaacttgtcaagcaggtaaacaagtgggaagtgctcatcacatcaagaacgtgatgactacatcgagaccctggagctgctgcatatggacctcttcggacccgtcgcctatctaagcataggggggagtaagtatggtttaataattgttgatgatttttcccgcttcatttgagtattctttttgtaggataaatctgaaacccaaaggaccctcaagtgcttc

SEQ ID NO: 31071 - DNA, 253 bp, Zea mays
agcttagttggtatgtatgtgcaacttttcgagatagttaagtgtctggtctaaaccattggttacattgagcatccaaagaactaacaaagcaaattccagtgtggagatactcacgagaacaattttgaattgccttgcagagccaggtaccacaaataagtgttcaaccttactctcatgcttcaacttcaagaacacctgaacacatttgctaagtgatgtacggggaaacaatagccatcatgttatc

SEQ ID NO: 31072 - DNA, 288 bp, Zea mays
tgacaatgaggagatggctcttttcatcaagagcttgcgccaaatcctcaaacaaaggagggggaaagactacaagtcccgctccaagaaggtgtgctacaaatgtggtaagcccggtcattttattgctaaatgtcctatatctagtgacagtgaccgaggcgacgacaagaaggggagaagaagagagaagaagggcggtgatgcccatgtttgtcgggagtgggattccgacgaaagctcaagcgactcctcctccgacgaagacgccgctaacatcgccgtcac

SEQ ID NO: 31073 - DNA, 260 bp, Zea mays
agcttattaaagagttgatctccttatgtgatttgccatctactttctgagacatgtgcttaatcatagttgagagggaataatcccttattaaaaaaatccaaacaagacatgcaccatgttggagtttatttggttgtgcatttaaaactaataaatggtaatgtccaaattggagtttatcctaatttgcaatttaacaaaaggaaaataaaatagaaagaggatgaggaaatactttgtacatataaagaaatata

SEQ ID NO: 31074 - DNA, 292 bp, Zea mays
tcataactcctactggtaccttttattaccttcggatgcctaaggggctcatgaatgctggaggaagcttcagtagaatgactgccaaggttcttcactctcaaattggcaggaatgtgctgacttatgtcgatgacatcatagtgaagagcacaaagcaagaaaatcatgttgccgatttgcaagaaacatttgccaatttcaggccaactagtctcaagttaaatccagaaaatgtgtctttggaatgaagaatggcaaatttcttggctgcctggtatcaacaaaaggc

SEQ ID NO: 31075 - DNA, 261 bp, Zea mays
agcttgtgcgtctcaagatacctagtctttgcctcatggaggacctcgctgacgtaatagaccagcctctgaacggtctggacccctttaactggtcccgggccctcaggctctttgccttcttgagccatcctttcgacgaccagcaccatgctcaccacctctgcagccactgcaatgtacaagtacagcgactcccctagctccggagctaccagtatcggcagggacacaaggtgttgcttcaactcctggaaggct

SEQ ID NO: 31076 - DNA, 313 bp, Zea mays
cactacacaatactcaagctttaaaatgcaggtgcaatattttttttatggtaaagatcaagggatgacaagggttaaggcgataacagacaaacacaaccaaggatgtattttagacagaacttgcaaggtgtcaaagaatggggagcagtcaatgatgaactatattaggcattatccccaaacagggatggaaaagaggaggcttccaaggataggttcaatgtaagcaggaaagcaagggcatagatatcacgagggttttaaaggtaataatggacaaggatgtatgagaagagataattaagtcata

SEQ ID NO: 31077 - DNA, 280 bp, Zea mays
taacagacgctgttaaatgctctactgccaaacaatctggagaaaactttgcaatataaattgtcgaaaaacttatgaaaatttgtgcataccttggaatatatattttcccctttatccgtgaacaatctgctttgctgtggacgaaaattcatttttgacccgaaggcgaaaaacaccttcccttcttttcgtacacaacgaaacatgaaaattttctctttctccgaagtttttcctcatagccgaagcatatgccttttctgtataatacgaccat

SEQ ID NO: 31078 - DNA, 252 bp, Zea mays
ttcttttaaagggataacacattttacgactaacaaatgttcattttgagaaagacaggatttgtaacgcatgccaagcttttaaagcaagttggcgcccatcattcacacaagaacatcatgacgaccgacaggccgcttgagctactccacatggatctattcggcccgattgcttacataaacatcggcgggagtaagaattgtcttgtaatagtggatgattattctcgcttcacttgggtattcttt

SEQ ID NO: 31079 - DNA, 285 bp, Zea mays
tcttcaccatgtgatcttttttatcttgggaaggttgagctatgcatttccctttaagttgtgtcaagctcatcttaagcctctcattttcttctttgagcttttgatatgtatcatattttgttcctgcaaagtttagctcaaaggaaggtttgcttgtcgacagacaacaagcataagcacatggtaatatagtttctatttgaatacatgtgcatgtgtgaagttgttgagattttaagttttctatcacaacctcatgagtaatatctaatatgatatgat

SEQ ID NO: 31080 - DNA, 243 bp, Zea mays
agcttcttcaccatgtgatcacggttatcttgagaaggttgggcaatgcacttcccttttagttgagtcaagctcttctttaacctctcattttcttctttgagcttttgatatgaatcatcatttgttcctgcaaattctagctcaaaggaagatttgcttgtcgacaaacaacaagcattagcacatggtaatatagtatcaatttgaatacatgtgcacgaatgaagttgttgggatttt

SEQ ID NO: 31081 - DNA, 286 bp, Zea mays
tgtgaagggtcttcatccccacatgtgctaagcggcgatgccacagctagcccatgctagtcttagcaattaagcatgcatctagaccggcctcttcttttgcaaaatcaactaagtaaagcttgccgtctaatacacccttaaaagctagtgaaccatcacttcttctaaagacagacacatctacatttgtaaatagacagttatatcccatattgcataattgactaacagataacagattatatccaagagactctactaaaaacacattatagatagagtg

SEQ ID NO: 31082 - DNA, 259 bp, Zea mays
agcttgacgacgaaggttgtcgtcggtctcccgctgacgtcgagccacctcatggacatctgcagcaatatttcggcacatggagaagaaggacgcatatccgtgggccaggcgggcacccatcccacgtccacgacctcgaccacgaccacgaccacgtggtgtgggagatccgcggccaggggaagggcgcgaggcaccaacagcagcagcagcagcaccggcagacggaccagcagatgtaggaccacgagagctg

SEQ ID NO: 31083 - DNA, 244 bp, Zea mays
cccgaggtccgaggcgcgggggcttacgcttcggtcctcatcatgattgaagcggtctccgcgacgctagttgtactaatggatactggctaaccctctctgtattcccttttattttctggatcggtcgtgctacgcgctctttcaccaagccccaggcgttggcagagcgaggttcgttctgtgcctttctcggatccgggcggatcccccaacgaggcgtcgttcctcaatggcatgaatg

SEQ ID NO: 31084 - DNA, 256 bp, Zea mays
agcttattaaatcccatactcttagctatctcccggcaaacggatattcctttgttatccgggagacagcacaggaaatcatcttcgttactaccattgaacactaaggcccccttcacatatttcactctttgggcgtagtgtttggcctccaagatttcttctttacataatttcttccccgaagcatgtcgaaaaatgtaatcagtatctttagctaaggcttcggggacaggagattttgctttttctgtca

SEQ ID NO: 31085 - DNA, 290 bp, Zea mays
  unsure (1)..(290): unsure at all n locations
tgacattgcttcctgttttttttatgcttcgncgccgaaggtcttataaagagaagtgatcctcggatgaagctgttcgtacaagatagccgaaggtgcctcttcgcagagcttcggcattacaaaccgacttaaagatagaatgaccttttagtccataaaggtctgagtcaacgttgtaagttcttataaggggcatacttgtaattcctcacaggctgcgtcctgtgcctataaatagtgaacagtattccgttactgttcacgcattctgatttttgcaatcgcat

SEQ ID NO: 31086 - DNA, 261 bp, Zea mays
atcttgtgcagagtccgcttgaactaatcttcggagaaacccgacctcattgcaacatgacaccagaaggtccaacccaaaaagcgttggctgagtttaaaattatttcagagcatatcagcacaagagacctggttcaagagtttttggctttcagggtttttcctaccttaaaagaatgggaaatgccgaagctagagggggagaagaaagaaagggaacttgtgcgggtaccttactattacaagtttaagaaatatt

SEQ ID NO: 31087 - DNA, 289 bp, Zea mays
ttatcaaatggacgtgataagtgccttcctcaatggaccaatcaaggaagaggtctatgttgagcaacctcccggctttgaagacagtaagtatcctaaccatgtctataagctctctaaggcgctttatgggctcaagcaagccccaagagcatggtatgaatgccttagagattttcttattacaaatggattcaaagtcggaaaggccgatcctacgctctttaccaaaacacttaagaatgaattgtttgtatgccaaatttatgttgatgatattatatttggg

SEQ ID NO: 31088 - DNA, 248 bp, Zea mays
agcttgtccgagcggcgcggcgaataaaggggagggatagagctgacgtgcgggacccacgtggaagcaagactgcgttggcgtgctgtgcgcggtgagtggctgacccgccgggtccacagtcagggagaaacccgcgtagcgtgcgcgtgggagggatgcgctgacacgcgggccccacccgtcggtggcggggtgaaagagatgggctgcgcggtatggaattagaagtgggccgaaaacaggtt

SEQ ID NO: 31089 - DNA, 282 bp, Zea mays
tcgactgcgggtacaacgccatcatcggcaggcctggactggcgaagttcatggccattccgcattatacgtacatgatattgaagatgcctggaccacaaggaatcatcactgtgcacgctgacttccaaggcaccgcggagtgcttccgagtggccattcaggcggctctcaccaccaaactatcgatgacttcttctgcacaggcgaactcaaagcctgaggaggacctcacagtacctacaaatgaagctcaagtcgtgacttctatgcggccgactg

SEQ ID NO: 31090 - DNA, 258 bp, Zea mays
agcttgccccatggaaagtcgcgccgcctgggccccccgctcgagggcgccttgcgcggaggctagccaaccggcatggcgcgccgtggcaccagctgcagaagtcggttccgtcttgagggccttcctgggggccagaccggccaagccctacctccgcttgctgaaagaaagagcaagatcaagacacacagagaaaaaaccaaaacagaggtatcctcagaaacttacccgctccggaccaaggccaattgtgct

SEQ ID NO: 31091 - DNA, 289 bp, Zea mays
tctaaagggatttccattgtgggactaacacatgctcatttatgagaaagacagggtttgtaaagcatgtcaagcaataaagcaagtggggtcccatcattctcacaacaacatcatgatgaccaacaggccgcttgaactactccacatggaatctattcggcccgatcgcttacgtaagcaattgacgggagtaagtattgtcattgtaattgaggatgattattcttgctttaattgggtattctttttgcaggaaaaatcacactcccaatataccttaaaggga

SEQ ID NO: 31092 - DNA, 269 bp, Zea mays
cttactagcctccttcttatctgtagtggatccatagttgaaagtctcctatagtgggggtgactagacgaaacttgaaaatgattaactctgaacacaaactctactcggggcttggattacaaacgagtgatatcgaaatcgaagtgtgaaaaagagttcttcttgctatgtgtcagggaccataattacggtaccctcattacgcctaattctcagctggtaacccccatcagcttaaagctgcacaggcctgatgggtgcgatta

SEQ ID NO: 31093 - DNA, 271 bp, Zea mays
tgaataaataaaaatattttgatattcaaagtttgcagggtattgtctctacacacatgcaacagattccaaaagttgctgtccgatccggcgaattagatcaattgggaatggatggaagccggttttctgcagaaaatcatataagcttgggccaagcttctcgcagacctgttaattcatcaaaaaatattgattgatttggccccaatgtctacttgccggtgaggggaaattctataaaccaaccattatacttacaatacaaata

SEQ ID NO: 31094 - DNA, 220 bp, Zea mays
  unsure (1)..(220): unsure at all n locations
tcgctagcatacttntattcaactccttcttctggtacaaaataacatgttacttatgcactaattatatnacanatagtataacactaaaacatctgcnatattattaccttgtcttgctcattatcactaacatctgtngactcattacatncaatatctggctccaaacggcttataacgacatcgagctcatccaacacatnncatcgcttatcgt

SEQ ID NO: 31095 - DNA, 272 bp, Zea mays
tttttatttttggtatattggtcatgaattttctatattaatttctctttttaaatatttttaggatgcacccaaagctaaggtggtagctgagattgaggaactccctcctctaggagtcgaagaggcaaagattagagaagttattgccttgatagcgcaaagagttatgcctttggagtcgctcctagagagcgaagatgaggagtaagaagaacaaatagctttggtgatgagctcattcttcgatgttgatgaagatgaaactgagg

SEQ ID NO: 31096 - DNA, 269 bp, Zea mays
tgtgctataacttttttgtgtttcttcaaagatgtgcatgcctgtcgaggacaccaccttttcagctcatagaaggaaacccaatgcaacatttttttcatatcaagcttgtgctataaataaatcatactgcattgaccatacaaagttttggtgaaatgtcaacttctgttgaataccattcacagtgcaaaatacgactatgaatcgaggtacttcctcacttttaaattgcaagtcattccgattttgtgagaaaatgaaaacat

SEQ ID NO: 31097 - DNA, 271 bp, Zea mays
tcgggcccatcttttttgtggattgctcatgaatcagagccaattcccctcggcctttctggcaacttcctgactcccatgaatagcaataggtccctgatccgaagggatcttcatgcaaagatatgccggatggagaattgctccaaaagcattgagtgtcccgcgaccaatgatagcattgcagggatactccatgtcgacaatgtcaaacacgacttgctcagtccttgcattgttgacgaatccgaaggccactggcatggtaatc

SEQ ID NO: 31098 - DNA, 129 bp, Zea mays
catttatgttgcgctatatcattctgctctcgtatatatatagctcccagcttaggccatacgctttaataccccgctgcctatcatctgtgtattataactttgcactgagctccaacggtgtgactg

SEQ ID NO: 31099 - DNA, 218 bp, Zea mays
acttctggatactgtaacatcatctctggcttgttaggatcgattggttcatgcaatatacccaatgcgcatctctttactgtgagcctgaccgcactgcaagtccgtgtcgagcataccactcatctaggcatggaaaaaccacttcatcttgatatctgagggattatcactcaacttgaaacatatctctcgttggagcctctccgacgatactt

SEQ ID NO: 31100 - DNA, 270 bp, Zea mays
tgagaaaggaaaatctgcatcaagtgttaagctcaacaagaagaatgttcccaaagctacaaatgaagaaatcaacatgaaaaaggaaaaaggtaaagattcaattaatcatgttgtttgcactgaccttctctccatgtcattcaagtacaaaaagggaaaaggaaaaaggaggtgtttcaagtgcaagaagttaggccacctcatcgcgtcgtgtccgtacaaagacaagaatgaagggacaaggagttgttttggatgcaacaaaaa

SEQ ID NO: 31101 - DNA, 179 bp, Zea mays
  unsure (1)..(179): unsure at all n locations
gtatgaatcgactaacggcctcggtanatctcctcgaaccctgtcattcaaaactgatgttctccttttggggagcattgcactcgatgtatctcattttgagcactctcaacgtggggggtctacaagactgcctaagtccggcgaacccttatatggctaagacaattcatggatat

SEQ ID NO: 31102 - DNA, 267 bp, Zea mays
tgagtaaaatttttttttcttctattgcatttatattctacttgatttaatttcatacttgttcattctacttagtcaattacgagaacacaagtgcatacttatttatgttgtacaagtgcttacgtgttactttgacttgcaaccagagcaatagtgaaatctttgcttaaaagtgttgtttaggcttaatttttgttggtggttggagatctatcacgtgtagatttggttggtagtcccacctagtgacaacgagtgtgtgtc

SEQ ID NO: 31103 - DNA, 247 bp, Zea mays
cttgctttgtatactccttcaaagcttgatgataataattggaatgattctattgaataatggaaactgttaatataaaattctctactcttttatccttcagtctatattggaatatatgctatcactggaacatgtctacctaaacatataaattatccaatatgttgccaaccatatgcttaaaatcacaactgcatcgactcaattatcatcagtgataattataaaatgtatcttgtaccta

SEQ ID NO: 31104 - DNA, 269 bp, Zea mays
tgcgagggatcctttttattaataagcaccatctgttaacatagattttctatggataaactcaacacaagagatgacattagtagcacaagcactagtttcttatttagcaatcctttatatgtggaaggcaagtgagttgctaaaatagagaaacctcataatatggactaaatttcctttgagccctcatgcacaatatattttgaatgacatggatatatgcatggtgttcaatgaagtctaaagggctgacttaatccatatta

SEQ ID NO: 31105 - DNA, 271 bp, Zea mays
taaccttgatttctaaaagccagcatatccttgagagtctttttccttagtcgggtaagacttgcgaaagtacacttcgtactcagggttttcgaacccatgtagttgcaggtactagttttgtgctactgtggatggtgttaagcgccggtgggcgcgaccttcttataggttaaagtagctcttatatacttcttattaaggattgtcattgagctagtatatatttcaaacttataaataatttataacatttcaaagtttatttctt

SEQ ID NO: 31106 - DNA, 263 bp, Zea mays
cgtttctacactttattactttctcacctgctgcgtcttgaggccttttgttgcatttactgttactggggaatttgatggtctgctctaactttttgttagctcttccttcaccaaacttttgtagtttatcagatgatgttgcaccactaaattggtcagaacactctggagcagagtcgtctttattatcgctttttgagcaagaagacgcatcagatcctccactccccactcttcttccagttgacatcttgcttctt

SEQ ID NO: 31107 - DNA, 264 bp, Zea mays
ttgctgcatcgatgatcatgacacaagtgtctcagctaattgagctgtcacacgcacgacatttgtataaatgcattgagcacatgtaggtcttgtttggatactctaacattcacgccaatctagatgtgttaaggtatattaggttatagattagtttaatttaaaaaccaatccacataaatacatgtgcattggggtgtgagtatccaaacaaagccgtaattgagaattaaatccatcgtcgccgttgcaaattggaac

SEQ ID NO: 31108 - DNA, 227 bp, Zea mays
  unsure (1)..(227): unsure at all n locations
gtgctactcatcaaaataactgtcactgcagcagaacagtagagacgctacacagatgtgtacattcagacctgagtgtgtatgacttcgacccgctttactagagggagatgctattgtgtattccttatgggtttgagaactaacagactacctctagaataatattactaggaaaaagaccacgtcataacctatagatctggagangatcaccattcctcctc

SEQ ID NO: 31109 - DNA, 271 bp, Zea mays
ttgccaagtgccttctttagcactcggcaaagaacctgacaaagggccccgctggtggaccctgtgctgagtgtaagtcggcggacactcgacaaaaatgtaacttctttgccgggtgtattaggtgacacttggcaaaggtaacttctttgccgagtgtcacctataacactcggcaaaggcgccgtccccgtcacccggcgccgtgaaggccgcttttctttgccgagtaccgaccggcactcggcaaagtctttgccgagtgttagca

SEQ ID NO: 31110 - DNA, 103 bp, Zea mays
tgcagctttctctactgctgcctgcgttcttttgtgcgcgtttttctctcttctggtgttttcgagctgagggaattcggagaaagaggatgtgcctatactg

SEQ ID NO: 31111 - DNA, 273 bp, Zea mays
tcgaagaagttgaatgtggttcaatacatttcttccattatatcttcatttgattcaacattgttttttttttttgaaagacaacgacgcgttctcggtatatgaagcatattctgcggaacataacaattgaaaaatcattgttgagtcaacactcaacacttcaaaaataaagttgctgttatatacaagaaattccaatatcactgcaccgtacctatatacattgttaatcaatggtattttaatgtgtaccagaaaatataaatgcgg

SEQ ID NO: 31112 - DNA, 388 bp, Zea mays
  unsure (1)..(388): unsure at all n locations
cactattttcaagctttcaacataatagntccttcttcacaacctctgaaggatattatgagaaaccgagaagctactggaaggattggataatgggctgcagagctcaatgaatttgattgatatgtcatgatcttcatcagtccatgcttacagacttattgtgactggacccacactaacgacggtcactacagaacctactgttggtgtaaacagcttcacactacgtggcgtaaacttacaccctggatgcgtgtatgcgcctaagttacacacttttacacacgcgtgtatatgtttacacaccgggtgtgcttaatacaccacgagttctattcttacacaaaattacttctcgtgttatatattcttattacccaattaa

SEQ ID NO: 31113 - DNA, 269 bp, Zea mays
tcatgcaattttggtttacaataggtgcatgttgtacaattgtcttctctttatttttcaaatgtttgtaagtttacctgatgaccgagaatccataattcgttgaaccaaaagtatggaagtgttcgtctcgacggataatgctgattctcgacgcacgctggctaagagaatgctcttttgttggatccacgagagctgttggcttccttttgtgatactagaaactagaactccagaccggaaggcaggaaaccaagtgaggatta

SEQ ID NO: 31114 - DNA, 103 bp, Zea mays
  unsure (1)..(103): unsure at all n locations
atgtgtcgagttcagctctatcaaaatctactaagtatagctgaccctctaacacacncttnaatgctattgaatcatcacttcttctaaagacagtgacact

SEQ ID NO: 31115 - DNA, 271 bp, Zea mays
tgggtgccgttttaatatcgtgactattcgatcgggatcggacagtccggatggcgtaccggttcgggggggacttgatttaatctcatgcgtccaactctgatccaatggtctagaatggcgcataccccttcacctcggcatttattctaaagaccccctcggcttttctgaaatcaacccgccacccgagtcagtgttaagatcattacagagaagacctcggatttacaaaatgaactctaaactcctattaatttgtgcctgtagt

SEQ ID NO: 31116 - DNA, 273 bp, Zea mays
tcgcatgacctcttttctcgattcgcgacgcagattatagcgggccattttaaccctttgcggatcaccttggcagcgagggccctatgccctgattgatagccacaagttccgctgtggacttcacgtaggatcttcggtttcggtgatgcatttaagcatgggctgactgacccccttttttgtatagctggccctcaataagtgcgaagtcccaactttggtgcttgaggcgcttggcctcgttgacgtcacttgggtagtaatatcctt

SEQ ID NO: 31117 - DNA, 292 bp, Zea mays
gctattatacttgaagcgggatgtacattaaaatagctttctaagaatccaatctaaatgaaacacaagggcctaagaatagatgctctttaatcacaccatgtgttacatcgattataaactgactagttggcgcctcccacccgtaacttcgtgtaccgctcacctggggatatgactcaatctttcaatgactaaaccatccatattattgtcggcccgcactctttatttgcttcctacgtcatactgttgcgctcaccccaacgtatctgacttcatctttgtctct

SEQ ID NO: 31118 - DNA, 268 bp, Zea mays
taggcagaatttttctatcataaagcaaatctgggggtgaatcttctcttcataacttgatgttcatgagcggaagccaaaagaccgggtttataagggcagaccttaccgggctggcgtacatatatgtgctacctagttacaaaggaagaaaactgcattccccaactttgcttttatgggaagaacttactgaggtgctctatgttccaaggattgggcagaggctctccttcagttgtggcgaggcggacacacccgggtcggc

SEQ ID NO: 31119 - DNA, 269 bp, Zea mays
tcgtcgacttcgcttatttggatctggtctgccgactgaactgctccctgtacagccttaagcatgcgtcgtgggcctggtacagttgctttgccttctacttggcctccctcagcttcatcgaggctaggccaggctggacacgtccttattcatccatcgtcgtgacgacgacaccgtctacctcctactctatgttgacgacatcgtgctcatggcatctagtgtcgatcttcttcagcgcacgatcatcacccttcagcgtgagt

SEQ ID NO: 31120 - DNA, 112 bp, Zea mays
ctctataactggatccgacaaataaagattatgagtgaataacattatacgttgaaaaatttttaaataggtatgcatccacaatgcatacgactctctgtaagtcacaaaa

SEQ ID NO: 31121 - DNA, 269 bp, Zea mays
tgcatgtctcttgttttgttgaattataccttagtaccaattagagattaaatggttatgcgcatgatgagtttagtaaaaatccatcggtgtcactggtgttaatttgaggtttatttgcgcgtgtaaagtaataatgtgattaatacttagaactcttagtcgatagtagaaatttttttggcttatatagagaggtggtgacataccaaagtagtcatcgctttctctatatcttgagtagggtcaatactcgttatgtgttcatg

SEQ ID NO: 31122 - DNA, 357 bp, Zea mays
  unsure (1)..(357): unsure at all n locations
atcttagcaccgagctcagctgtcgcgataacaactcagtgacctctctcaanaactcgagaagaaaaagataattcaccttctataggcaggctctcccggtgcggagggcaactacttgaacgtcattcaacctcacatcgctgggatcgaaaatctatgtatcaaacacaaacagcatgtgacaaaaaaaattgagactgttcaaatatatgatgctccacacccacctgactcgaattacgtcaggtgttgcaatgtaacagctttactgaaaaaaacttacctcgggaaaactccaaccgaaaagaatgtttcaactctagcgtaatcctctgatttgagctgaagtgtttt

SEQ ID NO: 31123 - DNA, 270 bp, Zea mays
ttactgatggagattccagaacagttcaaagcagcagttaacgccttaccacttattcacaaactcatttcaatagatagcagattatgtggttccaccttggcccatttagcaaattctaattttttatggccaagcttctatcaaccaaaagaaaagcatgttcctcaaaaagatatagctaagttggcattcaaagagtagaagaaacaaaagcatgtcactatctttcacattggtttctctagaaccgacatgtgatactcattt

SEQ ID NO: 31124 - DNA, 266 bp, Zea mays
  unsure (1)..(266): unsure at all n locations
tgagaggagctaaagtattctcataattagatctaagatcagggtatcaccaattgaagattcagactgaagatgtacctataacaaccttcactacaagatatggattatatgagtttttggttattgccattggattaaccaatgcaccagcatactttatgaacctgatgaataaagtattcatggaatatcttgaccagcttgtggtggattcgtcgatgattactaatatactctccgaatgaagaaacacatganaatca

SEQ ID NO: 31125 - DNA, 272 bp, Zea mays
ttatcaaatggtcgtgaaaagtgtcttcctcaatttaccaatcaaggaagaggtctatgttgagcaacctcccggctttgaagacagtgagtatcctaatcatgtctataagctctctaatgcgctttatgggctcaagcaagccccaagagcatggtatgaatgccttaaagattttcttattgcaaatggcttcaaagtcggaaaggccgatcctacactctttactaaaactcttgaaaatgacttgtttgtatgccaaatttatgttg

SEQ ID NO: 31126 - DNA, 263 bp, Zea mays
tgaataggacggatggtgatcatgacgaaggataagatgatcatgaagctatgcgcataaaagcttcgacatgacaccagaaaaggggaaccgacttaagaatgaaaagtcaaattagacctcgaagaattactatagaattattgataaatgtaaagggcattaatgtaattctacatgggctgcgtcccgtgcctataaatagatgaacagtactcccgtactgttcacgctgacttggcattcgcttttcacatcacgct

SEQ ID NO: 31127 - DNA, 264 bp, Zea mays
ttttgagcttcggcttaaagacgtttgcaccatgtctggggaaaaatgactgaggaggtgaagctgtttgaagagaagaaggttgcagatccttacattgctggatttattgaatccatggcaaaaacaaatacagagaaaatcactaaggagatcctggagggtttatccgaagattctgatgagagtgatagttatgacgtggaaagcggagacgaagattctgaagattgaccctgtcgaccaagtcatactatcttcgga

SEQ ID NO: 31128 - DNA, 270 bp, Zea mays
tgtttcataggatatgtttctattctatttgcttgccgggaaaggtttgggttgggaagcttagcagagggagaggtatcatacatagaagtcttgaagagcatggggcccccaaggtgaatgtgaatggtgacggggtgacgggcaagcctgccgctggttaagaagtgggaaactatccggaaagtaggtatgcactcacacagaaagaaagagtgtcgtatgaaattggagcggggattctctagtatcaactagacctttttccgt

SEQ ID NO: 31129 - DNA, 454 bp, Zea mays
  unsure (1)..(454): unsure at all n locations
tctttgacanactaagaacttcggatacaaaatatatntgggcctgcctcttgacttgaccatcaagcttctcctggacaagcgctgcacttaccgctgagtgcgaagctgccacatataataacaaaggagcccctggcattggtggagtcaatgggtgtagatctattanatactggtgtagttcttcaaaagccttctgttggatngatccncatngaaagacttctgctgacttcagcacttcgaagaatgagtaattctctctgctgactgatatgatctattggagatgccatcttctgcaatcttgactccttctcgagttgggctcatccaagatagctcatntactggatagctcatcccttgtgaacaacatcagaattccctctacccgaaccattttgattacttaccactgctgaatgcaggctctggacacattatctct

SEQ ID NO: 31130 - DNA, 271 bp, Zea mays
tctaaagggagaacacgtgataggtttaactaacgtgcaattcgaaaaggatagaccttgtgcagcttgtcaagcaggcaaacaggtgggaagctctcatcacaccaagaatgtgatgaccacatcaagacctttggagatgcttcacatggacctctttggacccgtcgcctatctaagtataggaggaagtaagtatggtcttgttatagttgatgacttttcccgcttcacttgggtattctttttgcaggataaatctgaaacccaa

SEQ ID NO: 31131 - DNA, 271 bp, Zea mays
tatcacgtagcatttttcgtgtgcattgcgtgtgcgtagaagtactcctataattagcctcttttttccctttaatcactaaatttagtcgctaattacatcgttttgatccaacgactaaaccgaactaaagagcattaattgctgtgaaaaataactatattatctctattaattagtggatgtttactaaaaaataaaatggagaggacaaataagataaaaatcctactttagttcttttagggtgcgtttggttgcaatgacagga

SEQ ID NO: 31132 - DNA, 274 bp, Zea mays
taacggatactaatgatgcttgtttagataactgtagaaaaaactcaagagcttttgtaataacctttgtaaagaacaatgtaactaaattttactctgtgaactttgtccataccttgtaatatattcttacccttccatcaatgtataaagtgcttcgatgtgaacgaaattggtacttttgagccgaatgcgaaaaacaccttcccttcttttcgtacacagtgaagcatagaactgcttctttttctatttttgctgaagccatattttt

SEQ ID NO: 31133 - DNA, 269 bp, Zea mays
tatccaaaaagtttagtgatttttggagttattaatcaatttctaaaattccaggagtatagttttttgctattttaaatactccataattccttattcggactaaaaatcataaaactatttttattaaatagtatagaattttaggagcctagcaaaactggtcttgtatttttagcattttttacaattttctatgaattctctaataccagaagaaaaagaaaaaggaaaaacatgaatagtactaggccgaaactggcccaatt

SEQ ID NO: 31134 - DNA, 409 bp, Zea mays
  unsure (1)..(409): unsure at all n locations
cttgttcatctgccggtcttagcacgcgctcacttacttcgttagaatgtctgtatatctttgctgactttgtcgttgctacttctgtacgactgctcctgtgggtcgcgttttgtaataacaccttgttggcctccaagggtatggctgctaacctctttaacttatttcttatttaagaaggggcccatggaaaagagatcatctgtgaagaaatatnatatgactgtgcttaccngaatctaatttcaactgttcgtngctagattgggcaacacacaaaacatatcttgatatcttgagttgtcaatcgttaagactactttgatttaatatatgcactattggcatggataagctgtcacccattatattaatcattagttgtgttgtggaacagccgctctgt

SEQ ID NO: 31135 - DNA, 267 bp, Zea mays
ttctcaatctttcttgttgctcattaaatatactttaatttttataattggctcaagtcataattttaaacttttcatcccctttttcttattttcttgcattttgcttatagggcccacttagggtttttattagggttgcacattcttaccttttcaaagactcaattgttttgttcatgatacttttaagcatgtacttggtgaattctttatttcttaagttaatttgatgctcatgcttactttgattcacatgaaataatg

SEQ ID NO: 31136 - DNA, 369 bp, Zea mays
  unsure (1)..(369): unsure at all n locations
ggcaccttcgccgccatcacgacactgagctggcccttatgacgccacgtatggtcagaactacgcatccccatgcggttttgatggaaatacgactcagagcctgctgaccacatgcatgatgcacatacngtcatcaccatgggagagccactgcattggcaaacaaccgcagtattgaaacaacgtgggacacatccatacctcggctgatcttctaaacgagggacccctcacgataaacaccccggtcgtctgaacgtcgcacccacaaccccggatgcctccgcataatctgcagagcaactcgagaaacgccgtcctcgttaacgtaaaaggcactattatatgcttcttcttttttttttt

SEQ ID NO: 31137 - DNA, 268 bp, Zea mays
ttttagaaacttgactccattttattttctatgtccctctcggctttgtttcctatcatttccatgacttgctatgcatttgcactatatttggcatgtctaaaaccgctacacaaaacttgctatatattttgtctaaaaatactatatccttgttatgcttgcttgatctttattttttctggtcttctattcttgtgtggtctatcaagagtgaggcaattatataaggatatatgctttgtcagtattgtctgagtctttgagc

SEQ ID NO: 31138 - DNA, 276 bp, Zea mays
ttctcggcaacgaatatatggcgcttgtcctccagagcttccgccaaatcctcattcaaaggagggggaaagactaccagtgccgctccatgaaagtttgctaccaatgtggttagcccggtcattttattgctaaatgtcctatatctattgacagcgaccgatgcgacgacaagaaggggaggcgaaaggagaagaaaaagtactacaataataatggcggcgatgcccatgtttgtcgggaatggaattccgacgatagctcaagcgactcct

SEQ ID NO: 31139 - DNA, 264 bp, Zea mays
tgtgaagattctttatcccaacatgggctagtcggcgatgccagagccaacccatattagtcttagcaattaagcaagtgtcgagttcagctctattgaaatcaactaagtatagctgaccctctaacactcccttaaatgctattgaatcatcacttcttctaaagacagtaacaccaacatcagtaaatagacagttgtagcccatattgcataattgagaaacagaaagcaaattgtaatctaaagaatctacaagaaaaa

SEQ ID NO: 31140 - DNA, 263 bp, Zea mays
tctgcttctatgtttgactcttaagccgaggatgcagctcttcgacagtttgacactcggtgtacagcagctgatgatgatgatgatgatgattttggggttcctcctctgcctctgcctcctatgcctccacgctcacatgatcatgaggctgggagttctagtgctgcccctgctcctcctcaggctatggaccctgctcttgcttcgattctggccaacctggcggccgagcaggcccggttatccgagaggatgctctc

SEQ ID NO: 31141 - DNA, 269 bp, Zea mays
tctccaaagtttgaggaggcttcctggcgaagtactgagctgacggacctggccgaagccccttgatcatggcctcgatgacaatttcattgggcaccgttggtgcctgtgcccttagacgcaagaaccttcggacatacgcctgaaggtattcttcgtggtcctgagtgcactggaacagatcctgagcagtgaccggcttcgtctgaaatccttgaaagctggttaacaacaaatacttcatcttctgccatgaaatgatcgctcct

SEQ ID NO: 31142 - DNA, 228 bp, Zea mays
  unsure (1)..(228): unsure at all n locations
tgcgtggtggagtaatgtcgtatgtctatanatacttcttcactcgtcgaaggcttctgtgactggccccattgaaaacttcgctgacttcatgtttcaaaaatggtagattctttctgctgacagatatgaatcgtcagaatgcagtcttccgtcagtcctgaccccttcttgtgctggtggtcattcaagataactttatttattggatagcctaatcctttgttg

SEQ ID NO: 31143 - DNA, 271 bp, Zea mays
ttatggcgttcggggtatcagtcgatagccttcaccaggcgccgctttcctgtcacacctagttttggaaggcaaaccgaatgcgaaccatgttcgtgccaggatcagaaactcacgttgtcacacccggatttaagggataaagccgagtgcgtctcatatgtgtgccaaagaagaacatcacatataacggcaaagtgtacaaagataaatgtcataagtatcattattacatagctgaagtcttacaaaaataaattgttggtccttg

SEQ ID NO: 31144 - DNA, 271 bp, Zea mays
tcggggcagcagctaagctcttttcggccgccagctccaaggggcagatgcgccatgggcttcggaggaaggtttggggatcagcccaggaaaatttattgtctattctgtggtgaggacaagggtcacaccaccaggatgtgccatgttaccatccagaagcaaaaggagatagcagaagctgcatcacaacagagtcagccgaatcaagtcatgcatactgcttcgtaccattcgccttacattccagagtatgtaggcaaccaccctg

SEQ ID NO: 31145 - DNA, 163 bp, Zea mays
cggaagcctttcttgtcttgactacgatgtcatcgacgtatgccttgactgtgcgaccgatgtgttcgtcgaacacatggttcatgcaccgctggtacgtctcgcccgcatttctcataccgaacggcatggtgacatatcagtacatgccgaagggcgtgat

SEQ ID NO: 31146 - DNA, 270 bp, Zea mays
taaagccatggtttttagcataggcaagtaatatatgaattgactcaagcctagctaagggtgcataggtttcatcgaaatccaaaccttcgacttgtgaataccccttggccacaagtcgggctttgttccttgtcaccacaccatgctcgtcttgcttgttgcggaagacccacttggttcctacaacattttgattaggacgtggaactaaatgccatacctcgttcctagtgaagttgttgagttcctcttgcatcgccaccaccc

SEQ ID NO: 31147 - DNA, 286 bp, Zea mays
  unsure (1)..(286): unsure at all n locations
atcaccatatagnctacattaacaatgttattaccttgtatcttaaatcactaatatactgacctcaatctccctaatgctttgatcatactttttaaaacatacactattcataaaaacagtgtgccctttgcatatgaaactgaatcagtgatctaaaattacaaaaacatggaataaaggcngaatataaatttaccaccttgacaacctgattacatccaatgataatctgggacttatttctattagaaacatctttcctgctgtgttggccccttcatat

SEQ ID NO: 31148 - DNA, 268 bp, Zea mays
tagatgaaaatttttcttaagtttgagatcaccgttcttgattcgcttggtggctgctgctatacccttaagggtaccacacccctcctttttgaagactccatcgttatctacatatataccaataacatctgaatgggtagaaatattcaaagtagaagattgcaacatttgaataaaaaactcttagtaaaaaataccaggatctcttttcctatgatgtctagcatgagatggccaattagcagtaggtttgctgctgccatga

SEQ ID NO: 31149 - DNA, 269 bp, Zea mays
ttaagggcacaaaaagaagttgatgacgaaagctgtcaaattgcacttgggaaccttcggtcagaggtcatcacactgagaaatgaagcctttgaaaaagataagattctgctttccttaatagatagactaaaagtcagcgaagctaggcttaatgcacaagccgaaattcacaaagccaaagttgaggatctaaagaaaaaacttgccgaaatgaatgaaaattttgaagtcgcgaaggcaaacaagagataagttaatggacaagt

SEQ ID NO: 31150 - DNA, 284 bp, Zea mays
ccggtcttagacggtcactgcgctgtcttttgtatgggaccgaacacagaggctatcctctgtgcttcatttgtatctggagggatgctgacaccatagtggacttcctccctgcgttttgcctacctgcaccgagtacatggtagaatgttccaggggcccgctgcgtagtttgcgtttggactctttggccccagtagcaccgctttatggcgtgaccaccatcaggaaccacaaactctgttggaagcaaatgattctcctgcagcattctatcaccgtgt

SEQ ID NO: 31151 - DNA, 268 bp, Zea mays
ttagatattcataagtctgacaacgttcgtccgaagcgttctcgccgagccaatcagcctgcttctcctgttgacgggaagaaatagaagaagagacgtcttcatcgagtgtctagttttgaccaggatgctagtccttccgttcctgctgctgaagaagtgccagtgcctgcatttgttgaaactaatcccgatgggtgtagcctgcctgctattaaccccaatgggtgtgacctggatgacgttgaccccaatgggtgtaacctgg

SEQ ID NO: 31152 - DNA, 271 bp, Zea mays
ttacaaaacacttatagagtttagagagagatgaagaaagcacgactaaggaaaccaagctacacgagctacaaatgaaacacaaatcactctctctcaagtcactaatcactaatgatcactagtctcaattgtggaacttggagagattggaagctttgaatgtgtcttggaatgaattggtagctcttgtattgaatgtgtatgagtggagtgcttgcttgttgtgaatggaggtgattggggttgtatttatagcctccaaccactt

SEQ ID NO: 31153 - DNA, 437 bp, Zea mays
  unsure (1)..(437): unsure at all n locations
ctatgggataactcaacacaagagatggcattagtagcacaagcactagtctcttatttagcaactctntatatgtggatgggcagtgagttgctaanatagagaaacctcataatatggactacaattccctcgagccctcatgcacaatatatnttgaatgacatggatagtatgcatgggtgttcaatgaagtctatagggctgacttaatccatattatggcgagtgtctataatagaagaatagaaatccaattaactagatagagaatacgcacataatttggagtgtcacatatgaaatatatatctcaatgacttattatataacactgtgtttctcacgcttttgctatgctccagtcanaaatagatgaatattgcttaatagtgtcacctgtctattcaatgatatctctatcacccactgtcatg

SEQ ID NO: 31154 - DNA, 264 bp, Zea mays
ttatttgaagtgcttgacatttttgacaggatctctgattccgctgcaacctactcgaagagtcttctcacttcactgcgtactaagtcttcgagtagagtaagaatttaagttttaaagtaataagttttattcgcctattcaccccccctctaggcgacatccagatcctgttcccgggtcaaagggaactttcaattggtatcagaggtaggcctctccagtgtgggcttagccgtccggagataacgatgttgtcacaag

SEQ ID NO: 31155 - DNA, 296 bp, Zea mays
cataatgatgctaaatcaggccactcatcttggtcctctatgcgatgaacactatttaaaatttgggttatgcggacaccatgtcagcttaacttctgcagttatgtgtccttatcatcaataatgtatccatgatgtttatcttcaatatgttccagtaacgacactaagtgactctctctttctactttatttctgcacagagtcttatggatattgtcgttggctttgttgccacatattgctttgacctactatctctgcttgtcctttaactctctagacttcggcaatgt

SEQ ID NO: 31156 - DNA, 273 bp, Zea mays
gcttcataccatctcttttttctgcttagcttgtcaagcatattttggtacccatctcttgatgggtccatcaaggttagtcaacaaagatctgggaacccaagagtcctttgtgttagcactaggtaaactcattacctttctagcacaagttgcaattttgggttgcctagttacatgagaattaattgacaagctaggagtgggattgttaccaatgggacaatccttgcattgatgtcccttctttcggcatatgtatcaaaagcgatc

SEQ ID NO: 31157 - DNA, 282 bp, Zea mays
  unsure (1)..(282): unsure at all n locations
atactnaagcttcggctatggttaatttttttggcagcaaaacagtgcagtagcaatgaatgctgtggtaacttcacacctacatgtctgtttatatagtgctgcaggtaagaaggtaaatcgttaggatttttacaccatgcaaacagctgctcgcacccgctgcgcggtgggccgcaaagaccaaatagtaaacctgcagggtgagaccgctacgcgctcggaaactatatcgtttctcgacaacgagctcagggaaggtgtttttcggaccttcggctt

SEQ ID NO: 31158 - DNA, 270 bp, Zea mays
tcagaaatcgaatgcagcgtatctgaatcgtggtctgctccaaatccaaaagtgtgcatgggtaccatatggagctcatttggattagcagatggaacaagtgacctacgacctgctgatgtgccttggaaatttgaggaaatgttgtaagtatcttggccatctgacagaagaatgatactgcacacagaattcttatagctgcggtccgcaatcaccttcacagctttctttatcgcatcagcaatgttcgtgccaccaccagcgcca

SEQ ID NO: 31159 - DNA, 272 bp, Zea mays
ttgtatgcacccctttttctcgttttcggaatgggtgacgtgcggcaacgaaattgcgcgaaaccaccccaaacatgagttttggacctaaagtagtggaatgggcatgttcgttgtgaaaaacgaagaaatggttccggtggcaaaaactcgtgcttgtattcaccccgacacccattttcggaatgggtaacgtgcggcaacgaaattgcgcgaaaccaccccaaacatgagttttggacctaaagtagtggattgggcatgttcgttga

SEQ ID NO: 31160 - DNA, 276 bp, Zea mays
  unsure (1)..(276): unsure at all n locations
ctcaagtattcagttttgaatacaaggagagtccggctcacatctnttttttccaatatatctgtatgtctcctttgtttcaatgcgccacatcanttntatacttataanatcatatgtacaaccctataacatcaactattctgggacagaaggaatagctgaatgaataaattcatacgccaccccaccttacttcagtttcaaacatgactactacagattgagaacctntgactacacccagctcatcatcatgaactacacactgactat

SEQ ID NO: 31161 - DNA, 270 bp, Zea mays
tctaaagggatatcactttttgggactaataaatgttcattttgagaaacacagggtttgtagtgcatgtcaggcagggaagcaagtcggtgctcatcatccacacaagatcatcatgacgactgacaggccactggagctcctacacatggatctattcggcccgatagcttacataagcatcggcgggagtaagtactgtctagttatagtggatgattattctcgcttcacttgggtgttctttttgcaggaaaaatctcataccca

SEQ ID NO: 31162 - DNA, 269 bp, Zea mays
  unsure (1)..(269): unsure at all n locations
agctttgggtttgatattattaagatgaaaaagggcgggggagttgnaatagaaaggagtntnggtgtaatgtatatgtatgaatagattaaggaccatgtcgatgtatgcctattgacctatgaccctttaactggtcacattcctcctcatgggtaagctttgcctcgggcagactaaggccacaataagataacaccgaatgggcgtggagcggtggctagagtagcgtgtaccctccgtggcaagaggctggacggtggtgtatc

SEQ ID NO: 31163 - DNA, 246 bp, Zea mays
  unsure (1)..(246): unsure at all n locations
tccttgacagagtgatacctatttctttactaannatagagatttcaattcaatgaattatgtctagttntgtgcatcctaatattctaacttgtgaatagggaaactctatgctcgtatcnntgtgttaacttgagcgtatctcacagagaacttcagacaatactacgctntcgttactatcagtgagtatgaatggttaaaagaaaaacttgttattgtatgtctaacatatgcctgtactca

SEQ ID NO: 31164 - DNA, 269 bp, Zea mays
tgttagagaagcttatggtggggtaactttgttacaatcccattatgtggaaaaagtattgagtcgctttggttttagtgactgtgatcctgctccaacaccttatgaccctagtgtgctattaagaaagaatcggagaatagcaagggatcaattgacatactcccagatcattggctcgctcatgtaccttgcaagtgcaacaaggccagacatctcttatgctgtgagtaagctaagtcagtttgtgtcgaaaccaggagatgatt

SEQ ID NO: 31165 - DNA, 269 bp, Zea mays
tctagttttattttttccataaaagccaggatgacatgtactgacctgttcaaactatctgcacttcctttcagcatcattttggcagttgaaggttccattttctcgtctaccatcagtatacagataccacgcagatcaatacctcgacgaccagcacggccactcatttggatgtactctccactcgacaaccatctgaatcggtctccgtcaaattttcgcacattggtaaacacaacagtctttgcaggcatgttcaaaccaat

SEQ ID NO: 31166 - DNA, 269 bp, Zea mays
tgctcgttaacgttccgatctaagatgttagctcagctcgtaacaaaattgaaatgagcccgccgtgataaaattgaaatgagctagccgagccgagctgatcactcgagtgagttcacgagctacaagtattttgtctagccgtaccttacccaccttccttcgagtgttgttgttgcttataggagtcgcgatgatcaccgaggtcttcgtcgtcgtttacaacatgccctccacaacagaccgagaaatttgctttttagtcactt

SEQ ID NO: 31167 - DNA, 295 bp, Zea mays
  unsure (1)..(295): unsure at all n locations
gatcttaagtcactgggctgcagcttagtaagactnattccatgtcaactcttacatctcggttgaagacagagaagctaaaactggggtatcacaaaagattgccacttccctaaaagttccagtggagtacacgtcttataatagaatggattataaactatgatcccgggatatgtgaaggatgatcacaaccacaggtgttatctgtgaaaaatagccacaggaatctaagcatgtgatgatgaaaagtttaagtggtaatacttgaataagttagtaggagtaactactg

SEQ ID NO: 31168 - DNA, 271 bp, Zea mays
ttattgaagcggttctcattcacgcgaatttgcgaaagagcaaggagatattatgtccgtgcatcgattgtgataataagatagcttggagagatataggagtaatccaatcacatctgctaaaaagagggtttaaaaacaattacacgatatggtcagaacatggtgagttggatccgtgtgaagtgcctggtaatgacgagagagttgtcagaattttagatcttaaagttgatggtaaagtggataatgtggatgctaatcaagattt

SEQ ID NO: 31169 - DNA, 303 bp, Zea mays
ttttttacccacaatcaacagcccataactatctgcttgacatccctcagatcttctaacgcattaataaccttcgtcctgaaacgattcactcgcaggtgcgtccacagtataattatcagactttatgttataatataatctattcactcgtatggtatactacatactctatgttacacatattccgtacccatcctacgcgaactacgccaacttgaaaaccactgacatacaaacggcctcacggacttccaactttcttgtctcttaaactcgcgagcgggttaccatatcatatat

SEQ ID NO: 31170 - DNA, 264 bp, Zea mays
tgactcatgtatccacacattaatccttaattcatttttcccgtctcatggacaaggcatcctccctggatccaagtccatagaccaacataattcccgttatcaagatgaatacaatcaattcctgacctcgcgcgagtgctagaaaaatcactcgacttctaccgagatcctgattagcaagcagctactcgacctagcatactggtattcatctcaaaaaaggaatcctaagttcatgcaactagaggtttcaagcaactc

SEQ ID NO: 31171 - DNA, 264 bp, Zea mays
tgtgaagatttttcattcaaacatgggctagtcggcgatgccagagccaacccatattagtcttagaaattaagcaagtatcgagttcagctctattgaaatcaattaagtatagctgaccctctaaaacttccttaaatgctactgaatcatcacttcttctaaagacaataacacctaaatctgtaaaaaaacagttgtaacccattttgcataattgagaaactgaaagcaagttgtaatctaaagaatctacaagaaaaa

SEQ ID NO: 31172 - DNA, 272 bp, Zea mays
tggtaaaagcacttcttttcttttataatcaccaagaagtgattccaggtttaatcaatcaaacattacagttttcgaaatctgttctgacagaggacagaacacagcaaccagtttgtaaaatccataactcataaactatcaggcctgtgtttatgaaattttaacacaagcaagatcagaaaagcatctacaactttcttataataaccatgaacagattgtaacattaaattaggcacacaatacagtttctgaaatctgtacagaat

SEQ ID NO: 31173 - DNA, 311 bp, Zea mays
cttagcacggctcactaatttaacactcgtctactttgtgtgcattaccgactgacttcaccaagttatgtgtgttccactgcgcggattattatactgttccgagtcagaagcctatgagatctgcgacctttgcatggccctataggtgatggcgctgctccatgctctgtgacttatatcggtttctattttatgcctgtatagtgctcatcataagtcatctgttgtcaaggtgatcttcgcgactgatgatctggcggatctctgacaaatcgtgggactggccatgatcactcacaccattgtgt

SEQ ID NO: 31174 - DNA, 270 bp, Zea mays
tctccttgtcgtcatcttccttgacatagaaccactccgacttccagcctgctgcccatttgcttcggtagctgattacaggaaactttgtggttttttgataagcaaaattatagcaaccaaaattgtcatgcaatccatcttttctagccttcgtctgatagtgcagctcgtgaactcgacaaaagctgtccgcaaacggctccaccgcttggcttctaagggcccagatataaacactatgcctaacgatagcgttaggagtcaact

SEQ ID NO: 31175 - DNA, 272 bp, Zea mays
tcgtcatctgaaagaaaattaccctgaaggaaagaaatgatctcagttctccaatcttcactatagacaggggatatgttgaggactgctctttcaagaagctcgaccgaaggtgcttttattgtttcgaaaaatacttccgaaggtaagggcagcccctgtgctgctgacttggctaatagatgagcatattcattttctccaggaggaatatttttaacagggaatccttcgaaggaagcctcaatccttcggactgtatctaaatattt

SEQ ID NO: 31176 - DNA, 362 bp, Zea mays
ctcgtctcttcaatatgtggtttagaatgaactactctactgaccaccctgtaactacgtcattggcttcaccagaaatgtacccaggttgcggcctactatacaaaagaggtgcgcgccaaattgtctcactcctaccaaatcaagcttgaagctccccatgcccggtgcatgatgtttgtagcacaaaaaagaaactatactggtagcctgatactcgtactcaccgcattcatggctctacctctagtgatagtggtacttcccaaattataatttacacgctctcttcatggatgcaaaatagaaatacttcctctcttaattaagtaactctgtgtattaacccagattgaatcaaa

SEQ ID NO: 31177 - DNA, 268 bp, Zea mays
tgctagctagtttgatttgatttgtcactaggctactgaggggaagacaatctcaatggagtgagggagggcggtggcgtcaacttcaattcagctcgggggagggaggagagtggctagtgggtgatgtggggagaagaggagctcagggcgacccttttataggcgtccaggggagagaggtgccagagactatccggtaatgagcacaacgacgacgataatgggccataacggtggcgacaagatggctctgtgaagacggtgt

SEQ ID NO: 31178 - DNA, 274 bp, Zea mays
tcaattggttcaatgttccatgttgaatcattcccaggtttaatttctccatttcttgacacaatgtggtgtcagaggtccttgctgtaagacaatggctagaagccttgcgacttaatgcatcaaccaccatgttggctttgcctgggtgatagtgaatttctaattcataatccttaatcagctcaagccatctcctctgcctcatgtttagttctgactgggtaaaaatatacttcaaacttttatgatctgtatatatatggcagatatt

SEQ ID NO: 31179 - DNA, 351 bp, Zea mays
ctacaaaattaacaattgcttctattgaaaatgtatcaggtggaaaatcgtatgacttatataatgaagaatctcattccctttgtgggatctaaaaatatccaatggttgctatgcgcttctcacggatgtcgcatttatgccttatttacatacaagacttggtaattgtaccgtatccgaggttgctatcaagcatgcccacatgctggatgactgtcgcggaaacacattgtttaccaacagatcaacgagcctgtttatttccccatgtcaacatataggtcagccacaatggtacattaattcgcaggatctgggatcctcacgatgcgaagcaaaaacatcgtc

SEQ ID NO: 31180 - DNA, 270 bp, Zea mays
tttatttacttctttcatgcttttaatgtcttccttttcggtggttgattccaaagggggagaattttagggaccaaagcaatgaaaaatgtatcaaacaccaaaaaccaccaattttaaattttaaaattctgcaagtgccttgtcaagaggttttggttatttagtccaaaataggaagtaagtgaattatggagttagggggagacttaagtccataatatcacattaaggggacaatcatgcatcctagcaagtagattgcatatt

SEQ ID NO: 31181 - DNA, 246 bp, Zea mays
gtcacctgagctgcagctgtaagtcaatattcacgaacgtgtggcatcttctatattttgacaatatatgtatatacaagtcgactcaactccggtgcaaacacagaattatggttatacctgagcgcctatatcatgttatataataatcaattataccctacatatgtattttattgatgatgagaactatataattgatcataacactggggctggtgacttacttaagcgaaccagcactac

SEQ ID NO: 31182 - DNA, 269 bp, Zea mays
tgacattgtctcccttttggaagccaatgccatccttaatgtcagggcgtctcccactatatagcatgcttctagcaaatttaaaattttcattttctaagtcatgctcattaatttttgcactaagttgagctatgtgatcattttgttgtttaattaaagctaggtgatcatgtatagcatcaatattaatatctctacatctagtgcaaacagtaacatgctcaatggtagatgtagagggtttgcaagcatttaattcatcaatc

SEQ ID NO: 31183 - DNA, 291 bp, Zea mays
  unsure (1)..(291): unsure at all n locations
gctttaaataccggactctgctatagatctatgatctctngatcgacgagtgatgaacttgtacacgcatggacgtactggatgctcgtnncccaccaccaactccagccccagctcactctcttgtggacgacgacgatgtgtatgcactgatgcgacaacgcctcgcacgtaatcgacaatgtatgggaggtaatggtagacgtcgtcatcataatcctgaaccagaccatgatccattngctaagatatagttctctattccaccgttcatgggttcttatgatgctg

SEQ ID NO: 31184 - DNA, 266 bp, Zea mays
tctcgcttttatctaacactttctttctgagtgcgtcaagtatcatcccgttggctctttccacatgcccattagctcttgggtgtgccactgatgcgtacttgatttgaatgctcctctgctcactaaaatcgaagaactccaagctagtgaagttagaccctaggtcagtgatgatgttgttaggtattccaaacctgaacattatctcctgaatgaactccactgcttttgctgaggtcaaggaagctattggcttgtattct

SEQ ID NO: 31185 - DNA, 270 bp, Zea mays
tcttcaaggctggacttcggttccctttgagcaagtttgtagttgaagtgctaaaaacctaccagatcttcctccatcagatcacccccgaagccataataaggatggggatttttgtctgggtagtaaggagtcaagggctagagccaagcgcaaagtgcttctgcaatatgcacgaacttttatatgatacaaaggccattggtaaagaacaataccacaacaactttggttgttacggatttatcgctcgccccaacgcaagccact

SEQ ID NO: 31186 - DNA, 257 bp, Zea mays
ttgatcttttcaattgtgtctaggagtgaatgctagagctcttgtaatgaatgtgatactcagaaatcttggatgcttgaggtggtggtggttgggggtacaccttgacaaaaagccttgcattttttcttttgacaaaccgctgatctcatggtttgttctgaataaacctgtttttttctaaaacttttttcattgagacttgcaactaatgtccatacgaattcacccaagttgtttttctttttacctcccaa

SEQ ID NO: 31187 - DNA, 152 bp, Zea mays
atcttacaccgcgcactgcggagcatgctattcagttgtggcgactcaaatttcctcctccattgtcggacccctcgggacccccttggaagaacatcctctcgaaaatcattggagccctccactcattaaattgatcctttctttttgct

SEQ ID NO: 31188 - DNA, 264 bp, Zea mays
ttctcattatataagtttggattagtctatctcctaccatcacattgtgttgtattcacattatataagttggtacaaatgttggtgacattggattgtgggatgttggtagttggaaccaaagagagattcattgtaagaaacttaaatgtcttggaccttggtaaatgtacaatgaccctccaggttggtttgttgcactatgtgtttcaggaactgatattatattagccatcatataacacataaattgatcaacaaaca

SEQ ID NO: 31189 - DNA, 165 bp, Zea mays
  unsure (1)..(165): unsure at all n locations
acacaagaacatcatgatcaccgacaggccactggagctnctacacatggatctattcggcccgatggcttacataagcatcagcgggagtaagtactgtctagttattgtggatgaatattctcgcttcacttgngtattctntnntgcggaaaatctcatacc

SEQ ID NO: 31190 - DNA, 264 bp, Zea mays
tcgcgagagagggtttggccttgaagtgagccgtctgagttagccccctccgcctcccttgggaaggccctaggcatccccttttatagatacaaggggatgttccagttgtacatatgggggtgtagctatgtgctaacgtggtcgacgaagaagtgcttgagccctgtagaagcgtatctagcgatgcggccctgggtcctgctgacgtttctttgccttcgtagagagctgagaacaatcgacgtcatggacgcatgcagg

SEQ ID NO: 31191 - DNA, 272 bp, Zea mays
tcggcatggtggctgaaaggggaaccgacttaaagatgaaaagactacttatgccctgacagatccccataagtcattagcaaatgtagtggacatgaatgtaattttacatgggctgcgtcccacgtctataaatagatgaacagtactcccgtactgttcacgctgacttggcatttgcttttgcgtcacacttgtattttcatctccttccaagccgaaggtacatttgtaattcgatattgtctctatttttctatgatgatataata

SEQ ID NO: 31192 - DNA, 271 bp, Zea mays
tttcttgaacaagtgccgcacttaccgctgagtgcaaagctgctacatataacaacagaggagcccttggcgttggtggagttaacgtcgttaggtctatcaaatattgcttcagttcttcgaaggctctctgctgaactggtccccattgaaaaacttcggctgacttcagcacttcgaagaatggtacatttctctctactgatctagatatgaatctgttgagagatgctagtcttcctgtcaatcgttgagcccccttctttgtgct

SEQ ID NO: 31193 - DNA, 312 bp, Zea mays
ttccgaactacttaaccttttctcctctctagacatgtctgtatgttattgagcgcaaacctgtgaatcgtctacaccaacacccgacacatcgtgtcaaaacatgggagcacagcacactctgaaccatgagccacgacgtgtcaatactggagcaagccgctgaatctattcatgtggtatacattgactgaaaccatgatctgtggtgctccaatgtgctactgtccatatatgctactatagtgtactcactatgcttacgtccgctggttgcctataagacacctactgattcctataaaatgacct

SEQ ID NO: 31194 - DNA, 271 bp, Zea mays
ttactatttgatgaatatccaataagaaaacccttatcacatttcttttcaaatttagaaagtcggcttccctttctcaaaatataacatttgcaaccgaataccctaaaatatgagatatttggctttctaccaatgagcaattcatatggagttttcttcaaaagcttgtgacaatatagtctatttgatgaatgacaagcggtatttattgcctcggcccaataagaatccgatatattatattccgctaacatagacctatccatat

SEQ ID NO: 31195 - DNA, 273 bp, Zea mays
ttaaactaagacttgtctagtttgagcccgagttaagctttttcactcactttattggcgatatcttaactaggttagacaagccctagatgcaatacaagaaatttaaacatgaaatgcaagcttgacaacaccatttgagatcttaaataaaatttctgagatcaagtatatttaattcatttctcaacatgcaaaagcgggttttatcaagtggcttagtgaaaatatccgctaattgatcttccgacctcactccttctaaaatgatgg

SEQ ID NO: 31196 - DNA, 285 bp, Zea mays
cttagcacgcgctgacttcgctccggacttcgagtgatcacagagcgaaaggtgcacggtgctggggttgcgtccggagcgcaacttggcaccgggatagctgtcgagagcacggaacacgctttgcgctttcctgccgggtgcacgcgccgcccgggttgccgctcttacccccatgaccctcacttgactcttgctgtacacgtgacctacgcgttgcaaccggtgcttctgctacacttgggatcacaacgcggggatagggaatctttatgcacgcaactt

SEQ ID NO: 31197 - DNA, 273 bp, Zea mays
ttgcttataagcatgctctacaaataaacaaccttcgttaaagaatattgccattattaaaaaacaatagaagttagggagaaggatgtttaccttgaaatttgaataaaataagctgccgacgatatgttgtcgtcgatagcggctgatgtctgtctctagcttcggaaaaccgatactctttgatagagtaccgatgaccttatctccatctgagtcccggatgcagcccagttgttcgtcatcaatgcccccaaataggagggcacctga

SEQ ID NO: 31198 - DNA, 270 bp, Zea mays
tcagcttcttctattgatgggttgaagtaccaatgacaggttgcgccaccacttaacagtacttcccctatataattagaataaatgaagataagaagtgtatgaggctaaaaaagctatgaggaaaagttgtatttgtgcaccttgatattcttttggtaaacaaccaacaaataagaccacgataggagtttgtttctgtgggtcataagtgttggtcaacgaaaattcttgtgcacgttttccccatagagtaattttcagaatgtg

SEQ ID NO: 31199 - DNA, 401 bp, Zea mays
gtcctgagtctgctgtaactgttgcattgcgacttgactcgatgggacttaatcgcaatatgtttgcagaaaattctggcagcttcatgtatttgatctgccttgctcatcactggtaaaactcacggcacaaaggacttgagtccttggccgggtatggccacatgtctatcccacatgaatggcatggtgggcacacttgtaatgcgaggtgccaacggagaactttgcagcttcacactctgactcattcgccaatatacgccacaaacctgcgatactgcacagcctagccgagaacacatccgttgctcctagactagcttgcttgaccttactggtgcgtctttgttatgctatatgaactgttggtggctgcttgctctgtgattctcaacgtt

SEQ ID NO: 31200 - DNA, 268 bp, Zea mays
tgcgcgagatttgttccactatccgcggcgcgcggcgaatccttcgtgaggtgggtgacgagcccgattgatgggtcccacacgacggtgacaaagcgaacaagtctcgtgcgtccggcgagactgacggaccggtcccatggtcagtcacccagaaacagacgccaacgcgcacgactcaaggagactggcgcgcggggccgggtgacagcggtggaagcagagagggacgcgcgggagagttaatgggctgaccatcccgatttcg

SEQ ID NO: 31201 - DNA, 270 bp, Zea mays
tgctgagatgtgggcgtactttcttgacgtatgccacacacccgaacaccttcaggaagtgcacgggtggcttctttgcatgccaggcttcaaacggcgttatgccatcaagagcactggtgggcgccctgttcagcaggaagacagcagtgtgtactgcttctccccagaagtgaccaggcatgttgcgggcacgcaggatgctccgctctgtccccacgaccatctggtttcgccgttccacaacgccattctgctgtggcgtgcctg

SEQ ID NO: 31202 - DNA, 95 bp, Zea mays
tctagtaccctaagcccacacactacaggatacgcctaaatttcgtgggccataacccacgaaataagccttaccgacgaaatagaaatttcgtc

SEQ ID NO: 31203 - DNA, 269 bp, Zea mays
tggtgccgatggttaagcataaatccttgaagtcttggttgtcgaattgcttgtcgttgtcgactgtgagttcggacgggactccaaagcggcaaacaatattttgccagaagaatttctgggctgtcttcgatgttatcgtggatacagccctcgcctcaatccatttggtgaaatactcaacgacgacgaaggtgaacttgaggttcccctgagccgtgggcaggggtccgacaatgtccatgccccagcgctgaataggccatgtg

SEQ ID NO: 31204 - DNA, 268 bp, Zea mays
ctgtgaaggttcttcatccccacatgtgctaagcggcgatgccacagccagcccatgcaagttttatccattaagcatgcatctataccggcctcttcttttgcaaaatcaactaaataaagtttgccgtctaatacacccttaaaagctagtgaaccatcacttcttctaaagacagacacatctatatttgtaaacagacagttatatcccatattgcacaattgactaacagatagtaaattatatcctagtgactctactaaaa

SEQ ID NO: 31205 - DNA, 243 bp, Zea mays
gctcagctggaccatccagttatgagatgtttatttctttgcttaagatatgaactttgacaatgatatatataaccatgctcggatggtcaacgatttataaccttgatggtttggaccatcagagggttcgctggtctatcaaaatctgatatgctatctcagcagtgcccacatgagacatatctgtatgacaactactcgagtctgcctaatcgcgtatattgtggtacgttgctatta

SEQ ID NO: 31206 - DNA, 263 bp, Zea mays
tctccaccatgtctctgctagccaagttgttgcagctacctccatcaatgatcaaacgacatgaacgctccttaatgacacactttgtttgaaacaacgtatgtcgctgattctgctctgccttctccatttgtgcactaagcacacgctgtacaatgaggctctcataatgctctgcatcatctgcaccaatctgttcttcgggtggttccttagtgcctacatcatcagccgcaagcaaagcaagtgtagcttcatccaaa

SEQ ID NO: 31207 - DNA, 211 bp, Zea mays
  unsure (1)..(211): unsure at all n locations
gtagtcttagctattaagcaagtgtcgagttcagctctatcaatatccaccaagtatagctgaccctctaacactcnctgtaaagctatggaatcatcacttcttctanagacagtgacacctacatcagtgaagagacagtngtagcccatntgacataatggagatacggaaagcaaatggtaatctaaagaatctacgagaaaaacat

SEQ ID NO: 31208 - DNA, 265 bp, Zea mays
tcaaagggtgacatcttcagactggcctgttactatcgttatatgagaactcagcataaggtagactcttgtcccaactactaccatgctgaagggcacaagctctcaacatatcttccaatacttgattagtcctttcagtctgtccatcagtctgaggatggtaagccgaactaaaattcaacctcgtatccatattctcatgaaaacttttccaaaatctgggggtaaactgtgatcttctatccaaagtgatcttcttcgg

SEQ ID NO: 31209 - DNA, 411 bp, Zea mays
  unsure (1)..(411): unsure at all n locations
aagtccattagacataatagattccatctcacttcttacttgcttctttcataagtcagcatcaggagaagaatatgcctactaatggagttggtgtgtttcacaaagacactattagtcataccnaggatttgcacccttgctcttgtcttcagtgactatatgcatctctcaggatggccggaaatctacatacatagaacacgtcgctctgggaattactatactgatataggatcttatggaatatctaaaagtgcgttgatctatgtcacatcttagcctaatttatagacttccatgttaaaatacagattcacacattacattactttggatgctattacacaccaggcaataaatacttttcatcaaggaatttttggacttagaacctaatctccctctgta

SEQ ID NO: 31210 - DNA, 272 bp, Zea mays
tgaatggactaagcagaaaagaacttgagaatggctagttggaatctacattaaatctgtttattgtagtctaggcccattctttcaagtgcacatacaagccttcaccatctctttaccatactttctggactctgcatacattcttctatactgatgtcaattctagttgctacaaagtatataaaatgaaataactgcccccccccccctatttgatgcaaatgtaattgaacaagatttcagtttgtgatttatctaaaatcgaacat

SEQ ID NO: 31211 - DNA, 278 bp, Zea mays
tgcatcagctacatatggtgatcgatcaattacactcaactagactatttgtgttcaagtcaaggacgctgaattgtgagggttctctctcgacagccaaaagatgcgatggactttatgcatcaacctgactcagaaggagtatgtgtccgcatacactctattgtttgatacgagaagacgtctccatgcaatacatgtgcataatacgttaactatcgcgagtggcgccaatatgctatttgcttgttgacttccaaattattctaccgagtcct

SEQ ID NO: 31212 - DNA, 274 bp, Zea mays
tgacaatgagggaattgtttgctcgtcatcaagagcttccgccaaatcctcaaacaaaggagagggaaagattacaagtcccgctccaagaaggtttgctacaagtgtggtaagcccggtcactttatagctaaatgtccattatcaagtgatagtgacaggggcgacgacaagaaggggagaagaaaggagaagaagaggtactacaagaagaagggcggtgatgcccatgtttgtcgggagtgggattccgacgaaagctcaagcgactcct

SEQ ID NO: 31213 - DNA, 136 bp, Zea mays
  unsure (1)..(136): unsure at all n locations
agacagtcgcgcgatcatacacaatcatcagacaatagaaatattcttcggcatgatacaacacccatgtcaacttatggtnnttttgttacacaccatacngacaccagtcactatactgctttgaaactgggaa

SEQ ID NO: 31214 - DNA, 271 bp, Zea mays
tgcagtagaaggttgtgaatgattgttaaacccgattaatcaactattcttcttaactaagtctgtctatgtgtaagtcatcgtaaattatgcgtacttaactagtttaataataagtaactaatgaatgataaaagtgaacgtggcgaatgcttgtacttatgatgtcgtgtttgctatagaaaattataggaagtgtttgttgttttccagtgatgattgactatgtatgcccgatgacgtatagataactagcgcttgcgtacagttg

SEQ ID NO: 31215 - DNA, 206 bp, Zea mays
gctggctctcttttctcaaactggactgcctgcctcggactttctggcgaattagatcgctgtctcactggcgcatagaggagagtcccggctacgcagcagcgcagggattcagcagcagcgcagtgattttagcactagagcagcgcaggacttcagcagtgcagcgacgaggactttagagcactggtgaggtcttccagtat

SEQ ID NO: 31216 - DNA, 272 bp, Zea mays
tagcaaaagaaatttttttaatcaagaatattgagctcatgcctaagtctggtaaaagattgttcatcaagtggtttggtaaagatatcggctaattgatctttagtattaatgtaagaaatctcgatatcccccttttgttggtgatccctaagaaaatgataccgaatggctatgtgcttagtgcggctatgctctacgggattgtcggcaattttaattgcactctcattatcacatagcaaagggactttggtcaatttgtaaccgtt

SEQ ID NO: 31217 - DNA, 269 bp, Zea mays
ctcttactttctgcctcccaaaaataaccaaactttttcattataatcatgttggctgctattatattatatttcccaaattcaatgtggcttggcttcatgggcttaaaatattgtaatcttcttcatcctaataatcacttctgtcctcaactgcaatctgctaaccttctgcagcttcaccttcagaaataacttcttccgatgtcactagacctgatcgcctcatcatttctattatcggtgttgtctctgttgtctcagcatca

SEQ ID NO: 31218 - DNA, 228 bp, Zea mays
  unsure (1)..(228): unsure at all n locations
gttctctcgccaccgtcaagaacttattgttctgatgactaatcatttaaattaagaagttatttaaaatatgtaatggacctaatatnggtatgttggtgctgaataacacactgccttctctgtgtactgatctgaagaaaaaaaccactgcacacggagttcttctcatgatacaataactactatctattccatccgtctgtatttaatttatatgtaacaaat

SEQ ID NO: 31219 - DNA, 270 bp, Zea mays
tatctcaaatttattaggtgaaagatgaaaattgattctatagatttatatgctaattttccgatgtacaacttatagcacactcttctacttgcgcctataacataaatgtactatataactatctctctcatatgatttaggataatatacaaatatattacatatataaatatataaacttaattagttttgtctaaattataattattaaaatggaattcaattccaacgaaacaaacgggaccttaggttatattccacgatgga

SEQ ID NO: 31220 - DNA, 269 bp, Zea mays
tatgagtttgctggattgctattcaggttatcatcaaatctggatgaagaaggaggatgaaccgaaaaccagctttataacccctagtgggacatattgctaccttcggatgcccgaggggcttaaaaatgctggaggaagcttcagcagaatgacagcgaaggttctccattctcagataggcaggaatgtactaacttatgttgatgatatcattgtaaaaagcacgaagcaagataaccacattgctgatttacaggagaccttcg

SEQ ID NO: 31221 - DNA, 270 bp, Zea mays
tgtaaaaatcattttcgccctattcaccccctatgcgactttcaacctcttaatgcaatactacgatcaacactacactggactatgacgaaagccataaccctttaacagagttttaaagaagataggctcaaaagagcctcatttgggttgttctgggcctcaccggactgggtccacaggggcctatacttatctggttgggcggtctggtgcaccggactatgttcgtgtgcaccggaccgcatgtacggctgaactcggtgttct

SEQ ID NO: 31222 - DNA, 264 bp, Zea mays
ttcttggcacttcttatcccacttaaattctcttcctttctccaaaagcgaggtcatatgcttggcaatcttagagaaaccttcaataaatctcacataatatcctgcgagtcccaaaaaactccgaatctccgtaactgtagtgggcactctccactccattatctccttcactttagcaggatccactgctattcctccattagaaataatgtgaccaaggaatggcaccttgtcaatccaaaactcgcacttgctgaactt

SEQ ID NO: 31223 - DNA, 263 bp, Zea mays
tgtatagttcagcttcaagtgttcaaatttgatggtccaaaggctgagttgattatgagtgtggacatcacaagtgaaggagaacattacttatgtgagactcggtgtgcataacttggatacaactgatcaagccaaggatggatgcaagaggagcttcgaggtaccgagttcatgggagaaggtcaaggaggccaaggaacctaaaactaggggtgaagaagaagattcgctaagtcaaggttgatcgaattgagaagagc

SEQ ID NO: 31224 - DNA, 266 bp, Zea mays
tgttgaggttcttttatccccacatgtgctaagcggcgatgccacaaccagcccatgcaagtcttatccattaagcatgcatctagaccgacctcttcttttgcaaaatcaactaaaagtttaccgtctagtacacccttaaaagctagtgaaccatcacatcttctaaagacaaacacatctacatttgtaaatagacaattatatcccatattacataattgactgacagatagtaaattatatccaagagactcaactaaaaa

SEQ ID NO: 31225 - DNA, 330 bp, Zea mays
  unsure (1)..(330): unsure at all n locations
gtgactttctctgcatcactctaagnggaatggattgacctgacatgccttgngtggattcttcctccgaagcccctggtcatctcagagaacctgtaggcttcctcccttctttggcgaaagtcatngtcggcccggatgtattcatccatcntttgaagcaacttctccaaagtctgtggagggcttctagcanaatactgggcagtatgtcctgaacgaagccccttaatcatggcctcaatgacaatttcattgggcactgtaggcgcttgtgctctcaggcgcaagaaccttcngacatatgcntggagatactcttcatgatct

SEQ ID NO: 31226 - DNA, 270 bp, Zea mays
tcctctcccattttagttcaagagtgttgtcttacccatcccgctcttgttcgttcccttttcctctgtcgcgttgcaagtcttagcttttgctcgatatcacccctaccttcctaatatctagacctttccatgatgcttatcttatgcctaccttttgaattatcatctttcccatatcgatttgagaatggtgttttacctatcctgaccttggttgtattctctcccttgtcggttacaatcattgctttagctccatcctttatt

SEQ ID NO: 31227 - DNA, 263 bp, Zea mays
tcaaccatgggcttttcaacaagcgcaagcgtgaaccgactcctccatcggaggagtttggtgactcggaatactcggaggaggagttctcctccgagcccgaggggtctccggctcccgtctctcccccggcgtcgtctgatgactcggacgactcccaggggatagccgcggaggtctggacgtacatccgagccgtcgagcgcgccgggctcgaaggctcggatgaatcggagtactcctcggatgaggaggactcggac

SEQ ID NO: 31228 - DNA, 402 bp, Zea mays
  unsure (1)..(402): unsure at all n locations
ctcatcncacatgtgctatatgtctatgcttcaaccagcccatgctagtcttaacgaataagcgtgcatctagactcggctcctcttttgcaaaatcaactaagtaaagattgccgnctaatacacccttagaagctagtgaaccatcacttcttatatagacagacacatctacatttgtgaatagacaattatatcccatattgcataattgactaacagataacaaattatatccaagaggctcaactaacaacacattatatatagagtgctctgatgaaatagcaattttacctaaccctcttaccttgccttgattcccatcaccgaatactattgaatcttgtgaaccttggttttgacgtatgatgtgaacatcttcttctntcccgtcatatg

SEQ ID NO: 31229 - DNA, 258 bp, Zea mays
tgaaaccatggtttttaccataggcaagtaaaatgcgaattgattcaagcctagctacgggtgcataggtttcaccgaaatccaaaccttcgacttgtgaatatcccttggccacaagtcgggctttgttccttgtcaccacaccatgctcatcttgtttgttgcggaagacccacttggttcctacaacattttggttaggacgtggaactaaatgccatacctcattcctcgtgaagttgttgagttcctcttgca

SEQ ID NO: 31230 - DNA, 254 bp, Zea mays
tgaccataatgacattacaattcgagccggcccagggaaggagctcaaaattacaaaggatacagtgcactttattttggggttaccaaatgctggtggagggacgggcggacggccttgggcattgatgaaactgttgctgccaacaatttaagggctaaacttggtttatcgaaagaagattttggggttatagctcttcaagatcgtctgaagaaagggtctgaagatgaatctaaccattcaaatctttt

SEQ ID NO: 31231 - DNA, 265 bp, Zea mays
ttaaacccccctttttctatacagaccttttcccgtttctttctaactataatgaatgtgatatcgaatgtcatacttgatgcatattcactttatttgttcccttgtgtgatgtactgtttgtttcccaatttgaatggatgtatgtatgtatgcttgcaatcgcatagagaacgatccggtcgaagagcccgaggaactcgcaggagaagcccctgagcagcagtcggttggtggaggcaagtgtcccttgacctatctccgt

SEQ ID NO: 31232 - DNA, 299 bp, Zea mays
ccaatctatgtggcgactctaatacatacgctgcgttgtcggattttgttaaggaatgaacctttggggtgcttgaggaaattaattccattcttatctactcaagctatcaatcttcaaatggcccacgaattccccatagacccaaggatacttaaatttattggattcaaaacccatatcatctctgaaagatattaatgttgtcggaaataaagaatcatcatgtgcggaatatcaaagccttcacatggaggaaagtcaaaggatggtaacatttatattcttaagtgcaatta

SEQ ID NO: 31233 - DNA, 281 bp, Zea mays
  unsure (1)..(281): unsure at all n locations
tgctaacctgttgagaaaccgcaacaacgaggaaaagcttaactcggtcaatctgcaagattagtttaagctttagcacttaaattcttactttataatgcaatattggttcttgaaatatgcatgaagtactgcacttagggggagtattcaaaactcanatcattcatgagaaaccctagtgcaaaccanaatgcanatttcaccattngcctattnntctctaaaattatctagcctatggcgaaatattttgaaaagatatgaaggtgccatacctg

SEQ ID NO: 31234 - DNA, 266 bp, Zea mays
tctccgggtctgtgggggtttcttggcaaaatactgagccataggtccttgccgaagccctttgatcatggcctcaatgacaatttcattaggcactgtaggcgcttgtgctctcaggcacaggaaccttcggacacacgcctgaaggtacttctcatggtcttgtgtgcactggaacaaagcttgagcagtgactggcttcgtctgaaacccttggaaactggtgatcatcatgtccttaagcttctgccatgacttgattgtcc

SEQ ID NO: 31235 - DNA, 253 bp, Zea mays
taataaattttttttgttgtttaatcttcatctatataatcaatttcctaattacactatatttaatactcgtaattggtgttcaaacatccaatgagacacgtactaaactttatttaggggaaccaaacaccatcttacttaaggtacaatggtgtttcatgtattacaatgggaagatgtgcacatatgtgttagggcctgtttggtaacaatgtttctcaaagctatggttttacaatactatactttg

SEQ ID NO: 31236 - DNA, 299 bp, Zea mays
gtctcctacagattcaaacttgtatgcacactttctagggaggtactcttaatctaatctttaggcttcactcgttccacgtctatttatgtagaaatctcttgaatgaaaatggatcccacaaaagacatatctccactgcaatctctagaatttcaaatctcaatggttcacaagtgttcatttataatggatatcacatgttctcatattcatacacatattatactatctccatgtctataagccatgtaaaaattctttactacaaggggatactaataaccttctgcctcctt

SEQ ID NO: 31237 - DNA, 227 bp, Zea mays
tgtggagctggttttttactaaaccacacctaaaatgcttgaaatgaagctctcccaaacatgcccttaataggggtgtacatgtcctaatcctggagtccacacaactgaacaagcaattgttagaccaaccgaacctttagcaatataaccttttatttgagatttttttacgtttacaccctacatgaattaatgttgattctggaccctttgctcggtgccat

SEQ ID NO: 31238 - DNA, 301 bp, Zea mays
  unsure (1)..(301): unsure at all n locations
tgcagcttgagctccgcgcttggccaagttcgccctcttcntggtgcccggatatctgctcgcgtccggcttnctctgctccttgcttctttcttctctctcgcacttgccgtggagcttcgttntccagcgcctgctccatccatggccggctgcagctcgctagactgtctctgctctctccatgtagcgccttttttaccagcccagccagccgcttctccctgagctcggcttctgcctttcctgctgcgcgcgctcctctccctctaccctctcactggcgcgcgcgtnctcccat

SEQ ID NO: 31239 - DNA, 198 bp, Zea mays
ttatttcagtgtcttttatgaccatgaagaataccttcaggcgtatgtccgaaggttcctgcgtctgagggctcaggcaccaacagtgcccaatgaaattgtcattgaggccatgattaaggggcttcggctgggaccttcagcccaatactttgccaggaagcctcctcaaactttggaaaacctgctccaaaaaat

SEQ ID NO: 31240 - DNA, 270 bp, Zea mays
catttgagaaagacagggtatgtagcgcatgtatagcaatatagcaagttggctcccatcatccacactaaaacataatgacgacggacaggtcgctcgagctactccacatggatatattcggcccgatcgctcacataagcatctgcgggagtaagtactgtctagttatctgggatgattattctcgcttcacttgtgtattctttttgctggacaaatcacagaccctagatactttaatggattctcgagacacgctcaaataag

SEQ ID NO: 31241 - DNA, 259 bp, Zea mays
tcttgtgaaggttctttatccccacatgtgctaagcggcgatgccacagtcagcccatgctattcttatctattaagcatgcatctagaccggccccttatgctgcttaatcaactaaataaagtttgccgtctaatacacccttaaaagctagtgaaccatcacttcttctaaagacagacacattttcatttgtaaatagacagttataccccatgttgcataattgactaacagaatgtaagttttttccaaaaaa

SEQ ID NO: 31242 - DNA, 283 bp, Zea mays
  unsure (1)..(283): unsure at all n locations
tttgaaatacctaatgagacaccaatatgatatcttactnttacaaaccaattgaaaattagataccactttgagaattcattctgaggctaactcaataaccaattgaaataaactcaattactaaggtgaaataagcatttgtgaaattcttgaaatggtggtgcggtcctttngaaatggnggtgcggtccatatgctttgggcttaatactttctcctcctttgacattatatcgcaaaaacggaaaacttgagagcccttgataatatctcctaatac

SEQ ID NO: 31243 - DNA, 253 bp, Zea mays
tataacaggaattatacatatcccctgtttatagtgaagattggagaactgagattatctctttccttcagggtaattttctttcagatgacgaagcttataacaggagaatagaagcaagagctcgaccatatgttatagtagaaggggagttatacaagcgcggggtctgttccccattgctcaagtgcttatccagatccgaaggtatggaattaatgaaggacatacatgcaggtctgtgtggatctca

SEQ ID NO: 31244 - DNA, 327 bp, Zea mays
agagaacactagaaaactcaaacccgcgggggcgcataaattatttatccccgccacgaatacgatggggtcaaccaaagaagcatcgattcactatgtgacaatactatgatagttcttaacaagagaacacactactttacgtaacaaaaaatttgtgataacaaagcctacaattttttctcaatcgataacaatcgcctcttcgaagaaatcataaaattattggatgaaaaatgaacgcgtttcttaatataaaattaaacaactctatactcatgaacctaaaaaaaagcaaaatcggtggtaaggcctaaaaaaaaacat

SEQ ID NO: 31245 - DNA, 269 bp, Zea mays
tgggccctctgatttttttatcataacgaagcttcatttctaatacaagcatgatctggcatcattctcgttatgaaatgcataaatcactgcagccctgggagcctgacagggaaagctaaccaaagaagaaggaaacacaacaactgatgtattgaaatctgtgctacaaggagggaactgtgagtacacgcgtgaacattaacttactaaaatttgttatggacaacgataaaatctgctaggtgaattggttatagacactctag

SEQ ID NO: 31246 - DNA, 259 bp, Zea mays
tgaggctgactctcttttatcttcagagactgcaggatggttgcccacatattctgggatgtagggcgaatgatacgaagctgtatgcatgacctgcttcggctgagcttgttgtgctgctgcttcagctatttccttttgcttctgaatagtgacatggcacatcctggtagtatggcctttgttctcaccgcagaataagcaaaagattcttctcggttgatcgccaaatcttcctccgaagcccctggtgcctctg

SEQ ID NO: 31247 - DNA, 258 bp, Zea mays
ttggggtgcctgttctgtttaactcaattcttacctcaagctaacaatcttacattgtctatcctttaagattgacccaaagatgaattgagttgttatatcactaacttcatattcatctctagcaagaacttgtgttgtagggaataaggattaatctttgtgggaatcaagcaaaaggcctacaaccaagtgatatccaaaggatggtaacaattaattcttaagtgcacattgcttttaattggtatattcctt

SEQ ID NO: 31248 - DNA, 269 bp, Zea mays
ttatctcccgtgtattttttttcctaatttcctagcaatcacttttctatcctttctacaaagtgcaaatgaagcattacaagcatgataaattgtagaaggttcattaattatttacctagaaacatgaacaacatttcttctaggcatgtgattaataacatttctcctagccaaatttctatcatgcataatagaagaactagaagcaaccatggtatttgaattgtaagcattacaactcctatcgacatgaacatttctagaaa

SEQ ID NO: 31249 - DNA, 203 bp, Zea mays
tgcggaggctcattattttttatattgcgcaggaagattacgtagtcacacatgatgtgggagtcacttgcgaattacttgcataatatcacaactgaaccactaccatactaactgtatttgagataaatgcgaaatttctcttactgataacattttcctttctgaaccaaaggaattggttgtgatcaaaccgttgtaca

SEQ ID NO: 31250 - DNA, 266 bp, Zea mays
tacccatgatgattgtattcgaccagttaaaaggtcctcgatcatcaagcctacatcgagacggtccttaatcgactcagacagagacactacaccgagactctcttctcgtgtaagtcacccgcccggtctcagctttatcattttaacccaaagtttggtacctgacagaggtacatcttttctgatgttgaatccatcactgccatgatggatccaccatcaagttttattttgaaaacatcccatcccacttgaagcatcat

SEQ ID NO: 31251 - DNA, 255 bp, Zea mays
tgacaacacttttttacatcttacataaaatttctgagatcaagaatatttagttcattcctcaacatgcaaaagcgagtcttatcaagtggcttagtgaaaatatctgctaattgatcttccgacctcactccttctaaaatgatatctcctttagcaacatgatctctaaggaagtgatgacggatatcaatgtgcttggtgcgagagtgttgtacatgattattagcaattttaacaacactctcattatca

SEQ ID NO: 31252 - DNA, 251 bp, Zea mays
ttgtattgcttttccatcgaagaaccttcgtgccacctttgtgttaggaagccgaaggtatgtttgtaaacttatttgatataaaggaggatgatataaaaatgtcaagacatacgagatgagtttcacactttgttttatattgtcgatacaatctatactgttcaactcacatcccctctccgaagaccttcatcctctgtattaacactttggagaagtgttaaaataaagacggaggtttacgtatt

SEQ ID NO: 31253 - DNA, 266 bp, Zea mays
tccttgcgcatttcttctgagctggttcggccttcgtcccaaccatgcttttcatattgtgaacagcttcatcccgagtccgagggttcctatacatatattatacttgggaaacattgttaatcatgtttttgaggaccttcagaagacgaaggcccccaatagtagcccctcgcagtattaatttgttaagataacgaattcagactgcgacatggatgaaggccttaagccgaaggtccgaaaaaacacctttcccttgctag

SEQ ID NO: 31254 - DNA, 257 bp, Zea mays
tgacattttcttttttttggaagccaaacactacaggaaacgcctaaattttcgtgggcccaaaacccacgaaaataagcctaaaccgacaaaaatagccgtcgaaaataagttcgacgaaaataggcacctattttcgtcggtacccacgaaaaatacctactttcgtcggctttaccaaagccgacgaaaatagttggtcgactcactattttcgtgggctcgatggctgtgtttgcattaaatggacaagaatg

SEQ ID NO: 31255 - DNA, 253 bp, Zea mays
tcatgcaactgctgtcagaaatgagaggtgaactgcgttcctctgactgacactatcttctttggcacaccatgaagacaaacgatccgagacatatacaactctgccaatactgcactgatgaacttggccttgacacgtatgaagtgggctgacttggtcaagcggaccactactacccaaatggaatcgtagccggctcaagtgcgaggcaatcctactatgaaatccataccgatttcatcccatttcc

SEQ ID NO: 31256 - DNA, 230 bp, Zea mays
tcatgtgggagttcgcaagagaaggttgtgtgttggcatctatgctcctctcataagcaagctgccaagcgaaagctagaagcctgaagatgatcctttgagtaccagaatcagtgttttcatcagcaccagatgttcctcaaggcccagacttgatgaagtttcatcttctcgaagagttgcaaagtgaagatatgtagctgaagtaaagctatacccataacccttct

SEQ ID NO: 31257 - DNA, 267 bp, Zea mays
tgtagtaaggtcttatggaaacagggataggatcagacttttgcttaatgcactgctgtaatgtgttccctgtccttttgtgtccaccagcagtttaattaaggtagtctatatgtaattaaggaaaaccgaatgttactacttatggtactacctaatgttattatggtcccttgagtgttaattttgttttcttcttaattcgactgcactacgtattttcaaaactctacacttgttttgcattagatggacaagtctggcaat

SEQ ID NO: 31258 - DNA, 175 bp, Zea mays
aaacggaaaactggcaagggaccggactggcgaccccagaccaaccagcgggaaagaaggaaccgccgcaagcctggaaaaggggaacaagtcagaggtagaaccaccggaaaccacacttcaaaagcgcccccaaaagtacgaatgggcctaaaaagcgggggggaagccaaac

SEQ ID NO: 31259 - DNA, 443 bp, Zea mays
ttcctatcctttatatatatggaccagcgggataccgacttcagttactcgaaacactgtctgagtacataatgtgttccacgtgtctcaaattgagaagtgtcttcgcgttcccgatcgaactattaaagtaacggatgttgccttagaacccaacttgacatattcagagcaccctattcgagtcttggatcaaaatgacagattacccaaagaagaactcttaaggtttacaagatacagtggaacccacacacagaagatgatgctcatgggatactgaaacttttacatagaattccaggatttagcctctgtattgtaagtgatacatcgtgtataaagaagaccccatccaccgtgcttgtcaaataagaataaaagtgagtgttctttcctgctgcctagatttattcggagaatctttatggagagatgacacc

SEQ ID NO: 31260 - DNA, 259 bp, Zea mays
tcagctccatctatgttatggattgcttttgagtcagtccaattgccttcggcccttcttgcagcttcctgacttccatggatagcaatgggtccctgatccgaaggtatcttcatgcaaagataggcaggatgaaggattgcttcgaaggcattgagggtaccacgaccaataattgcattgtaagggtattccatgtcaacaatgtcaaacacaacttgctcagttctagtgttgttgatgaacccgaaggtcactg

SEQ ID NO: 31261 - DNA, 301 bp, Zea mays
  unsure (1)..(301): unsure at all n locations
caagttggttcttcgcagaagaacataatgtattcgctcgaaagaatagataccatgatgatgaacgagagatgccttcgtgtagtgatcttnttgattttcagacgaacggcatagccgttggtccacccaaggcatatcacctcagtatggaagaacgaaagtctgcttactgtacatgtcacgaatatgcctgtgtggaaaatacttgtgtagacttatttcttaactgtcattgtgaatagttatgtatcaatatctatgtatacataatattgcagcagttgatgaacaaacatga

SEQ ID NO: 31262 - DNA, 258 bp, Zea mays
tctcatcggactctttttgttctacaccaataggaagcaacacaagaagaagacggcgacgaaggcaaaggcgaaagggtgatggctgtctaggaggaggcggaggaggatgccgggctgccgggcgggttcgcttcacttccagatctagaagcacgagcacgatcgatcgtgcagtgcaggtcctgatgtgaggcggcactgtcgtacgtcagtggtgttaactgccagaagaacccatgacccattttcaagctt

SEQ ID NO: 31263 - DNA, 197 bp, Zea mays
acactctgaaactcagccttggagatgcctatttttttggggcgaaaccgcgatgccaaagcccacccatgttattcttacacatgcacccatggcccaagttcaacttattcaaaaccccccagttttagctggacctttaaaccccccttaaatggcttttgaatcatcacttcttctaaagatagtgaccccta

SEQ ID NO: 31264 - DNA, 252 bp, Zea mays
caagctttaaggagacacggatagctactttgtattccaaaagaagaccttggcagctggtctagcatgcgaacaggtgggaagctctcatcacaccacacatgtgatgacaacatcaagacccctggagctgctacatatggacctcttcggacacgtcgcctatctgagcataagaggacgaagtatgtgctagctatccgtgatgactcttcccgcttcacttgggtgttctctctgcaggataagtct

SEQ ID NO: 31265 - DNA, 287 bp, Zea mays
acactatataatcactgcatgttgttgcggtttttaacccgagctcccccagacgcgcagttccaaaaaccctaccaccaatgctagaccctcccggctctagcttccccacactccgacgagggctcgtgggctccggcggaggctaaattaagggtgcgggagtcggcgtcgtcgtccgagatgccatccttctctgccggcgcctcatcgcagaagcagcagttcgcgaggagccaactcttatcttgttgacgctgatctcttccgattgttacattagttgg

SEQ ID NO: 31266 - DNA, 204 bp, Zea mays
taaacaggtgggaggagcgcatcacagcaagaatgtgatgaccacatcaagacccctggagctgctacatatggacctcttcggacccgtcgcctatctaagcatatgaggaagtaagtatggtttagttattgttgatgacttttcccgcttcactcgggtgttctttttgcacgataagtctgaaacccaagggaccctcaa

SEQ ID NO: 31267 - DNA, 260 bp, Zea mays
ttacttagttgattttgcaaaagaagaggccggtctagatgcatgcttaattgctaagactagcatgggctggctgtggcatcgccgcttagcacatgtggggatgaagaaccttcacaagcttctaaagggagaacacgtgataggtttgactaacgtacaattcgaaaaagatagaccttgtgcagcttgtcaggcaggtaaacaggtgggaggagcgcatcacagcaagaatgtgatgaccacatcaagacccctgg

SEQ ID NO: 31268 - DNA, 307 bp, Zea mays
ggtcaagaaatcaatcacacacctgaagacgattaccaacacaaagtatggcaaactgacaaatgcagtaaacgactctctcagtcaaaccacagaaagcgagtatccaatcaactagcgaaaagtaactcaaatctgtagactaaacaagttggtcaaccacggcaagccaacaacttatcgtgagcacggaaattatctcatgaactgcggcctgacaatcggtaatgtactgtaataaccactggatctgccgaacttcggcaatgctctcagaacgtgcctgaaatgatcgccctcctcccct

SEQ ID NO: 31269 - DNA, 255 bp, Zea mays
tggctactttggtattttaaaaggaaatggttcgatttgccggagaagaaaccaccccagcgccgaaggatgatgaagtggtggtcttcaagagttttttcagagcaggactccgacttcctctgaatgagatgatatgggaagtcttaaaatttcaaaatatatcttcatcagctgaccttaacgccattgttaggcttagtgtcttcatctgggccctccgaagccaagggatgagcccagatgccgaagcat

SEQ ID NO: 31270 - DNA, 257 bp, Zea mays
ttatcaaatggttttgtatagtgccttcctcaacggaccaatcaaggaagaagtctatgttgagcaacctcccggctttgaagatagtgagtatcctaaccatgtttataaactctctaaggcgctttatgggctcaagcaagccccaagagcatggtatgaatgccttagagatttacttatcactaatggattcaaagttggaaaaggcgatcctacactctttaccaaaacacttgaaaattatttgtttgtat

SEQ ID NO: 31271 - DNA, 197 bp, Zea mays
cgagttcagctctatcacaatctaccaagtatagctgaccctctaacactcgcttaaatgatatcgaatcatcacttcttcttaagacagtgacacctacatcagtgaatagacagttgtagccatttgacataattgggataccgaaagcaaattgttatctatagaatctacaagaaaaacattggaaatagaat

SEQ ID NO: 31272 - DNA, 178 bp, Zea mays
taacatgcttgattttgtgcattcttttcatttgcaagattagctatagaggtttccatgtaaataactccttaaccttaatccccaatagtatcttgactaaagagacttccttagtcaagacatctaacatttcatctttattatgaatcaactcttgaagctctaggtttctttc

SEQ ID NO: 31273 - DNA, 281 bp, Zea mays
  unsure (1)..(281): unsure at all n locations
agagacacnaaacacaacgcagcgcgagcgatgctttataataagaggcccgccaacaagcatgcgggaaagcgaagaacaagaagggcaggccgaggcaaagccgaaaaacacaaggggggatgaaaaaccctcacaagcatcaaaagggagaagaaccgaaaagatagccgaacgcacaaatcaaacaagatacaccaagagcaaaatgggaaggagggcaacacggggggggagcccctcacatcgagagcgggaagaacacatgcagagccggggag

SEQ ID NO: 31274 - DNA, 254 bp, Zea mays
ttacctattggacgtgaagagagcttttctcaatggaccaatcaatgaatacgtctatgtctagcaacctacccacatggaaaataatgagtgccctagccatggctataaactctctaaggtgctttatgtgctcaagcaagccccaccagcgtggtatgaatgccttagagatttacttatcactaatggattcaacgtccgaaaggtctagcctacattctttaccaaaacacttgaaaatgatttgtttg

SEQ ID NO: 31275 - DNA, 375 bp, Zea mays
  unsure (1)..(375): unsure at all n locations
tgcaatatcgtatgtcatattctatgcatggttaatctactcggtctcttggatgggggactggttgtttcctaatttgaatggatggatgtatgtatgttngcactcgcatagagaacgatccggttgaagagcccgaagaactcgcatgagaagcccctaagcagcagtcggttagtggaggcaagtgtcccttgacccatctctgtcctattcaatctttaattcacctcccgcattacacanttatacctaaggattgactagctnntgtatccatgtccttgtttacctatntgggttggattattattgcttagtcttatgctattggctcactctaatcaatgaacatgatgagaatgatcaatgata

SEQ ID NO: 31276 - DNA, 265 bp, Zea mays
tttagggtttctcaacttggtgttaagttttacccctttaaccaccatttagggttaagtcctttaaccagggttccatttgcaaaacatttaaaacaatacaacttgtttgaaatttttacctagtgaatgcactctaagtgtgtcaaacatatgcaaatgctaatgtttatgatgtcatgctcaagttttagttatagtaacaccaggggtgttacaccgacataaaagtagaatgaccttttagtccataaatgtttgagtc

SEQ ID NO: 31277 - DNA, 263 bp, Zea mays
tagctaggatgaaccacagaaagggattcgattcgaaactccataaaagctaaccttagctaggatgaaccatagaaagggattcgattcagaactccattaactccacatgtagaacgagaggctaatttgacttaattagactaggaatctctccagaaccaaagtagaggaggagctagtcgatcctctagctcagttagcatctgagtgtaattttggtctttgctttgtcaatttatctaccacaaagatgacgcagt

SEQ ID NO: 31278 - DNA, 257 bp, Zea mays
tcaggaacctgataaatggtgaagtagtcttggcacttggctaaccatattccaggttccttcccttgaaatctaggaaacaaatatttgggcagagatggatgtcctcgccctcccatcacctgatcttcttcttctcttactctctcctgttgaggttctcttcttcttcggtttggatcaccttgatcagcaccctcccttgatgataaagcaccatcgccctccaagtcctttgccatcatctccaaacgcaa

SEQ ID NO: 31279 - DNA, 309 bp, Zea mays
  unsure (1)..(309): unsure at all n locations
agaatggtgtatgtctcgtcactgatccagacataatggtccatccgtcngacggtgatgcgtggaaggcatttgaccagtttgatcccgaatttaaaacgaccctgngagtgtacggcttggtctatcgacggatggattcacacctttcaataccagtgcaagcccttactcgtgttggcctgcttcattggacatataatcttcctctgagttggcaataaagaaagtcatgttccttgactattattccagccccgacatccaggcaaagtgatatgttgttcccttaatgagagctgaacatgt

SEQ ID NO: 31280 - DNA, 259 bp, Zea mays
tgctgatgaggaaagtccttacaacttttcttatctcaatttctatattgaaggcagctggtataaggtgagctacaggaggtttgctcacatcctgggatttactgatggagatatttcaggcgacaaaattaagattcatgactttcgtcttcccaccaaggatgaagtcaaggatcttcatatttctgagtctgataaatattgggagtctaccaatctgcacaaatactacagatacataaattaactctgcaga

SEQ ID NO: 31281 - DNA, 288 bp, Zea mays
gcatgtcaagcaggaaagcatgttggtattcttcatccacacatgaacatcatgacgaccgacatgccgcttgactactcacatggatctattcggccgatagcttacataagcatgactgataagtattgctgtattgggagatattctacttacttgggattcttttgcaggaaaaatctcacacccatgatacattgaaaggattcttgagacgggctcaaaatgagttcggtttgaagatcaagaagattctaagcgacatcgggacggagttcaagaactcac

SEQ ID NO: 31282 - DNA, 266 bp, Zea mays
tgcttaagtcacatggaaaatggttctggaaatggataaggttttagtataggtacagcctttaggaaatgtatgccttttaatttattatgtgcatgggtatacccatgtttcatgtcattactttttaaaggaagaagtgctacgatgctgccacatgttatttagcatgtcaatgttaagtttgtacgtcagtagtgcaggcagtcaggcactaaaaagaatgtagttctccatgatagatgtgtttattgtctgagtacatg

SEQ ID NO: 31283 - DNA, 261 bp, Zea mays
ttctcaccatgtttaacatgcttaatgaaacttcatagaatgatgcaggttaatacgaaaacttggtcatcaagcagactgttgaccttctgaccagtcagcactaaagtaggtcggctgcctttctggtagatttgattaagtcggccttaaaagcattggaaactatacttcaagagctttccaaaaagtacttatgggccttcatagcttttgggaatcaaaagatatgactgtttcttctggacggatctgtagcgc

SEQ ID NO: 31284 - DNA, 260 bp, Zea mays
tatgaagattcttcattccaacctgggctagtcggcgatgctatagccaacccatgttagtcttagcaattaagaaagtgttaagttcagctttgttctcattaaaatcaactaaatatagctgaacctctaacactcccttaaatgctattgaatcatcacttcttctaaagacactgacacctatatctgtaaatagacagttgtagcccattttgcataattgagaaacaaaatcaaattgtagtctaagagtctac

SEQ ID NO: 31285 - DNA, 258 bp, Zea mays
tgtgaaggttcttcatccccacatgtgctaagcggcgatgccacagccagcccatgctagtcttagcaattaagcatgcatctagaccggcctcttcttttgcaaaatcaactaagtaaagcttgccgtctaatacacccttaaaggctagtgaaccatcacttcttctaaagacagacacatctacatttgtaaaaagacaattatatcccatattgcataattgactaacaagtaacaaattatatccaagagact

SEQ ID NO: 31286 - DNA, 230 bp, Zea mays
gcataacggccccttgcaaacacaaaaagtgcgcaaacaccaaagcaaaacaccttttaaaaagaccacactttgaaagcacattccattacaaatgctacgatcaataaccaggaccacagaaccctaaataaggccataaatgaactgcaaccaaacctgctggcccacaaatatgactggatctgttgacagagaaattctccccgcaaggcggatccgcaaaacct

SEQ ID NO: 31287 - DNA, 254 bp, Zea mays
tctaagggagattttttttgggactaacaaatgttcattttgagaaagacatgatttgtaacgcatgccacgcagggaagcaagtcggtgttcatcatccacacaggaacatcttgacgactgacaggccgattgatcaactccacatggatctattcggcctgattgctgacataaacatcggcgggagttagttctatctagatattgtggatgattattctcgcttcacttgggtgtattttttgcaggaa

SEQ ID NO: 31288 - DNA, 273 bp, Zea mays
  unsure (1)..(273): unsure at all n locations
tgagcaacctcctatctttaaagatagtgagtaccctaaccatgtgtataaactctctaaagcactntatgggcttaaacaagccccacgagcatggtatgaatgccttanggatttccttatcactaatggattcaaagtcgganaggcccgtcctactttattcaccaaaacactttgaaatgagttgtntgatgccaaattatgtgatgatatatattgggtctactaacaatctactgtgagagttagttgatcatgacacaaaattca

SEQ ID NO: 31289 - DNA, 242 bp, Zea mays
tagaaacatcattttttggacgaaatagaagtgcgatccgttgttgccgagttcaggggcagaaatgaagcaagtctagaaacaaaaattcagtgccggagctaaactctatttaatttctacgttcttagagcaactccaacagaagatataaaccaaccccaaaatagatattaagaaagaaaaatgattttctttgctccaacagctcctttatttttttcccaaaaaatctgcgtccc

SEQ ID NO: 31290 - DNA, 241 bp, Zea mays
  unsure (1)..(241): unsure at all n locations
agcattagtagtacacctcatatgggtctccgtctgacattagtcgtcctttgatacatgcttgggacccgcanggtttagtccgggtggccaagttgcgtgtctggacccccttgggtcgcggttctagatactatgacacttgtcgcatggtggtggagcgtgtatgcccatggtacgggaccaagctgagcggctgcatgggctccggaccaccccaggagactaatgtccattctct

SEQ ID NO: 31291 - DNA, 255 bp, Zea mays
tattgtctgcgtttggtagacgatctctgcgctgacgagctccatgagctgctccatgggctttcgcgggtcgatcaggagattcgagccctacttcctcctcctgctcctgctcggacagctgaagccggcggtttgatgagaggtccgccgccgcctttgcattctcagggtcgaccgcggccaccacgacggctgccatgggtttcgtcgcaatcgcaaccgccatccctgcccattttgagagcaccgtgc

SEQ ID NO: 31292 - DNA, 255 bp, Zea mays
tggcaaaggtggcttcggccatgtctttcttggccgacgtctgactgccgcccacgccgcacgctccgcggcgtccgctgcccaagaggttgccatcaagtttgagcacactagcagcaagggctgtacctacggccctccagctgaatggcaaatctacacgtaagcggctcttcatcgtttgtgtctttcatcttccactatcaccaacagatagtactatgttattactagtgtccgtggttctaagtggct

SEQ ID NO: 31293 - DNA, 264 bp, Zea mays
  unsure (1)..(264): unsure at all n locations
aaagagaggctatatttatatactgcaactatccttgacataagaataagaaaattcatgctagaaaacctcattctatatctcatcatgcattatgtataaaaatgacgcttctagttctaggcataccactcatgctaaatngcctacaaagaaaattcctaatgcatcacatgagcataatatttcatttaagacattcgatgctccttatgtttaactaacaaatcacgccaagtagttgcagatatgttggggcaacac

SEQ ID NO: 31294 - DNA, 255 bp, Zea mays
tttacaaaagaatatggagctctcggcaacgaagaagtctgctaagccgaaaaaatgaagaattattactgtgactgaagccattgaagaaacaccaccgccagcttcggcgtcaaagacaccagctatcgagagcgctacagctgccgaagctacacctactgaagctgcaactgccgaagctgcaacggccgaagatgcaaatttagaaagcacactctctaatattgataaaatacttctggacatggccgc

SEQ ID NO: 31295 - DNA, 284 bp, Zea mays
tgacactcatagaataactcaaagcttcggcatgattgcattaaggggaaccgacttaaagatgaaaaggccattcagacctcgatagattactatagaattaccatcaaatgtaaagggcatgtatgtaattttgtatgggttgtaccccgtgtctataaatatgtgaacagtaccctcgtactgttcacgctgacttggcatttgctttagcatcacgcttgtactttcatcttctttcgagccgaaggtacatttgtaatttgaattcattttcatttttc

SEQ ID NO: 31296 - DNA, 358 bp, Zea mays
cacaagccatagttctctatatagcaacctctagtatatgaatgacaagaacggtactaatatcaggatacctcatgatatgaactaaaatacccttacatgcatcatgcataacatccatagtaaaaaagatgaaagaagcatgactatttaactacgtttacatggccagcttaattcataacatggtgagcgattaatgtataagactctcatccaatctaaacaagaatgaattcctcacatagtattgggtccatactttttgattgttgaatgcacactccattagagaacacattctcatgttggagactacaaaaccttcgataatacattatctcacactctagcatat

SEQ ID NO: 31297 - DNA, 260 bp, Zea mays
tgttgttcgtcgacttgcaaatcttcctttgagctagaatttgcaggaacaaaagatgatacatatcaaaagctcaaagaagagaatgagaggctaaagatgagcttgacacaacttaaagggaagtgcattgctcaaccttctcaagataaccgtgatcacatggtgaagaagcttgagacggagacaaccgtggcatgcactaaatcccttgaagaaaatgtcaagtacttagagattgccaagaggagggaacaaaa

SEQ ID NO: 31298 - DNA, 224 bp, Zea mays
gcggcgtcaaaggtaatattgtgcacttcggaagttttaacaattttctttggagttgtgcttgaaaatttgattgtctctaaaacatctagcacattaaccatcctttttcttttaggggtcactactggacctttatggctttttgttgcctcagtttttgccgaaggactcaagacttctgatgtctttacttcttcagccctcgtttctttcattttttt

SEQ ID NO: 31299 - DNA, 259 bp, Zea mays
tctccttgtcgtcttcaaccttgacatagaaccactccgacttccagcctgctgcccatttgctccggtagctgattacaggaaactttgtggttttccaataggcgaaattatagcaaccaaaattgtcatgcaatccatcttttctagccttcgtctgataatgcaattcgtgaactcggcaaaagctgtccgcaaatggctccaccgcttggcttcggagggcccagatataaacactaagtctaacaatagcgtt

SEQ ID NO: 31300 - DNA, 257 bp, Zea mays
ttttgaaggctatgctacgctttcctcttcacaaaatgttggtcgaggttctaaaaaggttcgaaatataccttcatcagcttactcccgaagctctaattaaggttgagatttttatctgggtagtaaggagtcagggtttggagccaaatgctgactgtttttgcaacatccacaaggtgttttatcaaataaaagctaccaaaaaagggcaatatcataccaactttggttgctacacctttgtatagtggtca

SEQ ID NO: 31301 - DNA, 257 bp, Zea mays
tgtggaggaccttatcatcaaagcatataagtttctggatgagaagtggtcacccaagttttgttgatgaagcaccagaagactaatcaaggaaggaatccatgtggaagttcgcaagagaaaggtttgcgtgttggcattgatgcttcttcaataagctagctgccaagcgaaacctataagcctgaagatgatcttgagtagccagaaccagcatttgcaatcagcaaccggatgcccctcaaaggccaaatttt

SEQ ID NO: 31302 - DNA, 257 bp, Zea mays
tcgggagcaggattctctatcttttcaggagcaatttgctctgccattttttcttcaagcgcggcaggctccgtctcgataggcactgaaggcccagcttcggcttcagcttgagcttgcgtagctttggcttctgcttgcctagtttcggcttcggcctgtgatttgactttagcttgaggaattttctttgcaggagcagggctcagtgcctttgtagtttccagcatggcatccagtacgttggccatccttct

SEQ ID NO: 31303 - DNA, 266 bp, Zea mays
tcagatagcctattctgtccgctatttcccggcatacatttatctctttattgtctggcagacaataaaggaaatcatcttcgtcatcgccaccatacaccaaggaccctcgggggtactttagatccttggcataatgctgcgtttcggcaatttgctcttcttataattgattcctcgaagcatgtcgcacaatgaattctagctctttggcaggtgctccaggagcaggagatttagatttctcagtggcaccctctttttca

SEQ ID NO: 31304 - DNA, 199 bp, Zea mays
caccgaaattcaaaccttcgacttgggagtatccctttggcacaagtcgagctctgtttcatatcaccacaccatgctcgtcttgcttggtgcggaagaccctatttggtcctacaacattttgattaggacgtggaactaaatgccatacctcatcgctagtgaagttggtgagctcctcttgcatagcaccacccaa

SEQ ID NO: 31305 - DNA, 255 bp, Zea mays
ttgctttatgatgagatggtatgaagctttggggtgcttgagaaagtcaattcaatttttgttgactcaagctatcaatcttcaatgatctatattcaagattaacccaaggttattttaatttgttatatcttaaactcatatcatctcgagggaagttgttgatgttgtaggaaataaagaattatcctatgcggaaaagtcaaagcctacaacatggaggaaagtcaaaggatggtaacacttatgttcttt

SEQ ID NO: 31306 - DNA, 119 bp, Zea mays
  unsure (1)..(119): unsure at all n locations
attgcgaaatagtttacacattatatcccaaactattcacctcaaatattattgacttnacccaacaaatgttacattaatcgcctaanaaccgttttacaataactactagtctttct

SEQ ID NO: 31307 - DNA, 249 bp, Zea mays
tcagttccatctatattatggattgcttttgagtctgtccaatttcctttggcccttctggcagcttcttgacttccatgaatagcaatgggcccttggttcgaaggtatcttcatgcaaagataagctggatgcagaattgcttcaaaggcattaagagtaccacgaccaatgattgcattgtaagggtattccatgtcaacaatatcaaacataacttgttcagtccttgtgttgttgataaatctg

SEQ ID NO: 31308 - DNA, 363 bp, Zea mays
ttcaattcatagaacgtacatattttggagagccatccacgactgtacttcataactatctatacacaagcttgataccatgaaagatccgatcccaagacgggggtgatattgcgctttctaataatcaacacttaattaaacctatgcgagagctatacaagagcccaacttcaccccacaactagcactaagaatataatactagaaatggtacaaactatatagtcttcaaatactgctaacaaatcacatgtaagtgctaataatgcgaatgaagcaagcaaaaactcctcaatttctgagatcaagatcgacctcactttctcttggaccccccaaggatcctccccttgtctgaaa

SEQ ID NO: 31309 - DNA, 260 bp, Zea mays
tttgaagaaaactttatatgaattgctcattggtagaaagccaaatatctcatattttagagtattcggttgcaaatgttatattttaagaaagggaagtcggctttcaaaatttgagaagaaatgtgatgagggtttccttcttggatattcatcaaatagtaaagcttatagagtcttcaacaaaactcatggtattatcgaagaagcatatgatgttgaattcgatgaaacaaatgggtctcaagatgagagtgata

SEQ ID NO: 31310 - DNA, 283 bp, Zea mays
atagagagacttaagaaatatcagcaacgattccataaccattatttgtaaaaactaaccttaaataagccacaacgcgacatggataacgaagcactaacgctgattaattaacaacaaaggatctaagataacacctaaaatatataataacgacattggtaatatgtctacaacgaaatgcaacttatacgaatgaacacagacgatgaaaccgctggccagacaaccgcacttttgatgcccgccagaaaaagttgcttacaaacccaaacgaaggacc

SEQ ID NO: 31311 - DNA, 259 bp, Zea mays
  unsure (1)..(259): unsure at all n locations
tatcaaagaaaaatttttctaaatnggagaaggtgttgaatgctgtcttaatggcctccaagaagcttcagcattattttcaagcattccatataattgttccttcatcatagcctctaaaggatatcatgaggaacatagaagctactggagggattggaaagtgggctgcagaacttaacgaattcaacattgattatgtgcatagatcctcaattcagtccgaggcgttagcagacttcatcgctggttggacgcc

SEQ ID NO: 31312 - DNA, 259 bp, Zea mays
ttggctagttgtggcaaggccactactggccgtagacacagttggtcatagtcgttgtccgactagccactaccaatcataagcatttttagagccaaacaactttcaatcatgttttctattatgtttttcgctgaagtacatatattgtgtgaatgttgattgttgtttcctctttatatggttgtgtgatcatgtagaagtcgacccgttagttaaagctcaatagcaatagttcgaggaggaaccctaacaattt

SEQ ID NO: 31313 - DNA, 250 bp, Zea mays
tgccaagccctctgacccggccggacttcaccggaggcccgagatcgacctcaccggacttcggtcttccgccgccgcgcgtggaccgagctatccagtgagtctccgaccaattccttgcacccatatcttctttggcatcccgtgaacctctctgacccatccaattgctctatctcgccgtgaccaggccggagcaatctcgtcgccggtaagcccctccgccctttcttccgccgcgattactgtt

SEQ ID NO: 31314 - DNA, 268 bp, Zea mays
tcttcagctactgaattatgaaaagctgctccccctacgcaaaggactgaaaaaccaactgcattgccgaagctaccttcagctgagctaactaagatgaagactgataagggtaaagctgaagaatcaaatattggagaaacaaaagtgtcagaaattttaagcccttcgacagaggtagcagtgccaaaggcacaaaaaattctgcccgaacttcccaaaaggaaaaggatggtaaacgtactagatgtgctagaaacagtgaaca

SEQ ID NO: 31315 - DNA, 257 bp, Zea mays
ttagcagattatttgaagctcaacagatgatgatgaagcttgaatatctagctgtggaaaaactctaagaaaactcttgtattaacccttataaagaatattgtaatcaaattctactctgtaaatttgtccataccttgtaatataattttaccttttcatcaatgtatgaagtgctttgatgtggacgaaacttgtttttttgagccgaaggtgaaaaaacaccttcccttcttttcgtacacaacgaagcataa

SEQ ID NO: 31316 - DNA, 250 bp, Zea mays
  unsure (1)..(250): unsure at all n locations
agtgtcgagatcagctctatcacaatctaccaactatagctgaccctctaacactctcttaaatgctattgaatcatcacttcttctaaagacagngacaccaacatcagtgaatagacagttgtagcccatttgacattattgagaaacggatagcaacgtgtaatctaatgaatcaacaagaataacattggaaatggaatggtcacgtgatatagcaattttactcaaacctttgaccaacccttga

SEQ ID NO: 31317 - DNA, 237 bp, Zea mays
taaggaggcatatactttatagccctgcaggacatagatagttaatttcattatctgcagttattaacacagtaccccggcgaggtcaaagaaaaaatatcaattcacacattgtgtaatgaattaagttgtgtatgatattttgtaatgaaactattatttttaatacagactgatttcagattatttggcatgtgtgagtctataaaagtttggaaattgaattatttgcaaatg

SEQ ID NO: 31318 - DNA, 178 bp, Zea mays
gtttcctgcctctctttattggtcagctcattttatcctctcattctcttctttgcactctctatatgtatcaatcgttcgtccctgcgaattctacctcaaagaaagatttgctcgtcgactgacaaccagcatcagcacatggatatgtatgttccattccaatacatgtgcatga

SEQ ID NO: 31319 - DNA, 258 bp, Zea mays
tctccttgtcgttatcaaccttgacgtagaaccattccgatttccagcctgccggccacttgcttcgatagctgatgacaggaaactttgtggttttccgataggcaaaattatagcaaccaaagttatcatgcaatccatcttttctagccttcgtctcataatgcagctcatgaactcgacaaaagctgtcggcaaacggctccaccgcctggcttcggagggcccagatatagacgctaagcctaacgatagcgt

SEQ ID NO: 31320 - DNA, 225 bp, Zea mays
tgtgaagattctttattccaacatgggctagtcggcgatgccagagccaacccatattagtcttagcaattaagcaagtatcgagttcagctgtattaaaatcaactaagtatagctgaccctctaatgctcccttaaatgctactgaatcatcacttcttctaaagacagtaacacctatatccgtgaaaagacagttatagcccattttacatagttgaaaaa

SEQ ID NO: 31321 - DNA, 426 bp, Zea mays
  unsure (1)..(426): unsure at all n locations
gctgcaagcttaaccctcgcagaccttccgcgcctctgtctatctcatggtaatnncattatcgatgtgatattctatgcatatttactntatttgttctcttgtatggggtactgtgtgtttcctaatttgaatggatggatgtatgtatgcttgccatcgcatatagaatgattcggtcgaggagcccgacaaactctcaggagaagcctctgagcagcagtcggttggtggaggcaagtgtccctcgacctatctctgtcctattcattctttaattcaccctccgcattacacatntatgcctaacgatagactaactttgttatccatgtccttgtttacctatttagggtggatattattggttagctatatgctattgctccactctaatcaatgaacatgatgagattatctatgata

SEQ ID NO: 31322 - DNA, 263 bp, Zea mays
tcggataccccatgttatccatcatttcatggcaaacattgatctccttactaccaggtagacagtagaggaaattatcatcgttatctactccgtatactaaggacccctgggggcacttcagctccttagcataatatttagtttcggcaacttgctctaccgatagctgttttcccaaagcatgtcgaacaataaaatttaaatcactctcgggaggtgcatcgggactagaggttgtgggtttttctagaaggctctct

SEQ ID NO: 31323 - DNA, 178 bp, Zea mays
taaccgcttcttgaaatataaaagtgcgctaaccctaagaggactcttttagacactttttgaaaacgtttccttgctatgctacagcaatttcaagattctaacactaagaagaggctataaaatgcatttacctaccctttaccttgcttgattccataccgaatataatgaatct

SEQ ID NO: 31324 - DNA, 254 bp, Zea mays
ttcttacttctactacagcgagtcgagcgtaggttgtcatcgacatcccatttcttaccacatgctggcagactccaaatggtaaatgcaatgttttccgctctacccacatactacatgtgcacccttaagctccttatctcaatagtcaaacaagtagacaaatatagaagacattgcttatggagaggtgcaaacatcaatgcgaaaaagcccctgtaagcagcgtggggattagcatgcaaacctaaaag

SEQ ID NO: 31325 - DNA, 254 bp, Zea mays
catatatacacttaggcataaaagagagatattataaaataaatagacaacctacattatccccatctaaaatatatctagtatcacatatctatcttatcttaacagaatctatcttatccttggagaatcatcttataagcatagtccacccgacatagacacacaacaacagaaataagctctacctacgatcctccagtttatgaccaactacgaggctatctattctgcgtactaaattattccccttg

SEQ ID NO: 31326 - DNA, 248 bp, Zea mays
ttgttcgtatttataaagaataatgttttaaaggttttctgaaaaaccagtttccactgaggaccctaggcttttcctaaaacaatcctttaacttatacccctgtgcaactattcacctaagtctccgaccattcaaaaacccccttgacttcttttccttctccccccaggtccctcccccttttgaacagtacccgcggaagtaaataaggcggcgcggcttaccaacggcgagggaggtccggc

SEQ ID NO: 31327 - DNA, 458 bp, Zea mays
  unsure (1)..(458): unsure at all n locations
gctcatgaagtccaaagtatctgttgcattcacaacggaatctattcttggtaatgaatattcatccttcagacatgccttgntgagatctgtatagtcaatacacattctccattttctgctagctttctttaccaagatggtgttagccagccactcttggtatgtaacttatctgataacaccggcacttagaagatctttcacttcatttcgtgcaccttcgactttatcatctgacagtttctgaagcctctgcttcttggtctcaaggatgggttcacatatagngagttcattggctgttcaaccaaaacatctattgtgttaacaaaatcttncaatgtctttctattatgcatagtgagacccatagacttttgtcactatgtctacacaacattgcttggtgactgcaacaaccttctctttatctattcgtgataactcactctata

SEQ ID NO: 31328 - DNA, 258 bp, Zea mays
  unsure (1)..(258): unsure at all n locations
taacactttngattgccctgcctttgctcttcctctttgtgggttcgacatatttggacaactatccctgaagtgtcccttctccccacatgcaaagcatcctctctttctttgctttttcctgtcaatgttaaagagaagatcctcgacttgcaggggcacacccattagattaatctaatgaatcatccccattacctttccaatgcgtcggactgtttcttcgtccttggaggatgatgttgaggcttgatcatc

SEQ ID NO: 31329 - DNA, 217 bp, Zea mays
tgtctctcggaatcttttctaaactccagtttgaagcctgcttcgtcagaagaaaaaacttcgaaagaaaaaagtattaaatttccacaaattcataattaaatggccagagtgcgttctaccgccagggttgagcgtgagggaagcgaaactgaagcttcggagactgttcccatctccgaagccatgcaacgatccgggctggtgactttacaaa

SEQ ID NO: 31330 - DNA, 177 bp, Zea mays
tgttgtacggctatttgtctatcttcctcagggctacattttgcatgatcgaaccatgagccataacaagggctcaactgggagaatgataagcttacgatgagcttgacaccacttatgtggaagtgcatggggctggccttctcaagataaccgtgatctcatggagactaagct

SEQ ID NO: 31331 - DNA, 192 bp, Zea mays
tatttagaggtttttttcattggtgtctacaaagccgccacacaaggtttcgccgaacctagagatcccacaaatcttgtaggagaagagtttaactatgagaaatggaatgctaaggccaaaaacactctctttagaggcctttgcaaagatgtgtttaatagagttagaaaccatagaaatgctcatgat

SEQ ID NO: 31332 - DNA, 268 bp, Zea mays
tataaaattgcctacttcttagagttgaagccatgccagtttgagtagatttgattttgtgaaacacttccaattcagtcagccctttctctcaattttgtcaacttcacttttgttttgtagctttgtatcttacttctacttcttgatgtgttggactcttagcatgtacaaagtatcttcaatatgactttgtaatgtattatatgggtcttataatgtcttatttgaggtgttgcatcctcagagcctcagtccaatccacttc

SEQ ID NO: 31333 - DNA, 370 bp, Zea mays
  unsure (1)..(370): unsure at all n locations
atttcgctttcgtcagaagagtagtactaatatttcacgctctgtaataaaaatgtgtagatacaatgcataagtatattacacagattgttactaatagacactcacgcatgttccaagatattcttaccaaaatagttatcactctttaccttatatatgtctagctatttcatgtaaagcttcatccatagctttcgccattattntgtgtgcaacttgtagcatggattatcatctttaagactcatatcattctcatgtatgtatgactcaggtagaggcacaagagcagtttcacaaagaatcatattatatacatgacagttttctatttagtatactcaagttatactaaagttttaaatca

SEQ ID NO: 31334 - DNA, 257 bp, Zea mays
tttgtgtcttttttttttagactaactacacagaagaattgttaattatgttaattcaaaaatataagttcactttagatccactatgaaaaatacatatataatttacaattaatatgtaataattactcttaaaattgatggtcgtagataatatttgactcaggattttataaaatagatagtcaaaaatcaacttaggataaagctaatctctactaactattaagaagttaacatagaccaaaaacgtgccc

SEQ ID NO: 31335 - DNA, 254 bp, Zea mays
  unsure (1)..(254): unsure at all n locations
tgtgagacataattatttttgtagaanagcaggggaagcttattggctatctccggggactccattttccttacaatgagactactacatgaaataaacttgaaaactggtgttagtatcaaagacttagataatagagtaacctcttcctgaaagtgtgcatacaagttttgaatacttgtaagaaacatgcactttgatttgatatcaagagaggcaaattatctataatccgaactttggcacatatagtt

SEQ ID NO: 31336 - DNA, 229 bp, Zea mays
tgtctcttcctcttcatcctcatttgtgcttccgctatcattttcattatccacacaacatatgtgggaatcaaaatgggaagacaaaccttttggagaggtggattcatcgtttggtctccatcgttcattttcttcttctcccttcaaagggttagtctcacaaataccaaaagaagtggaagcacaaaatgaactgttatgtttggactcatcaaaattgaattta

SEQ ID NO: 31337 - DNA, 200 bp, Zea mays
tacctttagtcttatgtaactaagcgctagaagacttttaaaaaggggagaaataattaacaaaaaggggaagtcattagaaaaacataagatgaagaaagttgataagtgcattccatgtcatgaacatcacgtttattttatgacacactgcaccctatgaatagtatgatataagttgtctatacttttgacctaaa

SEQ ID NO: 31338 - DNA, 214 bp, Zea mays
  unsure (1)..(214): unsure at all n locations
cngattctttttttatacatcgccatatcactgggtgtcaagagactgatggtatatggagattctctggtagtcatcagtcagataaacaaggaatgagattgttcaagtgattcaatgggaaaatactgcgctgtcgtccgaaagctagaagataaattcgagggtctggagtttcatcatatagaaagagatcggaacacggcggccgatg

SEQ ID NO: 31339 - DNA, 230 bp, Zea mays
tagatgaaaattttatcttaagtttgtgatcgccgttcttgattcgcttggtagctgctgctatacccttaagggtaccacgcccctcctttttgaagactccatcgttatctacatatataccaataacatatgaatgggtagaaatatccacagttgaagattgcaacatttgaataaaaaacactcttagtaaaatataccaggatctcttttcctatgacgtctac

SEQ ID NO: 31340 - DNA, 258 bp, Zea mays
tgagttctcttcttcctactcacctcaacaaaatggtgtagtggagaggaagaatagaactctactggacatggcgaggaccatgcttgatgagtacaaaactccggaccggttttgggctgaggcgattaacaccgcctgctactccatcaaccgtgtaacacccctggtgttactaccactaaaatttgagcataacatcataagcattggcatatcatgtgtttatcacacctagagcgcattcactaggcaaaa

SEQ ID NO: 31341 - DNA, 258 bp, Zea mays
tgacaacatcaaattcttctttaccaacattgagatcacgtctcagttttgcagcagcatccacttcaccataccaatcagtaaactccctgcctcctccagcacatggcaaacccaaaatcagatgaaccgtatcttttgttatcttcagtttcttgccagcccctgggcgtatggtcatgtcatgtggatccaatttatccatcaaccacctgatgagtgatatgctctctaaggcatcagttcgcaaatcaaata

SEQ ID NO: 31342 - DNA, 253 bp, Zea mays
tcccattcgccttgttgactatgactgggttggccagccatattgggtgatgaacctcttcgatgaagccagcgtctagcggcttcctgtcgttcaacaaactgtctgcaaggcttctgactcaccggtctggcgtcggggctgatcttcaggtggtgctcgatcacctccctggagatcccatgcatctgcgatggctcctatgcaaacacgtggacatttccctgtaggaaggctacgagcccaatttcct

SEQ ID NO: 31343 - DNA, 259 bp, Zea mays
tgtagaggattttattaactttcccaaaaatggattttggggtgttacagaaatctgataccacttgatattgttgaggtgcccgatctttcggtgattggagataattccgatttggcggaagatgacccttgcgatccgactacgacaagcaagcccgaggcgccaatgcaatcgctgaaccaactccctgtggttagtgaccttgctgatgcgagatcggcctaatctcataatggtgtaaacaacctcctgtaaa

SEQ ID NO: 31344 - DNA, 265 bp, Zea mays
tgtggaggttctttatccccacatgtgctaagcggcgatgccacaaccagcccatgcaagtcttagccattaagcatgcatctagaccgacctcttcttttgcaaaatcaactaagtaaagtttgccgtctagtacacccttaaaagctagtgaaccatcacatcttctaaagacagacacatctacatttgtaaataaacaattatatcccatattacataattgactaatagatagtaaattatatccaagagactctactaa

SEQ ID NO: 31345 - DNA, 384 bp, Zea mays
  unsure (1)..(384): unsure at all n locations
ttttatcaatgctctctgggaggttaagtaacagttagcaggtaatcaatgacagctttttcctatgataaaagcaggacgctttttgggaagatgacgtactagttatctaaacgaatgattgtccctttgaccttctattnagaactctcttattgcgctttgtcctagcctagtagctaagacctatactactgacatatatggagtacttcgacaaagagagtttacaactattgatcttttaagtagttgtgcatattatatggtcacagtcgatgagattatgatctcttcttttctgtaataataatatgccgtacatacatagatacaactcaaacatacgccacggtctcagtgatatgagtggtatgttaccct

SEQ ID NO: 31346 - DNA, 247 bp, Zea mays
tatgaggattttttattccaacatgggctaatcggcggtgccagagccaacccatgttagtcttagcaattaagcaagtgacgagttcagctctatcaaaatgtaccaagtatagcggaccctctaacactcccttaaatgctattgaatcatcacttcttctaaagacagtgacacctacatcagtgaatagacagttgtagcccatctgacataattgggaaacagaaaacaaattgtaatctaa

SEQ ID NO: 31347 - DNA, 308 bp, Zea mays
ctcttgtgagattacaatcaaggtctgtgggctactattatgacaaaaactctttagtttgtcacacaaatgtctttctgacactatggcttggggcacaaaagcatcacatcctaagtgatgccaccggttgaagtaccaatgaacctgtctccagatcaaatcactccgcatactatgatctctaccatgttaatacattaagagtatattaaactaaccttctattatcagcccgataactgcccgaataccaccagcatgcgggagcgtgctacttaccaaatccgactcgaactccccctttt

SEQ ID NO: 31348 - DNA, 256 bp, Zea mays
tcctcgcacacagtttttgttctgtttcatcattcgttctccttgagtttcttcatacagcaattttgacatgtccgaaggtacctgttcatgtattacactccagaaacattgtcaaatcacgtttttgaggaccttctgaagccgaaggcccccaacaagcggtgaaagacgagtgttaggtcttcgctgatggaccaaagcagccgggtgactagccatggtggctaacacctaaaacacacactagcgcgag

SEQ ID NO: 31349 - DNA, 266 bp, Zea mays
tcttctaaagggagtattacattttaggattaacaaatgttcattttgagaaaaacaggatttgtagcgcaagccaagcagggaagcaagttggttcccatcatccacataagaacatcatgacgactgataggccactggagctcctacacatggacctattcggcccgatagcttacataagcatcggcgggagtaagtactatctagttattgtggatgattattctcgcttcacttggggggttctttttgcaagaaaaatc

SEQ ID NO: 31350 - DNA, 262 bp, Zea mays
ttgataccaatttaaagtagcctagagggggtgaataggctacacctgaaatttttcactaaaaactttgagataatgttaaattcaagttgcactggtgcaaactggttcagctgattttgtttacagctgaacaagtttgaacctgctcaacttagattagataaacagttaaacaagtgtgacaaagtaatgagagatttttgcttaagacttgccctatagaaaatccactcgaataggtgacagatcggtgtgaatt

SEQ ID NO: 31351 - DNA, 264 bp, Zea mays
tttaacaatttatatggaagggtttacaccatcaaaaacagctttgttcctagtcagccataggcaccaagaccccaagataatgagactgttgaagcctttctttctgtttttgggcaccttcttaagcaccttcctccaccaatcagcaaatgagatttcatgaacagcaggaatgagatccccaagacacaagggaacaagaatagcatgccaaaattgcctggcaaaactgcaagtacacagaagatgttgcactgtttc

SEQ ID NO: 31352 - DNA, 253 bp, Zea mays
tgagaaaaaacctggttgcttccatcatgtggtgagctattattacctttaatttagccaagcaaaggtaagttaaactcatgattcctgtttcaggtgcaatacactaatatcaaagacagatgcacaatttttccattgtcatcgagtggagttgacttgagacattgatattaacctgtaaaaccctacatagcatgctttcgtttccgtacataacattcaggatataagagaattttgtttttatggc

SEQ ID NO: 31353 - DNA, 468 bp, Zea mays
  unsure (1)..(468): unsure at all n locations
acactttatactaagctttacttctacatgctttatgtcttctttcggtggtgatgcctaaggggagaagtttangggccaaagcaatgaatactatatcatacaccaaacaccaccaatttaaaattttatatcttaaaatggctttttaagtggttttggttatttggtccaaaaataagaagtaagtgaattatggagttagggggaggcttaagtccataatatcacattgtggggacaatcatgcatcttagcaagtagattgcacatcttcattcaaatacttgtattatttgcttgctttggttgtgttgtcatcaatcaccaaaaagggggagattgtaaggaaaatggaccccgggccttttggctaattgagttttagtgtttgatgaacaacacaatccgtgaactaataagttttctagtggttggtgttgtagttcacaggatgcgaagagaatt

SEQ ID NO: 31354 - DNA, 365 bp, Zea mays
  unsure (1)..(365): unsure at all n locations
tattcatatgcttcttgcagtattatatgtgttgcatcatatggactagtgcttccgctgctatgaattaattggcatctactgtcgtcattctgaaatagacagacatgtggataataatgcatgtggcttatggtgcttaagattgctctaaattaatatctgagcttaaattggtatcttaatggtgaatagtggtaggttgatattcctgtgagatatccactaaattgaatggtgtttaactctgattatgtgcacttgtgtgttatagcatcatggtttgatctttgacacaatgcattcacaaaagtgctaatgtgtagaaatgcttcaaatngcctaagtatgtgcaaattggcata

SEQ ID NO: 31355 - DNA, 291 bp, Zea mays
  unsure (1)..(291): unsure at all n locations
acaatagaatctattctnggccaatgggaatacattactccggcatgccctatagaaatctgtgaatcaatgctcattgtacaatatccattaactttcctcaccatcacaatatttggccaccactctgggtatgtaacttctctgataacaccgacactcagaatccttttgacttcctttcatgcacattcggctgtatcatcggacactttatgaagcttctgctctcttggcctgatggccacatctacattgagtgagtgctcaatgactctctattgacacaac

SEQ ID NO: 31356 - DNA, 234 bp, Zea mays
tctcttgaatcttggggaattgaactccctgaagtacctcataacaagggtgttacatggccttcttctgctggtgctgcttgaacacgcatcaaaaaaatgactggcacggggttgattctgggagaaccctcttcttaacttatcttcactatcttcttttcactgaccctttctttctctttgtcttcccactggaggattctatcaaagaatattaccatcatacattgg

SEQ ID NO: 31357 - DNA, 414 bp, Zea mays
ctacatatgttccaatctaccgtggccaataggatatttcttgcccatactgtggatcccggtttgctccttccatctaaaggcagctttgtaccatatgtgagcttgccatatatggggcagacgcctcatgcctggtctgctcccctacgcagatgaagtagacggtaggtctcctatattctttctactgtcttaaagatcttagactatcatatattttacatggaagttcagcgattataatgaataagtatatatatgggtttaccaaaatgttctttattcgttttatggtgcctaatctgctgatatcacttgctatatgctccaagagtcatgaactgtgagtgacccatggatgctatgctgcgtatgagatgtttctttacacattacaatactttggctatc

SEQ ID NO: 31358 - DNA, 487 bp, Zea mays
  unsure (1)..(487): unsure at all n locations
ctttatctagcttacccagtaaagaacacatttgcgtttagcccctagttttgtataataacaattccgagattcttagtttagaaattaccgaagagagacttcgatgtatatgtgtagtcgtaaacaagcctcacaacgatattntgacaggtgtatgaatttatatttcaaaaaaaattacgtcactagtcactacttggtgatttttatagacgtttacgattagtctcgctttagcacataaacaataattgttagtagtattttaagtataattgtatggatataaagaagtataagaaaacactaaaccacgtatttttggtcaaatgaaaataggttttactagtcataataaaggtattcataagtatagcacttaattacttagaattaataaaacacctattcatgtcataataatcatgattatgttattaaaagtccaattagtaatgtacattaattcttagaatattaatgg

SEQ ID NO: 31359 - DNA, 374 bp, Zea mays
tatatacttgtccatccctcgtaagaatcacagtaaaactgtgaccagtagcaacctgtgaaaaagtaataacatagcatctgatcacgaatacttaattacagaggaaagatgaaagatcttaatggctcagaacaaaatctaggcagcccatggaataaacagtatagaaaacggaatatagataagtgtagataacaactaagcctcaaaaagctcatcccaataacatatagatacatataaaatggtgaatgagtgtgtctattgttcaatagaaagctgatttaatatgtaatcaaaagtatgaaactgaagtaccagcaacgatcatatgataagaatcactcgcccgcaaaagacaacaaaagaaa

SEQ ID NO: 31360 - DNA, 468 bp, Zea mays
  unsure (1)..(468): unsure at all n locations
atactatagcctgacaacaccacaacattntacataagatatgtgagatcaagatattnttgttcattcctcaacatgcaaaagcgggtcgtatccagtggcttaatgaaaatatccgctaattgatcttccgacctcactccttctaaaatgatatctcctttatcaacatgatctctaaggaagtgatgacggatatcaatgtgcttggtgcgagagtgttgtacaggattattatcaattgtaacagcactctcattatcacacaacaaatgtaccttttctagaactacgccatagtctagaaagagtatgcttcatataacaaaatttgtgtgcaacaagcacctgcggcaatgtattccgctttcgtagttgacaaggcaacactattttgcttttttgatgtccctgaaactagtgatctaccaaacagatggcattccgcacaagtactgtttctatcaa

SEQ ID NO: 31361 - DNA, 447 bp, Zea mays
tcgcatctctgaactaactcggctgcatcgttcttcgtcgtctgccaatataatcctgacctgaataccttcccgactagtgttctggatgctgcatgtactccacactgccctgcatggacttcctccacaagttgcttcccggtggacgggagaacgcatttcatgaggacgcctgacgcgcccctcctgtataatacctccccaatgagtgtatagtgagcatgatgtctggcaatgcgttctgccgagttcttgtcatctggttcttcttcattctttatatacttaataatcggctgtctccaatcgtcagagtctgactcaggttgatctatgatgttgcactcttctatttgatccgtcgagatactcggttgtggtatttcttgtacaaagactccgggtgggacctgagttcgactggatcctatcttggacaataca

SEQ ID NO: 31362 - DNA, 343 bp, Zea mays
atacaatagtaatggagcccctggcacaagtggagtcaatgttgacataccaatcaagtatggcttcagctcttcgaaagctttctgttgagctgggccccatagaaagacttcggctgacattactattgcaaagaatggcatgtgtctttctgcatgaactatatatgaatctattcaatgaagccagtcttcctgccaaccagtgggacccttatttgagcttggcggatccatccgaaggatagcatcgatcttgcttgggttggctgcaatccccttcgttgaaactatacagccaaggaacttaccctatttcactccaaagacacatctttatgga

SEQ ID NO: 31363 - DNA, 409 bp, Zea mays
aataagctcatgaactcttatatggtcgctgcatccacaatataatccattcttggtaatgggaactcatcctctgggcatgccttattagtatacttttctgacaatatctgataacactcaaaggtatcttcatgcaaagatatgttgggtggatgtattgcttcaaaagtggtcaacgggcctctaccaatgattgcattgttgggatactccacatcgacaacgttcaatacaacctgttctgtacctaactccttatattgtgaacatactccgaaggttatcgtcatagttattctgccgagcgccacactctgtcttcctccgaagcccgctagggtgtgtgtccatcatgtatcttgtagccgactctgcatttgctaaagcacttgatgatgacgtctgc

SEQ ID NO: 31364 - DNA, 478 bp, Zea mays
  unsure (1)..(478): unsure at all n locations
tctggataagttntattacgaacatatgactttagctgtcctatgttcctacaacacaaacaaaataactaaattattggattgaacaaccaaaatatttgtataacgaatattgttaccatagctcattagtacctctcaatataatacatccatcgataattgacaggtccagcaatcttacattcagccacaagatgaactatttaatgaaccatcaccgtgaataaaccaggaggaaaaaccatctccatnttgcatagagtaataataatagatttttccaaatggtccaactcatcgacacggagaacttttgaacatatccctcgaaaatatgcagacaactcanacagtagtgttgtaatatcatctggaagaattccccttgaagcaatatgcataagtngttgcatcatgacatgacaatcatgagtttttagaccaacaattttcccttccgcaacattaacacatg

SEQ ID NO: 31365 - DNA, 276 bp, Zea mays
aaattgggtctgataattccctgtaggcacaattcctcctcatgataaaaatcctatgtttacataaatttagtgaaactagtgcagccagacctatctatggctaacccaccaacttactccatagcatgagctgacggccattccgaaaccatacaaaaacataaaaactggaccaagatgccggcatcaagctgggtataatcccctcgatacctacatcccgggcgcgcgcacgagctatgtgaccctgtaaccgtataaaactcccacctt

SEQ ID NO: 31366 - DNA, 347 bp, Zea mays
  unsure (1)..(347): unsure at all n locations
ccctgctatcttcgcggggaagaataatatcggatggcgattgggtcccacgttccatctgctcataaaaaaaaataatagaagcgttgaaatgggccgcgcgccttgaatctgaccaatggggagctcgccggcatggattgcttccttggccgactggagattttggtccaatgcgcangtgaactactttcttttttttatttcttttctattttgatttctaagttctttctataaatttaaatctggtttcaaaattcaaacttaaagtgattataaaaaccaaaagaattcaacatgacatgcatatttatttatttattttattcgcatcattttaatgc

SEQ ID NO: 31367 - DNA, 360 bp, Zea mays
tgaatgcagatcttcctggactcggccgtgacggctgaaactcaatgcgagatgctggacaacattgagacgcacgtgtggtgatagatgctttgtcactcgatcgctatttttcctgatacctgcaatcacctatttcgttaaacattaatcaaaagggaaccagccatagaattgttattgttgacttttttctgacttttggaatatctgcactcaagtcacaggcgcagctgaacatatatagaccggaacaaaccctctgcagaaagcgaagaatccgcagaagaacacaccaaaatggacctgcataggcataatcatcctcctcataacattctcatcattatccactccttg

SEQ ID NO: 31368 - DNA, 448 bp, Zea mays
  unsure (1)..(448): unsure at all n locations
ccgcattngaagcatgagcgcttccacttggctttggtctttcttggctgtcccttgcgacctttaagcgccgtcttgaatctcttgatgatgagggccatctcttcatcattaagtccagccgcctcgatttgtgccaccttgctaggtatcgcctccttgcttcttgttgccttgagagcaaggggttgcggctcgttgatcggaccattcaaagcgtcgtccacgtacctcgcctccttgatcatcattcgcccgctcacgaattttccaaggacttcttcgggcgacattttggtgtacctggaattctcacgaatattattcaccaaatgaggatcaagaacggtaaaagaccttatcatcagtcggacgacgtcgtggtccgtccatcgtgtgcttccgtaactccttattttgttgataaaggtcttgagcacggtatatg

SEQ ID NO: 31369 - DNA, 349 bp, Zea mays
gtggcgatggccgacctgctgggcgacttgtgcgcgcgcgaccccttcccggatgagatcgagagccaatttggggagaatgtgctgggcaacgtggacacgctccaccatatcctcattcccaccctctccgcgctctccctcgcgagcctcccgctgcagcccgacgcggagccgctctccctcgacgacgcgcgcaggctcctcttcaaggtcgtcgggtggaggctcgtcctctccgacggcgacggcgacgagcagcgtcccgcgcggctgcattgcgtctggaatgtgcgcgacaagacctgcggccatgagctcatctgcaggatcaacgacgcgcttcacg

SEQ ID NO: 31370 - DNA, 393 bp, Zea mays
  unsure (1)..(393): unsure at all n locations
aaacatttaaaacaatacaacttgtttgaaatatttacctnatgaatgcactctaagtgtgtcaaacatatgcaaatgctaatgtttatgatgtcatgctcaagttttagttatagtaacaccaggggtgttacatccttccccccataaaaaaatctcgtcccgagattaaaaatcctatggtaggtaatggtaaaggaaacgcatcacatttttatttccttaattttggtacaaggcatgggtgatgtgggggtcacttctttagtacacagctatacagactttacaatntacatgaggctaanaagcctgcgaaattcttttctagaaaatcttgggtttaccatgtagcctcatcttcagaatgcatggtccactgtatcttgtaaa

SEQ ID NO: 31371 - DNA, 344 bp, Zea mays
tcttatcaattaagcaagcgtagagtttaactctattgaaatcaactaagtatagctgaccctctaacactcccttaaatgctactgaatcatcacttcttctaaagacagtaacacctatatccataaaaagacagttgtagcccattttgcataattgaaaaacagacagcaaattgtgatctaaagattctacaagacaacattggagatagaatggtcaggtgatatagcaattttacccaatcctttgaccaaaccttgatttccatccccgaatgtgatggctcgttggggatcattgtttctctcgtaggaggagaacatcttctccccagtcatgt

SEQ ID NO: 31372 - DNA, 201 bp, Zea mays
aattatgaatgctataaagactctcaaagtgccatacctcctatgaaattacttgaatagtttactcgactctgctaaaatatacacattagccggttttctgatttgttaaaagcaggtgctttcccctactgaactacggacttgtttgtaacacccacctgagtggttcgtgcaatcatttacagacacccatttgtc

SEQ ID NO: 31373 - DNA, 429 bp, Zea mays
  unsure (1)..(429): unsure at all n locations
ttgacgtcaacctgctgaaaaattatatattgttcagattaaatntcgaatataaatcatgaccaacaacaaatagtttagttgtctgttccaaaacaagtaacctaataggttacctaacatcataattatataaatgcagcacatctttactataacagataaactgaagtatgcaatcaaatcagatataatgcgtagtagacgacgctggtagaagcagcaaggtcgacaatgtcaaagtagcatggtcgacgacgtcgtaacagtatgatcgatgacaagatcacgagcagtcgtgtgagaacgcttcccaaaaatcttattcgccctctcccgatgcaggacctcgaagtcgatgggtttcggagacccgctctcctgatcgcagatacacatatgtggtcgggatgaagagaactacgatga

SEQ ID NO: 31374 - DNA, 367 bp, Zea mays
tggacgtgaagagtgccttcctaatggaccaatcattgattatgtctatgttgagcaacctcccggctgtgaagatagtgagtaccctaaccatgtttataaactctctaaggcgctttatgggctaaagcaatccccaagagtatggtatgaatgccttatagatttccttatagataatggcttcaaagtcggaaaggccgatcctactttattcactaaaactcttgaaaatgacttgttcatatgccaaatatatgttgatgatattatatttgggtctactaacgagtctacatgtgaagaatttattaggatcatgacatagaaattcgagatgtcaatgatgggggagttgaagtacttc

SEQ ID NO: 31375 - DNA, 243 bp, Zea mays
gccgaccctaaagcacaccgtgccttcatatcacgacccatatatttgaaccacattaagtccaaacattttttaacataatgacaggagctctgtctttccattaagaaaattagaattgacccagttttaaggaaaactgggccctaaacctacacagagtgcccaaacaacacatgcaacaacaaccccacacacaaagcccatccggactccagagtcatcattgccgagctcaacaca

SEQ ID NO: 31376 - DNA, 469 bp, Zea mays
  unsure (1)..(469): unsure at all n locations
tacttaagcttcggaaaatgtttgaagataaagccgaatgtgctcggaacgaagttttagtcttctcagtgctggtgtcatcagagaagtgaaatacccagaatggctatccaacactgtgatggtgaagaaggccaatggttaatggagaatgtgcattgattntactgatctgaacaaagcttgtccaaaagatgagttcccattaccaagaatagattctctagtagatacaaacagcttcttcagagctcatgagtcgactagattgttattcacgctaccatcaaatttggatgaagaaggaagatgagccaaagaccagcttcattaccccctgtggtacatatagttatctctgaatgcctgaggggctcaagaatgttgttagaagcttcaacatgatgacagccagggttcttcattcttatatangcagaaatgtgctaacatatgttgatgatatcat

SEQ ID NO: 31377 - DNA, 353 bp, Zea mays
  unsure (1)..(353): unsure at all n locations
gaagctctaaccgtatgttagacatctctcgcaactcgatccaatcagaaattgtcgttcaaatttgttggaccttacacagctactacgcattggtgatgttgtattcnaattacagttacctgacagttccaacatgcatctagtctttcatgtatctcaattgaagactgtgttgagcagacatcataaactaattcctcaactgccagatgatgctaatgtactttatattccagctcaaattcttcagagtcatatggtgcagcgctggaggctcttttgtggaacatgtgctggttctctggtcatggttggatgcttcattagcaacatgggaggatcacgatgct

SEQ ID NO: 31378 - DNA, 425 bp, Zea mays
atggataaacacaacacaagagatgacattatttgcacatgcactattttcttatttagtcaccctttatatgtggaaagcatgcgagttggtaaaataaagaaacctcataatatggactaaatttcccttgagccctcatgcacaatatattttgaatgacatggataatatgcatggttgttcaatgaagtctaaagggctaacatatacatattatggcgagtgtctaataaagaagaatcaaatccaaattaactagatagagaatacgtcacataattttggattgtcaccatatgataatatacattcatctttcaatttgacctttatcaacaactgatgtatatcactcaagtgcttctttttctttagtggctacacaagtcacaaaaaatgatagaattgataatcatatgcac

SEQ ID NO: 31379 - DNA, 389 bp, Zea mays
  unsure (1)..(389): unsure at all n locations
ggagaatgcctaatttttaagatattaaaatacacaaataaatcttctttatcattcatatcatttatagtaattataatttttggttttctgttcttcatttatttaaacacaacaaaagtatgtaacttatataaattatactctaaatgtatctcatattatataaaacggtattatcatgactcgtaaatggaaaatacgaaaataattgaaaaactagctaaatcgtttccgtatcatttttaatcgatttccgaacagttcaaaaatgtataggtaaaaacggtatgcggaatgggacggtacaaattcaaatgagcatatattttntagattnttcgttcgtaagtacaccatgaacgacgcgggaagaaattcccacatca

SEQ ID NO: 31380 - DNA, 442 bp, Zea mays
  unsure (1)..(442): unsure at all n locations
tataaaaggtgttagtctcacagatactagtttatataatgaccccctcctaaaagtgtgcatacaagttttgaatacttataaaatacacacacttggacttctatggtcatgacaccacataaatgataattgtatgttagcattactttatgtcatattaagagtaagtaatctataatttggactttagtacatataaaccataatgatatcaccagtagaatcgaagaaccacctcgtaaaattttgatatcatttatttataactttgaagagccatgtgccatgctcctaataattntntaaccatataggtctactccatggtatgattgagatcgaacaatcctacgatatgattgtcacagtgtatgcatgcttctttatacaattaaacaagatccatatcaaactggattcacatgcaagataacactga

SEQ ID NO: 31381 - DNA, 460 bp, Zea mays
  unsure (1)..(460): unsure at all n locations
tatactngaaagatatgttctcttggcataccgactccacctacccgaaacattgtctgttgtgcataatgtgttccacgtgtcacaattgaagaagtgtcttcggattcctgatcgaaccgttgaagtgacagatgttgtccttgaaccggacttgacatattctgagcaccctattcgagtcttggatcaaaaggacaggattacccggagaaaaactctcaagttttataagatacagtggaaccagcattccgaagatgaggctacatgggaaactcaagactttgtagataagaatttcccaggctttttagcctcttgtaaactgtaaagcctgtataactgtgtaatacagaagtgacccccacatcacccctgccttgtaccagaaataacgaaataaaagtattccacgttaccctatgacttttaatctcgggacgagaatcttttatgg

SEQ ID NO: 31382 - DNA, 394 bp, Zea mays
  unsure (1)..(394): unsure at all n locations
atcaagtggctgggtaaagatatcggctaattgatctttaatattaatgtaagaaatctcgatatcccccttttgttggtgatccctaagaaaatgataccgaatggctatgtgcttattgcggctatgctcgacgggattgtcggccattttaattgcactctcattatcacatatcaaagggactttggttaatttgtaaccgtagtcccgcaaggtttgcctcatccatagcaattgcgcgcaacaatgtcctgcggcaatgtactcggcttcggcggtggaaagagcgaccgaatattgcttctttgaagcccaagacaccaatgatcttcccaagaactggcnagtccctgatgtgctcttgctattaattgtgcaccccgcccaatcg

SEQ ID NO: 31383 - DNA, 320 bp, Zea mays
tgttgtgcttaacattcatccacccgatagtttttgacgccaagatggttctccgcagccaatacacatttaaatccttttccctctcggtcttctcactgaatcctaaacacaacaagagtgcacgggcctccatggcccatatattatggacatgaactcaagagtgtaatcacctgaaggttgatgtgaccatcacgaacgcgatttatgggaccagaaatttggacatgtattggtatagatgcatacaaagtgtggatgtctctatcaaacatgcccaatccactactttaggtccaaaactcatgtttggggag

SEQ ID NO: 31384 - DNA, 367 bp, Zea mays
actcttatcaactcaagctatcaatcatcaatgatctatatacatgattgacccaaggttattttttcaaattgctatgtcttaaactcatatcatctcgaggaagatattatatgttgtaggaagtgaagagatatcatgtgcgaaaaatcaaagcctacaacatggaggaaagccaaaggatggtaacacttatcttttaagtgcaagtattttagaatatcatttcttatgtgtcttgtgtagtcacatagaaaaattgaagcacttcatatgcctttaaatttatattaccattctttgaagaatttcctatcatatggtagattgcatactcatcatttccatcctatggcaatctacatgc

SEQ ID NO: 31385 - DNA, 387 bp, Zea mays
tcttttctggtgcctatgtattggttctctgccgagtgctatggccctgacactctgcaaagcacctctttgccgagtgtaacactcgacaaagtgaccaatatacacactttttatttgttttttctattccatccaaacaaacaaaagataccacatatacatcacagatatcacatatacatcacagatattatcacagacataagtatgcaacacacacataagtatctaagttctcaacacaaacataagtatcaagaacataagtctcaagttctcacataagtatccaacacaaacataatgttccaaacacagaattaacaacaagttctgaagtctcaagtatctcataagtctcaacacttagaacaaaagtctcat

SEQ ID NO: 31386 - DNA, 197 bp, Zea mays
tgatatttggatctcctggctctgagttttgataaacagacaatgcatatgatctttgggaagaggtctgaaattcagaaattcagaaatctgaatttctccaaggggtcatagatcaagggctgaattggggatttatatgagttattttggctaagctctctcaaactctcttggtgctgaataaacatactgta

SEQ ID NO: 31387 - DNA, 345 bp, Zea mays
tactgtctgcttcttcattgtttctatatatttaattcaagagcatatagccttcagagtatggctgcttgtagagaactgggaaatgccgaagaagactgtcaccaaatctatcgaaggtgacctattccggctgaagtatacattcagatatggagataaatttgataaaccaaacaacgattggctaaaatgtatcgaagctacaagtgatgaactgcttggatcatattccaaagcagaagataatgcattatccacagccttcggaggccggggaaaaaagagattgaacagagtttttgatgccattggctttgcttacgtcgactaccgctatccact

SEQ ID NO: 31388 - DNA, 423 bp, Zea mays
  unsure (1)..(423): unsure at all n locations
gagtgggtgataccctgatgcttgggattgccataaattatacacttgggcaaaggcctcttcctaccaccacgcctcacacggacaaggtacacaacataaccctgaagatgaattaccacaacacaacgtcaaataaaatcatgacattggtactcaaactgcaataattaaataaagtaaacaagactaacatatcatactacgtgtctaatgctaaaaaagcatacaccaaataattcttccagattatacaatatttaggctattttatattgataactttngctacgcatctagatatggtaaagttacgaacctggagatgccataacatgttatagtttggcacagaggacgtaacatattaaggcatacatatcagacagttgcataactgcaacaagaccaccgtgtggcaat

SEQ ID NO: 31389 - DNA, 402 bp, Zea mays
  unsure (1)..(402): unsure at all n locations
ttcatccncacatgtgctgaacggcgatgcctctttctcccatgctagtcttagcaattaagcatgcatctatactggcctcctctttcgcaaaatcaactaaataaagtgtgtcgtctagtacacccttaatagctaatgaaccatcacttcttctaaagacagacacatctacatttgtgaataaacagttatatcccatattacacagttgactcacagacaacaagttatatccaagagactcaactaataacacattagaaatagagtgcttggatgaaatagcaatttttactaaccctttcaccttgccttggttcccatcaccggatatgattgaatcttgnggatccttgttcttgacgtaggaaaagaacatcctcttttcccacgtcatgt

SEQ ID NO: 31390 - DNA, 358 bp, Zea mays
aaatttcaacttcgtcaaataacaagaaattcaatcatcagatggctatggtacgctcaacagctatggttactcgcgactgagatgaagccaaatgtgccgaaaccgctccaatctctgaagtgatgaaatggtcacggctggtagtatcaaaagatgcaccttccgctgaagctgagctggttgatgctgaggaaattgaatctaaagatgattacagcgccgtgccatctaaacccatccacctggagtttgggaaatccaccattaccaaaggtgatatgtctaaactgatgaagttaggctatttcagtgaagcaaaaaaggagctggttcattttggcggagaggaaattac

SEQ ID NO: 31391 - DNA, 369 bp, Zea mays
cagcttgtcaagcatgcaaacaggtgggaagctctcatcacaccaaaaatgtgatgaccacatcaagacctttggagatgcttcacatggacctcttcggacccgtcgcctatctaagtatatgaggaagtaagtatggtcttgttatagttgacgacttttcccgcttcacttgggtattcttcttgcaggataaatctgaaacccaatggaccctcaagcgctttctaatgagagctcaaaacgagtttgagttcaaggtgaaaaagataagaagcgacaatgggtccgagttcaagatacttcaagtggatgagtaccttgaggaggaatggatcaagcacgagttctcaactccctacacaccac

SEQ ID NO: 31392 - DNA, 294 bp, Zea mays
gttaacaaagatctatgaacccaaatgtcctttgtgctagcgcttggcaaattcattgcctttctagcacaagttgcaattttgggttgcctagttatatatgaatcaaatgacaagctatgagtggaggagttaccaatgggacaatccttgcattgatgtcccttttcccggcatgtgtaacataagcgttttccaaagtttgaagatttcttctttcctttgttgttgcttgctacatggttagtaaaaactttcttttctaaccctatgcccttttgtttaaatggggac

SEQ ID NO: 31393 - DNA, 335 bp, Zea mays
gcaaggtcgagtcagcactatcaaatctactaattagctgaccctctacactccctaaattctattgaatcatcacttctttaagacagaacacttgtatcctaaaaagacagtgaacccattttacattattgtgaactgaaagcagttgaatctaagaatctacagaaaaacatggaaaggaaggtatgaatatagaatttacccaatcttgacaacctggttccatccgatgtgataccgtggggatctgattctcgtagagaaacatctttctcctgtaatggttggcattgtgcatgaccactgaccccggtgctaactacaaaaattat

SEQ ID NO: 31394 - DNA, 257 bp, Zea mays
gaaggcaaggggacggaggataacggagatgcgccggcaacgccgcaggctgttcgcttgctctgtctgaaacaagtgttcgcatggcgacgggccaaaaactgtgctcggcacgaactcaaaatagctatttcagcatgtggaaagacaccaacatacaggatgtctttgggaaggccatggaacggaggaaacacacgatgcccggcgacgcggatggctgtcggctgcgttggctaaaacagcttcgcatgtcc

SEQ ID NO: 31395 - DNA, 328 bp, Zea mays
caattcaagttcctttcgataacattctctggatataattggacaacaaataagaagaaaatcagttgccacaaaatgtacaataaagactacgtgaaagatagttataaacctatgatacacatgaatgcgaatttgtgttcctgggatgaagaaacatcatgtgcctttgacaaagaccctagctgcttttaagccgataatactgacatgtttgacatccctacaaatatttgagcaataacaactgatgaaatcgttaagtgaagataatctaatggtgagttgtattgataaaatatttttgttcactctgagtcaaaactta

SEQ ID NO: 31396 - DNA, 432 bp, Zea mays
cattaatctaagctctaagggagaccatttgggactaccaatgttcatttttatttactgtgttgcagcgcatgtcaatcatgaaagcaagttggtacccaccatccacacaagaacatcatgacgaccgacaggctgcttgagctactccacatatatttattctgcccgatcgcttacataagcatcggcaggagtaagtattgtcttgtaattgtggatgattattctcgcttcacttgggtattctttttacaggaaaaatcacaaaccaaagagactttaaagggattcttgagacaggctcataatgagttcggatcgagaatcaataagataagaagcgacaacgggacggagttcaagaactcacaaatttgaggctttcttgatgatgagggcatcaagcatgagttctcttctccatacaca

SEQ ID NO: 31397 - DNA, 426 bp, Zea mays
  unsure (1)..(426): unsure at all n locations
acatgtgctatgcggcgatgccactttctttccatgctagtcttagctattaagcatgcatctagaccggcctcctctttngctaaatcaactaaataaagcttgccgtctaatacacctttaaaagctaatgaaccatcacttcttctaaagacagacacatctatgtttgtgaataaacagttatatcccatattgcacaattgactaacagatagtaaattatatcccagtgactcaactaagaacacattggaaatagagtgttcatttgagattgcgaatttacctaatccttttaccttgccttggttcccatcaccgaatattattgaatcttgggaatccctggtcttgacgtaggaggtgaacatcttcttctcccccgtcatatggtttgtgcatccgctgtcgacaattcagctt

SEQ ID NO: 31398 - DNA, 348 bp, Zea mays
catcatccacacaagaacatcatggcgaccgacaggccacttgaactacttcacatggatctatttggtctgatcgcttatataatcatcggcaggatttagtattgactttgaattgtggatgattattcccgcttcacttgggtattctttttacatgaaaaatctcaaaccctagagacctttaagagactcttaagacacgctcaatatgagtttggactgatgatcataaagataacaagcgtatatggaacggagttcaagaactctcaaattgaatgatatcttgaggaggaaagcatcaaacataaggtctcttctccctacacaacttaacaaaatggt

SEQ ID NO: 31399 - DNA, 341 bp, Zea mays
tacttgaagagtcttctcactccactgcatactatgtcttcagtagagaagaattaagtttaaagtgaaaagttttattcgcctattcacccacccccctctatgcgacatccagatcctgttcccgggtcaaagggaactctcaattggtatcagagctaggcctctccagtgtgggcttatccgtccggagatgacgatgtcgtcacaagaggtaactggggaacttcttttaacgatggctctaattacaagtcttggtctgtctctatttatagtgctctcatgagtggtgatcctgatttgagacaagtctttattagtagtatttttccctccaa

SEQ ID NO: 31400 - DNA, 462 bp, Zea mays
tcagttccatctatatatggattgcttttgagtctgttctatttccttcatcccttctggcggcttcctgacttccatgaatagcaatgggccctcggtccgatagtatcttcatgcaaaaataaactggatgaagaattgcttcgaacgcattgagagtaccacgaccaatgattgcattgtaagggtattccatgtcaacaatatcaaacacaacttgttcagtcctcgtgttgttgataaatccgaaggttaccggcattgagattttgccgagtgctacaatctgccttcctccgaagccgcataggggatgtgtggcatcaagaattttatcttcgggctcttgcatctgtctgatagccttaacatatatgatatcaattgcactgcttgtatcaaccaaaatattatggaccaaaaatactcttgttacacaagagataccatacatcgatgtgt

SEQ ID NO: 31401 - DNA, 391 bp, Zea mays
actcaaaagtcccttgtgttaacgcttggttactcattatctttctatcacaaattgcaaatttgggttgcctagttacatgtgaaataattgacaagctcaaagtatggttggtaccaatgggacaatccttgcattgatgtcccttctttctgcatatgtagcatatgcgatcctcaagtcttgaagatatcttctttacttgtgtctttcttgctacatggtcagtgaatattttcttttctaacactatgccttcttgttgttaatggggacaagaacctaacaagtgtcccttcttggacatttaaaacataatttccattcttgttaaaatcaagtctttttaatatatagacatgacctaaagagtgcgccttttaaagcattc

SEQ ID NO: 31402 - DNA, 435 bp, Zea mays
acactatatatactaagcttagaatgtttaacttactgtgactacatttctcttattttgtgggctaaaggttaaagccaactttataccacctgatgcatataaggaaaaagggtccacatgtaccattctctgtggcatatcaaaatcgaactcgatgtcctttatgattgatcgagataatattagtcaatactgaatttaattttaatgacaagtttgtaatgagtaggataataacggatatgttacaggttgatggtttcttggatgaatatgcttctgcatatggttaggcctgaaaggagaaacagaacatgattgtgttgtgtagctctcctcccctaatctctacatggtattggaatatatataactctgtgagtttatatggaaaacaatatatattgttatttcctctcttcatcctctcct

SEQ ID NO: 31403 - DNA, 473 bp, Zea mays
  unsure (1)..(473): unsure at all n locations
tctanagggagagcacnatttaggacataccaatgttcatttttgtaattacagagtttgtagcgcatgccaagcatgaaagcaagttggcgcccaccatccacacataaacataatgacgacggacaggtcgctcgagcaacttcacatggatctattcggcccgattgcttacataagcattggcgggagtaagtactgtctagttattgtggatgattattctcgcttcacttgggtattcttcttacaggaaaaatcacatacccaagagacattaaaaggattcttgagacggtgtcaaaatgagtttggattgagaatcaaaaagattataagcgataatggaacagagttcaagaaattctcatatgaaggatttcttgatgaggagggcatcaagcatgagttctcttctccctacactccccaacaaaatggtgtaatggagaggaagaatagaaccctactgg

SEQ ID NO: 31404 - DNA, 480 bp, Zea mays
ctaagcttaacactataacaccttcgatgcgaaacgatggaggggcaacttttcttgcttgtcataacaatacatgaagacaatgtaagaagaaggtgtcatcctggatgttgaaagcaaaagacaacgatacccttgtattatttgtaaatcctgtgtataatcgctgtgggtataaatgtaatttcatatgaagctgtatgattccctataaataagtgaacagtgtcctgcataaagtacatttttggagggctagataattgttgtatgtaatcctctctctacaacaccttcgttctaactctctgtattaaaccgaatgtacgactgttaattcaatatacaaaagaggagaaatgtattattaatataactcaaatgagttatcatgcttaaactccttcatagtctttgcatacttatttatttatactactaaattatgatccacttagttaactcttaatcttcgtcttc

SEQ ID NO: 31405 - DNA, 428 bp, Zea mays
  unsure (1)..(428): unsure at all n locations
ctaagctcatgaagaggaaccttcngtcatcacatgtggacagcttatttctatctgnttcttcctacaagaccttcggcgacgaagcatagtcccaacagtcattatcatcttcttcaccctcatgctcatgctctccaccctcatactcgttacatgcagtctcatacttctgctcttcaccctctcgagcttcatactcgtcatctttatttgtgatctttgaagtgcttctcgtctacatctcaacaacattttcaatctactagtgttgaaagaactctctggcaaaagggtcttgtccgtcctttatgaactccatttgctgttttcttaatcctatgaatgatcctgctgagagaaatagtagaaattagtccaacaattatacaatgatcattgagcaacatcgtcctaaagtagatgtc

SEQ ID NO: 31406 - DNA, 385 bp, Zea mays
cttcttttaaccacataaacggcgagtttcatattattgtattaagacggcatggacttttatccggtaactatcgttagtacggtttaagggtcaccctcagtaaagtaagcgtgagcatgttgcaccgcctttagtcgctgcccacttaagtcgattgctccagttgtagggcatattggtcaccccgagctaattagcgtgagcatgttgcaccgccataagtcgttgccgacttaattcgatcgctccgtttgtatggcatagtggtcacactgaattaaattatcgtgagcatgttgacccgcataagtcgtgaaactttatttattgtccgttgtatgcaattggtaccctgagtttatagcgtatcatgttgaccgca

SEQ ID NO: 31407 - DNA, 270 bp, Zea mays
gcatacttgtaattcctcacaagctgtgtcctgtgcctataaatagtgaacaatattcctttactgttcatggattcttgtaattgcaatcgcatcattccgaaaccaatctttgtcaaggcagaagtataactgtattcaatgatttaatgtattataatatgactcatttatgattcatttacctttgataccctttattttatattattatatacgatctattaaaacttaattacgaagacttaaccttcgtaattatattctcat

SEQ ID NO: 31408 - DNA, 337 bp, Zea mays
tcaatgatatttgagtggtatgacaacttttcatcagtacctatctaaacggttcatataagtttatctgataatgggttgtttacacaataatacgaaagctctcagatgttatggttctctctacctgttgcaagtttggtttgggacgtgctgtctaacaaagaggtggtgaaactcgtgtcatcggcgcccgacccgtcctatgcggctaggcatctgatctgtcggcgcaagttcccgacattcatggtggacgactgcgccgtcgtgtgccttgaccttaacatgcgggtctcttcgggcaacacatgaacatgctattttgggcgtcacg

SEQ ID NO: 31409 - DNA, 331 bp, Zea mays
tttaaactcacctagcttaaatgctacttgtgaggctgttttctgtcagaaagggggcattatccctgcggttccgaccagattagaaatccttagaagtctactctgacttatatgcttagataaagtgagcattactctatgcatcccatgtaatgctaaaaaatctctatacatcaaatacatacattattagacttttgagcatcttgtttactacaataggcaaatttgccaattgtggggcaacacaggtaagactggttggaccaaggctgtttatgtgaagccaaaccgtgggcctaacatgctaatgttgaagttatcatcg

SEQ ID NO: 31410 - DNA, 358 bp, Zea mays
attactatatcgtggtgttcttgacagaaatggtcatgaactaattgaaagaaatggtaccatagcaagttagcgatacctcaacacatataacgccacggcacacctcatcacacctagttcgcgccacagacacgcacattggctggaccgcctcgacggacacgacgacgggtaggggttggtgcttcacacttgtggcagttcttaaggctccaccctctctacaaggctaacaatccatcttcactggcttatctgccatgctcaccgcctagcccactatttgccgttctcaggtggttcctatgtaatctgtgataattcaaatattaactaaatccttcatcttaatcca

SEQ ID NO: 31411 - DNA, 441 bp, Zea mays
  unsure (1)..(441): unsure at all n locations
ctaagctctcaatatcagccagctgctcagacgagaagttcttttctatcttgaccatctatcaagttcgttctcaaataaggcaagtcataccctntgtgtctcaatttggttgtaatgaacgaacaatatcttagggatatatagttgctgtctgcaaaggcttcctctgatctatcaattttgtgcttgataagtggatatgtcaaggtcaaaggtcaagttggacgtgatgaatccctgtattgccaaccgggtcactgaactacttgggtttgacgtttatgtatttcaataagcatgttaatcattagtgataaacttgttgtatctggtatttcaggaatgatctcgtcngcgtacttgtgcttttctatgtcttgcttaacttggagaaaattgttaagccatcatctctactacctattaagatggtaaggg

SEQ ID NO: 31412 - DNA, 266 bp, Zea mays
gttaacgggataacagacaaacacaaccaatgatgtattttatacaaaacgtgcgatgtatcaaataatgggaagcaatcaatggtgaagtaagtgaagcattatcctcaaacatcaatgaaaaatatgtggcttgaatggtaggttcaaagtaagcatgacggtaatggcatatatatcacgagggtttaaaggtgataatatacaaagatgtatgagaggaggttaatgcgcataataaccaatgatataattaccacaaatga

SEQ ID NO: 31413 - DNA, 316 bp, Zea mays
gcttcttagggagaacacgtgataggtgtgactgacgttcaattctttatttatagaccttgtgcagcttgtcaggcatgtaaacatgtgggaggagcgcatcacatcaagaatgtgatgaccacatcaagacccctggagctgctacatatggacctcttctgacccgtcgcctatcttagcatatgaggaaagaagtatgggttagttattggtgatgacattttccgcttcacttgggtgttctttttgcaagataagtctgaaacccaaaggaccctcaagcgctttcttaagagagctcaaaatgaagttg

SEQ ID NO: 31414 - DNA, 415 bp, Zea mays
tgggtatgaagcacatacgggaaaagataatggctggaacagccaaatgtttcatagaagacgatcaaggtgtgatatggttcaataatcgcatagtagtgccaaagaatgaagaactccgccagcaaattttagatgaagcgcatcttattcgctattctattcatccgggaagcactaagatgtatcacgatctaaagcagtactactggtggacgaagatgaaaatcgaaattgcacgctatgtggctaagtgtgacacttgcagacgtgtcaaagccatacacatgaaaactgctggtccattacaatctttgccgatcccaacatggaaatgggaagacataagtatggactctatcgtgggatttccacgactgcaagaaggtatgattctatctcgggtataattgat

SEQ ID NO: 31415 - DNA, 376 bp, Zea mays
ttgtagcgcatgccaagcagggaagcaagttggcactcatcatccgcataagaacataatgacgaccgacaggccactggagctcctgcacatggatctattctgcccgatcgcttacataagcatcggcgggagtaaatactgtcttgtattgtggatgattattctcgcttcacttgggtattctttttacaggaaaaatctcatacccaagagaccttaaagggattcttgagacgagctcaaaatgagttcggcttgaggatcaagaaaattagaagcgacaacgggacggagttcaagaactctcaaattgaaggcttccttgaggaggagggcatcaagcatgagttctcttctccctacactccacaac

SEQ ID NO: 31416 - DNA, 491 bp, Zea mays
  unsure (1)..(491): unsure at all n locations
ataanactcaagcctatacacaatcctaactaatcctcctccagaactggaaacgccttccattctctngaacaactatagtactcctcatcaactacatcaacatgggttcgaacaccctgagtacggagtgtactttctcaaagcttacccgactaaaaaaaaatgactctcaaggatatgctggttaaatacgaatcaaggaacaggctttaacaagaatcaacttagaaaacttttgcagaaataacttactaaagtaagtccctgtaatatcttaacgccagattaaatattaatagagtctggttgcatctagtctaatttcaccatctcatcaatacaacatcatttttattcataatggttacattccggactaggttgtatgtcggatataaagcctccactctccggggatataacggcgacacgaatcgatttactcatctgatgatctctaaccacacgacatatatttctccgtactc

SEQ ID NO: 31417 - DNA, 309 bp, Zea mays
tgaatcttcttcatgcgattctcacttatatgacccatacgacagtgccacatgtaggtatgacttaaatcattatgccgaagccttttatcactaatattacaggtgggggcatcatcaagaattaaaatgaataacccattcataatggatgcaatagccacaaacatgccattcttatagatcacacaaccattgttttcactcgcaaatgaataaccatccttcatcaaacatgaaggagacataatgttttgactcatactatgaactagataacaattatttaactccaaaataaatcctgat

SEQ ID NO: 31418 - DNA, 381 bp, Zea mays
  unsure (1)..(381): unsure at all n locations
tatcacaatccaccacctcttagataaccgacgtcttcgtctgtcaaccccaatccagtaacactccctcttggtcatgtatgtatgtctagtgtcatcatatgtcatgccatgtgaccattctaagcccacaagcgccatgcattatatggccgaacccctatcgccacacgaccatgaaaccgcgagagtcggctctaataccatntgtaatgccccgttcactctcgaaccaacgatacttactcctgacagctctctatgaccatagatcatccacacagaccaacatgagtcttttatgtgcactttgtcctcattcatgcgcatcagataaaacttctcagtcgatcacccatctcaagattactctgggccaag

SEQ ID NO: 31419 - DNA, 440 bp, Zea mays
atctgaagaggataatagtaaacgtcgaatctatctccagatggacaacttctgctcacaatggagatgaagtattttgataatgctgaccaaaagaggaaaatactacttagtgcttaataacttggattacgatcatatgtgatattagggacataaatgtacttttacccgggttgcgtcccgtgtctataaatagatgaacagtttcaccgtactgttcacactgaattgtaatcgctacctcgcatcttcaccttcgagcaagccgaaggtaccaatgtaatatggattttggtgatattcatacatgttttataaaatgcaaatatgatagaacttatgagatacaatcattatctcgatgctttcgcattcatgtttattatataaattatgaaggacaagccctcatgagcttcgtctgatgatcattatat

SEQ ID NO: 31420 - DNA, 472 bp, Zea mays
acactttatactcagctcatttatctctggtacctgcagcaacttattaagtatattttggttcccatctcatgatgggtccatcaaggttagccaataatgacttatgcacccaaatatccttggtcctataatgtggtgaactcatcacctttctagcacaagagtcaaatttgggtctcctaagcaaatctaaatgtattgagaatctaggcttagaagttttaccctttggacaaacctcgaatagatgaccttttttatgacaattatatgcaatgcggtgcttatccttgcaatacatttgcactttgctgtcatctttcttgatagtcatctttcttgatagtgcaaggtcttgggtcttcatgtgggggcatgaatcaatttcatgacccttctacttgcatcatagcaccttctatcgcttatctttgatctttcttgtgtgaaacacatatgtacattgtta

SEQ ID NO: 31421 - DNA, 257 bp, Zea mays
aagtcctccagtagagtaagaatttacgcttaaaggaataagttgtattcgcctattcaccccccccctctatgcgacatccagatcctgttcccgggtcaaagggaactttcaattggtatcaaagctaggcctctccagtgtgggcttaaccgtccggagataacgaagtcgccacaagagggaactggagaaattctttaggcgacggctctaattacaaatcctggtctggctctatttataacgctctcatg

SEQ ID NO: 31422 - DNA, 414 bp, Zea mays
tcacaagtctattgaagaatgaaactaaattctattggttttcaaagtgtaatgaagcatttgagaaattaaagacattgttaaccactgctccagtgttggctcaaccagacattaataagccctttgatgtgtattgtgacgcattatgcagtgggctctgctgtgtattaatgcaagagggccgagtaatcgcatatgcttcaaggcagttacgccggcatgtggagcattatcccactcatgatctggagatagctgcagtggttcatgccctgaagatatggcgtcattatctactgggaaatgtctatcatatttatacagaccataagagtttgaaatacatctttacccagtctgaactcaatatgagacaaagaagatggcttgagctgatcaaggattatgaat

SEQ ID NO: 31423 - DNA, 58 bp, Zea mays
aactgggctcccctgggaagattttttttttttcaaaacgtgaggtggtggtacctca

SEQ ID NO: 31424 - DNA, 383 bp, Zea mays
tcgctacgctgagtgcacaacattatacctctttatgattcttgaaaatgctggcgcccaatccttatgtattccatacatcttattgagagtaatgctatcgtgcatatggaaatcttcaagtagcattgaccatgcagtctcatactccaactcagtcaaagaatgatgtattatagattggaaccttgtcttaaagtccatttcctcaaaccttgcataacactagtttagaaaatgcatatacctattttgccatgccatatacacaactgatgtattgtgtgtgggaaaaccctctcgagtgctactggcatttgaagatcctggatctgattcatatacgccacaattgtatgaattttattccatgtgtaaaataa

SEQ ID NO: 31425 - DNA, 391 bp, Zea mays
  unsure (1)..(391): unsure at all n locations
gtatactcccaatattggtctatggtatcccaaaggtgctcaatntgaattaattggatattcggattcggactatgccggatgcaaagttgatataaaaagcacctccgggtggtgtcaatttcttggtagatctattgtttcatggtcttctaaaaaacaaaattcggttgctctatctaccgccgaggcggaatatatatcggccggaaattgtggcgctcaactattatggatgaaacaaaccttattggactatggaattattttcaagaatgtgcctcttatgtgtgataatgagagtgcggtaaaattagctaccaatccggtccaacactctagaaccaagcatattgatatacgacatcactttntaanggatcatgttggc

SEQ ID NO: 31426 - DNA, 425 bp, Zea mays
  unsure (1)..(425): unsure at all n locations
taaactaagctgcttgctgttaannattctgatcgcatctaaggcttgtcttatctatttatattaccgtcaacaaagcgagtgaataagcttaactcgggtcaaacttgacatgtattactttaagctcttaacacttaaattcctacttattatgcaattgttggttcttgaaatatgcatgaggtactgcacttatggggagtattcaacactcaaatcactcatgataacccctattgcaagccaaaatgcatatttcaccatttgcctattgtctctaaaaattatctagcctatggcaaaatatnttgaaaagtatatgagggtgccaatacctgttccaacaagtgttattttgtgtgattataagttgggaattggtttggttggaaattaaatagaaaaattcataattttccaat

SEQ ID NO: 31427 - DNA, 393 bp, Zea mays
catgatgccactatctctatgcggagagaagagtaccattgtttgtccacatttctgactgccatgacgaatgactatgccatgacaacggcgttgcctacgtatgatgatattgttgcatcgtaactcatcaagaattgctttgggtccgagtgtccatcgtacatgggcaactggtgtggcttgtatgattgtggctatgggataacctgcagttctgctgccatgggagaagcatcatcaaaagtaaagttatcgtgatgaaagtcatcgtaccattcatcttcattgattgagctctcttgacgaaactccctgtgctgaagacttcagtcctggtcatcttgagtaagatgacacatttcttctgtagcttcatcaatcatcttctga

SEQ ID NO: 31428 - DNA, 312 bp, Zea mays
atgtagtcttagcaattaagcatgtgtcgagttcagctctatcaaaatctaccaagtatagctgaccctctaacacacccttaaatgctattgaatcatcacttcttctaaagacagtgacacctacatcagtatagagacagttgtagcccatttgacataattgggatacggaaagcaaattgttatgtaaagaatctacaagaaaaacattggaaatggaatggtcaggagatatagcaattttaccaagaccttgaccaaaccttgttttcatccccgaatgtgaagctcgtgggaacttggttttct

SEQ ID NO: 31429 - DNA, 378 bp, Zea mays
gagaacacattgtgtgactaacatttgttctttttgttatatacacggttagtatcgcatgtgaagcatggaatcaagttatcgcatgagttctcttctccctacacacctcaacaaaatggtgtagtggagaggaagaatataactctactggacatggcatgaacaatgcttgatgagtacaatacgcccgaccggtttttggctgatgcgattaacgacgcctgctactccatcaaccagctctaccttcaccgtattctcaagaagacatcatttggtctcctcactggtgaatagcccaatgtttcatatgttagagtctatggacgcaaatgtttattcttgttaaaagatgataaaatctaaattgctccc

SEQ ID NO: 31430 - DNA, 359 bp, Zea mays
ttttttaatcccctttacagttgcgcggatgaagtgttttttctttatacaaactggcgtaatgctgggcctttgccaacatcctattatgtcgtgcttctggtcattgttaatatgcttcaacattggaaactaaattcagaactttctaaagacttagggccttcataattttggaatcaaaatataccgtcctttggatggtctgtgagctaactgatcaacatctgttttgtgaaccacttgattgaatgccttctcttgggacctagtatatcactaccgcttagtgctaaaatctcatacctaatgaattctaagaaccgtccctttatgtactcttaccggcacagtattgt

SEQ ID NO: 31431 - DNA, 447 bp, Zea mays
  unsure (1)..(447): unsure at all n locations
tttatactaagcttacgggcctatggcggagctaaccgaagcgctggcgcgacttgttggtgactggagttggctggccactgtggccgaatctctggcggcaatggcgggcggaaaggagctcgccggagctaatgangggtgtctggcccgcggtggtgaatgcggggtgaaatgatgcgcgcccggtgaggctttatatgcgcgggcgatcactgacgatggcggtgctctgacaagcgctcggggcgtgcgcggcgaacgccattgcttgctctggcgtctggcacatcgtctagcacgaggcagcgcatagagaggtcgagttcaaacgcggattgtgcccaaatctttgagattatggccatgatcccgttgagaggtctcttcctctcaggtccctttgtcgtttgtgtgtggaggctagcaaggttttgctgactggat

SEQ ID NO: 31432 - DNA, 346 bp, Zea mays
tggtttcagtgactgtgatcctgctccaacaccttatgaccctagcatgctatgtgaaaagaatcagagaatagcaatggatcaattgacatactcccagatcattggctcgctcatgtaccttgcaagtgcaactagaccatacatctcatatgatgtgagtaaactgagtcggtttgtgtcaaaaccattagatgatcactggcgtgctcttgatagagtgttgcggtatttgaaaggtactatgacatacggtattcattatactggaaacccataagtgtggaaggctattgtgatgccactggatttctgatgctgatgagcttatgccacaagcggatat

SEQ ID NO: 31433 - DNA, 354 bp, Zea mays
tatcctttgcctcgtattgatgtcacttttgtggcggaactgaccgaattattccaacttaagtgccgaagtcccgccttataggctttaccacacttaaatgggaataacccgtcaatccctcggatctattccgacaaggccactgacaggatcaagtaccacaatctcactcgatggtgagtcacagagcatatacaatatagcataaaaccatacattaaggagtattaagttattacatcatcatcggaagttttgcgaaagtaaacatcattgttcgaagtgcagcggaataaaactaacggtaaataaacagagagatggggaagcatgtcccatcacttctcatgc

SEQ ID NO: 31434 - DNA, 301 bp, Zea mays
aagcaaacgtatagtttatctctattgaaatcaacttaatatagctgaccctctaacactcccttaaatgctactgaatcatcacttcttcttaagacagaatcacctatatccataaaaagacagttgttgcccattttgcataattgaaaaacacaaagcaaattgtgatctaaagattctacaagaaaacattggagatataatggtcaggtgatatagcaattttaaccaatcctgtgaccaaacctttgattccattccccaatgtgatggctccttggggatcattgtctttctc

SEQ ID NO: 31435 - DNA, 425 bp, Zea mays
  unsure (1)..(425): unsure at all n locations
tttattgctaactgtcccgacaatgatagtgatcatgattaagggaacaaganggagaagaagaagaactataagaaggcaaagggcgaggcgcatctatgcaaggagtgggattctgattgctcctcttccgactccgacaatgatggactcgccgccaccgccttcaacaagtcatccctcttccccaacgagcgtcacacttgccttatggcaagggagaagaaggtatgtactcgaaactctacttatgcttcttcaagtgaggacgaatctagtgatgaggatgaaatagactattcatgtttatttaagggcctagatagaaccaaggtagataaaattaatgaattgattgatgccntgaatgataaaaataggcttttataaaagcaagatgattttgatagtcgcctatagggggg

SEQ ID NO: 31436 - DNA, 382 bp, Zea mays
catgcaagcttgaggaaggcctcttatttttgtttatatgagaacctgcagatagccttgcatacaacagtataaaggtacagaagctgttactttaaagttgagaatgaagtatttcattgtcatacttaactctctccttttcttgcagggcctaattcttaataatgccttgagggcacaaaagaacgccgaagacgaaagttgcacaatagctctcagcaaccttcgctcagaggtaattgagctaacaaacgaaggtttagagaaagacaagattttgatttcattggtgagtaaaatgaaagaagaccaagctaaattcaatgctctggttgaagcccacaaagctaaggttgaagaacttcggaaaaagctcacc

SEQ ID NO: 31437 - DNA, 225 bp, Zea mays
cacgagagcaaaggattctatcatcaaccccgaaagcggaggggatgggcccaacaaacactacccaccacagcatttgaaaccctcgaccccacaaggagcggcatcgccaatctcaaagctcaacgtaacccgtccagtgagacaccctcacaaatcaagacctaccttaatggcccatgccaaggaacatgaaatatagtcctgagcatgataaagggacac

SEQ ID NO: 31438 - DNA, 375 bp, Zea mays
agcttgtgaaatagaatatgaatctgatttaaaaaaacgaaaaaagaaataagaaaaataaaagaacaaaatgaaaaaaaccatacctgggccgatttcctcttcttggcccactagctcccactctcgtacaacccaactggtgcctggtgccgactggtgggcccaagtcaccagcgtcctagccgcgtccgtgcactagaccagaaccactgccatgtgggacccaatggtcagcatcgtcattgtcctcgtgtccgacaagaaatctcgcgcgcaggtcacgcaacaacccctccatggatctaggatcttcttggaaatcctaacaaacccgaacatataacccggagccacccctcgaccatccacaag

SEQ ID NO: 31439 - DNA, 336 bp, Zea mays
cactctagaaacttcagcttgctattcgcaagctgctccatattctttttacatcttcggcccaggattatgttgatcgtttttgtgaacctattgatgtccttgccacctatgagcacactacagatcctttgtgttataccatgaaattcattgatggcctccgtgacgatattaaatctgccatattggttcaacgccccagtactttggatactgcctgcgctcttgctttgttacaggaagaggcagattcatcccggcgttgtgagcatcgtgggtcggagggtacgttcccagggcgttcatatccgaagttacctgctcctcctcctc

SEQ ID NO: 31440 - DNA, 374 bp, Zea mays
agcttctaaagggagaacacattttatgactaacaaatgttcattttgagaaagacagggtttgtagcgcatgccaagcaggaaagcaagttggtgctcatcatccacacaagaacatcatgacgaccgacaggccgcttgagctactccacatggatctattcggcccgattgcttacataagcatcggcgggagtaagtattgtcttgtaatagtggatgattattctcgcttcacttgggtattctttttgcaggaaaaatctcaaacccaagagaccttaaagggattcttgagacgagctcaaaatgagttcggcttaaggatcaagaaaattagaagcgacaacgggacggagttcaagaactctcaa

SEQ ID NO: 31441 - DNA, 188 bp, Zea mays
tgcaactaaaaaaaacgtttgctatttatattttcacaaataagagcattattaagtgcatgaagaaggttagtgatcggcacgtcttcaaaaacgtacggacattcgttagtttctcaaggcttggttagcacgtctttagttagacaacatatctggtgcacatagaacattggtgctttatcctc

SEQ ID NO: 31442 - DNA, 384 bp, Zea mays
  unsure (1)..(384): unsure at all n locations
acctgcggcatgcaagcttgccagtgtgtgtantaatttatttccctatagcgaagatatacaagaataatgtcactagttcattgctcaagaaataatggtacaacaaagctttggtttccaatatgctcactcgtggggatggggcatcacaagtatattgagagggggctcgatgagctcatggatcactacacgatgattcatttacaacgacttatgattggttgttaaaagcgtgtttagtgacctacgattgatcgctaaagacctttaatgacttataaagatggtcattgtaagagtcatcgctaatgttgagtctcgatgctgccccaatctatgttgcgacctatggcctatatcccaccgagcaaacgctcc

SEQ ID NO: 31443 - DNA, 329 bp, Zea mays
aactcaagcttgcaaataactagtctacaacactaacaacaataaataacataccaaaaataataatatacaaaaatgtaacgtggggggaaatacaaaattgattgcgcaccaaaattaacacataaataaatagaaatatatacatagtacctggaattttctaggagtcttctgtttaggagagccttttttgaaatgatatttgccttgacgtctatatcaaactttgaactgcttttcacactcggaacttgtggggaagggacttttatcttctttgcactattttttctgaaggggaaggtgaggctgatctgaattggcgc

SEQ ID NO: 31444 - DNA, 311 bp, Zea mays
ttttattgctcttgaaactgtgcagtttccttctgcctttctagcagccttctgactgccatgaatatctatgggtccttgctcccaatgtatcttcatgcatagatatgctggatgaagaattgcttctaaagcgttgagtgtcccaccaccaacgattgcattgtaggggtattcctagtcgacaatatcaaacacaacctgttcagtccttgtgttgtggaccaatccaaaagttactggcattgtgatcttaccaagtgctactaactggcttcctccgaagccacatagagggtgcgtagcatcat

SEQ ID NO: 31445 - DNA, 384 bp, Zea mays
gaccttaagcaccgcggctgcagcttggagcgacagttttttttagagaagctgcttcggctgatcagccgaagcccatgcttctatgtgaagacatagcagagcagaaggtactgctggggtctcaattatctgaagagcaggaaaaaactttgataaggtttttattgaacaacaaagatgttttcgcatggtcggccaatgatctctgtggtgtcaacagggatgtcattgaacattcacttaatgtcaatccatccttcaggcccagaaagcaaaggctttagaaaatgtctgatgataaagccgaaggtgctcggaatgaagtaaaaagacttctcagtgctggtgtcatcagagaagtaaaatatccagaatggctag

SEQ ID NO: 31446 - DNA, 324 bp, Zea mays
agaaactcaacaaggaagggcaaaccccccatgtgttatttgcgatgccacagccagccatgctagtcttagcaattaagcatgcatttagaccggcctcctcttttgcaaaaacaactaaataaagattgccatctagtacacccttaaaagctagtgaaccatcacaccttttaaagacagacacatctacatttgtgaataaacaattatattccatattgcataattgactaacagataacaaattatatccaagcgactcaactaaaaacacattacaaatagagtgctcagatgaaataccaatctttcataatcctt

SEQ ID NO: 31447 - DNA, 369 bp, Zea mays
agctttaccagttcctatgtgtgccttctttgccaagtgttatggtcatgacactagacaaagaacctctttgctgagtgtaacactcaacaaagtgactagaaccccctttttatttgtctttattattacatccaaacaaacaaaagatatatatcattgacatcacatatatcacagaatcaacacatgtatcaccaacaccatatatctcacaaatatcaccacatcaaacaagtttcacggacataagtctcaccaagtatctcacaacatcaagtattaccaacatcaacaagtttaaccaaacaaatatcaccaacactcacaaacataagtttaaatcatcactaagagatcatcaactag

SEQ ID NO: 31448 - DNA, 336 bp, Zea mays
  unsure (1)..(336): unsure at all n locations
gcgacactatacacaactccagctnctaaagggagaacacgtgtattttttgactaacgtgcattccgaaaaagatagaccttgtgcagcttgtcaagcacgtaaacaagcgggaggagcacatcacatcaagaatgtgacgaccacttcaagacccctggagctgctgcatatggaccattctggacccgtcgcctatctgagtataggaggaagtaagtatggtctagttattattgatgacatttcccgcttcacttgggtgttctttttgcaggataagtctgaaacccaagggaccctcaagcgtttcctcaggagagctcaaaatgagct

SEQ ID NO: 31449 - DNA, 367 bp, Zea mays
agcttgaaccggggacccgtttcattcttaatagctcaatcgtgctcaccggagttcaagaacccgccggcgcacgtggaccgggtaagcctctgcaccgatttccaattcgttgcgtgcatggcctctacatcaccccgtggagctcctcgtgcaccttaattgatctataccgccgtggcttggccggagcaggagccgccgacgacccccgccgcctgtgctcgtggccagggtagcttcgaccaccttcaacgccgatccgcacaccgacgtgaccgttgcgacctcgcggacgtcactgaccaccctgtcggagctctactgccgccggtaatccccaccgccgaatttatgccgagggtac

SEQ ID NO: 31450 - DNA, 314 bp, Zea mays
tgacatatcaaaagctttcgatttcattaattgtgcatatccgctagaggtattgagagctctacgtttttcccacaagtggagaaattggatcgccataatattacgctcttcctcttcaaaaaatcatcatcaatggtcaacaaacaaatgcaattaagcacatgtgtggcatacgtcagagtgatctgctatccctgttcatgtttatcctagcaatggaccctctgcctaggatgattgacatggcggcaggtgctaggcttctggggtgggttctgccaaaaaaggctaaactgcactgttctctttat

SEQ ID NO: 31451 - DNA, 363 bp, Zea mays
agcttcaaaaggtgacttctttatactggcctgataactattattatatgagaactcagcatatggtagacttttatcccaacttcctccatgctgaagggcacacgctctcaacatatcttccaatacttgattagtcctttcagtctgtccatcagtctgagggtgataagctgtactgaaattcaactttgtactcatattctcatgaaagcttctccaaaatcttgaggtaaactgcgaacctcgatcagacacgatcttctttggtactccatgcaaacacacaatccgagccatatataactctgctagttgagaacctttataagtagtcttgacaggaataaagtgagccacttt

SEQ ID NO: 31452 - DNA, 314 bp, Zea mays
tgtttcacaggagtcgtatattgttttttttgatatcacggtcttagaggacgaccgtgacattatgaaagcactgtgtgacaaagcgatggacaaagctgtttgcgccggccggatcctgatgaaaaggcctggtgtcgtggtgcctgatgacattgtagctgacgtgcttgttgcatctgctgatacaagttaattttctccttctagtgatcctgcagacaaggtcccttgcagggatgctcctgcacagtaattgtgtaatgaaaacagatattgatttgtttcaccagaaaacacttttcattgagggg

SEQ ID NO: 31453 - DNA, 154 bp, Zea mays
tatagatccatcaagcgttgttatactcttacgaaagtttttcgtcgagatgcccccaaccaaacactaccgcctgactacacatttacaaacaatggtgatctattcctcgtgccatacacaacaatccatgctaagatgcctagcctttctg

SEQ ID NO: 31454 - DNA, 368 bp, Zea mays
agcttgtgaaggttcttcatctttcacatgtgctaagcggcgatgccacagccagcccatgctagtcttagctattaagcatgcatctagaccggcctcttcttttgcaaaatcaactaaataaagtttgccgtctaatacacccttaaaagctagtgaaccatcacttcttctaaagacagacacatctacatttgtaaatagacagttataccccatgttgcataattgactaacagatagcaaattataaccaagagactctactaaaaacacattagatatagagtgctcattagaaattgcaattttacctagcccttttaccttgccttgattcccatcaccgaatataattgaatcttggg

SEQ ID NO: 31455 - DNA, 307 bp, Zea mays
ttaactgatttagagtcccttgttggatgatccccaggtttagctttgccatttcctgacacaaagcgttctcggaggtcttcgccataagacagtggcaggaagttttacgactcagcgcatctgccactacattggccttgcctaggtgataatggatcttcagttcataatctttaatgagctccagccatcgtctttgcctcatatttaactctgactgggtaaagatgtacttcaaacttttatgatctgtatatatgtgacagatattacccagcagatagtgacgctcaatctttaaggc

SEQ ID NO: 31456 - DNA, 371 bp, Zea mays
agcttcgcaacacttcccattttgttcttttggtcaccaatattcacaagaacgatcaaagatctagtgccttagtcgcttctaacagcaagaatgatctaagatctgagcccctagagcctcggtcgctcatgacagctggacacttatgtgttctcttagtcaaccgaggcgctctaccggccactgaatccccaaggttctcggccttaggtaacttaaaaggtcatgctttgacccccctagtcctagggcatcctaacgggacacactgcaactatatcaactaaatatgaaggcacatgcaaaaaaaacgacgtaacagaccccctcactaagggtgtggtggcccttaaatacacaacaccaca

SEQ ID NO: 31457 - DNA, 285 bp, Zea mays
tctttttatcacccctccttttcagacagcttaagcatatcccactcaccccctaatggccacgtgatgaaagccagaaattcttgaacaaggtcccttgtcctgaagtgggtgcacatagcatcaaagacaataatagaagcttgacattcgaaatctatataacaagttggccttttaaaccccaagctgggaggataggattatggataatacccttaatatcttgcctcctatgctaaaccgtcttcatataaaaccaatcctttgcccatgtgttcgggc

SEQ ID NO: 31458 - DNA, 344 bp, Zea mays
agcttttaagatctaatgatccttttgtatccgagcggggggcgtggattgtttcacctccaggaaattatcaagagccgacttgtgccttcaaccacgtgacctttgtagtccattgtaaaagaaatgtctctatgctatttactcatacattacaacaggtttttttgtaagtttacactctatgcaagtaacctagagcctttaccactgaaatggtttaaggtaggttgcctaaatacaggggaggtggaaactggaccaataatggatccgtatatgtatactgccgagggtgccatttattaaatacacagtacatgtgttcttattaagataaagaa

SEQ ID NO: 31459 - DNA, 187 bp, Zea mays
cagtgcacgaccaccacccgagaaaaacgcccacaaactccagcaaggcgagcaaacgcaacgagacccaaactgggagaaagatattcttggaacaagacatgagaacccaaccaaaaaccccagggccggaacaacaaaccgaagaaacaattccacacaaaccgtaccacccaccacaaagaaa

SEQ ID NO: 31460 - DNA, 368 bp, Zea mays
gcatgctagaaggagactgctctttagtgataccctgcgcagcgcaccaagctgattgcccacacacggccactataagctgggggctggatatcggcgggccactatctacggctcaagggaacctcaagttcaccttcctcactgttgaatattataccacgtggatcgaagccagggaaatatccacaataacgtggaaaactccctataatcttttgtggcaaaacattgtgtgccgattcagagtcccgccctaactatacattcgataatggaaaacagcttgacagccaagacttcacggacttctgcttctccatcggcaccaagcttgcctttgcctcggcataccaccctcaatccaa

SEQ ID NO: 31461 - DNA, 110 bp, Zea mays
agagccgaaacaaggaagaaccagagaagagaaatagggaaacgaccgaaagagagagactccaaaacgaagagaaagagcggggccgcgggggaaggggagccgaaacc

SEQ ID NO: 31462 - DNA, 373 bp, Zea mays
agcttttcagtttccactcacatatttacaccgctacgggccaagcccaagcgagaagttcttgtaaaatactccgtactacttactgaaaagaataaaaacttcggtcttaaaagtttttactactagcaaagactcctcgactcgagcgaggtcgaggaaaagtttcgccatccggtttggttgtgttggattttccttctattaaaccacaccatctgtgctcctgactccgctgctctggtctttcccaccaccgcgaacacctggcaatggcggcccccgccccgtcggccacctcccagatgtcctcaagcggcctcctttcttactgagctcacccaccacccgccacgcccccgactcccacgaa

SEQ ID NO: 31463 - DNA, 324 bp, Zea mays
tcaagcgccgccagaacacccatgaagcgtggttgtttttctgcacatgtcacacaacacgcgtcgaggaggaaggcgtgctcaccatgagcgagccgctccgcaagatgaggtgccccagcagcagcacctgccgcccccgcccccgatgtcgattgagcagatgatcctgatgcagactcaggcagcccaagctatcggtcagactttggccgccatttagcagcagcagcagcagcaacagcagcaagcaccaccccagcctcagatgcctcagatgcctagagataagcgtgctgaattcatgagaggtcatccaccaac

SEQ ID NO: 31464 - DNA, 382 bp, Zea mays
cttaagcaccgcagctgcagctgggaggggaaatcctcatagtgctaagcggcgatgccacagccagcccacgctagtcttagctattaagcatgcatctagaccggcctcttcttttgcaaaatcaactaaataaagtttgccgtctaatacacccttaaaagctagtgaaccatcacttcttctaaagacagacacatctacatttgtaaatagacaggtatatcccatattgcataattgactcacagatagcagattatatccaagagactcaactaaaaacacattagatatggagtgctcattagaaattgcaattttacctaaaccttttaccttgccttgagtcccatcaccgaatataattgaatcttgggaa

SEQ ID NO: 31465 - DNA, 326 bp, Zea mays
actcaagcttctaccaaccgacggacgcgaaatttctttattatgttcgactgaaacaacgatcaaccatggattctgtaagagcacgataacttggaaatacggatgacatgaatctataaaatctgggtagaaggtgaatctaaattgaactaaaggaacatgcagattctcaagaatctattctgacggtgtacttgtgcggctaggatcctatatattggcagcgaatccgattcaaaaagctaaaccaaacacacacctaaataaaaactaaataccttataattactcactaactaaataataaaaataaataccccgcc

SEQ ID NO: 31466 - DNA, 362 bp, Zea mays
  unsure (1)..(362): unsure at all n locations
agcttgtgcaggttattttttttttgtcctangaagcanaggcaccaagcgaaccactcatcgttgcactgatcaagtggttcaagtctccaactgtccagaaacaaactgtcaaaagtattcaaaaatttcaaaaatactaaatgacaacatgatttctgtaaacactaagaagcaaattcattgtttgaaatctagtacagatcaaatgccagcttgttttttttatttcggcagcaagtgacaccgctcatcgttgcaatgatcaagtggttcaagtctccaactattcagaaacaaactgtcagaagtattcaagaattttaaaacactaaatgacaacatgatttatgtaaacacta

SEQ ID NO: 31467 - DNA, 257 bp, Zea mays
aaacaaagagacataaggtgtccgatacggctcacacgcacctcaaaaaggccccgcaaatgccggcggcgacaacaactcgccaacgggcaaccactgcaacgagttcggccaagaccaaaccgacaaacaagacgcgcgagacgcccccggacgaatgccccgtcacatacacccagagagatataacctcccaagcgaatgaacaagacaaaatcgaaacttccatggcgtcgacgaaacgcacccccacacca

SEQ ID NO: 31468 - DNA, 371 bp, Zea mays
agcttgagtgatcacgtcttctgttggtggtagtatggtacgatcaggattcatgaattccaagagtagcagagcatgcaacccagtagcagactagcagctattgtcgttacgccactgtgattagggaacaatcgaatagggataggattggttattgggattggttattaggttggggtgctgggcgcctgacggcgcaggccggctgaaacgtcgtgagcgcttgcagttgcagaagatgaatttggaggcacgaaagattttgacaccagtaccacacgcttgcatgtgtgcacaacagtcatcgtccatccatttaatcatgcatacctagaaagatccacatgtgacgtacacagacaataaag

SEQ ID NO: 31469 - DNA, 275 bp, Zea mays
attctgagaaagacacggttcgtagcgcatgccaagcaggaaagcaagttggtgcccatcatccacacaagaacatcatgacgaccgacaggccgcttgagctactccacatggatttattccgcccaattgcttacataagcattggcgggagtaagtattgtcttgtaataatggatgattattctcgcttcacttgggcattctttttgtaggaaaaatctcaaacccaagagactttaaagggattcttgagacgggctcaaaacgagttc

SEQ ID NO: 31470 - DNA, 351 bp, Zea mays
agcttgtgagggagttctcttttctgactctcaactgttgattgtgagaaagacatgatttgtaccgcatgccaagcagggaagcaggttggagttcatcatccacattataacatcatgatgaccgattggccgcttgagctactccacatggacctatttggtctgaacgcttacatatacatcggtaggagtacggactgcctcgtaattgcggatgactattctcgcttcacttgggtattctttttgcaggacaaaactcacactcaatagaccttgtacaagatatttaacatgggctcaaaatgagttgggattgcggatcaaacagatcacaagcgagaatgg

SEQ ID NO: 31471 - DNA, 350 bp, Zea mays
  unsure (1)..(350): unsure at all n locations
agcttgaagccanggtaagtttcttatgctaataatacgcgaattgactcaagcctatctacgggtgcataggtttcaccgaaatccaaaccttcgacttgtgagtaccccttggccacaagtcgagctttgttccttgttaccacaccatgctcgtattgtttgttgcggaagacccacttggttcctacaacattttggttatgacgtggaactaaatgccatacctcgttctctctcgaagttgaagagctctttttgcatcgccatcacccaatcagaatcttgaagtgctttctctaccctgtgtggctcagtagatgaaacataagagtattgctcacacaaat

SEQ ID NO: 31472 - DNA, 366 bp, Zea mays
agcttttgacaaaacaaattctctatcctactattttcaaaatctctcaagtggtagctgatccatttatcgctttggcctttattttctccccctttggcatcaagcaccaaaacgggatcaatcttggccttttaaccccattgcctcaccaaagtcttcaattaagagcaaatggcaataagatttcatgagatgaacttggagttagttaccctctcatcggagtgcagtggaagtctttcatggtccaagtccaccttttccctttcaatcctccttcgagactaaatcaagcaaactcaagcaaatggttagtctcaaagggtcaagttgtaacacatctccccctaaacatgtgcatca

SEQ ID NO: 31473 - DNA, 289 bp, Zea mays
cgaagctgcaaaaagctttaacttttaaaagttattgagggaacttcaagataaatgtctgaacttcagcaacgttgcgtgcaacaactgaatgaagtcttcaactaacttggagctagttctgaaaagtttaaaccttcagctgaaaatctgccaagcatctttgatccatatgaaggcgagggtgaagctcttgagaaatcataacttgggcatggcgaattctgcgctctggtagcttctcgtggcacaactgtcacttttatgaaggctggctgcacgccccgga

SEQ ID NO: 31474 - DNA, 364 bp, Zea mays
  unsure (1)..(364): unsure at all n locations
agcttgagggtgtgcttattattgcagncgatgcccgagcaggctttataggtgcgggcacgggccacggcgtcggctggccgttggggcgacgtggggcgcgcgcgggcgtgctctggcgcacacagagcgcgtcgaacacgtggagcttttcttctgcccgtgttccatagctcacccaagtcgcaaacgtgcgaatcttggcaaaaatccggcgcgagtcttttcctggcacctagggttgtttctcatccgtgagctgccttggcagatatggcctaggtagggagatcttccgtcgccaattcgggtgtgtcacactgcccacctcgcgataaaaaccatgccaaggcatgtcaaacgt

SEQ ID NO: 31475 - DNA, 365 bp, Zea mays
agctttatcaaatggatgtttttgcgtcttcctcaatggactaaataaggaagaggtctatattgagcaacctcccggctttgaagatagtgagtaccctaaccatgtttataaactctcaaatgcgctttatgggttcaaacaaaccccaagagcatggtatgaatgtctacgagattttcttatcactaatggcttcaaagtcggtaaagccgatcctacactctttactaaaactgtcgcaaaagatttgtttgtatgccaaatttatattgatgatatcatattcggttctactaacaaatctacttgtgaagagtttagtaggatcatgatacaaaaattctaggtatatatgatggggg

SEQ ID NO: 31476 - DNA, 308 bp, Zea mays
tctgcgcgtcgatccgtcctctgtctgagcaggcgctgcgcccttccacgggatcatccctgggaagcgcgcccagcccttcgggctgacttgacctctcagtctgctttgggacacccttcaacttttgaagggagaccctgacgttcgaagtggtcgggtttcgaggaacctaccacgccgtgctagggaggccatgctacgcgaagttcatggccgttcccaactacacctacctgaagctcaagatgccgggcctcaacggggtcatcaccgtcggccccacgtacaaacacgcgctcgaatgc

SEQ ID NO: 31477 - DNA, 376 bp, Zea mays
agcttgaatagcacaagatatttgtgattgtggaagtttacccgacatatgaagctgagagcctgagacataattttaaattgaactgtgtaaagaattaaggaatacctgaaattctattcgacctagaacagaatatatgaaattagagtagtttgcttagaaacgtggacaatctttatgaacgagaggaggctctaaacaagtaatttgtgtgttaaacattgtttcgtttagttaaaatatgtcccattcagaaaactatatatgactttcatgttacaagaatgagactttaataaggttagaaacaattcaacctgcaaagtatgcccaccacgttgaggtcctcctccctgcgagcacctcctttagc

SEQ ID NO: 31478 - DNA, 302 bp, Zea mays
gccgccgatgtgtatctatattaaccaaacttggtgccggtctatcttctaacctagggcgtatcctcccttggaactcacatgaaataggtagctctaggggcagggaagagatttttcacagtcgacatggcgagattcctacgcttggccgctcagcaaagcgaagaacacgggcagaagcaacgtgccacgtgtacgacgcgttctgccggccaaaacacgctcgcgcgcgccctcgcgagccccgcgccgcgcccgagccaaagccaccgccctggaccgggtccgcgcctataaaa

SEQ ID NO: 31479 - DNA, 373 bp, Zea mays
agcttcatgaagagggacctttttttatcttacacaaacagcttcaaccgaaggtcgcttcttcctagaagaccttcggcgacgaagcataggcccaacagtagcctctttcgcggtgctagatcgtttttcgtaacgagcttgatccgtgaaaaaagtttcttaagcttcggagcgccgaaggtctaaaaaacaccttccctgagctcgttgtcgagaaacgattcaatttctcagcgtgtagcggccccaccttgcagagttactgttcggtctctgcagtccaccacgcagcgagtacgagcgggtgtccgcctggtgtaaaaatcctggcgcttcgccttcttacctgcaacactatataaacagacga

SEQ ID NO: 31480 - DNA, 312 bp, Zea mays
gctgggacgaggaactcttatttctacaaagcgtgctcctccccgtaaaacaaacgtaaaacaaaggacaaagccgaaagtaaaaaaaacgctgctgacaatgacaaagggacaaaacgaacaaatgatcaaatagaatcgcataagtaatccaaactaattgttgagcaccaaatttggcaacaggcagtttgccttagcagcgcggacaatccgcgagagcacaaaaacagccatgattccggaattcttgcgggatttgtcagtaaaacacgccggactaactcacgaaccgcttgttatgggtacaca

SEQ ID NO: 31481 - DNA, 372 bp, Zea mays
  unsure (1)..(372): unsure at all n locations
agcttcagctccatctatgttattgattgctnttgagtcagcccagtttccctcagcccttctggcagcttcctgactcccatgaatagcaatgggtccttgatccgaaggtatcttcatgcagaggtaagtaggatgaagaattgcttcgaatgcattgagggtgccacgaccaataattgcattgtaagggtattccatgtcaacaatgtcaaacacaacttgctcagttctggtgttgttgatgaatccgaaggtcactggcatggtaatcttgcctagtgctacaatctgtcttcctccgaagccacagagagggtgtgtagcatcatgaatcttatcttctggctcttgcatttgcctgaaggcctt

SEQ ID NO: 31482 - DNA, 323 bp, Zea mays
ccgaccaacctcgttcatgcagcggagactattctttttttttatccaaattccttcggctctcctagccgctatttaactcccatgcacagcaatgggttcctgtacccatggtatctttatgcaaaagtctgctgggtggagtatagcttaaaaggcatggagcgtacctcgagcagggattgcatcgtatggaaactccatatcaagaatatccaagacaaattgtgcaccccttgggatatgaacgtagcccaacgtgaccggcattgctatcttgtcaactgccacacatatgttatccccccaacccatacagaagg

SEQ ID NO: 31483 - DNA, 375 bp, Zea mays
agcttgagtcagttctcttgttttatataattgatgcccaaaaggataatgtgggtacgaaacacattcgtgagaagttaagggctggaaaagccaaatgtttcaaagaagatgatcaaggcattgtatggtttaataaccgcatagtggtgccgaagaatgaagagatccgccagcaaattcttgatgaagcacatcttagccgctactctattcatcccggaagcactaagatgtaccaagacttgaagcaacattactggtggacaaagatgaagatcgaaattgcacgctatgtggctagatgtgacacctgcagacgtgtcaaagccatacatttgaaagctgccggtccattacagtcactaccaatac

SEQ ID NO: 31484 - DNA, 302 bp, Zea mays
ctagggaactacgcacgggaccaataagtttgagtcagaactaaaagcgccggccagatgacccccgcccgaacgaccacgaccaacacccaacataagacctccctagtaaaccagccaagaccagaaccacgacagccctcaaggtagcactgttaatccgggaggacactccatgttccaaaaaaaaagcaaaaatctcgtttaaccatccgggtaacaacaacaatggaaactcaccattcggaacatcagcaccatataggagcgactgcatacagtcagccggagccatagcataa

SEQ ID NO: 31485 - DNA, 367 bp, Zea mays
tgcaagcatacgaagaggcgccattccttcgtggtctagacggcgacggcagagccgacccatgttaggcctagcactccaccgctgggggaggacatctctatgcaaaatctaccaagtatagctgaccctccaacacacccttaaatgcgattgaatcaccacgttcgacaaagacagagacacctacatcaagaacagagacagttgtaccccacttgacagtattgagatacagagagagaactcggacctacagaatctacaagagacacattggaaatggcaggagcaggcgataaagaattgtacccacttctctgaccaaaccctgattccatccccgaatgcgataactccgagggga

SEQ ID NO: 31486 - DNA, 368 bp, Zea mays
  unsure (1)..(368): unsure at all n locations
agcttatgaagattcttcttcttatcgtgggctantccgcgatgccagagccaacccatgttagtcttagcaattaagcaagtgtcgagttcagctctattaaaatcaactaagtatagctgaccctctaacactcccttaaatgctactgaatcatcacttcttctaaagaaagtaacacctaaatctgtaaaaagacagttatagcccattttgcataattgagaaacagaaagcaaattgtaatgtaaagaatctacaagaaaaacattggaaatagaatggtcaggagatatagcaattttaccaattcctttgaccaaaccttgatttccatccccgaatgtgatagctctttggggatcatg

SEQ ID NO: 31487 - DNA, 284 bp, Zea mays
ttttttttactcatactacgaacccgactcaagcctacttaccggtgcacaagatacaccaaaatacacacctttaactagagcagaacccctaggcccaaggaaaagcattgctccttgccaccacaccatgctcatctagcttgctgcggaagacccacttggctcctacaatattctgattaggacgtggaacaagatgcctactccattcctcaagaagtagttgagtacctcttgcatcgccaacacccaatctgaatccctaaatgcagctaccaccc

SEQ ID NO: 31488 - DNA, 369 bp, Zea mays
agcttgccttcgcctcatttgttcacccacaatccaacggcgtcgtagagtgcgccaacgacaagattttcacggcaatcaagaaaatgctcctcgacgacaagaagggtaaatgggccgacctgctacctgaagcagtctgggcactgaacacgaccgagtgtcgggcgaccggattcactccctttcacctgctatacggatcggaggccatgaccccgcaggaaatgaagcatgggtccccgcggacaagcgcttcagcagtacccgacgtcgatgagctaacctccaaagatctcatccacggagactgtgtcttcgccctccaggccctcaacaaataccaagtccaaatgaaggcctggcgcg

SEQ ID NO: 31489 - DNA, 313 bp, Zea mays
  unsure (1)..(313): unsure at all n locations
cggatattcttcatcagaacactttggatattatcgngacaaatgaaaattcttcttcacgaagcatgaaaagaagggaaggtgttttttctgtccacactccaaaatggtacatatgtggaatttcatgcatccgcaaagaattgaaccataaaaaacaagtatattacattcagggttacaagatattacacatattacatttcagatatttttataatagcacctagtcttccctaagtactacttccgcagcttcgttcacgagttgattgacaacttgatccatgatagcttcagccatctttctaat

SEQ ID NO: 31490 - DNA, 367 bp, Zea mays
agcttcggatctttattttttttactcttgtcaatatgacccaaaacaacctgggaatcagttttaagtatggcccttctgatccccattgcttttagcttccgaagacccagaagcaaggcttcgtactcggcaatgttatttgtgcaactaaaatcaagttttgcagcatagcaagttttaactttggaaggtgaaaccaacacagcagccgctcccgctccgaaggttccccaagacccatcgcaaaacactgtccatgcttcggcgtctttatttgtttcttcctcctgagcccctggcgtccagtcagcaatgaagtctgctaacgcctgggactgaatcgaagatctatgaacatattcaa

SEQ ID NO: 31491 - DNA, 325 bp, Zea mays
tataaaactcaagcttatcacaccacctctactaatcttttatccctgcgagagaaggtgtgattgatgaacctatgatagatcctcctcagaaacaagcgtggcttccaaaacctaaccatcttaggaacacacttgacacatttcccaacatctctagcgatccccttcctagagcccctcagtcatctgaaaagaaagtcgccttctacaaacaaaatccacccaagagagaggtgaggtaccattgcgaatatcgtgagagggatgggcatctagcttctttttgctttacgaggaagagagatgaccggcggctttataa

SEQ ID NO: 31492 - DNA, 368 bp, Zea mays
agcttgtaaagaagattatttgttgagagatttatactctaaactttacaagattacttctttcattactatacattatgatagcagtgtgctatttgtctaactaaagataagatgttttaagaaaaaacaaagcacaatgatgtggtatcacttttattaaggtgtcattgctaaaggtgatgttaggatatgcaagatatgtactcgtgataaacttgctaatatgttgataaagtttgttattggaggctggagctaagcttgagctatggtgaggcttagttagtaatactattttagtcctagagatttttagcatcagtaattatttattattgaagtgagttgattgatgatacttcata

SEQ ID NO: 31493 - DNA, 224 bp, Zea mays
tttttttatagagagaacggcccccaactccattgcgaacactacaagagccacaagaagggaccctggacaataccaagaagaagcttgcgcgcggcacaatgcttcttcctaagctagccgccaacaaaagctagaacctaaagagagcttcgaccaccaaacaacgttgcaacagcaccggagctccgaagggccagaatcgccaagctcattcctccaaa

SEQ ID NO: 31494 - DNA, 362 bp, Zea mays
  unsure (1)..(362): unsure at all n locations
agctttgttcatgctcttttgttttctgaggntctgctaggcatgtgctcacttattgtaaacttttctttgtatgtcagggaacctattaaacatactaaaaccctatattgtcttttagacgcaagcttttaacagaaacgtcttcttgcattctagccgcgtcgtcgtcatctctttaggggcgtctactgcgccatgcaccctcctcaccctgcctacattgatggtgagaaccaggatgctataaatctgtaagcctgtcgtgttggtttatcataatagaaatattgtattaaacatataaggtagttagtgaaccagctctttagttggctactgtcatgagtgtaatgactgac

SEQ ID NO: 31495 - DNA, 279 bp, Zea mays
aactgcgcacacacaagagaaaataggtcaccaagagactaagaccaactccagcaacactggctatcccactctgcatccgcattatacacgctctaagtcactatctcgctctccaacaacctccgcatccgtctctgcaaaatacacgcccagactttcactcctaatactcacgttgcctctctcattagtgtcgcctgcctttaacctcctctaacgtaatcggaaaactgtaccactattctgcttaccgccagaagggagggggtcattgct

SEQ ID NO: 31496 - DNA, 365 bp, Zea mays
agctttcacattcttcttctttcagttctgtattgtctggtgctatacatagttgtaggtccagttaattctacaagtgctaagttatttacagtcttctgcttacgttgtatcttgtaagctcagctctccaataatcactggaatgtgtagaactcataactcatttcctagcaggtcgatttctgattttctgttaatttacaaacaaaagtatgaaaagaaaagagcaccatgccgctgttgcttgctggtggcccctaccagagctacagctagctttagcactgaaccatagacctaatgactatttttccaacagatctagagcgtgttctaccatttgagagatgatgacatgtctt

SEQ ID NO: 31497 - DNA, 306 bp, Zea mays
ggataggatttccacttttattcggacgccatgtgctgcacattgcttgaacctagctaatgttcggaggacatacgaaacttgaaggttttcaagaaaccaatagcacgtgcaaagcctgtgacaactttcatatacccacacgggagaaaattcgttgccatgatagagaaaactgctggggctgattttgtgaggcctgcacctactcgccttgctactttttttttcacattgaagagctcgtttaaccacaatgacgccttgaaggctttatttgcaagcacaaccttggactgataacac

SEQ ID NO: 31498 - DNA, 385 bp, Zea mays
ggatcttaatcacctgcagctgcagcttataaattttgtttttgcgtcttcctcaatggactaaataaggaagaggtctatattgagcaacctcccggctttgaagatagtgagtaccctaaccatgtttataaactctcaaatgcgctttatgggttcaaacaaaccccaagagcatgggatgaatgtctacaagattttcttatcactaatggctccaaagtcggtaaagccgatcctacactctttactaaaactgtcgcaaaagatttgtttgtatgccaaatttatattgatgatatcatattcggttctactaacaaatctacttgtgaagagtttagtaggatcatgatacaaaaactctatgtatatatgatggggg

SEQ ID NO: 31499 - DNA, 309 bp, Zea mays
tctgcgcgttgttccgttctcttttttagcacgcgctgcgcccttcctcgggatcattcctgggaagcgcgaccagcccctctggcgactcgacctcccagcctgcttcgggacaccctccaactttcgaagggagaccttgacgctcgaagtggctgggttccgaggaacctaccatgccgtgctagggaggccatgctatgcgaagtttatggtcgtccccaactacacctacctgaagctcaagatgccgggccccaacggggtcatcaccgtcggccccacgtacaaacacgcgctcttaatgtc

SEQ ID NO: 31500 - DNA, 374 bp, Zea mays
agcttgcttctctggattttgtggtctcaaaaacctccctgcactccagattgtgtttaaggttgactttacgaacatctgttgcctgttggtgtagccttactgcaagacggttgtgaatgagaacatgtagggggcagtcggcccttttttttaacgaaaacggcaggagatgtgtccatcaattatggagaaagagtttagagggaacaaacaacggtttgagaccggacaagtcacacccgagctcacctaacaggaggctaagcccacacacaaacagctctaggctagcagttgtatgaaaaattagagtaaagtactagcggtccacgaacttggcacgttgtgtcacttacccctctaacttagaa

SEQ ID NO: 31501 - DNA, 317 bp, Zea mays
tcttgtagaagggaagacgagtactgcgcgccgctcggcacgggtgcactatttgccagtaggctgaacagacgtgccgtctgctgggcgggtctgacaccgtctgccagcagatgggacatggcacatttaatgtcgagagggcacgtcgtccgttagcgtggtggcaggcggcgcgtcctctccgcaataaatgcaaaggctgcatggctgtaaggaccttgcatcaggctcggtctgctggcttatgtcacgagccacatgccacgcggcagcagcgggccttcgcctgagcaggaagcgtacggcaaggcctg

SEQ ID NO: 31502 - DNA, 372 bp, Zea mays
  unsure (1)..(372): unsure at all n locations
agcttgagcacttttcggattacttttgacattattgngataaatggcaattcttcttcacgaagcatgaaaagaagggaaggtgttttttcgccaaagactcaaaaatggtacgtatgtaaagtttcatgcatcgtaaagaattgaaccacaaagaaaaataaaacaagtatattacatgcaggattacaagatattacatatattacatttaaaatgtttttacaacagcatttagtcttccctaagtactacctctgcagcttcgttcaacagtcgatcgacaacttcatccataatagcttcagccatcttttttaatctcatcgtcacccctaggccttgcacccggagatacttcagtaggatctg

SEQ ID NO: 31503 - DNA, 317 bp, Zea mays
tgacgaggaagcaggacaacttgtgctttttcgacaaaacatcgagcaggaatgggtaggccgagcactagccggagaagcgcgtcatcaggcctaggatgtccagcgcccaatcactgacgatgccagggcaaggctgcccctggcttccagtggggtcggccagaacctggctgcaccggcaattctacttcgagcgatgtcggagccatccaccaccgaggggcagcgtatccacggagaactcaagaatctcctggaggatgtcgtggtccgaccggccgagagctctgcctccccaaggcaaggttgccccc

SEQ ID NO: 31504 - DNA, 374 bp, Zea mays
  unsure (1)..(374): unsure at all n locations
agcttcttctcgtcatcgattatttattccaacgngagtgtctcctgctcatggtgtttgtttggggtttcaagtaagaaacatggattcatgcttggcgttggtttatgaaaatgactcagaagtctgatctatgaaaaaaatattacgaagaaaaatgtcacgcatgcaaaaaagggaatttaagtataatacattattcaaacaaaagaaattgcatgcaaagctcttctttaaataatattacctccatccaaaaatctaattcaagaatctcggtgatacttatctactactacgcattgtgcaagggtaccaagtgagcttggtgagagatgtactacatatgttttctatcatagatatagacataa

SEQ ID NO: 31505 - DNA, 317 bp, Zea mays
tgcggctgaagcacgctggaaagtttttatatccgtatcaggcccagcgggttggaaagaaccagctggtgcaccatgtgtctgacgtagtgctggactttcatcaagaactgtcttgaaaggtgcaggatccccaaaacgatttgaagcatcaatctgttgcaaagttaaaagagaacaccagaattcttagattagctattatgaccagacagattataataaaacactaacagacaatatcaccaaacgaagttacttgatgcttgatttataacatgactactgacagaaattctgttgttacttgttactgc

SEQ ID NO: 31506 - DNA, 367 bp, Zea mays
agcttttactgagccaggctatgtttgagatatgtttggcatgtcatttgttgcagccctgtgatggaattgtagaaacctgagtgttgttttcaggcttctaaaacatgtgaggtgatataattgcttagccctgtgattgaattatagaaagctgagtgcagttttcaggcttctgataatttgagatgatcaagttgcttagccctgtgatgttttctttcaaaatagtgaactgtatactacacctgttctttttttgctgaaaaattactgagggcaattggatgtttgtgatgacagttgaactgaggccatggttgcaaaattttctgtttcatgttgtttcattgaaaaaattgatgtg

SEQ ID NO: 31507 - DNA, 316 bp, Zea mays
tcaagcttgacgacgtgtcggagtggactttgtaaccaaaaaaaaaaaacgtgtctaagcagtaagcaccacgatctttcgtcttttgcattgcaggccacggaggtgccggtgctgccgaaagacgagaagtggccattccttctgcggttcccgatcagcgcgttcggcatgtgcctgggcgtgagcagccaggccatcctgtggaagaccctggcgtcggcggcgccgacggcgttcctgcacgtgagccccgcggtgagccacgcgctgtggtacgcggcgctggcgctgacggtgctggtgtccggcatct

SEQ ID NO: 31508 - DNA, 368 bp, Zea mays
agcttgtgaagattcttcattccaacatgtgctagtcggcgatgccagagccagcccatgttagtcttagcaattaagcaagtatcgagttcagctctttcaaaatctaccaagtatagctgaccctctaacactcccttaaatgctattgaatcatcacttcttctaaagacagtgacacctacatcagtgaatagacagttgtagcccatttgacataattgagatacggaaagcaaattgtaatctaaagaatctacaagaaaaacattggaaatagaatggtcaggagatatagctattttaccaagacctttgaccaacccttgatttccatccccgaatgtgatagctcgttggggattttg

SEQ ID NO: 31509 - DNA, 330 bp, Zea mays
aactcaagcttatcctatgtgcttttgaacaattatcaagccttaatatcaacttccataaaagtgaaattttctgctttggcgaggccaaagatagtgaacatttgtactcccagcttttcgggtgtaagacagggacttatccattcagatatttaggcataccgatgcacgttaggaagcttagtaatgctgattggtctaccctgctcgaacgcatagaaaagaaattgggtagctggaagggcaagcatctatcttatggaggacgtctggtccttattaattcggccctttcgagccttcctttgtatatgtcgtctttctttg

SEQ ID NO: 31510 - DNA, 371 bp, Zea mays
agcttctctcgaatatgctttcttctaccgtacactccattttaacattaacatgcatgcgaacagtctatattattgtttactacctatctacatcattctcttttttctttgctaatacatatatcgtttcattagcttttatcctcttaatataatcaatcttattaaaatgatgtaaggatattgtcggcgtttcgaccccggggggtccctggaccgacgagtaaatttgtcgctgcgtgtcccaccccagatgagttggcgcgagatggaacacaagggggaaaacgcggctcgtgttatactgcgccagggggatgcgctcgtaatatgggttacaagcgtccgcgagggagagagagtgacct

SEQ ID NO: 31511 - DNA, 310 bp, Zea mays
cctaaagggagaacacattttgtgtactaaccaacgttcatttcgacaaagataggatttgtagcgcatgtcaagcaggaaagcaagttggcacccaccatccacacaagaacatcatgacgaccgacaggccgctcgagctactccatatggatttatttggccccagtgcttacataagcatcggcgggagtaagtattgtcttgtaatagcggatgactattctcgcttcaattgggtattctttttgcaggaaaaatctcaaacccaagagactttaaagggattcttgagacacgctcaaaatga

SEQ ID NO: 31512 - DNA, 371 bp, Zea mays
agcttgtactcccgataattgtggttcatgctcagagccggctaacaagaagcagaagaaggaggcacaaagaagggtacaacatgtaggggtgcaaggacccttcatcaagtcaagatggtctcacatcccgattaccttctcccaagaggatcttcagctcaaggattaccctcacaatgatgctacggttatctcttgtgttatcaaaggatttctggtccacaatgttttggttgacacaggcagtgcagcggatattatatttgctaaggccttcagacagatgcaagagcccgaagataagatccatgacaccacacatcccctttgtggcttcggaggaaggcagattgtagcacttggcaaga

SEQ ID NO: 31513 - DNA, 315 bp, Zea mays
tgagggagatgagcgcgcttgttatagcacggtggtgggaatgagttgagcaccgctcccggcgctcagatcctctctcaaagtttatggaggtagcaggtacggtggttacacgacggcacaccgtcggttcgccggacgcagccgggtcaagtccaaaatgccagtctgtcctctcctcctctcagtcgccgcctatattcctctcccctccgtatcacacgtctggcctactcacttcacccactcacggcccaagagccggacgttgggccgtgtcacccgttggctccgtctgagtccatcagcgcgcgc

SEQ ID NO: 31514 - DNA, 371 bp, Zea mays
  unsure (1)..(371): unsure at all n locations
agcttcatgaatgatttnttggcgtcacgtacaagcagctttagccgaagctgtttctttctgcagggccttcggcgacgaagcgtggtcccaacagtagccccttcacggtgctagatcgtttttcgcaacgagcttgatccgtgaaaaaaaagtctcttatgcttcatgaagccgaaggtccaaaaaacaccttccctgagctcgttgtcgagaaacgatataattttcgagcgtgtagtgattccatcatgcgagttcactattctggtttttgcggtccactgttcagcgggtgcgagcaatcgtttgcttggtgtaaaaatcctgacgattcacctttcttcctgcaacactatataaaccaaccg

SEQ ID NO: 31515 - DNA, 312 bp, Zea mays
tgataaaagtcttttcatcctatggcttggtgaagatatcggctaattggttgtgggtgctaacataagcaatttcaatatcgcccttgttggtgatctctcaaaaagtgataccggatgtctatgtgcttactgcggctgtgttcaacaggattatccgccatgcggattgcactctcattatcacataggagagggactttgctcaacttgtagccatagtccctaagggtttgcctcatccagagtaattgtgcacaacactgtcctacagcattatactcggctccggtggttgatagaggtactgaa

SEQ ID NO: 31516 - DNA, 354 bp, Zea mays
agcttatgaagaaccttcatctttgatgcgctagatgctggtgccagagccaccccatattagtcttagcgattaaacatgcatctagatcggcattctcttcagcgaaatcaactaaataaagtttgccgtctaatacacctttaaaagctaatgaaccttcacttcttctaaagacagatatatcaatatttggaaacaaacaattatagcccgtatgacataattgacttacagaaagcaaattgtaaccaagcgattctactaacaatacatcggaaatcgaatgctcggtactgatggctattttacccaaacctttgaccttgccatgattcccatctccaaagataa

SEQ ID NO: 31517 - DNA, 320 bp, Zea mays
tactcacgctcctaaaaagaaccgccaaacatatttctatattgcgcccacgagaaggcccccaccgccacaaaaaaacaataacgggcacaaaaagagcatactgaccagaaaatcccaccaatcgaagcttcacccaacaataataaaacaagctcacaacatgcaaaaaaacaagcaaacaaagcggcaaaccagaaatatatcaaaaacctatcaccgaagcttctcacaactcaaatcccaactatcagagaagatatactcacctcctgacataacgccgattcatggtaactgccggcggcctccgtcctccg

SEQ ID NO: 31518 - DNA, 366 bp, Zea mays
  unsure (1)..(366): unsure at all n locations
agcttctagatatgtctatgtgttttatgatgagggngaattggtagttacgaaggtcgcagctaagcaacttcgtcggttgcccatcattcctcggctttcaagggtgttcctcaacaaggaaatagctctgcatatgacatggccaaagaatggtgtacgtctcgtcactgatccagacataatggtccatccgtcggacggtgatgcgtggaaagcaattgacgagtttgatcccgaatttgcaaacgaccctacgagtgtacggcttggtctatcgacggacggattcacacctttcaataccagtgcaagcccttactcctgttggcctgtcttcattgtgccatataatcttactcctga

SEQ ID NO: 31519 - DNA, 315 bp, Zea mays
tttgataaattagaacatgcaattatcattgacatattgaggcataaggggtttggggccaaatggattcactggatctcattgattttaggctctgacacatcccaagtacttttaaatggtgtacctggaagacgctttcactgcaggcgcgacgtcagataaggggaccccctgtcccccactctctttgtcctggcagcagatctccttcagtcaattgttaacaaggctagagactgtggcatcctcaggcttccacttccgactacatgtgggactgacttcccggttattcaatatgcagatgacact

SEQ ID NO: 31520 - DNA, 352 bp, Zea mays
agcttatggccatttgttattgactgggcaccccctatactagttgtgtcaaacctatctcatggtgcaaagatctcatgagtctccgcatctttgagcagattgtaccctagcgctactcctttggctttaactcttgtcaccctatcatgcaggtcttggatgatgagcaataccatgagctacctactacacctgggtctggacgcgcaactgatcaccatacctcattcctgggaattggatcacatcatttgtattgcgccaatgaccgctgaactacattgcgtgctctatcatgtttggtcactaaaagacacagatgtttctgggccatagcgaactactccta

SEQ ID NO: 31521 - DNA, 305 bp, Zea mays
ttagggcattttttatatcacgatttcgctaaacggcgatgactcactcatctccccttgggcttcccaaacccataattgaaaccctgagaagccttcatattaaactctatgggctattgtgcacccttgaacactctttggactgctgtggaaaaactactatgtttagacatataaacacctatggctgacaaaagagagaagtaaccaattaagccttgatgttaggacacaagcgcataggggacccccgaatgtaatatatctacgtcggaattacaatggtcgcgggacaaattagg

SEQ ID NO: 31522 - DNA, 363 bp, Zea mays
agcttagtaaatccataacttctttgtttcaactccaaattaactcgtttaagttgcgttagcttcataataatattaactacacagtaatattattatttgcaccatatcacttacttatataattagatattgtttaaacctatgtttaatagattaatctccttaatcaaagatggtttatctatgattatgatctaactaaaataggatatctactcaatgtataatgtagattagagttatttgtttaaaatctttatcgcatgatttatataatcaacataaagatctagatctaattggttaatcgagtaggtcttacgagaaccatatctttccaactataactccgaatgtagt

SEQ ID NO: 31523 - DNA, 307 bp, Zea mays
tatagggtgttatgtcttgggggtcaatgcacctagggctggcccacatcgcttgagaaggcaaacctctctactagggaaagaaatatctctacttagggagcaatcacacgcaggtgaaaggagagatatactcaattagcctaatatagaaagggagatatgtattctaacaacactgtctccactagaactcgcggcagctcaggccgtacggctggtgagctgccacgtcttgacctttgcagcctggacgaggttgttcccatgggatcaagggggaccaaccttggcatatgttaggttc

SEQ ID NO: 31524 - DNA, 337 bp, Zea mays
tggggtaggcgagcatcgcgtggggagggtgatggggcccacaacgggggcggtgtggcggcctcttccaagatctgtgtgtgcggggagggtatggcctcgtggggatggtagcgaggatcgcggggcgtcaatggcgcccttccatcgacggatagccgaggggcggcgagtgggtatggaaggaagaggatggaaagaagcgcggcgggcgggatgcgaggagcgtgcgccgtcccggcggcggtggggaggagggcggggatccaccaccgatacgggagcggcagaaccgtgcaccactcggcagtgtggacgcctacgatacacacttaat

SEQ ID NO: 31525 - DNA, 325 bp, Zea mays
ttctctaacgctacgttgacgataacccgcgcaactagcgggtcgtaatactggatctgcaatacgcgacgcgatattcacatgacaatcaatatctctgttctgcatattttcttagtgcggcattcttaaattctggaatactggatcagctctcttaatactcaaatactaaatattggagtgttctctgaatacaacatactggataagttcgtggagttgaatatcggagctaatctggacactcggtagcgtctcgtaatgaatatttttgtcggatatcgtgtaagaaaccattctacacatatcatagttgtaatca

SEQ ID NO: 31526 - DNA, 372 bp, Zea mays
agcttgaggctgtgtatagattatcttcctcttaatgcggtaactatcaagaacaagtatcctttgcctcgtattgatgttctctttgaccagttggtcggggccaaggtgttttccaagatagaccttcgctctggctaccatcagatcaaaatacgagcaagcgatattccgaagacggcattctcaaccagatatgggctatatgaattcttggtgatgtcattcgggctgacaaatgcaccagcatatttcatgtatctgatgaattctgttttcatgccggagttggacaagttcgtggtggttttcatcgatgatattttggtgtactcaaagaacgaagaagaacatgccgggcatttgcatgta

SEQ ID NO: 31527 - DNA, 313 bp, Zea mays
  unsure (1)..(313): unsure at all n locations
caccaaagcaaccncgacacattcaagnacccccaggaacagagacgacaaggcaagacaaacggcgcncccaaagcccaaaccaaaccaacncaaacaagagcaaaccgccaaagaccaacggaaagcgcgcaaaaccccagacagcagcacaacagacaagcganccgccgagaacccacaaaaaatgcaaccaaaagcagaaaactaggaccctatggaaatcttacaaagtccactatacccttgcgattatcatcaccacaagatttgacacttagaaaggccaaacaatgcaaaacgtaaattttgc

SEQ ID NO: 31528 - DNA, 254 bp, Zea mays
agctcgcgagcgagaatttttttttttcccggagagaagtcacgctgctagactctaaccccgccgagtactggccgggtattccctaaccggccttttattcttgtacaacagtagtacgtaccccgcgaagctcaccagccttggaagagcccttctcgtaacttggcggacactcccgaccacagaaccccgctgcgcacgtggacggcgaatcggactccccgacgacaagccgtacctcgacggaccgc

SEQ ID NO: 31529 - DNA, 372 bp, Zea mays
  unsure (1)..(372): unsure at all n locations
agcttcatcttgctttctaactaatattatganctctgatcacatggacttgttttcttaatcttgttattaggctaccaaagaacttgtggccatcggatctgcttatcctcaactgcattgccctcgaggagcctaaattccttgtgccagagaatggtgagatggctgatatccaagacaaggaaattcgtattactataagcacatatgatcagtggatgtcactctctgttttggccagctccccaatccacgctataaggcccactttggttttcatgactgcctaatttaacttctcatttagtgacatgttgtctgtgatgattgcagcatggagctatggtgattcagtagaagatgtatgtg

SEQ ID NO: 31530 - DNA, 317 bp, Zea mays
tagctccaccataatcagcagcatcgaccacaccaccacccagggacaagcatcgtgagttcatgagtcacaagccaccactttctccagctccccagatcctctatagttgatgattggttgaagctagtggataagatgctcatcaacgcccaatgcactaacaaagagaaggtattatatgcattgggttgccttactagcctcactgctgactggtgggattcttactgtgctgctcgtgccgctgctgacaccatcacctaggcagagttctcagctaatttcagaaactaccatattcttgtgttttgatg

SEQ ID NO: 31531 - DNA, 369 bp, Zea mays
agctttggaccatgtattttttgtgtcgctgatgaaaacaggagcgggtgcgggcctgctcttcatctcgcccctcgtgaagcatctccgctacgtcatttgcctccattttccggcatcaaacaacgtggccgagtatgaggcactggttaacggactacacatcgccatcgagctaggggtccggcgcctcgacgctcgaggcgactcgcagcttgtcatcgaccaagtcatgaagaactcccactgccgtgaccggaggatggaagcctactacgacgaagtccggtgcctggaaaacaagttctacgggctggagctcaaccacatcgcccgacggtataacgagactgcagacgagctggcaaa

SEQ ID NO: 31532 - DNA, 319 bp, Zea mays
ttggggtgcttgagcggtttaactcaattattatctcaagctatcaatcttacattgtctatcctttaagattgacccaaagatgaattgagttgctatatcactaacttcatattcatccctagcaagaacttgtgttgtacggaataatgattaacctttgtgggaatcaagcaaaaggcctacaaccaagtgatatccaaaggatggtaacaattaattcttaagtgcatattgcttttaattggtatattcctttgtgtcttttgtagccacataggaaaaatgaagcacttgagaatgaacttaaaagttttta

SEQ ID NO: 31533 - DNA, 371 bp, Zea mays
  unsure (1)..(371): unsure at all n locations
agcttctaaagggagatctctatttangactgacaaatgttcattttgagaaagacaggatttgtagtgcatgccaagcaggaaagcaagttggtgcccatcatccacacaagaacatcatgacgaccgacaggccgcttgagctactccacatggatctattcggcccgattgcttacataagcatcgtcgggagtaagtattgtcttgtaatagtggatgattattctcgcttcacttgggtgttctttttgcaggaaaaatcacaaacccaagagaccttaaagggattcttgagacgggctcaaaatgagttcggcttaaggatcaagaaaattagaagcgacaacgggacggagttcatgaactct

SEQ ID NO: 31534 - DNA, 315 bp, Zea mays
tgagacgggaacaacctttttattctctaaatccctcaaagagaatgtctaggacttgaggattgtcaagaggaatgaacataacaagaaaatcaattcctctgccaaaagcctcaaccatgcctccatgcaaggtaacatccaaggtaatgattcaagtacacttcacactatgagaagtaagaagtgtagtgaacgctttgaaaagggacattccattacgttatgtccttatatcaaaaatgtcttgattattaacaaggatgataaactttgttttaaatgcttaaagaacggacacttaattaagtcttg

SEQ ID NO: 31535 - DNA, 369 bp, Zea mays
agcttagtagatcattctaggttggccgatgcaccaccggactagtctggtgcaccaagcctaagaagtctttgttaggactcactgtgaactcgaaccagtgcgccaccggactagttcggtgagtcctaaactgtacaaccaaagaactttttggctaagttttcatcaatttgacttggccttccttatgagattccctatgacttagacaaacaatgttagagtacaataaattgagttgagtcaaggaaactcatctctttctcaacatttcaccaggatttctgttttggttcaaattaagtccaaaacatcctttttctcaagaaactgagctagagatcaaaccaaagtgctagaaacatt

SEQ ID NO: 31536 - DNA, 313 bp, Zea mays
agagacgggagaaaccgcaccaattgtcaaactccatacgaaggcacgccctaaagcaatacacgaagaaaccaacacgaacaacgaaaaaggccaaaatccaaatagccccgctggatgcactgatcatctctctatgccatccaagagcaaaaagggaagaggaaaaaggaggcgcttcaagtgcaaggaataaggccactccattgcgactggcccacacaaagacaacgacgaacgaatgacgagacgctccggatgcaaccacaaggaccatatgaacacttcaaggccgctcacgaagaatcacaca

SEQ ID NO: 31537 - DNA, 360 bp, Zea mays
agcttgtcttgggctcattcacttttttcatccagatttggtgatagcctgagtagcaatccaataagctcatgagttccgaagtagctgctgcatctacaagggagtctattcttggcaatggaaattcatccttcggacatgccttgttgagatctgtaaaatcaatacacatcctccattttccgttggctttctttaccatgaccgtattggccagccactctggatatgttacctctctaataacaccgacacttataagtcttttcgcttcatttcgtgcaccttcagccttgtcatcagacattttctgaagtctctgcttccttggcctacaagacaagtctacattgagtg

SEQ ID NO: 31538 - DNA, 334 bp, Zea mays
acactatacacaactcacagcttgcgaagaggcgtcattttatcatgggctagtcggcggcgccaaagccaacccaagatagtcttaccaactaagcaagcgccgagttcagctctttcaaaatctaccaagcatagctgaccctctaacactcccttaaaagctattgaatcgctacttcttctaaagacagaaacaccagtatcagtaaaaagacagttgtagcccattttacataatagggatacggaaagcaaatagtaatctaaagaatctacaagaaaaacattggaaatagtatggccaggtgatatagcaactctacccaaacctt

SEQ ID NO: 31539 - DNA, 364 bp, Zea mays
agcttctaaagggagaacttactttattattaacaaatgttcattttgagaaagacagggtttgtagcgcatgccacgcaggaaagcaagttggaacccatcattcacacaagaacatcatgacgaccgacaggccgcttgagctactccacatggatctattcggcccgattgcttacataagcatcggcgggagtaagtattgtcttgtaatagtggatgattattctcgcttcacttgggtattctttttacaggaaaaatctcaaacccaagagaccttaaagggattcttgagacgagctcaaaaatgagtcggcttaagggtcaagaaaataagaagcgacaacgggacggagttcaa

SEQ ID NO: 31540 - DNA, 316 bp, Zea mays
tagcggctcgtatagaattagcttatcttattcaaaaaagctaggcacgttgtggcactttaggtagcaaccaaatagtccctaaggatatcattgaaacaaaaaagaaagcttgtggatgcccaaaaataaaaagagtatgcagtgtgtggaaaccaaatatcattcatggtaagtgtgaatggcaatattaatatgagcaaatgtcatgttatcccactcaagaaagcaatttcttcatcacccgacaaacctcctttctaacctaaaactatagttttgtcaatttgttgtgtactcatcaacacatcaaaag

SEQ ID NO: 31541 - DNA, 366 bp, Zea mays
agcttgttagtgttggttcttctactgattagctcctaaaatggaaatctgttttccctactgctgagatacaggagtttgttcattcgctctcttatttaatccatgtattccctaaccaagtggataattcatcttgcataaagaaacggatgaacaacatgaccaaatggatttttacccaaatgcatgaccttttgtttgcaactatgaactctcaaccccttggcttaccaatggtactgagaggatttgcttaatgtcaaaagtagttcaacaagttggttttgactaacttgtaactgcccaatgaacgcatgttgagtttagagatcgttttatcgagttgtctaagctcacttttgt

SEQ ID NO: 31542 - DNA, 305 bp, Zea mays
gcgaaggcctttattccccttgtgctaagcggcgatgccacagccagcccatgctagacttagctattaagcatgcatctacaccggcttcttcttttgcaaaatcaactaaataaagattgttgtctaatacacccttaaacgctagagaaccattacttcttgtaaagacagacacatctacatttgtaaatagacagttatatcccatattgcataactgactaaccgatagcaaatcatatccaagagactctactaaaaacacattagagatagagtgctcattacaaactgcaatttta

SEQ ID NO: 31543 - DNA, 369 bp, Zea mays
agcttgacgatttatctttatggacgtttttaatgaagaatacaaagaagaccccctgaggatagaattttctaggaatattttgcctatcactcctcaagtggtgcacaagatattaggtatcccaattgggggtcagtcattccgagctttgaatgacaaggttaacaaagcagcgaggaaagagctcaggaagatttgtgatgacactactgacatagataacaaaagtgcccatgaaacgtgcatgaaactatgatatctattctaccaatgttggacaattacagaaaaaatggtaaatcaataaatcacagcagtataagtagcaaattatccaatcaagtcttgtcacatactactaactta

SEQ ID NO: 31544 - DNA, 304 bp, Zea mays
tcacggctgcctgcgtatggggtttgggtgggcgagtggttcgaggggtgctgatgcttactaccaagataaatcacgttgtgtggttgtctgcatatgaaatagctacatcaacctgagcaccaaatctacaacgcaaaatctaggatagattcttaactctgtggtgctaaaaaaatcttcatggtactaacaagctgacaaccacaacataccgaaaacaatttcaatttaatgatggtgagttaaaaacccttttggcattctaaaacctgtagaaaataggccacacaaactggagcat

SEQ ID NO: 31545 - DNA, 371 bp, Zea mays
agcttcttcctactcctggctgactgataactctttgttatccgggagacagtacaaaaaatcttcttccccgctgccattaaacactaatgccccctttgggtatttcagtttttaggcataatgttgagcttctcgttcttcttccttagaaagtacctttcccaaagcatggcggatgatgtaatcaatgctctctttcaaagcttcgggagcaggagtggcaaccttttcaggcaaaatttgctctgtggctttttcttctgttgccttttcttcaatttccgtaggctttagctcagcgggctccgaaggcccagctttggtaccagcttgggttactgcagcttcagttttggcctgctctgttt

SEQ ID NO: 31546 - DNA, 318 bp, Zea mays
taatgttcattccattgtcccatacatcaagcattttaaaatattattacaatgaaatctattcttctctaaggactttttccgcaacttcgttcaaaagtttatcgacgacttcattaataatggagtccgccatgcttataatgtctagtgcttacttcatttttggatcagctaggggatcgtacggttccggtggcagagatagttcacctgaagtaggtaaaattgattagttcgaagccacaaagcaaatactaaagctaaaagaccaaaaaataatacatatatgcctttcgtgttctgcaacctctttag

SEQ ID NO: 31547 - DNA, 371 bp, Zea mays
agcttgatatatgtgcctctattttttaacctactctatatcaaaactcatctctttttattttcaaatcttctagtctgatttttggtctatcagaagactctgcttagaagcactacaagatgataaattttggttgcagaacttgaagcgaagttcgcctgaaggaacccttttgaagctattgaagatgcctcattctctgtcttatccccaccctgcaagaagtttcgttttggatcccttggatcaattaccagacttcttagttagggtgataggatagttctatagtgttaagttttcgactagatcggtaaggacgatgttatattgtagctgttttctaatccataatatcgctatataac

SEQ ID NO: 31548 - DNA, 290 bp, Zea mays
ccgacccacaagaacgaggagcaaatgccatgatgccgatgcacacctagcaggcaatacttcagcgcgcccgacatcaagctcggcaaacaatcccgaagagcccactgttgcccagcggaaaatgaaaggacgctgccgcccaaaacgacggaaagaccagaagcaaccaaacaacgggagaataggagatactgttgggagcgcaaccaatttgtagggcctaaacaatccaaagcagcccgcatcctgcttttcacacccaaacctaggagaccgtcggagaggct

SEQ ID NO: 31549 - DNA, 368 bp, Zea mays
agcttgtgaaggatcttcattctttatgtgctaagcggcgatgccacagccagcccatgctagtcttagcaattaagcatgcatctagaccgacctcttcttttgcaaaatcaactaagtaaagcttgccgtctaatacacccttaaaggctagtgaaccatcacttcttctaaagacagacacatctacatttgtaaaaagacaattatatcccatattgcatagttgacttacagatagcaaattgtaaccaagagactcaactaaaaacacattggagatagagtgctcattagaaattgcaattttacctaacccttttaccttgccttgattcccatcaccgaatataattgaatcttgggaa

SEQ ID NO: 31550 - DNA, 314 bp, Zea mays
tctaaagggagaatacatttcgtgaccaataaatgttcattctgagaaagatatgatttgtagcgcatgtcaggcacggaagcaagttggcgttcatcatccacataagaacatcatgacgactgacaggccactcgaacttttacacatggatctattccgcccgattgcttacataagcatcactgagagtaagtactgtctagttattgcggatgactattctcgcttcacttgggagtgcttttcgcaggaaaaatctcatactctaacacaccatatatggattcttttagactggctcaaaacgagtt

SEQ ID NO: 31551 - DNA, 371 bp, Zea mays
  unsure (1)..(371): unsure at all n locations
agcttatgaagattcttcatcctttatgagctagtcggcggtgccagagccaacccatattagtcttagcaattaagcaagtgtcgagtacagctctataaatcaactaagtatagctgaccctctaatactcccttaaatgctactgaatcatcacttcttctaaagacagtaacacctatatccgtaaaaagacagttgtagcccattttacataattgagaaacataaaacaatttgtaatctaaagaatctacaagaaaaacattgaaaatagaatagtcaggtgatataacaattttaccaagtcctttgaccaaaccttgatttccatccncgaatgtgataactctttggggatcttcgttttt

SEQ ID NO: 31552 - DNA, 316 bp, Zea mays
tctcgtaggccgcaagctaggtgaccggtacatagttcatttgctcgtatccacgtccaaggttgtacctcacattcccttatggtaacccggctaagggggtggccacgaggcctctctttggttggccagatcgacgaaagagccgacacatggttgaattaggaaggactcaatgagatgcccccaacgggtcgagcccccagtcggaccactcgccaagacttaaccctacaggagggaggtcggatctcacttggataactcgtttgtagctcgacgacctccttattcacgccgactaggtcgatggagg

SEQ ID NO: 31553 - DNA, 363 bp, Zea mays
agcttcgcatcaaaattcttcttttcttgctcgaagctttctgattttaggaggagttcactgcttaatctggcaatttcggcttgggcttctgccagtgaaccctccattgtttgaagaagaaaatctttcttttcaagagcagcttcatgatctttgattttactttccaagccatcagttataacttcgttcttcttatcttcaaggtcctgttgcatcctcaaggctttacttagtagcatactttgtgcaaaataactttcatcaaaaatcaccttcatcgcaaaataataaaaagttgagggaaaaactttaccttaaaaattagaatagaataaactgccgacgatatgatgtcgt

SEQ ID NO: 31554 - DNA, 318 bp, Zea mays
tgtgaagccaatcacaagtttattgaattttgatacaaaatttaactagtcttcaagatgcgatgaagccttcgagcagctgaaggtgttattgaccactgctccggtattagctcaaccagacattgaaaagccttttgatgtgtattgtgactcatcacgcaatggtttaggttgtatcttgatgcaagaaggcaaagttgtagcatacgcctcaagacagttgcaccggcatgaggaacattatccaactcatgacctggaattagctgctgtggttcatgccctgaaaatatggcgtcattatctgctgggaaa

SEQ ID NO: 31555 - DNA, 369 bp, Zea mays
agctcggaaattgattttttttttcactacaagcatcaattgtgaaagtctttacacctagtacaaatcacaacatgttctacacaataattagatttatttgcaacttctaagttagcatttaaatgatcattaaaactctttaacttagcaatagttccatgacaagtagatagtttaaaagaaagcatttcatttctcttaatctctaatgcaagcgatctttgtgcttctacaaatttgtcatgtcctatatacaacaaatcctcttgcttttgtaaaagcctattcttatcattaaggcatcaatcaattcattaaatttatctatcttagatctatctaagccctcgaacaagctttaataat

SEQ ID NO: 31556 - DNA, 370 bp, Zea mays
agcttgtgaatcgtggtctttatatactatgaacttgtgacatcataaagacacagcattgcagcaatggttaatgacttcccagataagactaaacagcacttgtactgaaaaagcatgaggaacctttgaaccaagctttctcgagaagcccagcttatgtggcttctaaaggaaaatatgcacattgaagttagcattcaggtaagtgaaaatcaagtacaggaagttgtccctctcacaatcgacaagcctttcataatcaacagcacatatgggacctattggttgcagtttatcattgcacaaataccaaagtcatggttgattccttataccagacgtttcgatacaaacaaagacaaatgac

SEQ ID NO: 31557 - DNA, 325 bp, Zea mays
aggaccaacaaatcaacctatactaaaaatctttcttttcgcattaagagagctaaactgctaatcaccaaaaaacaatataaactaatgtactaagttgttgaaggatgaatataaacaaaatagaatgcacactcctatttccttagttgcctcccttttttgtataagttgcttcaaattttttagagagtcaaatcattttagttttgaccacattcaaataataaaataataaaatttatgatacaaataagtatcattagattcttttcatagcgcatctattcgatgtaataaatctatgcaactctctatatttttt

SEQ ID NO: 31558 - DNA, 365 bp, Zea mays
agcttgtgaagggtcttttactcctacatgtgctaagcggcgatgccacaaccagcccatgctagtcttagctatcaagcatgcatctagaccggcctcctcttttgcaaaatcaactaaataaagtttgccgtctaatacacccttaaaagctagtgaaccatcacttcttctaaagacagacacatctacatttgtaaaataacaattatatcccatattgcatagttgactaacggatagcaaattgtaaccaagagactcaactaaaaacacattagagatggagtgctcattagaaattgcaatcttacctaacccttttaccttgccttgattcccatcaccgaatataattgaatctt

SEQ ID NO: 31559 - DNA, 295 bp, Zea mays
ctctcctttacggctcgttatttttatagtaccccttccacattgtacaatggcctctccctttcttcaccatgacataccatggatcaaatctataccccttgcctctaatattataggcggtagcccactaattctcttcctctaattgctactgtccatctatgcgtcatataactcgctttaacgggtccttcacgtgatatctctatcatcggcgtttccatattttccatcgggaattcctttctgtcggcatatcgagcagatatgaatgaatgtgtcccataataat

SEQ ID NO: 31560 - DNA, 326 bp, Zea mays
agcttgccaagccctttgtttttgccgaacttcaccggaggcccgagatcgatctcaccggacttcggtctttcgccgccgcgcgtggacagagctaatcggtgagtcttcgtccaattcattgcacccatatcttctctggcataccgtgaacctctctgacccatccaattgaactatctcgccgtgagcaggccggactcctcgccaccgacgagcatccccgcctgcgcacgtggaccgaccgacttcggccatccccgacggcgacccgcacaccgttgtgatccccgagacctccccttcgtcctcgaccacgttaccgg

SEQ ID NO: 31561 - DNA, 306 bp, Zea mays
aaacttcgctcgtaatatcgggctctatcttttttctttggccaccactctaacgtgccgatgccacttgggcttccaatgaagacatgacgattattccacgaatatctattgtttgctctgtggtgaatataacggccacattacaagaacgtgtcatgtcatcattcctaagctaaaagagattgccccagcataatttctgcacaatcatcccaagcacgttttacatacggcttctcgcctactcttcctatatttcaaaatacttgggtaattaacctgcctcttttcttgctttggcaa

SEQ ID NO: 31562 - DNA, 355 bp, Zea mays
  unsure (1)..(355): unsure at all n locations
agcttggaagntctttatttcacatgtgctaagcggcgatgccacagccagcccatgctagtcttagcaattaagcatgcatctagaccggcctcctcttttgcaaaatcaactaagtaaagtttgtcgtctaatacacccttaaaagctagtgaaccatcacttcttctaatgacagacacatctacatttgtgaatagacaataatatcccatattgcataattgactaacagataacaaattatatccaagagactcaactaaaaacacattagatatagagtgctcggatgaaatagcaattttgcctaacccttttaccttgccttgattcccatcaccaaatattattg

SEQ ID NO: 31563 - DNA, 310 bp, Zea mays
ttgtcatgtggaccatatctactagtaattttgttctcaggatgcattgttaatggcgtatgatttcacaccatccaccgtgaggaaaaaaggaggacacaaaacattggagttatggttgatggcacacataatggacaagatattgaattctttggttgcttgaaagaaataatttaattgcagtacaatgcagactatagcggacacaggtctgtaattctatttccatgtgatcggtttgataccgacagtaatatagcaagaatgaaagatgatggttttttcaaaagcataaatagttcagtat

SEQ ID NO: 31564 - DNA, 362 bp, Zea mays
agctagcatatgtatgtttttctgatcttctatgagatgccgcgatgttcatttgtaatgcttatcgcagggaaaatatatgttaattgtagtttcactttctttatggccataccaatctgaaaaagatggtgagtgactaaacgtacctgaactgatttctatctgtattatttatcagctggaacttggaagtggaacagttgtttcttgacattatgcatttccctcatgatatgatactgatattgatgagatgtatgtattgattcaaggaataatttttcttgacctactgggtataaataaaaacatagaattttctgtggtaagatatatggccttttttttcgtaactcaca

SEQ ID NO: 31565 - DNA, 306 bp, Zea mays
tatacgctactttcttactaaattaagatgaacacgatcagatgccaacgtatgaaaacttcctctccttcacttgtttacaccttctatccttagtgggatgcactatagtataggctaaattccttccaatataaaatgttcaatagcgtatataacttccacatcaactatatgtgtgcactaatttaaaggaatatagccctatctcttctgggcttcaacaatgatgattcattttccatccaacatataacgatcatcatttgtgaaaccctccctaccgttctaatgctctcttctcta

SEQ ID NO: 31566 - DNA, 353 bp, Zea mays
agcttcgacatccatccgttgggaagcagtggcaagatttcaatgacaatcatcgagactttgccgatgaactaaaaaatgttaggttcgcactgagtcccaatggaatgaatccatttgctgagaggagcagtaagcatagcacatggccggtgatcctcaccatatacaaccttcctccatggttgatgcagaaacgaaagtacattttgttaaccattcttatttctggacctacacaacctggagttgatatggatgtatttttggagcccttaatggaggatatgaaaatactgtgggaaacaggtgttcaaatgttggatgagtatcgtaaagattccttcacacta

SEQ ID NO: 31567 - DNA, 318 bp, Zea mays
cgacactacacaacacccaagccgcagaaccctatctttcatgccttgtcacccagcttcgtgcggccgtatcaccatacattatgaatgcactgaacatcatttgattgttgtcgccctgtatattccaaaggagccttccatcggcgctgctgggagttatttcttgtcacttacaagaacatcacacgccgctgcaggaaaaccaagcactgacaatgaaggctcggaagaaaaaacatagaccaaagataatcagagagaaaaagctaccccaagtcagaaggaacacctgaaggctgaaggcgtgaagcccct

SEQ ID NO: 31568 - DNA, 373 bp, Zea mays
agcttgtaccattttgaatgtttatttatcatatctcttgcatatgctgcattgctacttgcaatggtagcgcaatatgcagcaaaccagtgagatatttatttgctgcatgatgctccaatgttaccaacatgctacttctaacagtagcactatatgcttttctcatgtgcaaatcttattggctaggtagcatgtaattctgctgatgtacatcaatgttcttgttttacatactgcatgtactttataacctcgtgcagttgtctgttttctttatcatagagtgatgtcctcacacagttgcaaaatgtcctgctgaaaattgcaactacccaaattatggatttggtactactactactcttttatc

SEQ ID NO: 31569 - DNA, 299 bp, Zea mays
caattaccccgccttgccgcccacccagcacgagtacaacacgcacgagagaaccacggaacaccggacggcacgcgagccacggacagaacgcgccgcaagggacgcaaaatcacccgccgacaacgcagagccccccagccaaccacctcgaaccaacacgcacagcacgcgctacttccaaggaaaccaaaaccgccacacccagccgacgcgcacacaacaaccagctacgcaccaaggcccacagaagacccccggatagagcgctccccacacccacccagacgcgcacgacc

SEQ ID NO: 31570 - DNA, 375 bp, Zea mays
agcttgtgaaggttcttcattcttacatgtgctaagtggcgatgccacagccagcccatgctagtcttagcaattaagcatgcatctagaccggcctcctctttttcaaaatcaactaagtaaagtttgccgtctaatacacccttaaaggctaatgaaccatcacttcttctaaagacaaacacatctacattagtgaataaacagttatatcccatattgcataattgactaacatatagcattatatccaagagactcaactaaaaacacattagaaatagagtgctcatttgatattgcaattttgcctaagcctttcaccttgccttgattcccatcaccgaatatgattgagtcttggggatccttgtt

SEQ ID NO: 31571 - DNA, 320 bp, Zea mays
tataacaagagaatagacgcaagatctcttccatatgtcatgacccaaggggagttgtacaaacatggagtctgtgctccgttgctcaaatgcttatccagaaccgaaggtatacagttaatgaaagaaatacatgcaggcctgtgtggatctcacatcggatctaggccgttacttggaaaaatctttcgtcaaggattttattggccgaaggcagcttccgatgcagcagaattggttcaaaagtgcgaaggttgtcagaaatgtgcaagagatcaaaaacaaccttcgtccttgacacagctcatacaacccacttg

SEQ ID NO: 31572 - DNA, 371 bp, Zea mays
agcttgtgaaggttcttcatctcttcatgtgctaagcggcgatgccacagccagcccatgctagtcttagctattaagcatgcatctagaccggcctcttcttttgcaaaatcaactaaataaagtttgccgtctaatacacccttaaaagctagtgaaccatcacttcttctaaagacagacacatctacatttgtaaatagacagttataccccatatgacataattgactaacagatagtaaattatatccaagactctctactaaaaatacattagagatagaatgctcattagaaattgcaattttacctaacccttttaccttgccttgattcccatcaccgaatataattgaatcctgggaatc

SEQ ID NO: 31573 - DNA, 327 bp, Zea mays
  unsure (1)..(327): unsure at all n locations
acacccaagcncggactaagcccgaacaaggcctttttgattattggcgcgccgctacagcgcgtctactgacccaccgtcaattcaccttcggttacgccaactgccatatctgtccccgccgctgactgaccacaggcccccacacccggaggatttgccgggccacgcacggggcgccttgacgctgctgcattggtttaaaaaattaccttttgtcatctgcagcggccacaaggaggcgcactacaggtgccacaaggaggcgcactacaagcgcgtgcgatggcttgtttttttcgcacccaaagtctggcacacaaaccg

SEQ ID NO: 31574 - DNA, 371 bp, Zea mays
agcttgacattgctcccctgttgtttaaccagtgccatccttaatgccagagcgtctcccattatagagcatgcttctagcaaatttaaacttttcattttcgagctcatgctcggcaattttagcatctaatttggctatatgatcattttgttttttaatcatggcaaggtgatcatctatagcctcaacattaatatctctacatctagtgcaaatggaaacatgatcaacagtagatgtagaaggtttgcaagcatttaattcttctatcttagcatttaatctaacattctcatctctaagataagaaatagaatcattgcaaacatttaaatctttgaccttagaaactaagctcgcatttttat

SEQ ID NO: 31575 - DNA, 316 bp, Zea mays
tgacattgcttccctgttggaaaccaattacatccttaatgccagggcgtctctcattatagagcatgcttctagcaaacttaattttttcattctcaatttcatgctcattgattttagcagttaattagactatatgatcattttgttgtttaattaaagcaaggtgatcatttatagcatcaacattaacatatctacacctagtacagatagtgacatgatcaatagtagatgtagagggtttgcaagcatttaattcatctatcttagcatgtaatatggcattctcatttctaagacaggaaataaaatc

SEQ ID NO: 31576 - DNA, 353 bp, Zea mays
agctagaaggactgcttctgtattattatcttccgaacgtgaagacttgttcggtccacagagtcgctttatccgagcgcgagttacttatcgcagaaggtgatgagtgaggtatccgtatcccggaggcgtaggagtccctcggctcggtcagccttggctgcttacgtgtactccgtcgtttccaggatccgctttccgaagtagtcaagaagcacgaaagtaatcctgctaaaaagagatccttcttctaggaaaaattccacgcagagggggtctccccccttttagcccccgagggagggtcgggctttgccgaggctatgccgaccctctcttgacgactaaacttt

SEQ ID NO: 31577 - DNA, 225 bp, Zea mays
cctcctgcacggcgtactgcacggcccctaacttgaaaggacggatggaagtgtgctagcaatcgcatacagaaccaaccggctgaagagcccgaggaacccgcaggagaagccccagagcaacagccggtaggtggaggcaagtggcccttgacctatcactgccctaaacacccaaaactgacctcccacatcatacacttacgcctaaggatcgactagctc

SEQ ID NO: 31578 - DNA, 367 bp, Zea mays
agcttaacgggtcattattttttactccaagcgcaacttcagaaatgtaagaactccaccacacccttattattaaattctaatgctagctcctccaacactagcacatgtaaacactgtgtaaaagtatcatgctacatgttgtttaactaaccatgctaggaaagttggttcaaagactaaggttaatcatgtgttaagaagaaacaatgatgggttaaagaaagttgaacccaagtataaacccttgagactcaacaatgaaaaaagtgacttgggtacaacatgcataaggtgaaccctagcgttgagcactatgggtggagatcccctaagttcatagaaagtactaccttgtatgatgcct

SEQ ID NO: 31579 - DNA, 392 bp, Zea mays
  unsure (1)..(392): unsure at all n locations
agctatcgggaggaatatgattttttacttctaactcttgactcaatggtctatccgggagcgggtntctgcactctccagtgatataataatacataccttaccacctcttatagtttgatctctcggtatgataataataccacactctgttcttacgttatcaatataagagtaacgtatagttgtacattaccttcacgcaattattcgtacactcctgatgttattgtacatgtctcgcgtgacgggtcgaaactgctctcgggaaaggtaaggaatacagataccgaacttgtcaagtgattcaagggcacttgcagggttgactgatgtccgttgggcaaggacaactgtatgtgggcctaatgacttgggaggttctgtcacaa

SEQ ID NO: 31580 - DNA, 126 bp, Zea mays
ggaacgaaggggcacccaccccggagacgcggatcacattgggccccaacggcccccctctctaccttgcccgccagcaccaaagacaacggaacacaagcacaaacgaacaatagacggactccc

SEQ ID NO: 31581 - DNA, 367 bp, Zea mays
agcttggcgactgctattttgatttctgaaagcaatcttatgtggccgcatgcgttgctatgttcggcaagctccggcgcagccgctgcttgaacgcgatccagagcggctgcaccgcgctgcccatcttcaaacaggggaccttatggtcgttgccaacgccggcgactcgggttgttctgggcaccgtatccgacgatggcgctgtgatgccgtccagctcatcatccacctgaagctcaacgctgccacgtaagtcgctactgaccggctatgaattcttgtacgctaggacaacgatcgatgctgacgttgcgtgagtgtcctcaaataagatgtatgctgatgagtagcacattcaatggtg

SEQ ID NO: 31582 - DNA, 310 bp, Zea mays
ggaacttagaaactcaatcttgccttcaaacacctttctatttttctaacaaacagctacaagctatctcattgcttgtaccatggaaatgctcactacattgcatgccctaccctcaaatatgccccgagagctacctaccgatcaatcttacaaagggggggtgggtacctaatctacagtatctagacataatggctttatctatcaattccgcttctattacctaatcatcctttttggtgacgaaatcaattacttccgtccttatcgcaaaacccgccttccattactaatcaactccctcacc

SEQ ID NO: 31583 - DNA, 365 bp, Zea mays
agcttctattcagtttcttgttttttaacgggatcaacatatcatgaagaatactttaaactaactatctcctaacatgacctcaataattttcatgttgaccaacgtcgatgacatgaactgttcatgaaagaacttgatgaggctacgcacccatcattcttctcataccatggatgaaacaattccttctctattattacataccagatgctgcccattattctcaagaaagtacttgagggataaacaatctattcatatatacccatatgctagtaacaattatatcttaccatcttcctggaaacttaaagttagacgccataatcctaaattcactcttaaggcccattgttggatac

SEQ ID NO: 31584 - DNA, 332 bp, Zea mays
  unsure (1)..(332): unsure at all n locations
acaccacacgaaacncaagcncaaggaacacgacgcactacatatgatgntttatacacgaaaaggcataaatagcgcttaccatgccaacctgacacaactggtactatacctgcatctcgtacttcaaaagataacattcgatgcaagcatgttagaggttcaagaacaccccctacgacaataacttcctgcttgagtgtgtactgacatataaaatgacaggtataatatatatgaggatatccatatcatcagtaaggcatattctacatataaacaggttctccccacatacatataaacagggtgcacaaatgaccaaacctaat

SEQ ID NO: 31585 - DNA, 365 bp, Zea mays
agcttgcacacatagctcttttgaatacctttgatcatatctcttttatatgctatgactaatgtgttttcaagtctatttcaaaccaagtcataggtatattgaaagggaattggagtcttcggcgaagaaaaaggcttccactccgtaactcatacttcgccatcactccgagcaactctctcttctttgggggagaaatgagcatcaaggaaaaggacttcatccttgggggagagagtaaaagctcaaacgcaaaaggaccggatttcgtctttggtataatcttaactcattcatttatgaccaaagaggaggaacttacttcgagggctctaatgattccgtttttggcgattcatgcc

SEQ ID NO: 31586 - DNA, 307 bp, Zea mays
tgtttccgagtaattcaatcacataaatcggtaccgtaggcggtggatcccatccggggacccttgatcgtcgacaaagtacaaaaagatctttatatgtaaaaaacactgcttcctccgttttaaaatataaattatttcagcgtttatatacagaaaattcaaaataatcaataatttaaaataaagagaatattctttttaggtacatatttttgtaataaccagaactgttcagactcgtgcaagtttttagctacgatactacagtcagtgagcacgcttattcaagggcaattagcatcga

SEQ ID NO: 31587 - DNA, 367 bp, Zea mays
agcttccctgtgcatatctttttctctgcgccaaccttcgtattctttgtgcttcttcacactgtggttctgatccgagcccgaaggtacctgttcatgtattatactccagaaatattgttaaatcatgtttttgaggaccttcagaagccgaaggcccccaacacagattgataaattaaatgcttgcaaaccctctacatctactgttagtcatgtctctatttgcactagatgtagagatgttaatgttgatgctatccatgatcacattgctatgattaaacaacaaaatgatcatatagaaaaattagatgctaaaattgccgagcatgaattagagaatgaaaaatttaaatttgctcgt

SEQ ID NO: 31588 - DNA, 306 bp, Zea mays
tttaggatgagggattcctatgatatctttcttcctgaatccgcaacaggttttcttgaactactggaactttggaaatgcctcgtaatgctaccttacctcgcttccttggtagaggtgtatggggtccatacaaccctgtggcaaatgggtaacatgacttgtgggtaaagatgcgtaacctctgcagagtgcaaaactagtatatcagccgtgctcacggtcatgagtggcacagacactcacatgattaacttatggaattaaacttaatttgtcatatgcattgcattgcgggtgttgtta

SEQ ID NO: 31589 - DNA, 358 bp, Zea mays
agcttagtagctgtttttgaaaacttatgtcagtaggaggtcagctggtgttaataaattctgtcctttcaagtctgacaatgtttaagttgtccttttttgaagttcctaggggagttttggagagaatagactacttccattctaggtccttctggcaaggagaagaccataagaggaaatataggcttgctaaatggaacatcatatgccaaacaaaggagcgtgggggtttagggatccacaatatagacttgcagaataagtgtttgctaagcaagtggcttttcaagttgattaatgaggatggaacgtggcaaaatattctgcagaaaaatacctaaagaaatatactcta

SEQ ID NO: 31590 - DNA, 307 bp, Zea mays
tcagcaacttaagcctgtggatattataggttttcctcgtgggaaacaacgaaatcattacatgaaaactaacaatgttctttgttacacagaaaatagaactgaatagaaaagactgctttcaaaggtaggatatgtgtcagtaaatgtgcttcgactctggcacagtgctgctgactgtgcgagctttggattgttctctgaagtccctttggtgtggggcatattgactcccttctggctgttgaccttgttgcagtggaggtggaggcggaggctgttgtcacgaagcttgaggttgacttgc

SEQ ID NO: 31591 - DNA, 375 bp, Zea mays
agcttctaagtatactacataaaatgatattatgttagattttttcagattaagtcggaaaaaagcagcatatgtagtcacctttacatagtgtaaaataaaatcaggaacattcataacttgttagtacattaatatttgtcagtcttatcattttcataattttcgatcatgattttacacattatagactaaaaagcacaaatattcctctgatgaaaagaaaaggaaaaaaagattcttacttgtctagcacaagcaaaaatagaacataaatttagctttgtaaagagcaaagaaggcaaagataatgaacatggtgtaaaaagtaggagtgtaggattcatctttttggatgctactgtcatcctatta

SEQ ID NO: 31592 - DNA, 329 bp, Zea mays
aactcaagctttcacagcaatccaacacacagtggagtatggtatttttcttcggcggcccgaaccactctaaatcctcgcgcgctcctgagtttatcgttcatctaccaataggcaaaacgcttaagccccctcctcatcttaggatttagggcgggtgcactccgccacccggccggagaattccctctccgacatttggcgcgccaggtaggggacttggcattaggtttttgcttgttttcttgctcggtatgatggtgcaaatcgttgagcaccgcgccgacactttggaggatttcgcggtggaggaagaagttgcgtcctct

SEQ ID NO: 31593 - DNA, 374 bp, Zea mays
agctttattgaattatttgtttacttgaaatcaattttcaaatttattttatatatattttacaggtatgtggaatgttatttaaatatatataaaaattaaatctgaaaacttcgtgtgcgatatgaaaacagacggaaaaaacggaaaacccttatcccattttcgtttccgtgatttatcatcgaaaatgagattggaaccataagagtcagaaacagaaagggtagcggaatcaacgggtgtacgaaaacagacgggaacaaaactattaagcggaaacttgtaatttaatacacacgcacatgatattgatgactaaccggtgactgaccagaaaggccacaacatgaaacaattaaaaacagagagat

SEQ ID NO: 31594 - DNA, 319 bp, Zea mays
ctttttagaggatggtgctagatagtattgatgccatctgaccgcctcaccccctccctcgcgactcgccagacgcgccttctccccctccgtgcgcccttcttctctttactgttggctttggctggaagccggcccagcctcgcaagtcgcaaggcacggagcggcccaataaattcgagcaactgctgcaaccaggcaaagaggcatccgcgcccctcaacgacgcccgtcgggcgtcggccacgggccacctaccgacgctcccccactgcttggtcccgcactcccgccctctactgcaggtcagcacccagca

SEQ ID NO: 31595 - DNA, 368 bp, Zea mays
agcttaatggtgctttaatttttttttaaattggtatcttagtttaaattggtatcttagtttaaattggtatgttaatggtgaatagtggtaggttgatattcctgtgttatatccactcaatcgaatggtgtttaactctgattctgtgcatttgtgtgctatagcatcatggtttgattcttgacacaatacatcccaaaaagtgctaaggtatagaaatgtttcgaattgcctaagtatgtgcaaattggcgtatgaggccaaaattatgtttttgaagtaagcacatatttagggggagcattctataaacttagagttcaaaatttgtgcttcaaatcttattcttatgtaagctctaattg

SEQ ID NO: 31596 - DNA, 318 bp, Zea mays
tctaaagggagagcacattttaagattaacaaatgttcattttgacaaaggatttgtagcgcatgccaagcagggaagcaagttggtgttcatcatccacataagaacatcatgacgactgacaggccactcgagcttctacacatggacctattcggcccgatagcttacataagcatcggcgggagtaagtactatctagttattgtggatgattattctcgcttcactggggtattctttttgcaggaaaaatttcatacccaagagaccttaaagggattcttgagacaggctcaaaatgagtttagcttaagg

SEQ ID NO: 31597 - DNA, 368 bp, Zea mays
agctttgcacatggtggggagtagtttgttatcaggtccatggtcgctggaggcttggaggcaattggtagagctgagcatcatgcatgggagggggtgaaaaaaaaggccctggaggtcaggacggggaggaaaaagcatgaacagggttttgaagcgtgtggagttgttgtgaacgagggatggatgatgcatgcgggagtggagtttctgcaggggatgatgtatgatgtagtaggctaggctaggccaggttgggtgtgtacaatgcaagccccccccctctgtaacagcctgatttgtacattcttgccatctctgtcttgtggatcgatcgaatcgcagacctcctgggttttttttgtgtg

SEQ ID NO: 31598 - DNA, 316 bp, Zea mays
tttgaacgtactaagcacatgcctggaaaaatggtaaccggtaaacctagtacctgagtgaagccgggcgcggactttatccctcatgcgacctgagactgggtcttccatgctagctatggtgggtacaagtgcggtcactgcacggcggcagccggggtcagtggagcattgtatgccaaggcggtgaggcctggacgcgaacggggaatcgatgggaacggttgtcatgtgtggggtccgagtaccctgacgtgtcgcgtgtttaggtttaccttgcaaggttaaaactcgattcgaatcgtctacttctcgc

SEQ ID NO: 31599 - DNA, 353 bp, Zea mays
  unsure (1)..(353): unsure at all n locations
agcttctccttatcttctttcacctcccttggcttcttcctcccctccgcccgcccctgctccctcgtcaccaagtgcgcgcgccatgctcctcgcgcgggccgagagttccccggctcccatgggcgcccgagctccttccctgctcgcctggccacgcctctactccactccatggtcggcgctccttcctctgccctctcccatggtgcgcccccttgctcctccaagccggtcattcctgccgtgagctccttcttggtcgctctctgttttccccatccgaccgtcgntcttcagcccaggtcatcacggcgccctcagtccaaccgcgttgtggccactgcaagctc

SEQ ID NO: 31600 - DNA, 306 bp, Zea mays
tctgctttttgggtcgcaccgttatggtcaacccccaagctatgctcaattatggcttggctgactccgaccagatcgagggcggaccatgcgaagacatctttattcttggccaggcagcagaggagtttctcttcttcaagtgaggtgaggtcttcgctgatagttactgtctgcttgggcgtggcctgatcgagggggaccgtcttggtctcgtcttggcactgcaactgtgccttgtcgtgctgtttgtcggttgggctggccggcgcacggactttgcgctgggtcgtgagacagcgtaca

SEQ ID NO: 31601 - DNA, 313 bp, Zea mays
aacaaactcaagcccggatgaatgtgagaccactagtttttcagaataattgccgcggaagggcgatagcaaaccaagtatctgcaccgtattcagcaatcagcagctctgatgaccgatcttggattgagcccacaaaatgcagcagaggttcgaactagggagcccaacattcctctggctttgaactgtcgtgagagtaagaacatatctaggaactagtattgcagcggcagtcactgagtcgatatatctacttctgcacctttcacctccagcagcacaagatgcatgatcgcatcgatcggtcatt

SEQ ID NO: 31602 - DNA, 370 bp, Zea mays
agcttatagagtatacaacattatctcgagtcatagttgaagaggtccacattattaactttgatgaatcaaatggctctccaaataaagatagatacctagatgatgtgagatgtatacaacttagcgatgcaatgcagaaaattgaaattggtgacataaagccaagagaggtgatagaagtggaagatgataaaaatctagtgattcatccataaagcatgcatatcaatgatcaacctagcacatataactctcattatcaagatcaaagtcaacatgtgtatggtcaaacaagctcaagaattcaagatcaagttattcaattgaaagctccatgtatggttttggtaattgagacaactagtgt

SEQ ID NO: 31603 - DNA, 313 bp, Zea mays
ttagtgattagcgagagagacttgtcgtgttcttttgagctcttgcgcttggattgcttcttttctttctcacttgttctcgtgatcaaaactccattgtaaccaaggcaagatgcaccaattgtgtggtggcccttgcggggaagttttgttcccggctttgatttgagaagagaagctcactcggtccgagggaccgtttgagagagggaagggttgaaagagacccggcctttgtggcctcctcaacggggagtaggtttgcgagaaccgaacctcggtaaaacaaattcgcgtgtcacactcttcattt

SEQ ID NO: 31604 - DNA, 365 bp, Zea mays
agcttctaaagggatttcttattttaggattaacaaatgttcattttgagaaagacaggatttgtagcgcatgccaagcagggaagcaagttggcactcatcatccacataagaacataatgacgaccgacaggccactggagctcctgcacatggatctattcggcccgatcgcttacataagcatcggcgggagtaagtactgtctagttattgtggatgattattctcgcttcacttgggtattctttctacaggaaaaatctcaaacccaagagaccttaaagggattcttgagacgggctcaaaatgagttcggcttaaggatcaagaaaataagaagcgacaacgggacggagttcaag

SEQ ID NO: 31605 - DNA, 313 bp, Zea mays
tgaagccatggtaagtatcatatgccaataatatgcgaaccgactcaagcctagctacgggtgcataggtttcaccgaaatccaaacctttgacttgggagtatcccttggccacaagccgggctttgttccttgtcaccacaccatgctcatcttgcttgttgcggaagacccatttggctcctacaacattttggttaggacgtggaactaaatgccatacctcgttcctcgtaaaattgttgagctcctcttgcatcgccatcacccaatccgaatcttgaagtgctttctctaccctgtgtggctcaat

SEQ ID NO: 31606 - DNA, 363 bp, Zea mays
agcttctcctggacaagtgttagtcttaccgatgagtgcgaagctgccacatataataacaatggagcccctggtgttggtggagttaatgttgttaaatctatcaaatattgcttcagttcctcgaaggctttttgttggcttggtccccattgaaagacttcgactgatttcagcacttcgaagaatggtaaatttctctctgctgatctggatatgaatctattgagagatgccagccttcctgtcagtctttgggcccccttttttgtatttggtggctccattcaaagtatagcttcaattttacttggattagcttcaattcccattgttgaaaccaaacatccaagaaatttcccc

SEQ ID NO: 31607 - DNA, 306 bp, Zea mays
ctgtgaaggttcttcattcccacatgtgctaagcggcgatgccacagtcagcccatgctagtcttagctattaagcatgcatctagaccggtctcttcttttgcaaaatcaactaaataaagtttgccgtctaatacacccttaaaagctagtgaaccatcacttcttctaaagacagacacatctacatttgtaaatagacagttatatcccattttgcataattgactcacagatagcagattatatccaagagactcaactaaaaacacattagatatggagtgctcattacaaattgcaatt

SEQ ID NO: 31608 - DNA, 368 bp, Zea mays
agcttatgaagattcttcattccaacatgggctagtcggcggtgccagagccaacccatgttagtcttagcaattaagcatgtgtcgagctcagctctattaaaatctactaagtatagctgaccctctaacacacccttaaatgctattgaatcatcacttcttctaaagacagtgacacctacatcagtgaatagacagttgtagcccatttgacataattgagaaacagaaagcaagttgtaatctaaagaatctacaagaaaaacattggaaatagaatggtcaggagatatagcaattttacccaatcctttgaccaaaccttgatttccatccccgaatgtgatagctcgttggggatcttg

SEQ ID NO: 31609 - DNA, 310 bp, Zea mays
tatctagttaattaattgttcataagaaaaggatattaaaatacaaattgaaattgaaaaataaaaataaaataaaaaagagaaacctttctctccccctggctaggacgattcccggcccacacccgcggccagcccaccccctcgcgctctcgacttctccccctctcggcccacctccggcccactccgcgcgcgcgaccacccccgctgacaagccgtcccactcgccagtcgcctccaccctcgccctcgctcgcgcccgcgcaccactgacaggctgaccccgccagtcagccaccccaccccc

SEQ ID NO: 31610 - DNA, 357 bp, Zea mays
  unsure (1)..(357): unsure at all n locations
caagcttgacaatganggaatagtntctcgtcatcaagagcttctgccaaatcctcaaataaaggagggggaaggactataaaccccgctccaagaaagtgtgctacaaatgtggtaagcctggtcattttatcgcaaagtgtccattgtctagtgatagtgacaggggcgacgacaagaaggggagaagaaaggaaaataagaaatactacaagaagaagggtggcgacgctcatgtatgccgcgagtgggactcggacgagagctcctcctcctcctcctccgacgaggacgccaccaacatcgccatcaacaaaggccttctcttccccaacgtcatggcaaaggacggcaaaa

SEQ ID NO: 31611 - DNA, 308 bp, Zea mays
tcggcatctttgcttatcccctttttttgagcccctggcgtccaatcagcgatgaaatccgctaacgcttgagattggattgaagatctgtgcacgtagtcaatagtgaattcattaagctccacggcccattttccaatccttccagtagcttctctattcctcatgatatccttcaggggttgtgatgaaggaacaattatgtgatatgcttgaaaataatgccgaagcttcctggacgccattagcacagcatacaacaccttctccaattctgtatagtttttctttgataagcccaaaacttc

SEQ ID NO: 31612 - DNA, 262 bp, Zea mays
agctttggccatatgcttgaggcaattggagcttttggtagaggtctgagaggtcctagtgcttatgagatgagtggaccattcttgaagagagcaaagcaaaaggtgttggatagattcaagaatcaccaggaatcatggcagctcacaggttgctcggtgatgacagatgcatggacagacaggaagggtaggggagtgatgaacttggttgtccatagtgcacatggggtctgtttcttggattcagtggactgctcag

SEQ ID NO: 31613 - DNA, 263 bp, Zea mays
agtttttcaagtatattttggtacccatcgcttgatgggtccatcacgggtagtcaacaaaaatctaggaacccaaaagtcctttgtgttagcattaggtaaactcattacctttctagcacaagttgcaattttaggttgcctagttacataagaattaattgacaagctaggagtggaattgttaccaatgggacaatccttgcattgatgtcccttctttcggcatgtgtagcataggcgtttttcaagttttgaagttt

SEQ ID NO: 31614 - DNA, 262 bp, Zea mays
atttttttatgtttaaagccatcttctcattgtcgagcttggaggcgtcaattggttgtctacttggtgtaaactcctccttcttttcctccgtcgccttaaatgccactggttgtgcttcggacgtggaggtttcatcaagctcgttgatcttcttggagcctttgatcatgcattcaaagctcacaaaattcccgataacttcctcgggggtcatttgagtatatctaggattaccacgaattaattgaacttgagtggg

SEQ ID NO: 31615 - DNA, 262 bp, Zea mays
agctttttcatttgaaaggtaattaccctgaaagaaagaaatgatctcagttctccaatcttcactgtgaacaggagatatattgaggactgctctttcaagaagttcaaccgaaggtgcttttattgtttcaaaaaatacttccgaaggtaagggcagcccctgtgctgctgacttggctagcaaatcagcatgttcattttctcctcgagaaatgtttttgacagaaaacccttcaaaggaagcttcaatccttcggacc

SEQ ID NO: 31616 - DNA, 262 bp, Zea mays
agctttaatgttcaaaatcaaaaacttcaagtgcaacttgaaaattgtaagaacatcaatgcttcatctttattgattgaatctaagtctagctcctcaaataataccttttgcaaacattgtgccaaatatcatgcttcttgttgtctaactaaccatgcaaggaaaaagagcccacaggtgaaggtcaaagaaatattgaaaagatgctctatcaatgatgggttaaagaaaattgaacccaagtacaagtccctaaagt

SEQ ID NO: 31617 - DNA, 231 bp, Zea mays
aggcaacgccgaaagaacaacttgcagaccgcatggcctagaacaaaccaaaggcaaagcttaaaccctttgtggcgccaaacatataaagtccacacgggagtggcagatgaaacaacctccgggcaacatacagtgacctatcttaaacaaagccttaaaggaacagaaaggacgcaaagataagcgctcgaatagccatatgcaacaagtgctctgaaatgaacgggc

SEQ ID NO: 31618 - DNA, 256 bp, Zea mays
agcttaccaagggagttgcctctttctatcttactcatttgtaactgaaatgtgaagcaacaaattcttcgattccccacggctatgttgcatcatatcatagtgttataacttatatgctgaaaactcttttgcttgcagtaaagatgtggacacctcaaagaagcttgtcgatgactgctcaagttgccagctatctgcttctctccgtcctcatgatgcagtctcagccgttggccgtatctatgaaatacat

SEQ ID NO: 31619 - DNA, 261 bp, Zea mays
tttgcaagttttataggtgatagcttcggcgctgcttctgagaggatctgccgaaggtgttctcttcctttaggatcttcggctacgaagcatacccccaacaattccttctagagaagcatagagataagtatacttctctaacatttatttaagggattcattgaacaaaaagatgaaaatatctttgtagaacatgaatatatatgtcgatacactcacattgacaagtggagaaataataagaaaacattatttcta

SEQ ID NO: 31620 - DNA, 184 bp, Zea mays
catggaaacttgaacaaagattgtgggctcaatattgaagcaagaacctgtacgtttatcccacaaatgtttgtggcagcacatcttggggcacagacgcatgacatcctatgcatcatcttcaccagaacaaactcgaaagctgcataagcatggtcgacgaaaaagacttacgtgggctaaa

SEQ ID NO: 31621 - DNA, 216 bp, Zea mays
ttgactgattgactccgcaccttaagcacgcgctcagctgacgatcttagccgcgttctgggcccaaaagtgttgcccctacgtccagaaagcaacacactaccacgaaagaatctgtcatgcttcaccttccggagcctcgaagcttgcgatgcagagccgatctcatgagaccccattttccctgcgacaccaccaccttttggataggcaacc

SEQ ID NO: 31622 - DNA, 254 bp, Zea mays
agtttttatgacaaaaccgtgaatgccataaatctgactcatcacaaaaattaacagaattcaccagtttattacacacatcatgcagtgataagcggaacaagcctccgcaatcatatcctttaccaacaaaggtaccatgtttcgacacaacacatttattagactcaagaacaattttatatccatctcgacatagcatagaagcgctaacgagattcttcttgatagagggcacatgctgcacgctcttc

SEQ ID NO: 31623 - DNA, 245 bp, Zea mays
attttttgacaaaacaaaaactctattctactattttcaaaatctctcaagtggtagctgatccatttatcactttggcctttattttctccccctttggcatcaagcaccaaaacgggatcaatcttggcccgttaaccccattgcctcaccaaagtcttcaattaagagcaaatggcaataagatttcatgagatgaacttggaattagttaccctctcatcggagtgcaatggaagtctttc

SEQ ID NO: 31624 - DNA, 133 bp, Zea mays
agctttgtgtggaatttggagaggatttgatctatttggttgtgtctagaattgaatgctagagctcttgtaagtagttggaaggtggaaaacttggatgacttgaatgtgggggtggctctctcttttctct

SEQ ID NO: 31625 - DNA, 332 bp, Zea mays
  unsure (1)..(332): unsure at all n locations
taagccttttactcttgcttattatcttatcttcacaagcaggtgactcgtctcaagagcagaatctggccggctgaggtacacctcgtcatccgacggatcttattggagttttatattttgctctaacacacattttggcccttgtctatatctagggggatgactctcgtcgtcatcatcactggtgtaatacactggtgtgctgttgtacactgaatcactgtcatgtggactactgtcgtactcactcntaatcagttggctcaagttaactgtgagaaagaactttaaaaatagtgctaatcctacaacaatactgagcaatattt

SEQ ID NO: 31626 - DNA, 263 bp, Zea mays
agcttcggaatactatgacttcattttcctcaggggtcggacaagtcttctctccttcgtcggccctcacaacggacaagtcccggaaatatcttcctctcatgttgacaagatgattttctttgatacttgatttgccgaaaaccgcatggcttggtcgccaagggcgatctttggagtcttcaccaccactatccgcatcataactgtcgctgtcatcagtatcttcagataaaccctctaaaatctctttggtgatcttt

SEQ ID NO: 31627 - DNA, 242 bp, Zea mays
catctatgtgatgatgggctttgttgtctactcggaccttttagttgggaaatcctcacctaacaaagatggtgaccctgtcgtcgagtgctagtcaacactagggtcacagcacctgcacttgtaacgtaaatctcgtgagctgagacatcgtaacgttactgcattactgatacccgcgactccatatggtgtgctggactagactttccaacgtgtgtgttgatataatggcctgacac

SEQ ID NO: 31628 - DNA, 262 bp, Zea mays
agcttttcatttgttgtcgctcccaatcttcagttcgccgactgactgtcgtgttccttattttccctcgtcagtcgacctcgtcgcgacttagttcgtccatcgtgctggtcactattccatactatacctattagcttagatcctgctcagctcgtcgttgcgtcatttgctgtcgagtcgtcaaaaacggcatcccctgctcgacccccacctcactagctcgccccaaacccgatctcgtcgtcgttccgcacgtcag

SEQ ID NO: 31629 - DNA, 106 bp, Zea mays
  unsure (1)..(106): unsure at all n locations
cttgctcgagtctagttatcananatctaccaaatggagagtgctttgctgcttaatggctcagaagctcgtcactacttcagcataccatatattgtctttatac

SEQ ID NO: 31630 - DNA, 262 bp, Zea mays
agcttgtgaaggttcttcatccccacatgtgctaagcggcgatgccacagccagcccatgctagtcttagctattaagcatgcatctagaccggcctcttcttttgcaaaatcaactaaataaagtttgccgtctaatacacccttaaaagctagtgaaccatcacttcttctaaagacaaacacatctacatttgtaaatagacagttatatcccatattgcataattgactaacagatagcaaattatatccaagactct

SEQ ID NO: 31631 - DNA, 262 bp, Zea mays
  unsure (1)..(262): unsure at all n locations
agcttttanagacatttgaattatctttgtaaaagatattgtaatttaggaatcaaaacattactctataaatttgttcgtacattgtaatatatttttaccttttcatccgtgtgtgaattgctttgatgtggatgaaatttgtatcttttgagccgaaggcgaaaacaccttcccttattttcgtacacgacgaagcatatctttgcttctttgtactcatcgaagcgttgtcatcaaagccgaagcatctgtttgtact

SEQ ID NO: 31632 - DNA, 109 bp, Zea mays
  unsure (1)..(109): unsure at all n locations
aagctctcatcataccacanatgtgatgaccacatcaagacctttggagtatcttcatattgacctcttcggacccgtcgcctacctatgcttatgatgaagtaagtat

SEQ ID NO: 31633 - DNA, 261 bp, Zea mays
agcttttcaatttgagggtggaactgcaagcctaatactatattcagcaactcacaagcagctggtatttctatacatttctacttcctctgaggaaagataatcattgtgaaaaatcacagaaatagcagtcatcttaatcaatttgctttggagcgttataatttacaatagaaaccaaccatacctgtgaggcaataacgaaagcagctggtatttctatacatttctacttcctctgaggaaagataatcattgtga

SEQ ID NO: 31634 - DNA, 258 bp, Zea mays
cgcccccgggaacccggaggcgaccggagcttgcagctttccaagaaaagcggcaagagagagaagacacaaacccagcatatggacatgccccaccaaacacacggctccaggagcatcacaaaaccgcgcgctagagacctcactccgacatcggccccgacaaaagagcagccgccatctggaccccacccgcaaagaacggcacgaaagccacccatagacccaccacaacgataaaagaggatccgctataca

SEQ ID NO: 31635 - DNA, 256 bp, Zea mays
agtttttgagctttggtttgaaggacacattttcgacgtttccgaagacaagatgtctcaagacaagaagatagttgttgagacgaagctgagtgaagaggagaagctccttgaggagaaaactgctggatttgttgaattaatagcgaaaacaaatacagagaagattaccaaagagatactggaaggcttgtctgaagataccgatgatagcgacagctatgatgtggagagtggaggcaaaaactctgaagat

SEQ ID NO: 31636 - DNA, 304 bp, Zea mays
cctggcctcagtagtacttcccacattcctaatacccacaaacttagctggctgaacatagtgacaagtacttcaatcctcctattagcatgaagccgtcacctttgagatgcatctgtgatcaccgaagaggtggcatttctgacaaaactaaagtaaattaacactcacgcattctccaaaaaactgtcttggttttactagtacattgatagtgacagcctccttttcgacccatacaaagatgttccgctaaatgtcctattctgtataactcaccaactcctgttgaaatatttaccca

SEQ ID NO: 31637 - DNA, 262 bp, Zea mays
tttgcaagcttcactacacaattttagaacatctacttaattcatgaatatcatcgtcacacacaccgactcgatttgatctaaccacacatgtctatcacatgaatgaagcatttcaacaaatattctaaaacaaactaacttcatcacacatctttcattacaaacctacttgacttatttgaagtgtctactcgaaatcgtgagcacaatcatacactatatgcgaaacataatttaacgaactcataatacgcatcgt

SEQ ID NO: 31638 - DNA, 259 bp, Zea mays
tttgcaagcttgacattgctttcctctttgaaaccaatgccatccttaatgccagggcgtctcccattatagagcatgcttctagcaaatttaaatttttcattctctatctcatgctcattaattttactagttagttgtgctatgtgatcattttgttgtttaattaaagctaggtgatcatgaatagtatcaacattaatgtctctacatctagtacaaatagtaacatgatcaacactagatgtagagggtttgc

SEQ ID NO: 31639 - DNA, 260 bp, Zea mays
ttttcaagttttcataatctttgttgttgcttatttagtatactttaatgtttataattggcccaagccatgattctaaatttttcatactcttttccccattttcttgaattttgtttatagggctcaattagggtttttattggggttgcacattttgcctttttgaaaaacccatttgttttgaacatgatgcttttaagtataagcttagtgggttctttattcttaaatcaacttgatgttcatgctcaattttg

SEQ ID NO: 31640 - DNA, 310 bp, Zea mays
  unsure (1)..(310): unsure at all n locations
acagcatacacgtcggctggactattattatcataattcgagacacaacatatataacaatcacttaacacaatcaactcctacctaacatgagtnggctaatgacgtgactatnntccaattaccatcacacaccacctntcgccatnntttggataaccggcacgacacacaactattgtaatacatctcaagttaancaacccactttagacattgcgactcataacatgagtgggagcggattaattatgcttctcttatacatttctcaacttataatggataacacacaagtcacctaaacacc

SEQ ID NO: 31641 - DNA, 254 bp, Zea mays
tttgcatgcaattttgtcaatacctgtcaaagcaacaacacatgccagcacagcagctacagaccataccaataacttggcctttcgcatgctggggattggatatgattggacctttcaagaaagctcaaggaggttatacccacgtattggtggcaattgacaaattcactaaatggatagagttcaagcccattgcttctttaacctctgctaaggccgcggaattcatacaggatataatattcagattc

SEQ ID NO: 31642 - DNA, 245 bp, Zea mays
agttttaagatcgagaacaaaatatatatgtgcatctggatcttgacccggagggaatcgaataaacatatgtacttggatcaattccattcgtcttgggggagtcatgtggagatagatagtcacatttagatagatagtcacatttctgatcacaacattgctgcacacatgaaagattatccgggcatttatttatctgggacaacaatagaagcagattttgggccatacgtgcgcatttg

SEQ ID NO: 31643 - DNA, 394 bp, Zea mays
  unsure (1)..(394): unsure at all n locations
ctactgcatgttctgtgaacaatgctcctatgcagactctcatatnagctgcttacaattaacttcattaattcatctatatttacacaatgacttgtgactttgggttaaaaacaaggacatatactcaaataaatcttcatctagtgctaggacatgttacataatgtaaggtgcaacattatcatcattttatttacaggctctatcttaaagaaaaatattgagcatatcttatctaaactacactttattttacaaatgattacacttatcttacctgaatactaattatctaactaaaggtagaaagctacctatagttaattatattgactacattattacagttgtttttagagcttgttcaaaacctttaaatatttcataatct

SEQ ID NO: 31644 - DNA, 263 bp, Zea mays
agcttaactaatttcatctaacgagtcggatagctagagaaacgacacaacccgctagacagcatacacgtcagcttgactattactatcacaattcgagacacaacatatataacaatcacttaacacaatcaactcctacctaacatgagttggctaatgacgtgactatttcccaattaccatcacacaccacctttcgccatttttggataaccggcacgacacacaactattgtaatacatctcaagtttattcaacc

SEQ ID NO: 31645 - DNA, 226 bp, Zea mays
gagacgctacacagatggatacactcagacctgactgtgcttgattttcgaccgcgctattaactagggagaagatggcagtatgtatactttcccttactggtgtttttgcagatattgaaccaggacctcaccttctagaggtaaatgattactaaggaaaatagacacacggtcagtcaacctcatggagatctgaaaaagataaccagttcgtctccaccac

SEQ ID NO: 31646 - DNA, 262 bp, Zea mays
agcttaaggtatttggaaccatcccctaatagtccacaaaatgtccatcgggacacgtcaccggctaaggaatccagataaaatgaacaatagcttaaactgaaacttatccattatttgaaattggagaaagagctaaatctatcctcctacctaaggagatcctcaatttccccaacttctgtttcatcaaatcagactggcgaccatccagcaatcgattagcgcaacgcagaaagccgagcagaggttcatccagcgc

SEQ ID NO: 31647 - DNA, 312 bp, Zea mays
ctctatgccttacacttctgtgtgtagcgatcacgactctgggtctcggctgaaatctgtcgtctcgtccacctaatctccccttcgttgattcgccggttgccttgtcaatactgtgattacgtgcagcgacttttgaccatctccctgttcgcagtctgtgaatttcttgaacagcctattggcgaagagccctggcgtaacgttatcttgctggtctttttgcactctaaaaaggtgccgactcttctctatctgagtcctatgcaataccattacgtacggctcgggcacggggaattagttattcta

SEQ ID NO: 31648 - DNA, 262 bp, Zea mays
agcttgtttaaaaagtttggtgaattttgggattattaattactctctataattccagaagtatggattttggctattttaaatgtcccaaaattccctattggaactaaaaaccatgaaactatttttattaaatactataggaaattagaagccaataaaaattggtctggtatttttagcagttttctataattttctcggaattctctaagtctagaagaaaaagaaaaatgaaaagatgctacaggattaagctgaa

SEQ ID NO: 31649 - DNA, 261 bp, Zea mays
agcttgtgtatgttcttcattcctacatgtgctaagcggcgatgccacagccagcccatgctagtcttagctattaagcatgcatctagaccggcctcttcttttgcaaaatcaactaaataaagtttgccgtctaatacacccttaaaagctagtgaaccatcacttcttctaaagacagacacatctacatttgtaaaaagacaattatatcccatattgcatagttggctaacagatagcaaattgtagccaagagac

SEQ ID NO: 31650 - DNA, 230 bp, Zea mays
tgattcatgggaaaactgcctgccgccgaaactggaaataatacgaggctggaattcatcatgtagatagagatcggaacacagcagctgatgtactatccaagctgggatccagtcgaacacaggttccgcccggagtcttcgtgcaagaaatctgcagccgagtatctcaatggatcaaacagaagagtgtaatatcatagatcaacccgagtcagactctgatgact

SEQ ID NO: 31651 - DNA, 246 bp, Zea mays
ccgcccccaacccccgccccccccccccacagcgggccctgacctgacgaacccgcccggaaccaagcaccgcgagccatgcaacgaggggacggcccaaacaaccgaacaccccacggaaacaacaaccaggcccgagaaaaaacacggaaaacaaaacagcgcaccaacaacgccggacgcaaacgacaaaaacaaccaaccggagaaacaaagcgcggaagcaacaccacacccgagaaaaaa

SEQ ID NO: 31652 - DNA, 256 bp, Zea mays
attttgtgaaggttctttatccccacatgtgctaagcggcgatgccacagccagcccatgctagtcttagcaattaagcatgcatctagaccggcctcttcttttgcaaaatcaactaagtaaagtttgtcgtctaatacacccttaaaagctagtgaaccatcacttcttctaaagacagacacatctacatttgtaaatagacagttatatcccatattgcataattgactaacagatagcaaattatatccaa

SEQ ID NO: 31653 - DNA, 236 bp, Zea mays
  unsure (1)..(236): unsure at all n locations
tagctaacggatatcggctaacttttgtaaaagaaaaatctgaattgtcctgacacctacccactcttttatgattgcnccctagccactgccagagctacgcaaccctctccggagacatacttgtgctctcacccgccgcgctgtgttcgctctctccaccatctctcggcgccttcgtccttccagcttctcctggcgactacttacgaagcgtcgctttctacaattgtgct

SEQ ID NO: 31654 - DNA, 255 bp, Zea mays
agcttctaaagggagagcacattttgggactaacaaatgtgcattttgagaaagacaggatttgtagcgcatgccaagcagggaagcaagttggtgttcatcatccacataagaacatcttgacgactgacaggccactcgagctcctccacatggacctattcagcccgatcgcttacataagcatcggcgggagtaagtattgtcttgttattgtggatgactattctcgcttcacttgggtattctttttac

SEQ ID NO: 31655 - DNA, 341 bp, Zea mays
gcttcattatatggctgtttacacaaccttatactaaagagtatatcacatatgtacaaaaccattgttttcatgctgcacacatggaacccaaattgtaaatgtacatgtcacaacaacagtgtgggtccaccgtacataaaactgactgcgaggataaaaccctcgcttatataaaagagactttacacagtaacaaacctgacccttgccaccatctagggcatgaccatgtaaacacacacggaccgactaccctgtttgggggtcaacgaagatttaaccattaatcctcccgaagtcactagacaagatgtgtatcactacactcgttagccttc

SEQ ID NO: 31656 - DNA, 252 bp, Zea mays
agcttctgcgacggttaaaaattttggcagcaaaacagtgcaaatagcagtaaatgctgtggtaacttcacacctactcgtctgtttatatagtgccgcaggtaagaaggcgaagcgccagaagttttacaccaggcggacacccgctcgcactcgctgtacggtgggccgcaaagactgaacagtaattctgcacggtggggccgccacgcgcagggaaattgaatcgtttctcgacaacgagctcaggga

SEQ ID NO: 31657 - DNA, 244 bp, Zea mays
agttttcaattccttcaaaccaacacactttatgaatatgaggtggtttgttcatctccgctttgttcatcatcatgttgtaggcatcatcatgaatttgaatattatcagctgctgctctttgtagaggtgctgcactgccgctcctttgtgtggcactaccgctggtgactgtggcagctgattgcagaatggatgccatatgaggagcctcttcttcaatagcctttttcttgattgcccc

SEQ ID NO: 31658 - DNA, 220 bp, Zea mays
cacagactattcaaacaacatgtcacacacacacataatggaatgctgatgtgtctgtttattacattacatatgaaataaaactgcatacttttaaacaaaccgttatatacacagttgaacacatgccctttgagttttattgttgactataatgttatgtcaatgcaatagaagtgttgtattattgtaattgatctaccctgatctccaaattgat

SEQ ID NO: 31659 - DNA, 246 bp, Zea mays
atttttaaaagggggatcacattttaggactaaccaatgtttattttgagaaagacagagtttgtagcgcatgtcaagcaaggaagcaggttggagttcatcatccacacaaagaacatcaggacaaccgagaggccacttgagctactccacatggatctattcggcccgattgcttacataagtatcggcgagagtaagtattgtgttgttattgtggatgattattctcgcttcacttgggtg

SEQ ID NO: 31660 - DNA, 252 bp, Zea mays
  unsure (1)..(252): unsure at all n locations
tcaagtgtcgagttcagctctatcaatatctaccaagtatagctgaccctctaacactcncttanatgctatggaatcatcacttcttctaaagaccgtgacacctacatcagtgaatagacagttgtagcccatttgacataattgagatacagaaagcacatggaatatatagaatctacaagacaaacattggaaatagaatggtcaggagatatagcaaatttacccaatcctctgaccaaaccttga

SEQ ID NO: 31661 - DNA, 262 bp, Zea mays
agcttctaaagggagagcacattttatgactaaccaatgttcattttgagaaagacaggatttgtagcgcatgccaagcagggaagcaagttggcactcatcatccacataagaacataatgacgactgacaggccactggagctcctacacatggatctattcggcccgatcgcttacataagcatcggcgggagtaagtactgtctagttattttggatgattattctcgcttcacttgggtattctttttacaggaaaa

SEQ ID NO: 31662 - DNA, 261 bp, Zea mays
agctttacttatttgattttgcaaaagaagaggccggtctagatgcatgcttaattgctaagactagcatgggctggttgtggcatcgccgcttagcacatgtggggatgaagaaccttcacaagcttctaaagggagaacacgtgataggtttgactaacgtacaattcgaaaaagatagaccttgtgcagcttgtcaggcaggtaaacaggtgggaggagcgcatcacagcaagaatgtgatgaccacatcaagacccc

SEQ ID NO: 31663 - DNA, 262 bp, Zea mays
agttttattcgatttaagggtcattttatgggaatctacaagttgtgcatgtgtaatttcaaggatgaacacacaagggctagaaaacactgacatagcatatgatttttttaaagtttcactagggaaccactagattatttggggaagggggtcttttatgggcaaaacaagcaactttttttttggcaaaaaagactaaacaatttcaataccaccttgatagcaagacaagagaaacacataacacgacctaacaaga

SEQ ID NO: 31664 - DNA, 263 bp, Zea mays
agtctttttaaaaacatccatgcttcggaaaaatatccatgcttcataaacaaggggtcccttcttttgtaacagggctgatgaaactgtatttctcaggttactttgtgccttagcacattttcatttttacaaagcattctccgaagatcggcttcgtattcaattcgtgtcattggtgtgatatgatgtatgatgtgatgctatgcgggatgatgtgatgatatgatgcaaaagatgatgctaatgccgaagacacacac

SEQ ID NO: 31665 - DNA, 259 bp, Zea mays
agtttgtcaagaggaatggagagcaaatgtgaatttgaactttgcggaatacgagagtagtcaaaagaaaagttcgaattaactggtttccttctctcatagtcgttgtggtcgtcgtccttttgggaagaagatgactcgtcgatgtcgtcgtagtagacaatctccttgatgcgccttgtcttcttcttcttcccatctttccgtctatggcccgagcccgagtcggtaggcttgtcatccgttggctcggccacgt

SEQ ID NO: 31666 - DNA, 217 bp, Zea mays
acccgggaacctacagagacgacctgcaagcctgcaagtttggaggccgccttgggaaccacacgggagaaacacgccacgcccacagccggccgacgctagcggaggcgacgggaagcagcctccgggacagggcagggcccatcaggcctcaaacgaacacgactgggaacgcgcccgagcaaagaaccgccactagaaaagcaaacggaagccc

SEQ ID NO: 31667 - DNA, 254 bp, Zea mays
atttttttcaagcttttcttctgtcccccctaagcagttttgtggtccaagttttaaagatataccagatttttcttcactagattactcccgaagccatcataagaatgggaatctttgtatgggctgtgaggagtcaaggtttggaaccaagtgcaaaaggtttctgcagtatgcacgaacttttatatgagacgaagccctagggtaaggagcagtatcacaacaattttggcttctacagcttcgttgct

SEQ ID NO: 31668 - DNA, 260 bp, Zea mays
tttgcaagcttgacgtgttaatctcgatagtagctgattagttttaaaacttgggccccaataagaaatgaacttgagacataaagaagcggcaagcgaaaagctagcagaattaaaatgtttggttgtagacatgctcgatcacaaaaccaaccaaaccatcaaccattaaacaacatatatagctagtacaccatcagagagagaaaaccttcgtacatgttcaaagttgtgttctccacgacaaatatttccgagac

SEQ ID NO: 31669 - DNA, 254 bp, Zea mays
agcttataataagagaatggaggcaagagcacgaccatatgtaataatagaaggggagttatacaaacatggagtctgctctccactactcaagtgtctatccagagctaaaggtatagaattgatgaaggaaatacatgcaggattgtgaggatctcacattgcatctatacctttgctagggaaagtcttcagacaaggattttattggccgaaggcagcttcggatgcagcggatttggttaaaaaatgtg

SEQ ID NO: 31670 - DNA, 254 bp, Zea mays
agctattatagccaatttcaagtttattgaagaatgatgttaaattcaattggtcttcaaagtgtgatgaagcttttgaacaattgaagacattattaaccactgctccggtattggctcaatcggacatcaccaagccctttgatgtatattgtgatgcatgaggcagtggactcggctgtgtattaatgcaagaaggccgagtaattgcatatgcttcaaggcagttgcgccgtcatgaggagcattaccca

SEQ ID NO: 31671 - DNA, 243 bp, Zea mays
agtttttgctcaatgctcctcggtttcgtcatcctatacatatcaaagtattataaggtaaattcaagtttcaaggaaaaggtaagcacaaggtatgagtttattaccggtttaaggtgacttcgagcttcatcaccagccaagtttcgcccgccctttgcccaaatttgggtaacgaatctgtttccgatgcttcgggccagaccggggatgtcatccaagtctgctggtgacaggctgaag

SEQ ID NO: 31672 - DNA, 245 bp, Zea mays
attttgaaaaatatctggatatggttcgaagagtcgaagcttccttcgaagggttttctgtcaagaatatccctcgaggacaaaatgagcatgctgatctgctagctaagtcagcagcacaggggctgcctttaccttcggatgtgttctttgaaacaataaaagcaccttcggtggaactccttgaaagagcagttcttaatatatctcctgtttttagtgaagattggagaactgagatcatc

SEQ ID NO: 31673 - DNA, 293 bp, Zea mays
actgcgaggctcacctttgtctttgccagaatattctacttgctcaggttgcctgtgaactgaagccagaacacctgttatatgggctgccactaattacataattaaggagttgtgatcaacacatggttgatgtatcaactaccacatgactcttgacttatccacgccaaatattgccttccacattggagtcgaggaaataatctgacagggtttcatcatagcttattccccatatcctatcgctcggggaagaataagagaaatcctgttgatcatcatctacctat

SEQ ID NO: 31674 - DNA, 293 bp, Zea mays
gcttttaaatggagagcaccatttttttttactaaccaatgtctaattcttgattaaagtacagaggtcttgtatgcaccatgtccaacgcaggtaaagtcccagttggtagtttcattcattccacacatagaactattcatgatggactcgataggctcgcttgtagctatctttacatgtgaccttatttggaccgatagtcttacataagcatcaagcgggagtaagtattgtcttgttactgtggatgattattctcgcttcacttgggtgttctttttgcaggacaa

SEQ ID NO: 31675 - DNA, 260 bp, Zea mays
agcttgacattgtctccctgttggaagccaatgccatccttaatgccagggcatctcccactatagagcatacttctagcaaatttaaatttttcattttctaagtcatgctcattaattttagcactaagttgagctatgtgatcattttgttgtttgattaaagctaggtgatcatggatagcatcaacattaatgtctctacatctagtacaaatggaaacatggctaacagtagatgtagagggtttgcaagcatt

SEQ ID NO: 31676 - DNA, 255 bp, Zea mays
ggagttccttgccacagcggcttgtcctgtaccaccctgtatctgctgtgcgaaaccattggtctcacatttggtagctgaacaatgctactatttaggagtgtgactcttgctgcacaccatcaatttgaactcttactggtgtcaaagaacaaaagagtacaaatgaccccaactatttaccctatatgtgcagatggcacgggactctgatgtgtgatttggggggctgtttcctctcttttgtattgttcc

SEQ ID NO: 31677 - DNA, 261 bp, Zea mays
  unsure (1)..(261): unsure at all n locations
agtttttttcgtgtttaaagcgnctctacaatagataaaaaggcaaaaacattataacctgcccaaacataaactgacttgatcttgatcaaatgatataatacttattagagaaagaaatgaaacatacaactacagcactgtacattatggctgcccttaccttttaacacactttgcactatcatcgcctataatatgcaacggaaccgtacaataacacgataacaatatatattctagatatgtgcccgtgcgttg

SEQ ID NO: 31678 - DNA, 263 bp, Zea mays
  unsure (1)..(263): unsure at all n locations
tcactatgcgtcatcatatcatttgcgaacctagttgcacctcgtcaactaagcagctccgacttcgccacaacacacatcaccatacaagtctgacgacgcaatcctncatagcgacgcctncacagaagggtgtgacgtatggcgtcgtggtccgctgacctaaaggtcaaggattacaccatcaaagatagcacactatgcaaagggacagcgatagtttgatagatgcttnncaagaaagtaacaacgcccncacgtca

SEQ ID NO: 31679 - DNA, 262 bp, Zea mays
agcttgacaatgttgagatggcgctcgtcatcaagagcttccgccaaatcctcaaacaaaggagggggaaagactacaagtcccgctccaagaaggtttgctacaaatgtggtaagcccggtcactttattgctaaatgtccattatcaagtgacagtgacagggataacgacaagaagggaaagaggagagaaaagaagaggtactacaaaaagaagggcggcgatgcccatgtttgtcgggagtgggactccgacgaaag

SEQ ID NO: 31680 - DNA, 261 bp, Zea mays
cttgcaagtttctaaagggagagcacattttaggattaacaaatgttcattttgagaaagacaggatttgtagcgcatgtcaggcagggaagcaagttggagtccatcatccacacaagaacatcatgacgaccgacaggccgcttgagctgctccacatagatctattcggcccgattgcttacataagcatcggcgggagtaagtattgtcttgtaatagtggatgattattctcgcttcacttgggtattctttttac

SEQ ID NO: 31681 - DNA, 260 bp, Zea mays
tttgccagcttatgctctgcaaaggtcttgggagaagaagctactcctagcaagggagaaaagtcggcacgatataatgttcgaggtagcggtagctacttgaaatagcttcatgagatggtgaaaagcaaggaatgacttagcaggcaaggaccaactagtagaccaattacgaatctggcggtgaaaggaggcaaggactcgtcagcaagtgatcatgtcaatcgcgggtgctagtttttttcaaccacctagaaatc

SEQ ID NO: 31682 - DNA, 278 bp, Zea mays
  unsure (1)..(278): unsure at all n locations
aagaggcgaccgggaggcangcaagttatactccgggagccacacacgaaggcgtaagccaatagccccggcgcacggacaaggcaccccccctggaaccaagaccccaaaccaacagagagcccgcgcgcaagacgaagacaaccaacgccggaccacacgcgagggcgagaaaaatcacccgacgtaaaccgagaaccggagcagcaagcaggcaacgcgaccaagcagacgagaaggcaacccaaaaaggaagacgaagagcacgcaacgagagg

SEQ ID NO: 31683 - DNA, 259 bp, Zea mays
  unsure (1)..(259): unsure at all n locations
ttttcaatttttagctgngtttatattaccgccctcttaatgcggtaactatcaagaacaagtatcctttgcctcgtattgacgttctctttgaccagttggtcggggccaaggtgttttccaagatagaccttcgctctggctaccatcagatcaaaatacgagcaagtgatattccgaagacggcattctcaaccagatatgggctgtatgaatttttggtgatgtcattcgggctgacaaatgcaccagcatactt

SEQ ID NO: 31684 - DNA, 293 bp, Zea mays
atcggcggatcatgggaatctagtccgccattcatctcgacttcttctattgtttaggtggaaagccgtttaatctgatatgctactctgagctcatacaacaacttcaattggaattttatggtaacttgaaaaatctgctgtttatgcattgttttgcaggcgactacaaatggagacctaaagacgattgtagggtaaggaacataatctgtacttgagtttggacgacctaaatcagataattaaagatccttgtatgaaattagacacttcacgaccttaattgctca

SEQ ID NO: 31685 - DNA, 245 bp, Zea mays
attttgacaatgaggaaatggcgctcgtcatcaagagcttccgccaaatcctcaaacaaaggagggggaaagactacaaatcccgctccaagaaggtttgctacaagtgtggtaagcccggtcattttattgctaaatgtcccatatctagtgacagtgaccgaggcgacgacaagaaggggagaagaaaggagaagaagaggtactacaagaagaagggcggcgatgcccatatttgtcgggag

SEQ ID NO: 31686 - DNA, 263 bp, Zea mays
agctttatatggttcgacggtgtcgaactccgctaaattggtctgaacctggagaacgatacttctttaggcctgatatggtgaaagaggtcgaagaaaaggttcagaaaattatttataatatgaagaaagctcaggctcgacaaaagagttatgcagaccgacgaagacaacccttatgctttctggtagacgattatgtctacttaaaggtttcaccaatgaagggtatatcacgtttcggggttaaagggaagcttgca

SEQ ID NO: 31687 - DNA, 229 bp, Zea mays
  unsure (1)..(229): unsure at all n locations
gatgtctncttacgtgcgtnctcgtcgctgctcggctcatccgagctaagagcccagaaccgagaaccgctgagagcttcgatgccgtgaactaccggcctcggactcacagtcgctgtaatggcaaaatcagttaccttctcaagtctatcttgatccagcaaccgcctcgccttctgaaggagcccatcatcttcagcctccttcactccatcaacgctgggatttg

SEQ ID NO: 31688 - DNA, 262 bp, Zea mays
agctttatcaaatggacgtgaaatgtgccttcctcaatggaccaatcaaggaagaggtctatgttgagcaacctcccggctttgaatatagtgagtaccctaaccatgtttataaactctctaaggcgctttatgggctcaagcaagccccaagagcatggtatgaatgccttagagatttccttatcactaatggattcaaagtcggaaaggccgatcctacgctcttcaccaaaacccttgaaaatgatttgtttgtatg

SEQ ID NO: 31689 - DNA, 140 bp, Zea mays
tttttctgaacagaacgtgagcacagtgtccaacctaccatagtttcaaatcgtaagtccgcttaaccatatcatctcaacagcaaaacttgtcgcgcgttgatataccggaggataaatgccctactgaaagatgactc

SEQ ID NO: 31690 - DNA, 262 bp, Zea mays
agtttgttgattcacatttctatggttagctcaaccaaaaatagaaagtaggcaaaaaaaatttaacatggacaacttaaataattagaaatgaataattagaaaattgttggagcacaaacatgcatgttttactccttaaagtgttttagcaactccctaaatctataatttaggacgctaaatttatataactaatggagatgctcttacatgtgaattctgctctggtttttattaatatttagtgaagccctaccaa

SEQ ID NO: 31691 - DNA, 259 bp, Zea mays
agtttgttaattttatataacgcagcatatctgtggaagcatggagaggaggtactatacgaagcgatttcatcgactagactccgcctccaagatctccttggacgacttcttccagaatcgccatttgcaaaggaggtgtcttcttcccttcgtacccctctcttcagaagggttgggatactagaagcgagaaactacatacccatttacgaaacggaggcgacgcgaaacgaagccgtattggagcttgcgaaac

SEQ ID NO: 31692 - DNA, 93 bp, Zea mays
gaaagacggccactctcaccatttgcaagtggaaatcgaaaattgacacttccaacgattcaaggcttacagccaaaattacgccaacaaatt

SEQ ID NO: 31693 - DNA, 255 bp, Zea mays
agtttttcaagtctatctttttcgaaatgcacgttagtcaaacctatcacgtgttctccctttagaagcttttgaaggttcttcatccccacatgtgccaagcggcgatgccacagccagcccatgctagtcttagctattaagcatgcatctagaccggcctcttcttttgcaaaatcaactaaataaagtttgccgtctaatacacccttaaaagctagtgaaccatcacttcttctaaagacagacacatct

SEQ ID NO: 31694 - DNA, 261 bp, Zea mays
tttgcaagttttagtcatcgcgcgcatcatctccttcaattctatttgagagacacactcatcgtcgttaagtttaagccccttgtccttgtccatttgattctttggtcctgtcattgttagcacaaaacagagaccaaaaaggcaacaaacaatatgaaccctacaactatctctcaaggtggtggtggaggtggtggaatacagattatgaagcgtcttaccccgctcttacaacgttcttaccatcactgcaggtgg

SEQ ID NO: 31695 - DNA, 264 bp, Zea mays
agtttgcaattttttgccagactttgttgagctgctaagttctatgtgtatatgtttttctgacagtgcgttgaccttatatttttttgatgttgtgtgttgaccatataatttctgatgctatatccaaataattcatttggtgtcacagcgtgtaatgcagaacgcatcaccaattcacataaatactttacataaaaattacatttgcattgaggaataaaacaattttagttaaatactgtcactaccacattcaacttc

SEQ ID NO: 31696 - DNA, 253 bp, Zea mays
agtttttccagccctcggacccggcagaacttcaccagaaggccaagatcgccctcacctgacttcggccgcccgcctgcgcgcgtagaccgagcaatccggtgagccgttcttaaattcctcgcgcacacaccttccttgatccctggtgaagctcgctgacccatttgattggtcaattgtgccctggataggccggactcctcgccgccgatgagctcccccgcctacgcacgtggaccggccgactccg

SEQ ID NO: 31697 - DNA, 253 bp, Zea mays
tttgcatgcaagcttggctgtagggctgaaataatgagcataatctgctctctgctgctaactttctctatcaatttctgtactacccttgtcctggaacaaatcaatacaatagaatcatcaggatcatttcatgcccttactaaacaaaatggatcacactgcatcacagcacacttgttctgatgcctgtgtactctattatactgactcaaagaacaacattctaaaatcaacaatcaccataattggt

SEQ ID NO: 31698 - DNA, 374 bp, Zea mays
  unsure (1)..(374): unsure at all n locations
acattgagctccagtgcatattcattatgtcttgagccacatgtcngngctcaatacctctgtgcatgcnctccttcaactattaaaggagaggcatgcgtcgtacaagacagatcaatcttatgctactcagcactcacaagttatacagctctcacaatcataccatggatagggtacctccgggccaacctataatctgtggtctggtcatccatcttcactaaacaaacctatccttctattagattaggnggcctcgccccgcaaattcttcacttggccgaataactacatttaaacacaacaacatttcagcttacagaataaattcatttatattacacatcaaaacactgtatgtatgaagtgta

SEQ ID NO: 31699 - DNA, 244 bp, Zea mays
agcttgttaaaatatctggatatgattcgaagagttgaagcttccttcgaagggttttctgtcaaaaatatccctcgaggacaaaatgagcatgctgatttgctagctaagtcagcagcacaggggttgcctttaccttcggatgtgttcttcgaaacaataaaagcaccttcggtggaacttcttgaaagagcagtccttaatatatctcctgtttttagcgaagattggagaaccgagatca

SEQ ID NO: 31700 - DNA, 260 bp, Zea mays
agcttcttcgttattcgttttggccttaagctggcttcgtctattctttgtaatgtgcctaaaacacacttaacctaagaacataaggttttgaggaccttcggtagtataggcccccaacatgtcgttgatttattgctattaaatcctaacatgttggttgatcaaggggttataagtgtttatgcctaaccgtatgaatcatgccatatacattgtgcctcgttaaccatgttgtagggaaactccaccaaaactct

SEQ ID NO: 31701 - DNA, 339 bp, Zea mays
  unsure (1)..(339): unsure at all n locations
gtgtttgtcgtctgacacacagcacagtacgctttgtcgagtgccattttctgacactcgngcaatacattnnttattcttattgcccaaccaaactcnttgtggtatgttcatacactatgtagacctacatgtaccatnntgtgcacattataaaagtgttntctctaactaatagatatagttcgtttaatcttaattcctcggaaattcagatttgaactgcaagtcactcgaaacatggaagatcgtgcatgctaaaatgatatgtatgtcatntagcacaacgtacgaccgatttctggacagatcggatcttcgagcccatgctcactaaca

SEQ ID NO: 31702 - DNA, 262 bp, Zea mays
agcttgtgaatattcttcattccaacatgggctagtcgacgatgccagagccaacccatgttagtcttagcaattaagcaagtgtcgagttcagctctattaaaatcaactaagtacagctgaccctctaacactcccttaaatgctactgaatcatcacttcttctaaagacagtaacacctatatccgtaaaaagacaattgtagcccattttgcataattgagaaacagaaagcaagttataatctaaagattctacaa

SEQ ID NO: 31703 - DNA, 259 bp, Zea mays
agcttttaaatttagagcacattttgtgactaaccaatgttcattttgagaaagacagggtttgtagcgcatgtcaagcaggaaaacaagttggtgttcatcatccaaacaagaacatcatgacgaccgacagaccgcttgaattactccacatggacctattcggcccgattacttacataagcatcggcgggagtaagtattgtcttgttattgtggatgattattctcgcttcaattgggtgttctttttgcagga

SEQ ID NO: 31704 - DNA, 262 bp, Zea mays
  unsure (1)..(262): unsure at all n locations
agttttatatatgtttagaaagnaaactcccatcaatgcactgatatttttaccgaggtatcaagaaccttgcaaggttcttactaatacttgtggtgcccttacgcagaagaaaagccacgcgagtgccaaacacctgatacagttaactccgtaaagaatcgtgggtctccttcacgcgcaagtggtgcttcgtaaaagtcgcctagagggggggtgaataggtgaaacctgaaatttacaaactttaaacacgcactat

SEQ ID NO: 31705 - DNA, 156 bp, Zea mays
ggggggatagtatctgtaactaactatcacaaactgaaggtatacaatatgcatggtaagtaactactaaccagtcccagaaatagccaagtgccatggttatccgggtcgcaaacaacctgctccacttgggtccacgacaggtgatcacccttc

SEQ ID NO: 31706 - DNA, 266 bp, Zea mays
  unsure (1)..(266): unsure at all n locations
acgcacgcaagcttgcaactatttcatacaanacaaagaccaagaaaatcttggagaagtcaagaccaacacagccagaaatccaaaggccacgcagggncccgcacatgcgaactaggggaaaatacaaaactggagagcagtgagaagaatggaatcgcagaattaacactagcagcaccattttcagaacacatctcttgcaaacacggcaatggggcgcacgcggagggtgatagcggcaacatccctggcaacatcccaag

SEQ ID NO: 31707 - DNA, 255 bp, Zea mays
agcttacccctccctgggaagggccgttcatcatcgtcaagattttgaagcccggaacatacaagctggccaacgatcaaggagaggtctacaacaacgcttggaacatccaacagctacgtcgcttctacccttaagatgtttcaagtcgttcatatacctcgttttttatttacatacataaataaagtctaaccgtcaaggaaggatcggccttgcctcggcaaagcccgaccctccctcgagggctagaag

SEQ ID NO: 31708 - DNA, 369 bp, Zea mays
  unsure (1)..(369): unsure at all n locations
cacactacaacttaactgaagctacacatggtgatcaagaactgagacatggattactcctctgctactgctccttntccnccatggtttgctcttatatatgcagtgaatgatcaacggtggattttgatctgcacaagatactataatctanggcaccgggctcctcaaagatcacgcattccaagctatctattagggaattatcaggcataagtggatggatgacgcctgacaatttgtctgtgaattaggtgccaattgatccctgcgacttctttattatcagtggcacgacgaggaattcagtaatttagctctattataatctgtctcctatctcctttcttttattaacagatacatacc

SEQ ID NO: 31709 - DNA, 261 bp, Zea mays
tttgcaattttttaaagggagatcacattttaggattaacaaatgttcattttgagaaagacaggatttgtagcgcatgccaggcagggaagcaagttggagtccatcacccacacaagaacatcatgacgaccgacaggccgcttgagctactccacatagatctattcggcccgattgcttacataagcatcggcgggagtaagtattgtcttgttattgtggatgattattctcgcttcacttgggtgttctttttac

SEQ ID NO: 31710 - DNA, 260 bp, Zea mays
tttgcaattttttgcttcctgtgtctgaaagatggatcgacattgagtgaatgttcaatgacgtccctgttgacaccacggagatcgttggctgaccatgcaaaaacatctttgttgttgaataaaaaccttatcaaggttttctcctgctcttcagataactgagaacccagtaataccttctgctctgctatatcttcacatagaagcatagacttcggctgatcaaccgaagcagccttctctcttatgtacttgta

SEQ ID NO: 31711 - DNA, 281 bp, Zea mays
tcgtacccgggatccttatatcgaccttttgcatgcaagtttaataatttccagtctccatggcctacataacaaaaatgatatgtccttagtgcatatatgcttcaaccatttagagatctagagaggtaagttcgaatggtaagaattactcatttacaaggtacattatttcttgtatctttttcactggattcctcatgttgtaatcaaaatatgtacaatgctttgctctactgagatcagtaaaaatattccatgaatgttgtagaaatgttata

SEQ ID NO: 31712 - DNA, 245 bp, Zea mays
agctttatcaaatggacgtgaagagtgccttcctcaatggatcaatcaagaaggatgtctatgttgagcaacctcccggctttgaagatagtgagtaccctaaccatgtttataaactctttaaggcactttatcggctcaagcaagccctaagagcatggtatgaatgcctaagatattttcttatcgctaatggcttcaaagacggaaaagccgatcctactctctttactaaaacacttgcg

SEQ ID NO: 31713 - DNA, 244 bp, Zea mays
attttcacttccaccccaataagagatatgggagtctctcctccctctatcgactgcttgtaacccctactacgagtttgatcatcaatgatgtcggtagtgtaagccaccaatgattggatgtatggatgttctgctcgaaccagtataaatctcgccctccgcgcacaccctccggatcacggtcgcgcacaataaatttatttgtcggagcgaggtacgaaacacccaacattttgtaatt

SEQ ID NO: 31714 - DNA, 257 bp, Zea mays
  unsure (1)..(257): unsure at all n locations
tctcttgtatgggggatagctcgtctcctaatttgaatggatggatgtatgtatgctcgcaatcgcatacagaactatccgcgtgaataggccgatgaactcgcatgagaagcctctgagcagcattccggtggtggaggcaagtgtcccttgacctatctctgtcccgttcattctttaattcactcttccgctttacacatatatgcctaatgattgactagcnnttgtatcatgtccttgtcacctatgtgggt

SEQ ID NO: 31715 - DNA, 265 bp, Zea mays
agcttatggaaatagcacgaaaggtttcaactcccggaccttaagacagataatcaaggagccctcctggttcaaagatcgctctgtgcgtgccactgggagaaacactgaaagaccctgcctcgatgaagcccacaactcagcttactctatccacccaaggaccaccaacatgtacttaaaccttaagaccaagtattggcggaaagggatgaaaagggagatagcacagtatgtggcccgaagtgacacctgtcatccaaca

SEQ ID NO: 31716 - DNA, 382 bp, Zea mays
  unsure (1)..(382): unsure at all n locations
actcatgctgatatctgaatgctactacgtctgagcttgcacgtatgtccgataatatgtgaganaaatggttagacttcatgcacttgaaacacgaaaaagaggacatcagatataatatcgtcataaagtacgacatttaactacagaaaacactcaataacaaatctcgggcaatgctgtacactgctgccgccgtcagtcaagcctgtcttggacagcgtgaaattatcaantctggcagtggccgtagctgtgtgtgctgttgtaacattaattaggaaataatatagaagaaaaaatgcgcacctcgctttaattgtatcgccctacagctttcattgtaatcatgaatacctgtatgttctattcaaaaattttt

SEQ ID NO: 31717 - DNA, 262 bp, Zea mays
agcttgaattgtttgtgaatgtaggtgaactacaagaccggtgggagccattgggttattgacagtggatgcacacaacatatgacaggcaacccacggatgttcacctcactagatgagaatgttgatggtcaagataaaatcacatttggagacaattcaaaaggaaaagtacaaggacttggcaaggtggcaatctcaaatgatttatcaatatcaaatgttctcttagttgcacctttgagcttcaatttattatcag

SEQ ID NO: 31718 - DNA, 309 bp, Zea mays
  unsure (1)..(309): unsure at all n locations
cgttggcaaatcattgctttctacacaagtgcattttgggtgctagtattatgaataatgacagctatagtgaggagtaccatgggacatatgcttgatgtccttttcctgctgtgagcaaggcgtntccagtttgaaaatctttttcttgttgtgttgtacatgtagaaaacttcttctaccttgcctttgtttaatgggcagattataagtgcctcttgacttaaaaagtatatctgtatatcagcttttattaagctactatcatgcctttaacatatatacttattcattgaagggatgaatact

SEQ ID NO: 31719 - DNA, 260 bp, Zea mays
atttttttccatattactggctctacattaatcacgcacaaagattccttccatcctgcaccacttttcttttttccatcacatattgccttgtagtttgtttaaactctttctccttttcttgtatttggccctttgtaaacccatcagatggaaacttttcattaaaactcttcacaatgctcttccacccttcgaccgcccatccattttgcccccgaaacctttgatgattgtgctcattcaatatatcaactaga

SEQ ID NO: 31720 - DNA, 265 bp, Zea mays
  unsure (1)..(265): unsure at all n locations
tcgtacccgggcacctaatttttacctttattgcatgcacatctttgcantggcatatattaaacttccttgagattcgcatactagggctttgccctaaacctagtttgtagattaaccgctcacatttaagtagagatgtaaataagctttagactcgtggttcaatacactgcacaaagtccttaatccttttaagcttttttagcacctttacaatttcttttccttttgcatgtcaatatatatgggttcctttgaaaat

SEQ ID NO: 31721 - DNA, 256 bp, Zea mays
agtttgtgaaggttcttcatccccacatgtgctaagcggcgatgccacagccagcccatgctagtcttagcaattaagcatgcatctagaccggcctcctcttttgcaaaatcaactaagtaaagtttgtcgtctaatacacccttaaaagctaatgaaccatcacttcttctaaaggcagacacatctacattagtgaatagacaattatatcccatattgcaaagttgactcacagataacagattatatccaa

SEQ ID NO: 31722 - DNA, 254 bp, Zea mays
agtttgccccccgcaaggcgggtgcgtcgcgtgaaaaaaaaactgtccactctcctttatctgcaaaattgatgttgttaattagttttctttcctccctttgcagctaagattggcagacctgggtataaagtaaccaaacaatatgatcctgagatgaagcaacactcgtttctttttgaagttagtattccttgccaatcatcttttactgatttcagttaagttacttgttgtttgcattttaaagatta

SEQ ID NO: 31723 - DNA, 253 bp, Zea mays
atcttttgcctaccgtagctgaaagttgaaatgaatgaagctgccgaagaatgccagagagccttcggtgttatttgttcttttattggaacaagagatttggtacaagagcatattgcctttacagtatggccgctcgcggagaaatgggaaatgccgcaagaaaccataaaggaggctgaccaaggtggacttatcaggctgaaatatactttcaagttcggagataaattcattgagccagatgatgact

SEQ ID NO: 31724 - DNA, 254 bp, Zea mays
ttagcatgcaattttctataccagctgtggcggaaccgcccgaattatttcaacttaagtgcctaagtcccaccttaaaggctagaccacacttaaataggaagaaaacgtctgtccctcggatctagtccgacgtggccactaacaggatcaagtaccacgtactcactcgaaggtgaggcacagagcaaatacaataaagcataaaaccatacattaaggagtatttaatttattacaacatcatcggagtt

SEQ ID NO: 31725 - DNA, 265 bp, Zea mays
tttttacctttaggcatgcaattttgttggtcaagttaagaggcaggccccaatatatttcgtatccgaggttcttagtttatcaaagaaaaattatacagaattggagaaggtactgtatgctgttttgatggcctccaggaagcttcggcactattttcaagcttacaacataattgttccttcttcacaacctctgaaggatattatgagaaaccgagaagctactggaaggattggaaaatgggttgcagagctcaatgaa

SEQ ID NO: 31726 - DNA, 244 bp, Zea mays
agttttctcgactaagtcggggacagggcctcatggacgggtgaaagtacgcgtaagcggcaaggccgaccgagccgagggattcccacgcctctgggatacggatacctcactcgtcccttccgcgaaaagcaactctcgctcgcacaaacatccctgttaccgacagagtccagatgctcgaaacaagaggaaaaaaggcgcagcttcgcaagcgtggcgagggtgtgttttttctggcctc

SEQ ID NO: 31727 - DNA, 148 bp, Zea mays
atgtgtattgtgatgcatcaagcagtggccttggctgtgtgttaatgcaagaaggccgagtaattgtatatgcttcaaggcagttgcgccgacatgaggagcattatccaactcatgatatggagctagcttgctgtggtcatgccct

SEQ ID NO: 31728 - DNA, 148 bp, Zea mays
  unsure (1)..(148): unsure at all n locations
gtggtgttcatcattcacacaagaacattatgacgactgacangccactcgagcttctacacatggacctattcnngcccnttgcttacataagcatcggcgggagtaagtactgtctagttattgtggatgactattctcgcttcac

SEQ ID NO: 31729 - DNA, 106 bp, Zea mays
  unsure (1)..(106): unsure at all n locations
tgctcttcatcatcattctccttttcagcatcttgggcagcangcatggcatatgtatcattatctaaatcgctcgctgatgagtactcaccattttctcttatta

SEQ ID NO: 31730 - DNA, 311 bp, Zea mays
  unsure (1)..(311): unsure at all n locations
accctangcatgtcagatcaatccacaacttcagccagagtgatgacagaggatgccagcttctaaggccacaacatatctcacaatcctcanggcaacaacanagctcatttatgccaccactcccaaggggcagaggcaatatgggcttcaaaagaangtatggngatcaacctataaagctctattgtctattntgtggtgaagacaagggccacactacaagaacatgcgaggtcaccatccagaagcagaaggagattgccgaagcagaagcatggcagaatcagccgaagcanggcctacatact

SEQ ID NO: 31731 - DNA, 287 bp, Zea mays
  unsure (1)..(287): unsure at all n locations
cgcgctgcactattaaagttgtgtttttatttattattctaatccagggtgagttgcttttaaactcaaatccttttggataaacctaactttttaatctataaataaagctacaaatggccggttntaatttctatattttagattttaatccaaaaaagaaagcaacttaacaggtggtaatctgcatcgccaacgaaacccctcccctcgactttgcaagcctgtttaaaacgataagcctcttttcctgcacgaatcaaaaccaactttatttcaaggatcca

SEQ ID NO: 31732 - DNA, 167 bp, Zea mays
  unsure (1)..(167): unsure at all n locations
atactttaaactctgtttttaatttgtgacttcgaacttatttacgttntcttctgcagctgagctatctcctcccccagagcccatcgagtcattggcgaccccgaagcacagaaagaagatgaaattactaaagtggtcaaggctattatggatgaagctattac

SEQ ID NO: 31733 - DNA, 359 bp, Zea mays
catgtgtcataggataacgtctatatacttgaaacttacaaaactcaatgcagctatgttattaaaagttttagctgattctgaacctctcctgcttagtatgctgatgaattgcactagtgttctcacagtaattcttactaaagggatttggctgcatcgcatgcttttatggggggtgtgtagctcaaatctaatcaaatgtatatatgctactgttgataatttactgtgacaccacgccctacttatttatacttagtgataatctacgttttttagtttcagtgatatattctgtcacagtactgtgcaaagattgcattaaattgtgatgatgaatttgaacacgattattg

SEQ ID NO: 31734 - DNA, 266 bp, Zea mays
  unsure (1)..(266): unsure at all n locations
gatagcgtaccaaatgtgctcggngtgggttcttatttatacgcccngtgcgctccaagttggagggccccgtctgtcattaactgttgctattctagcaaagggaanggtgtttttcggaccttctgcttatggccttcgtccatatcgcaatctgaattcgttattctaacaaattaatattgcgaggggctactgtttggggccttcgtcttctgaaggtcctcanaaacatgaataaacaatgtttctagagaataatacat

SEQ ID NO: 31735 - DNA, 261 bp, Zea mays
actgactaggatcaaatacatcaaaagaaaattacatcacgcaatcacctgacttctaggactgaggatctcggcggttggaatcgtttcaccgctcccatccttattttgagcaacagattctccctagggagactttataactgcggatacactactgccaatacttttttcactaacaccaattgcgacgctgtagatacttatttgcgcatttgactcgcttccagtgattatctttgtattggactacaccctttt

SEQ ID NO: 31736 - DNA, 149 bp, Zea mays
  unsure (1)..(149): unsure at all n locations
gataatcacttcttactagcatggtcacaatagtctcatacttcttcngaagagatctaacgaacttatgagtgaaatccacatcccgtacatcanaaccaaagccctttgatctcattcactatatcagttaactgggtgaacatatc

SEQ ID NO: 31737 - DNA, 227 bp, Zea mays
  unsure (1)..(227): unsure at all n locations
tgagatataccaagaaatcagagacatggagatgctccaccaacacgtgcagaggaagaaagataagatggccaggctagctgaactacaaaggcagatagacgaagcttncgaagaagttcgtcatcttactcaggatgagcaacaccgaaggcctcaacaccaagaccttcatcaggaggggttcttcaatgaagatgactggtatgacaatttccatcatggga

SEQ ID NO: 31738 - DNA, 251 bp, Zea mays
  unsure (1)..(251): unsure at all n locations
gacatcactaaaccttttgacgtatattgggatgcatctggcangngctcggctgtgtactgatgcaagaaggccgagtgatagcgtatgcttcaagggcagtgcgccgacatgaggagcactatccaactcatgatctggagtagctgctgtggtcatgctctacagatttgcgtactatctgctgcgaatatctgcacatattacagatcataaagtttgaagtcatcttccccactcagagtaaatat

SEQ ID NO: 31739 - DNA, 455 bp, Zea mays
  unsure (1)..(455): unsure at all n locations
gtgctgacatgccatgagcgaagaagtctctagcacatgtctacatctcaaaatgataangaaaggaccaagcggatggttgagccanagaaggaccacaatanaaagcataaatcagagccttaagttacatcaactattgaacaaggggctcgacgatgacctttccctcanagaagaataaattccagtagatcatgaagcgatgatgcatttatcatttagatgggcaacatataacacagaattgttgcatattatggattcttagagaactactcaggaacctatcctgatcctatagtctagatagaagaaaatgatctacaatgacaatcagttctaagccactangcatatgtcatcatcgagctagatctatgatccagaaaagacagctgagctgattgtatgcagctgtgcacttaagtctataggtggaagccaactttaca

SEQ ID NO: 31740 - DNA, 320 bp, Zea mays
  unsure (1)..(320): unsure at all n locations
attatccgtgtctgaatatttctgtagcttcatattcagtagactagaggaatgctgattgatacacttctgcagcacctgcagatggttgtttatggttcagatggtccacatttgcagtacaacaagtatgcttccaagttctganaggattatgtattttttatttgaaaactctttctgttgctgataacatacatgttatatctataattatggatttggctctgccgaacgctaagagggagataatactccctgttattcaaagaagtctcactacacacagccaaacatttgcctgaagtctgccttagatg

SEQ ID NO: 31741 - DNA, 408 bp, Zea mays
  unsure (1)..(408): unsure at all n locations
atgggcaagtcggcgatgccagagctcaaccatattagtcttagcaattaagcacgtgtctagtttagccttgttatcattaaaatcaactatagctgaccatctaacactcccttaaatgctattgaatcatcacttcttctaaagacagtaacacctatatcagtaaagagatagttgtaacccattntacataattgagaaacagaaagcanattgtagtctaatgaatctacaagacaacattagaaatggaatggtcaggagatatagtgaatttacccaaaccttngaccaaaccttgatttccatccncaaatgtgatagctctttggggatcttcatatttctcatatgaaggagaacatcctttctgcctgtcatgtggtttgtgacccgctatcgata

SEQ ID NO: 31742 - DNA, 254 bp, Zea mays
  unsure (1)..(254): unsure at all n locations
acatggatgcctgcaagctcattgatgcttcaagagtgaatggtgacgcttgcatggaggactcaactatctcgtagtcgtccacatcatatgatccttcaatctcattctcaaaaattgcgttttgaaaatgatacaagcaaacatggtcatactatgtacttggtagaaanggaacgacctacctagctaaatatggaagtgagatngaggaccncaatgtctctctacatcttccatgcccctctaactat

SEQ ID NO: 31743 - DNA, 141 bp, Zea mays
taccttatgctggagataaaatgcttaatttacctccacacgtcaggatcatccctcaactctcccactctttcaggggacattttcttcccctaatgcgaccgaactctttttcaagattttatgtatactacgatgtgc

SEQ ID NO: 31744 - DNA, 422 bp, Zea mays
  unsure (1)..(422): unsure at all n locations
taagtcttcaaatgatataccaccttgctntaatatctttattgcannattgggacatacatgtacagatgacanactcaaggaagtttatccaagtatgatgtgtggattacttgtgaagtggatccatagtaatgaaattgcacaatanagttctatattgntagggcacatgagtttcatgtccttaanatgttctttntagctcacatttttttttgtccacaatgagtcaaatgacaatgaacatagacatacatgcacaccacattcatatngcattcatatgttacttaatggaatattaaattagttaaaacgaaatatatntnggaatggacgggagagttctttatactacacattcgctctcaattttagatagtcacttcaccctcatatagagtatgaattataaagct

SEQ ID NO: 31745 - DNA, 310 bp, Zea mays
  unsure (1)..(310): unsure at all n locations
gtcacctgcggcatgcagctngccgtctatacacccttaagagctagtgaaccatcacttcttctatagacagacacatctatatttgtgaaaagacaattatatcccatattgcatagttgactaacagatagcanattgtaaccaagagactcaactcaaaacacattggagatagagtgctcattagaaattgcaattntacctaacccttttaccttgccgttgcttccatcaccgaatataattgaatattgggaatccttattcttgacgtaggaggtgaacatntttcttctccccgtcatat

SEQ ID NO: 31746 - DNA, 130 bp, Zea mays
tatcatgttgatttaatgtaccaaataattagagacgtctaacataagtggtgatgatatatggcccgttcgttttatctggaaccggcgaccagaataatattgggtggaatgattcgctaatttgtgt

SEQ ID NO: 31747 - DNA, 327 bp, Zea mays
  unsure (1)..(327): unsure at all n locations
tgcactctangtgtgtcaacatatcaatgccatgttatgatgtatctcagtntagtacaaaacacagggtgtacatcttcccccataaagatctcgtccgaattanagcctaggtagtatggaaagaatggtacatctattcttattttgtcaagcaggtggtggactactctatacacacttcatcttcaatacaagctaaacctggaatctattaaagctgattcctgagctattcgatgtgtcactgtttggactgaagtttttggaatctgcttgacagatcatggactaatattagtcgtcagtacttgactcatgtcacaa

SEQ ID NO: 31748 - DNA, 300 bp, Zea mays
ttaatctttcactggtgcgtggctacaccagtgctacacacaggcagtcactataaattacagatactaccttacatcctaatgcttgactactttttaagacaggaccctactcataataacagtgtgcccattgacatatgaatcggaagcaaatgtatctaagatctacaaaaacattgaatagatggcagtgattacaatttaccaaccttgacaacctgattcatccgaaggatactgtgggactggttttatatagagacactctctcctgctatgttggcccgtgcagatcac

SEQ ID NO: 31749 - DNA, 173 bp, Zea mays
  unsure (1)..(173): unsure at all n locations
ctagagtgtcagactcgataccctgcggatagtgagtgactcaatcaagtgggtgggatagtgtatatacatcatacctctaacgtccttgatgtctgattggtagaaagtaatgctctgttatatagcagaaaatgcatacgtccaactaatacataactattatcanatga

SEQ ID NO: 31750 - DNA, 358 bp, Zea mays
  unsure (1)..(358): unsure at all n locations
ctatacccgtggctacgccctcgtgctggactanatgtgagaactcacggtgacgcaagtctcctccaatggagatggctactactgatattctatcaagccgagcagaaatacttgtgttgcagaacattgtattcaaaggtggctaattgatcaaaaatggtttcgaggaaaggaattttgtgttgttcacaaggctaacccccacaaaaaacctctcgtgacccaatcacaaggcttagtacaaagctctctacattattagacacaaagactgctctcatgtagcaccaactcatggctatacaaacttaacgacgatgtgatatactacccctccgacctgtgtgttctgtcc

SEQ ID NO: 31751 - DNA, 160 bp, Zea mays
  unsure (1)..(160): unsure at all n locations
taaatcttaaatatgcttgacttgatgtntcattccaacttccattcagtttactctgcaatcttcttctaacgaattgaacacanatccaacttgatccattcctatatagtagtaatattttccatgctctgtaggatgcatggatgaaccgttaccg

SEQ ID NO: 31752 - DNA, 250 bp, Zea mays
cacaacaaatacaccagacaacgtacgtaacgccttcgtgagcatagccgaatgtgcgaaggcatacaacctcaccatacaagccattacatatgtacaagcgagggcatcacactcggctcaaccttcggaataattccatctccctatagttaaacagcattatcctcagctcctcacccgcaaaaagacttcgcagctccccctcacctgaactcacagtggccggcaaggacaacagttcttgcct

SEQ ID NO: 31753 - DNA, 302 bp, Zea mays
  unsure (1)..(302): unsure at all n locations
tgcagcctggagtcaccggttcgacacgatctatcatgtctgccggtctcanaatggacatcggggctcggtgaagcgtatcgatgtcatggcgagcggggtcccttcngagtccagagattacagcgaaatcgctataggctggggtatgggtcgccgccccacttgccggtgagtgtcgtcccctctgcttctctacttttgttccgtttggcatattaagtgtgggtccagcgctctggtgtgtctggcgtcgtggtggtgcccgctggacagagcaccatggtggcttctgtcgccct

SEQ ID NO: 31754 - DNA, 282 bp, Zea mays
  unsure (1)..(282): unsure at all n locations
aacgcatatgttgtatgttctccaagcaagtacaagacacaatgctgctgttaatgatatgaatcaacgattacaactctctgagaaggttagtataatatttatttgcttctctctaactggatttaaactgtactgtcctatataagtttgaatgtatacgccaaacccatttntaatttagcttattattttgcctgatgtatcatgtatgtaagctccgagttaaaagaaaaactgaccgttattaactaaacttgatctgtgagtaaattgtgagct

SEQ ID NO: 31755 - DNA, 283 bp, Zea mays
ctttatatgctatgactaatgtgtgttcaagtctatttcaatccaagtcatatgtatattgaaagggaattggagtcttcggcgaagacaaaggcttccactccgtaactcatgcttcgccatcactccgagcaactctctatttcttgtggagcaatgagcatcacagaaaaggacttcatccatggcggagagagtaaaagctccggactctcgctttggtataatcttaactcatttacttatgaccaaagcggaagaaattacttcaagggctctaatg

SEQ ID NO: 31756 - DNA, 374 bp, Zea mays
cttctcccacgaccgggctttctcacgttcagtaggagctgattagagtgcgggcggagtctcggacccaaattatacaggggcgaggaagtcaccgcacacccggcgatcctgtgaactcgtgagtcgtgcgggattggtatggtaccgcaggagaggactactacctgctcatctaaagtgtctggcaacggcaacgtgggaggtatgctccgacggcccctcgaaccaaaatgatctatgctcccgggtgtgggaaagaaatggcgagaagaaatcaccaccaaacagttttttttttttttcatcaattaaatcactattgatctgtaattcatttattagcccctaggattactcctgctattatactc

SEQ ID NO: 31757 - DNA, 297 bp, Zea mays
atgacttgataacctattttcagattgctgactatgagacctttggctagagtctcctctgtaagccataacatattcttggctctgaaagatcgtcgagacggctccttgtcctttgcttgctcatctgacacgtctaactctgatttctctcactcagtgcttttgtgctcttcatgctagttgcatctgcagaagacataagaaataattttacacccatagagtcaatctattaccttaacatgttgatgacagggatcagatcacacgaatgtctacataggtagaaaacta

SEQ ID NO: 31758 - DNA, 419 bp, Zea mays
ctgcagctataaactctacactcctcaggtagctgttctagcatgtggaacacttaaaatatagccacagcatcatcaaactctatatctcatctgctgattggaatttgtctgcttctgtgacccacctaatagtagctaacccgtcttacaagggatgcttagtcttcggcattctccatattaaaattgacattggtcacaaacttacaccgagtcacggaaatagagatcataattgtttgaacctacccattcttgatgactaatacactttgatcatatgatcgcctctctatcgctcattcaaactagaaccatgttaaatgtgtataactcttaacatcaagaatcaacttgatataccctatgagacctgactaaatattaacacttacctacatgtattcaagacaaat

SEQ ID NO: 31759 - DNA, 252 bp, Zea mays
  unsure (1)..(252): unsure at all n locations
ttgtcaccacaccatgctcatcttgcttgttgcggaacacccatattggttctacaacattntgattaggacgtggaaccaaatgccacacctcattcctagtgaagttgttgagctcctcttgcattgccaccacccaatccgaatcttgaagtgcttcctctaccttgtgtggctcaatagaggaaacaaaagagtaatgctcgcaaaaatgtgcaacacgagatctaatgggtacccccttatggatgt

SEQ ID NO: 31760 - DNA, 374 bp, Zea mays
gcagctcgatcttagcctgcactttataattgatcgaacatctggaatagtttaagatggcctttgataccatgctttacttcaaacccaaacagtctctcgatgtattggcacaaataatttgcgctcagtttatttaaggaacacaccaccgtctgtcaagtcccaaccatcaacatgcctgctcgcgtttattgttttctctaccctgcgtcatcacaatgaattgtaccctggactgatcaaactatacatttcatcaaatcgtacttgagcatttcatcttcatgtttggtctatagcttaagtggagagacatattttactgaatagcaactctgatgctaacacattaacttttattggagttttgt

SEQ ID NO: 31761 - DNA, 125 bp, Zea mays
ggacttagcacgcgctgcacttaagaaacattggactcctttattgaaaaagatgaccagacgaggacagtgggtatatcccaaacattaacgaagcctcactctcctgtatcgccatgtaatac

SEQ ID NO: 31762 - DNA, 281 bp, Zea mays
  unsure (1)..(281): unsure at all n locations
ggtgaatcacgatgccctggacctgcttcctgcttttacgccacacagtcatcaatatggggctcactctatctataacaatacatangccattcactcctctaaaagagaatagttaactgtatcactcatccatcagattgactcttttttattcataaatatcttgttctgatcttcacttacaagntcatcatatctatgcttgaccaacaagatatgaaataagcactgacccattagaatgacataatatagtgttcttgtaccatctagcctaa

SEQ ID NO: 31763 - DNA, 298 bp, Zea mays
tccttaataacctggtggagatacctgtcctaccagtccataatcttcatctagatgttgattctagagaaaagctataggactctgataagatccacccgctccaagaaaatattttgcagagaagcctcttcctatgatacctctgactagcctaatgcaaaacacctcttcacagattggcaggctacatttttaatatattgatctcataactattataaggatgtataagaggcatgctaatggttcagcactctataactatgcattataactaagggcaaatattaaacca

SEQ ID NO: 31764 - DNA, 318 bp, Zea mays
tatgtgagcaacctcccgctttgaagatagtgagtatcctaaccatgtgtataaactctctaaggcgctatatgggctaagcagcccaagacatggataatgcctaagattctatactatggcttaaagcagaaaggcgatctacttatttactaaactttgcatgatttgctgatgcaaattatttgataatatattgggttctacaattactgtgagattatagacatgaccaaatcggagtttgaggggatgaatctttttattcagtgacactcagacgccttataccaacaatcatcaaatttacagtggaga

SEQ ID NO: 31765 - DNA, 276 bp, Zea mays
  unsure (1)..(276): unsure at all n locations
atgtgtctattaatagatgagcacgactctcgtactgttcacactgacttgtatttacttcgtgcatcacgccttgtattnntaccttctatcaagccgaaggtacatttataattcagnattgttttatctttctattgatatataatgagaacgaataataacggtatatgattatntataatggctcttatattacatatgcgtcttctttattaacatatactgcgatcatgaaggtatgttcttcatgaccttcgtctaaagatcattata

SEQ ID NO: 31766 - DNA, 268 bp, Zea mays
  unsure (1)..(268): unsure at all n locations
acgtaccaataaaaaactaggcaactttccacataacttcagaactggatcgtcctcttccaagctgatcctactaacacccggcagataaaacctatctccttgtggagtaggcttcttacccaacagataacctggttatttgataatcattggcaggacccacataaaattatatcgtgaggtcccggtcgaacaccacggtgaacgcaaactaacgtggtacgggtgcgacgctgccggcccatnacgatctcccacatcaatg

SEQ ID NO: 31767 - DNA, 227 bp, Zea mays
  unsure (1)..(227): unsure at all n locations
gctatcaagtctactttatatggatccggattttgtcatattgtctgaggccgcgaatcattgntttcttaccgagacatatcctgccttttctgcccatggtgctgcgtcaccctatattggcccaatgggtcgtgtatcaagttaagtccattatggacgcaatctanggttgcagcacgaccacaatacccttgtggtcgtcctcccatgtttataaaccccct

SEQ ID NO: 31768 - DNA, 139 bp, Zea mays
tctggcatatccactctgaatactttacttatacgccatttgctctctgttaacgaacaccaatgaaaaatattattaatctcttgtatgattctgcctctaccagaatgaaatatatcttctttatagatataccaag

SEQ ID NO: 31769 - DNA, 150 bp, Zea mays
  unsure (1)..(150): unsure at all n locations
acgtaaccgcgcgccaagcttnnttctctccttcggccaccaacgcatcacggtcaaattgagagccaccgctctcggagtctatataattgagcccccctcggcttcgctatgtatattactagctatcgcacccgctcccacacccga

SEQ ID NO: 31770 - DNA, 154 bp, Zea mays
tcacgccgcgatggcgttcttatcgccggcggagatgtcctgatccataacgcgatagtaactgatgacgatgaacagtgcctctgatccaatacacaacttgactgacagaccaactttagagcccattttctctcaatttttcatagtgaca

SEQ ID NO: 31771 - DNA, 413 bp, Zea mays
atccttgagtcacctgcggcatgcaagcttgtaacccttactatgagcaccccggtgcaagatattataagcctcatcccccctcttgtgtttcatcttacatcaacccatctgggcagggacacgcagcatcaaattcactagtcggttgagggtcctcgcgggtccaaaacaccgacagttggcgcgccaggtaaggctccagctgcgtgttgacaatacttttccattgagttccagatggacaatcttcagcagcctcttcagcccgggacggtgctccgcttcgggagtctcgagttcatgtcccgcgacggcagctacgacatggtagtcctccccccgcagcacgacaacaacggtcgtcagctcgtctgaaggaggcgaactcgacgacgacttccccctgtggt

SEQ ID NO: 31772 - DNA, 493 bp, Zea mays
  unsure (1)..(493): unsure at all n locations
agctagtgaaagagagaaggaagatcgggatccatgttatgttngcactgctgggctatgaaggcctgtcgcacaatgatagtttcatgggttgagtctgtacataacaacagctggctgatcttcgtagatttcaggattttagaaaaaagcataggatgaggatttgttattagttttttttttgggagggtcgacaggaagtgtatagagggcagtcagactcacagtaaaaccaatcacggctgtgttgagttgttccgtgaattagagaccatacttgtaaattacttcttttttaaatcacttcggttaagttactcttttaatattctcatttatatttatatgatgcaagattacaatcaaactataagcatcttggaatataaatataataacatatttagcactcaaggtgccaaatagctagttggcaagccacatggcttaaggtgcaagccacataacgagactagtttgagacagtgtt

SEQ ID NO: 31773 - DNA, 460 bp, Zea mays
atctctgagtcacctgcggcatgcaagcttatgatggatgttggttagtagtgttcccgtcgatctgaacaattcccatcggcccagaaacttctatcggctgggatcgacatgaattaaccctatatctatcgacgagaatgaatttccgtgttgatttccaaccgacgagaattacctagatttctggtgtggctaggagctataagcctgttgatgtgatctttatatgaaacaaatatgtttcatatgaaaccataaaacttctacgaggattcctagtattgtcttaaaccttatatttgcttgtccagaatgaatattgtgtcattgttcatagcatggatattggaaatgtcatttcaatgactaggtatatcgactagccggtcggatacaaactttactctacaaacattgttatctagagtgtcggcccatattttacccgatccactaa

SEQ ID NO: 31774 - DNA, 413 bp, Zea mays
  unsure (1)..(413): unsure at all n locations
agcttcgagtagaataagaaagttcagtcgagttaatatttttattcgtctattcaccccctctaagtgacatccaggtatntagtaccaccaaatgatactctcatgtagctaatgtaaacaagaaccttaccatcgaatctctaaggtggttttaaattagtctttgagtccaataaatgtgtaatatttaagattggtacatttgtgtaaaggttatgacaatggaggattgttctgcttgtctttgtgaggtgatagttataaagatgtgaacaacatgattagtattgatgaaacaaatatttacgtttagaggctttcctcgcctatacagggaggagatagcccttctgaatacacattctcacaactgatgtactcttatttacgagaccccttccttctcatac

SEQ ID NO: 31775 - DNA, 468 bp, Zea mays
gatctctgagtcacctgcggcatgcaagcttctaaagggagagcacactttaggactaactcttgttcactttgagaaagacagggattgtagcgcatgccaagcaggaaagcaagttggaacccatcatccacacaagaacatcatgacgaccgacaggccgcttgagctactccacatggatctattcggcccgatcgcttacataagcatcggcgggagtaagtattgtcttgtaatagtggatgattattatcgcttcacttgggtgttctttttgcaagaaaaatctcaaacccaagagaccttaaagggattcttgagacgagctcaaaatgagttcggcttaaggatcaagaaaataagaagcgataacgggacggagttcaagaactctcaaactgaaatcttccttgaggaggagggcatcaagcatgagttctcttctccctacacgccacaacaaaa

SEQ ID NO: 31776 - DNA, 460 bp, Zea mays
cttcatccctacatgtgctaagcggcaatgccacagccagcccatgctagtcttagctattaagcatgcatctagaccggcctcctctttagcaaaatcaactaaataaagtttgtcgtctaatacacccttaaaagctagtgacccatcacttcttctaaagacagacacatctacatttgtaaaaagacaattatatcccatattgcatagttgactaacggatagcaaattgtaaccaagagactcaactaaaaacacattagagatggagtgctcattagaaattgcaattttacctaacccttttaccttgccttgattcccatcaccgaatataattgaatcttgggaatccttattcttgacgtaggaggtgaacatcttcttctcccccgtcatatgggttgtgcatccgctggcaataatccagcttgaacccccggatgcataaacctgc

SEQ ID NO: 31777 - DNA, 490 bp, Zea mays
  unsure (1)..(490): unsure at all n locations
gtcacctgcagcatgcaagctgaaaagttcagatagcctcgacttcatcttttggtgcagatgtngatcctagggcaatagatcttgccatgagaatcgccgaaaggatgttcctcaaaatgaaggaagatgaggcgaataacaaaattgaagaagaaaatgatcgatggagaccaaacgatgaatccacctcttcacaaggttcgtctttcaaatcctcttctcatatgtgctttattgctaatgggagtgacagtgaaagcgaaagagaggatgaggaggagcaagaaagtgataatgaagatgaggatgatcttcaacaattctttgctcagctaagcaagaaacatcggatgagcttgctcaaactcatgaaaagagcggaagaacaaatagaaatgcttcataagcaagaagacttcctcatcagaaaaatcgaagacttagagaagtngaccanagagcatgagaagctaaagtgctctcatga

SEQ ID NO: 31778 - DNA, 362 bp, Zea mays
gcagcatgcaagctaaccttgattccaaaagaagcatattcttgatagttcctttcttaaacgtctttgtcttaaatgggtaagacttgccaaagtacacttctgtcttaaggttttcgaacccatgtcgctgcaagtactagatttgtgatgatgttgatggtgttaaacgctcgggggcacgaccttcttataagcccaagtacctcttctatacttcttactgaagattggcactgagctagcatatatttcaaacttataaataagttataacatttcaaagtttatttctgtgaaccacttttgtaattactccggtgaacaatgtaaatttgttgaacttgtcactttgtataaac

SEQ ID NO: 31779 - DNA, 404 bp, Zea mays
  unsure (1)..(404): unsure at all n locations
cttcatccccacatgtgctaagcggcgatgccacagccagcccatgctagtcttagcgattaagcatgcatctagaccggcctcctcttttgcaaaatcaactaaataaagtttgccatctagtacacccttaaatgctagtgaaccatcactttttctaaagacaggcacatctatatntgtaaatagacaattatatcccatattgcataatggactgatagatagtaaattatatccaagagactcaactaaaaacacattagagatagagtgctcattggatattacaatcttgcctaaacctttcaccttgccttgattcccatcaccgaatatgattgaatcttgggaatccttattcttgacgtaggaggtgaacatcttcttctcccccgtcatat

SEQ ID NO: 31780 - DNA, 331 bp, Zea mays
gagcttaccgcatgtgaagcaagatcgcttccccttggtcttagtctctgcacgatgtccatcgcgaccctttatcaccgtgttgaatcttatgatgataacacccatctcttcatgattgagcccgggcggctcaacttgcaccaccttgctaggtagcgactccttgctactggttgcctttaaagcaatgaggtgacactcgtggagtggaccgctcaacgcctcgtcgacgtatcttgcctccttgatcatcatccgcccgctcacgaattatccaagtgctctcttcaggcgtcattatcgcgtacctgggattctcacgaatatt

SEQ ID NO: 31781 - DNA, 417 bp, Zea mays
  unsure (1)..(417): unsure at all n locations
gcttgcggccggagcgaaagtgagtcactggagttctctcaatgtggcatntactgtggtagagtcccggagtggtaactaaccatctcgcatgacactttgcgacatggtaacatggtgagtaacgtggtgtatccggggtaacggcgaccatcactgcgacggcagctgcgaccacttcgacgggcaagtgggtacggcgaaactgactctatccactccccttcggatctttttaccccctgcgactatccactcgccacagagcacaattcgtagcaccggtgcggatcacggcgcgaagatcaccggcggcgagattcactgaacgtggcgatcttgtttagtccactgttcaccactgaacatcgccccgagctgcttgacaaacaaagtttgggagcaatttacttcaaa

SEQ ID NO: 31782 - DNA, 314 bp, Zea mays
  unsure (1)..(314): unsure at all n locations
taatacctgagtgaagccgggcgcagactntatccctcatgcgacctgagactgggtctcccatgctatctatggtgggtacaagtgcggtcactgcacaacggcagtcggggtcagtggaccattgtatgccaaggcggtgaggcctggacgcgaacgaggaatcgatggggacggagtaccctgacatgtcgtgtgtttaagtttaccttgcaaggactaaaactcgattctaatcgtgtgcttctcgcagctaatgagacttgctngacccctngtactacatcgagtaagaagtgaaatgaggttacatg

SEQ ID NO: 31783 - DNA, 453 bp, Zea mays
  unsure (1)..(453): unsure at all n locations
gtcacctgccgcatgcaagcttcgtcagtnggagccctagtggacttagcttcgtgggcatgggttcagtcattacctttaaaatttcatccacgtcgctggtagaaggcggtgtgggggacccctcttcttcaggagattggcgcttcggagaggatattgttcttttcttgataattttctttntctttgctggtccttcttcacctctgatcagagtttcggtttcagccactctttttcttttgtggccttcggcacccttattcaactgctcatagtctggatactcgaggcccagggcatcgaatactcggttcagccttcgcttcggtcgggtgccgaaggctgctgtcattaattgatcctcctntttggagtaattccccaagaattcattgcacattgtctcaactgtgtctaaccactctttgcagaggttcttaaagtact

SEQ ID NO: 31784 - DNA, 494 bp, Zea mays
  unsure (1)..(494): unsure at all n locations
gctagtcatgaagtccatcgtcctcatcgtcatggccagagtcctcggcatctatgacctcatcatcgccgccatcatctctgccgggatcaaccccaaggccaagcccaagccctacttcttagacggctacacacacctctccttcgaactcgcatgcaaccttgctggcctcgctgccggcatggccatcagcatcgtcagagacaccagagtcaggtatagtactactctgattgcagtgtgtatgcttgaacatatatgaataagcaaagctgcaacattttttcatcagaaaataagcaagccaaactgatctagaatacactgtttttgagaaaataagcagcaacaaagaagtctatgtgccccttcttcaatagcaaggtatngttgtgcattgggttagatgatatgtntatgtgatcgttacagtgttaggtcttgnaggtatgctaaatagtcaatcatcaaaatgggcagtacctcacaac

SEQ ID NO: 31785 - DNA, 467 bp, Zea mays
  unsure (1)..(467): unsure at all n locations
agctagtgacaatatagtctatgtgatgaatgacaagcagtgtttattgcctcggcccaataagaatccgatatattatattccgctaacatagacctagccatgtcaatgagagtcctattctttctttcaacaataccattttgttccggggtatatttggaagagaattcatgtttaatacccttgtcatcacaatattcatcaattcttgcattnttgaattccgacccattatcacttctaactttcttgatatcaaaatcaaattgattttgagccaatatagcaaatgacttgaatgtttcaaacacattagatttatctcgaagaaaataacccaagtaaatcttgaataatcatccacaatcacaagacaataggaattaccaccaatacttacaaaagatgtgggcccaaataaatccatgtgaagtaattccaaggtcgatgagtggacatttgac

SEQ ID NO: 31786 - DNA, 464 bp, Zea mays
cacaattaatgagatacatatatgatgttttcttatctaattaaagaaaatgcaggggcaagcctgaagtatagggacttacggaaatgtaaaccccggatcaccatatatgtcgacatcaggaaatgatccatactccaggtccaatgatatttgaaaaaggttaataattgactggcacaaaaatagatgattgtgcagttgtttgaatccaaagcagacacaacatcatatccattggtccaaaagcatgtcacccctctgttttgaatccatctgaaataccatggaaaatgctcctcagcctactcccaccaaacatcttcatcatccgtttggctctaggccgcaagcttcttgagattcctgtccaagaacacaagcataaaaaactaagaattgcagcgagaattgatgagcacatgatgattggctactgataggggtatgtagtctgtatcata

SEQ ID NO: 31787 - DNA, 368 bp, Zea mays
agctttcctagaaaagtggcacaagagttaatactgccgagggtggaaaactgacacatcaagcatatcgttgctaatttaccaagatgtgcttcggtttgaaaacttggctaagggggtgtttgggagtgaagttttttcaaagttttggaagaatactgcagtattctcaaaaactgtagtattatataccaaaaggtgtttggcaagccacctaaatctctgttttcaaaactaaagtattacaaatactgcagttcttttgaagtattctaaacttaggtttatacctcagttttctctgtatactgtagtatttcaaaaactgtggttttcaaaaactttgttcccaaacaggacctaaattg

SEQ ID NO: 31788 - DNA, 451 bp, Zea mays
  unsure (1)..(451): unsure at all n locations
ctatctgtctccgaggtcgaggtatctctatcctagantatacagctggacactgcaagtaaagtggttctggctagaaaaaactgagtcaaagtgaccatggcttagtcttaacattcttgtgcaccaacatgtcaaagacatatttgcacaatctttgatctctattattgggaatggggtcagtaccctgttctggactgacaattggatgcctgaggaggcaatcacggacattgctccataagtagctgctcaagtgggcaacagaggcctgtggtttacaatacgagcttaagcccttgattattcccgtggctcaaagatattagaactcataccaactccctataacagttattaaaactctctcgacaaccaattcattttcaataggcagatatctaggtttatattattattactaactgaagatccgcacaactctgat

SEQ ID NO: 31789 - DNA, 172 bp, Zea mays
  unsure (1)..(172): unsure at all n locations
agcttcggctatgatgaaattttggcagcaancaatgcaattgtaatgaatgccgcggtaactctacacctactagtctgtntatatagtgttgcaggtaaaaaggtgaatcgtcaagtcttctacaccggacgaacactcgcccgcactcactgaacggtgggccacaaaa

SEQ ID NO: 31790 - DNA, 430 bp, Zea mays
  unsure (1)..(430): unsure at all n locations
agctntcatccttcttcttcacaaacagagctggacatcctcaaggcgaagtactttggcgaataaatcccttatctagcaactcctgcaattgcttcttcaattctgccaactcagcgggtggtattcggtaagggctcttggaaattggtgtcattcccggttgcaacttgatggcaatatcaatatcccggtcaggtggcattcctggcaattcatcatagaagacatccgcgtactcacagaccattgggattttcttcagaggtaactcccgcctagagaaagcacatgactgagtagaaccctgactgtgcagaattaacgtgaaagtcccacaaaacggagaattgatttcacagtacggctggctacatcaagcacaacttggtgcaaggtcatccaattagctcccagaataatgtccaca

SEQ ID NO: 31791 - DNA, 402 bp, Zea mays
  unsure (1)..(402): unsure at all n locations
agctntattccagtgcacccaggatcacgaagagtaccttcaagcatatgtccgaaggtttctacgtctgagggcatatgcaccaacagtgcccaatgaaattgtcattgaggccatgattaaagggcttcggccaggaccttcagcttagtactttgccaggaaacctcctcaaactttggagaagctgctccagaagatggatgagtatattcgagctgacaatgattttcgccaaagaagggaggaagctctcatgttttctgaaatgaccacgggcttcggaggaaggttttatctgaggcatgtcaggtcaattcacaattctactcacaatgatgacaaagggagtcagcagcaaaggtcacagtattcctcgcaagctttgggcaacaacaagct

SEQ ID NO: 31792 - DNA, 254 bp, Zea mays
  unsure (1)..(254): unsure at all n locations
ctctgtcgcgtgcgttgggaaagccctgagcatcccctcttatagatacaaggggatggtccagctgtacatatgggggtgtaactatgtgctaacgtggccgacggagaagtgcttgacccctgtataatcgtaactggcggtgcggacctgagtcctgctgccattctttgtctctgtagagagctaagaacaatctacgtcatggatgcatgcanggaaccatcattacctgttgccagagtaatctagat

SEQ ID NO: 31793 - DNA, 475 bp, Zea mays
  unsure (1)..(475): unsure at all n locations
agcttgacaactaagagatgacgctcatcatcaatagctttcgccanatcctcaagcaaagtaaggggaaagactacaaaccccgctccaaaaaggtgtgctacaaatgtggtaagcccggtcattttattgcaaaatgtccaatgtcaagtgaaagtgacagggacaacgacaataatgggaagaataagagtgtctacaataagaanggcctcgatgcccacgtgtgtctggaatgggactccgatgagagctccaccgactcctcctccgacgaggacgcctctaacatcgtctgcaacaaaggccttctcttccccaacgtccgccacaaattgtttatggctaaagacgacaagaaaaagaaggtacactctagagccaccctcaaatatacaacatctagtgatgagggtagctctagtgaaaatgaagatgatttacttactctttttgccaccttcacatggacaaa

SEQ ID NO: 31794 - DNA, 300 bp, Zea mays
tgtctcaagcctagctacgggtgcataggtttcaccgaaatccaaacctttgactagtgaatatcctctggctacaaagtgggctttgttccttatcaccacaccatgctcatcttgcttgttgcggaatacccacttggttcctacaacattttgattaggacgtggaactcaatgccatacctcattccttgtgaagttgttgagctcctcttgcattgccaacacccaatccgagtctcttagtgcatcctctaccctatatggctcaatagaggacacaaaagagtaatgttcaca

SEQ ID NO: 31795 - DNA, 371 bp, Zea mays
  unsure (1)..(371): unsure at all n locations
gaaacaatctcatggcaagtgcttagctcactagttaatatttcattnttctctacttcctgagcataagcatttttaactttaacatgctctttgttttctttaattaggaagtcctcttggctatccaagagttcatccttatcatgaatagtgctaatcaattcatttacattttctttttgttgcatgtttaagttggcaaagagagtaaacaaatcatcctcatcatcactagaattggcctcatcactagatgtagcatatttagtggaggatttggattttaccttcttcttcttgttgtcctttgccataaggcatttgtggccgacgttggggaagaggagcctcttgttgacggcgatgtt

SEQ ID NO: 31796 - DNA, 396 bp, Zea mays
  unsure (1)..(396): unsure at all n locations
tcaagcaacggaaggggaaggactacaagtcccgctctaagaaagtttgctacaaatgtggtaagcccggtcattttatagcaaaatgtccactatctagtgacaggggcgacgacaagaagggttagagaagagaaaagaataggtcacacaagaagaagggcggcgatgcccatgnttgccgggagtgggactcggacgagagctccatcgactcctcctccgacgaggacgccgccaacatcgccgtcaccaagggcctcctcttccccaacgtcggccacaagtgcctcatggcaaaggacggcaaaaggaagaaggtaaaatcaagatcctccactaaatatganagctctagtgataacgacaatgctagcaatgaggaggataacttgc

SEQ ID NO: 31797 - DNA, 299 bp, Zea mays
  unsure (1)..(299): unsure at all n locations
ttcttttcttcccgtgccttgaatgcaacgggttgcacctcaggtgtggaggtggcgcctttctccaagttgataatgtagttggagtctgtgttagtaaattcaaagctcacaaacttgccaatcatctccttgggagacatttgcttatacctaagatccacacgaattaattgcacttgagtgaggttacgaanaagaagagatcttagaataaccttgaccatttcatggtcatcccacttggtgctcctaaagttgcgaacttggttcaccattgtcttgagccaattgtacat

SEQ ID NO: 31798 - DNA, 344 bp, Zea mays
acagttcaccttatacatattgcatgcatgttgtgcggcgtgggtggcgcaaaaagaggcaggacaaaacgttggatgaacccatggtgaaacgctggatgctggctaaaaattttttggggaaaccaaaacattccctctttatagctacaaattagaaaagtcttggggttgtgaaaaaataaaaaaggtttacgagagctcgtggaggcttgcttttctctctttccctttaatttcaaggtatgagagattttagagagctcttggagatgctcttaattctcattgcactccctccaacttaaagaactttcttacttctttgctccgcaatatatact

SEQ ID NO: 31799 - DNA, 435 bp, Zea mays
gcagctttcccgcatttcaggcacgtcgtgctcccgggaattctgggcctccgaactgccggagcaccgggagagtcttccgggatacatccgagattctcgaacagcgcaccgagctgccaacatcaccgactcggatgtcatcggcacgttcctcgccggcaccacctgccgcgacctggtgagcaagctgggtcgcaaaaccctcaccagggcgagcgagctgatggacatcgccaccaagttcgcctccggccaggaggcggtcgaggctatcttccgaaaggacaagcagccccagggccgcccatcggaagatgctcccgaggcgtcaactcagcgcggcgccaagaataagggcaagaagaagtcgcaagcaaaacgcgacgccgccgacgtggaccttgtcgccgccgccgagtacaagaaccctcg

SEQ ID NO: 31800 - DNA, 209 bp, Zea mays
acatgtgctaagcggcgatgccacagtcagcccatgctagtcttaactattaagcatgcatctagaccggcctcttcttttggaaaatcaactaaataaagtttgccgtgtaatacacccttaaaagctagagaaccatcacttgttctaaagacagacacatttacattggtaaatagacagttataccccatgttgcataattgact

SEQ ID NO: 31801 - DNA, 423 bp, Zea mays
  unsure (1)..(423): unsure at all n locations
gtagcataggccaataatatacgaattgactcaagcctagctacgggtgcataggtttcaccgaaatccaaaccttcgacttgggagtatcccttggccacaagtcgagctttgttccttgtcaccacaccatgctcgtcttgctagttgcggaagacccatttggttcctacaacattttgattaggacgtggaactaaatgtcatacctcattcctagtgaagttgttgagctcctcttgcatcgccaccacccaatccgaatcttgtagtgcttcctctaccctgtgtggctcaatagaggaaacaaaagagtaatgctcacaaaaatgtgcaacacgaaatctagtggttacccccttatgaatgtcgccgaagatggtgtcgacagagtgatctcgttagatngcttattggactctt

SEQ ID NO: 31802 - DNA, 424 bp, Zea mays
agcttcagctccatctatgttatggataggctttgtttcagtccaattgccttcggcccttctggcagcttcctgacttccatgaatagcgatgggtccttgatccgaaggtatcttcatgcaaagataggcaggatgaagaattgcttcgaaagcattgagtgtgccacgaccaataattgcattgtaagggtattccatgtcaacaatgtcaaacacaacttgcttagttctagtgttgttgatgaacccgaaggttactgacatggtgatcttgcccagtgccacaatctgtcttcctccgaagccacagagaggatgtgtagcatcatgaatcttatcttctggctcttgcatttgtctgaaggccttagcaaatatgatatcagctgcactgtctgtgtcaaccaagacattgtggacc

SEQ ID NO: 31803 - DNA, 405 bp, Zea mays
  unsure (1)..(405): unsure at all n locations
agaggatttgatctcttttgtgtgtctagaattgaaagctacagctcttgtaagtagttggaaggtggaaaacttggatgccttggatgtggggtggttcgccncttcctttccctcctcctcttctttctctcctcccccttctccttctcttcttctatccttcctctcttttctttctgcttctcccctttctacctctcttttagttccccttccctctctcttttactttttcccctcccttcccctctttgactctcttcctctttcttctttcctcttcttcctcttccccctctcacctcttctccttctctctttctctcctcccctttcctctcccatcttttctatcctctttctcgtcgccttcttttcctttctctcctcttcctcctctct

SEQ ID NO: 31804 - DNA, 221 bp, Zea mays
  unsure (1)..(221): unsure at all n locations
agcttcggataacccatgtagtccatcatttctcgtcanaccataatctccttgttgtctcagagacagaacaggaagtcatcttcgtcatttcctgcataaactaaagacacttgagggtgtctcatgatcttcgcataatagtcgccgttggcaaattgctcttctgatagttgtttccctgaagcatggcaaacaatatattccaaatcgtctagaca

SEQ ID NO: 31805 - DNA, 420 bp, Zea mays
  unsure (1)..(420): unsure at all n locations
ttaagtcacctgcngcatgcagcttcncatccaataactcttgttttatgtattataacagagagcttgaagatatgaaaagatatctatcgaatcaaggttcaatacatagaaggtagagtggactactcatctaaatgtgttaacactctgtntcattctttgcaatatcacaagtaattacaaatgtaccttcaaccttacaatcaatagcacgaagatgaagaaattacacggcttcgtaatctgagctatacaattcaccttagctaaaaaaggtcctcacaatgcatgacactgttcctctatttatagtcatgagatatagattcagcaaaattacaatcatgcaagtctatacatgntaagttataaattgaactaaggcattgacgtcctttccttcacagttcttctgac

SEQ ID NO: 31806 - DNA, 359 bp, Zea mays
agcttccttgacattagtcatcccactagaattctcttcctttctccagcagtgaggtcataggcttggcaaccttagagaatccttcaataaatctccgataatatcctacaagccccaagaaactccgaatctccgtaactgtagcgggtactctccactccattatctccttgactttagcaggatccactgatatccctccattagaaatgatatgtccaagagatggcaccttgtcaatccaaaaatctcgtcgcttctgtagcatcaatctcagaagttcctcatgattactatcactcttggaataaataaaaatatcgtcgatgaaaaccacgacgaatctgtccagatat

SEQ ID NO: 31807 - DNA, 437 bp, Zea mays
  unsure (1)..(437): unsure at all n locations
attatctgaggcatgtcaggtcaatccataactccactcaaagtaacgacaaaagaagtcagtctcagaggtcacaatatacctcacaatcttcggggcaacaactaagctctttcaagccaccagctccaaggggcagaggcgccaggggcttctgaagaagatttggggatcaacctanaaagatctactgcttattctgtggtgaggacaaaggccatactacaagaatgtgtcacgtcaccattcagaagcanaaagagatagctgaagccgaagctcggcaaaatcatccaaagcaggtcttgcacactgcttcgtgtcactctccttacataccagagtatgtgaacaatcatcctgcagcttctgtcgcttcaactagacattcacaggcttcctggccacaacttctgccttcgccaccactacaaccg

SEQ ID NO: 31808 - DNA, 357 bp, Zea mays
tatacagcaactcttgcaactgcttcttcaactctgccaactcagcgggtggcattctgtagggcctttaggaaattggggccgttcccggctgccactctatggcgaaactcaatatcccggtccggtggcattccttgcaattcattaagaaagacatctgctactcacagaccactgggatcttcttcagaggaactccgtcatagaaaaacacatgactgaaaaaaccctgactggcagaatcaagtgaaattccccagaagggaaataacttccaggtaccactggctcctcgacacaacttggtgcaagtctccaattgctctagaatatgccacatttccatcccacaca

SEQ ID NO: 31809 - DNA, 402 bp, Zea mays
  unsure (1)..(402): unsure at all n locations
agctttcgtttatgctcctaaagtagtgattacaaagacaatttngctaccttgtagaaaatacctctgatntttggtgaaagacgcccacgtgatgcagagattctgttttcagagactactaaagcagagagggagcttaactggaagtaagtcatatatcgaggtataatatgttatcatgacaaaatggctttatcgtatattatatgatcaactttcgcttcctctagagcanaatacggtattgaagagatgtgccgcgaccaatggaactgggccagcaagaacccttatggctatggatcacctgactctatcaagcagagtggtcaccaaacaaacggatccgctgactccttcaaacagaatggccaccgcacaaacggttcaactgactca

SEQ ID NO: 31810 - DNA, 334 bp, Zea mays
  unsure (1)..(334): unsure at all n locations
agcttgtggaagaccagatcatcaaagcatatgagtttctggatgagaagtggtcacccaagttctattgatgaagcactagaagaccaatcaaagaagaaatccatgtggaagttcgtaagaggaaggtttgcgtgttagcatcgttgcttcttcaataagctagcttgccaagcaaacctagaagcctgaagatgatctttgagtagccagaatcagcgtttggcaatagcagccagatgctcctcanaggatagattttgttgaagctccatctcctcgaagagtctgcaaagtgaagatatgtagctgaagtaaagctatacccataacc

SEQ ID NO: 31811 - DNA, 403 bp, Zea mays
  unsure (1)..(403): unsure at all n locations
agcttcaaccagtgtcgccagcccatgtctaaattttatggagacccgtgcacgcaaagaacaaggtgttgctgatccacacgatgatttccttgatacacctctggaagctgtcaagaataccatcaggaaccctgcaactcccgaagaagcactggcacttgccgcctctcctcaagttatggatttcgacaattcagatgatgaaacccaagatctgaatattgcaactcaagccctccggcacatcctcaatatgccagttaccaagcagcaaaacacaatatcggtacatccaccaaagaaagacttcaaatatagagaatcagtgagaaagaaagctgaccgggagaacctganaggtgtcgagtgcaagcaatgcaagaagttttatgaatgctgt

SEQ ID NO: 31812 - DNA, 376 bp, Zea mays
  unsure (1)..(376): unsure at all n locations
caggggcttcggcggaagaattggcgatcaaccgagaagaatcttctgcttattctgtggtgagaacaaaggtcataccactaggatgtgccatgttaccatccagaagcaaaaggaaatagccgaagcggcagcacaacaggctcagccgaagcaggtcatgcacactgcttcgtatcattcgccttacatcccagagtatgtaggcaatcactctgcagtttctgttgcttcggcgagtcaacctcaagcttcctggcaacagcctccgcctccaccaccgttgcaacaacgccagcagccagaaaggagccaatatgctccacaccanagggacttcagagaacagttcgaagctcgcacagtcaacagcact

SEQ ID NO: 31813 - DNA, 439 bp, Zea mays
agcttcagaatgaactcaatatcctagattctcggaactttgatagaaatcttgcacacatagctcatgtatatacctttgatcatatctctttcatttggtacaaaagcatatttcttattcttcttgtgccacagctaatactaatgtgcttccaagtgcatttctatccttagtcttaaattgaaagagaaatggagtattcgacaaaggcaaggcttccactacgactctgtcggtatcatttatcctttgccctactcatgaactttcattcatttcctttcctaaaaaggggaagagagtaaaaggcccctagttctcttcgtttttggcacttaatgccaaagggggagagaataatatgcccaaagcaaaaggaccgcaccaccacccttgtttcaaaaaacttttcaaaagggggagagatatttcaata

SEQ ID NO: 31814 - DNA, 373 bp, Zea mays
  unsure (1)..(373): unsure at all n locations
agcttaaagccatggtaagtagcatagttatagtattatgcgaatngactcaaacctagctacgtgtgcataggtttcaccaaaatccaaaccttcgacttgtgaatatcccttggccacaagtcgggctttgttccttgtcaccacaccatgctcatcttgcttgttgcggaaaacccacttggttcctacaacattttggttaggacgtggaactaaatgtcatacctcatttctagtgaagttgttgagctcctctagcatcgccaccacccaatccgaatcttgaagtgcttcctctaccctgtgtggctcaatagaggaacaaaagagtaatgttcacacaaatgagctacacgagatcgagtagtta

SEQ ID NO: 31815 - DNA, 268 bp, Zea mays
  unsure (1)..(268): unsure at all n locations
cttcagttcccttaggataagttcctggtctaagntttaaagactttccgaaattacctttatcagcttacccccgaagctattatcaagatgggggtctttatttgggccatgaggagctaggggctagaaccaaatgcaaaatgcttctgcaacatgcatgagctatcctatgagataaatgctaccagaaagggagcatatcacaacaacttcggttgtacagctttctgcctcgctctgagatcagctacccatttccaacatt

SEQ ID NO: 31816 - DNA, 341 bp, Zea mays
gtcacctgcggcatgcaagcttctgttgcatcatcatccacaggctctgacaatattttctcttggaccatatcctctatagttggatcaaagttggccagagacagttcttgcagaccaataagggcatacaatgcaggagaaggaactcctctacttccaccgctggcgatgaactgccgacttgttttccgagttaatggagcttcattttctttctcttatctttcacagtaacaacgcaagcaacacccccatttgggtcagcagcagatggagcacacccattgtgatcagtgtcagcaaaggccattgcaggcactttcttaacagcaagagct

SEQ ID NO: 31817 - DNA, 411 bp, Zea mays
taagcacctgcagctgcagcttgcggttctattctctcgatggcccatatatttcttttctcttattctcagtctaacgctgagaggaataaacggatctcacggaggaccattattttccattaaacacgatggagggatggatcacagcccgtcgtgttccttttttttcaccgtaagcaacattgggagtgaatgctggctggcgctggtaatggcggcagtctcattctcacccggtgaacatgagtagatttaatatcataccatttgtttgtgtagggaatcgaaggctgtcgcgtaagacagttcggctaggctggaggacctgccggcttgacgaatagttggtgcagatccgatcccatagcagcatcgaagaagagcgtgctgatcacgtgttgagaacta

SEQ ID NO: 31818 - DNA, 495 bp, Zea mays
  unsure (1)..(495): unsure at all n locations
agctngacaacgaggagatggctcttatcattaagtgctttctacttatcctcaaacaaaggaaggggaaggactacaaaccccgttccaagagggtgtgctataggtgtggtaagtctggtcactttattgctaaatgtccatatacaactgacagtgatagggacgacgacaagaaggggaaaaagattgagaagaagagatacttctagaagaagggtggcgaggcacatgtggggcgggaatgggactccgacgagagctccaccgactcctcctccgatgaggacgccaccaacatcgccatcaacaaaggccttctcttccccaacgtcggccacaaatgcctaatggctaaagatggcaaaaagaagaaggtacattctagagacaccccanatatactacatccgatgatgaaggtagctctagtgtcnggtaccgtaattaggggtatccncaacactttctaaacacggctggtaaacaccttca

SEQ ID NO: 31819 - DNA, 486 bp, Zea mays
  unsure (1)..(486): unsure at all n locations
agcttctaagggagaacatgtgttaggactaacagatgtcntatttgagaaatacaaaccttgtgcagcatgtcaggcaaggaagcaagtgggaacaaatcaaccaagcaagaacgcgatgacgacatcaagaccaccgtaacttcttcatatggatctcttcggacccattgcttaccttagcatcgggggaagtaagtatggtctcgtaattattgatgaattttctctcttcacttggatattctttttgtaggataagtcagaaaaccaaagtacattaaagcacttactaaggagagcccaaaatgaatttgagcttaaggtacagaagatcaggagcgacaatggatcagaattcaagattcttcaagtagatgagtatcttcaggaggaaggcatcaagcatgagatctccgctccttacacgtcacaacaaaatgatgtagtagagaggaagaacatgacgctcatcgacatggcaag

SEQ ID NO: 31820 - DNA, 163 bp, Zea mays
actgggagttcccttggcacaagtcgagctttgttcttgtcaccacaccatgctcatcttgcttgttgcggaagactcatttggttcctacaacattttgaataggacgtggaactaaatgccatacctcattcctagtgaagttgttgagcctccttttgct

SEQ ID NO: 31821 - DNA, 445 bp, Zea mays
  unsure (1)..(445): unsure at all n locations
agctnttcanaatgtttattacaatacaatctatttctctttaagaactntctctgtaacttcgttccaacaattgttgacgacttcgtcgacgatggattcagccatatttatgatgtccagcgcttccttcatttctggatcggctaggggatcgaacggttccggtggaggagataattcagctaaagtaggaaaaattagttagtccgaaaccacgaaaacaaatgtcgaagctaaaaaccaaaaaataatacctatacgcttttcgcgctctacagcttcttcagcttgtcttgcttctactcgggcgtcatgggtgtctttttcacttttctttataattccgtgggtcatctctcggccaccattcacccagacatcattgtagaattttccgcccatcgaggttgcttcagctgaaagatccttcgtatcatctatg

SEQ ID NO: 31822 - DNA, 422 bp, Zea mays
  unsure (1)..(422): unsure at all n locations
agcttatctcagccgatgccacagtcacgttatggtcatatttagtagtatctgataaatgattgaaagtattggatacgaatctatttgccgaacatattaaaaattctccatagaagacattattctttcaaggcacgaggccggtggccagcagcaggtcgtcaggccgatgtcgatcgccggccaaccagacggacgaaactaaggcgatggcagcacaacgattaaaattctagacacagntttggtaagttaaacaattgaaaaacagacccgttataactttagcagaccatacctaatacctaagactatatacatgtacactacttgaagggcctntcaaaatcgggggccactgnggccgctctagttgccccctctaggcctggccctggccgtcggtaaaacaccacgta

SEQ ID NO: 31823 - DNA, 342 bp, Zea mays
catcgctagacacaaagtgttctcggaggtctctgccataagacagcggcaggaagtcttacgacctcatgcatctgccaccacacttggcttgcctgggtgacaatggatctccacctcatagtctttaataagctcaagccatccgctttgcctcatatttaatcctgactgggtgaaaatatactttcacacttttatgatctgtatatatgtgacagatatttcccagcatatagtgacgccaaatcttcatggcatgaaccacaacagctagcttcagatcatgagttggtaatgctcctcatgtctgcgcaactgccttgaagcatatgcaatcac

SEQ ID NO: 31824 - DNA, 292 bp, Zea mays
cctaagtctggtaaaagattgttcatcaagtggcttggtaaagatatcggctaattgatctttagtattgatgtaagaaatctcgatatcccccttttgttggtgatccctaagaaaatgataccgaatggctatgtgcttagtgcggctatgctcgacgggattgtcggccattttgattgcactctcattatcacatagcaaagggactttggttaatttgtaaccgtagtcccgcaaggtttgcctcatccaaagcaattgcgcgcaacaatgtcctgcggcaatgtac

SEQ ID NO: 31825 - DNA, 321 bp, Zea mays
  unsure (1)..(321): unsure at all n locations
agctgggttatgcatagattatctgttctcttatgcggtgactatcaagaacaagnatccattgcctcgtatagatgttctttntgatcagttggtcggagccaaagtgtnttccaagatagaccttcgctccgggtaccatcagatcaagatacgagcaagtgatattccgcagaccgccttctcgacctgatatgggctgtatgaattattggggatgtcttttgggctgactaatgcaccaacatacttcatgtatctgatgaattctgtttcatgcctgaattagacaagttcgtatgggttctcatcgatgatatc

SEQ ID NO: 31826 - DNA, 398 bp, Zea mays
  unsure (1)..(398): unsure at all n locations
agcttcacgcctttcgccttgagacatcggaatgtctcttcaaggtcggaaaggaggtcggaggctntcctcgtcttgactacgatgtcatcgacgtaagcctcgaccatccggccaatgtgttcgccgaacacatggttcatgcatcgctggtacgtcgcacccgcattcctcaagccgaacgacatggtgacatagcagtacatgccgaaaggtgtgatgaaagaggttgcgagctggtcggactctttcatcctgatttggtgataccctgagtaggcatcaaggaaagacagggtttcgcacctagcagtggaattcacgatttgatcgatgcgaggcagagggtaaggaaccttcggacatgcttttgttagaccggtgtagtctacacacat

SEQ ID NO: 31827 - DNA, 384 bp, Zea mays
gcttctccttgtcctcatcaaccttgacatagaactattctgatttccagcctgccgagccattgcttcggtagctgattacagagaaacttgcggttttccggtaggcaaaattgtagcaaccgaagttttcatgaagcccatcttttctggcctttgtttgataatgcaattcatgaactcgacagaaactgtcagcaaaaggctccactgcttggcttcggagggcccaaatataaacgctaagcctaacgatagcgttaggagttaactgatgaaggtagatgccaaacctcttcaatatctccgcaacaatctcgtgaacagggaatcttagcccagcctttaaaaagcttttgaagatgacaacctcgtccttctctg

SEQ ID NO: 31828 - DNA, 288 bp, Zea mays
tggcacacgataacgagggttacattttatatcctgctggttatcctgagcataaaattaggagaattcatgctaagaagactcattctgtttcccatcatgcttttatgtataagaatgagacatttagctctaggcattctacccatgttaaaatgcttaaaaaggaaatctcctattacatcaaatgagcctaatgtttcatttaagacttttgatgcttcttatgttttaactaacaaatcaagcaaagtagttgccaaataagttgggggcaaacacaagggc

SEQ ID NO: 31829 - DNA, 399 bp, Zea mays
  unsure (1)..(399): unsure at all n locations
agcttcacgaagaggaaccttcggccattnttattatcagcttccgccgaaaaccgcttcttcctttaagaccttcggcgacgaagcataggcccaacagtagcccctttcgcggtgctagatcgtttttcgtaacgagcttggtccgtgaaaaaagtctcttatgcttcagggagccgaaggtccaaaaaacaccttccctgagctcgttgccgagaaacgattcaatttcccagcgcgtagcggtcccaccttgcagagttactgtttggtctctgcggcccaccgcacagcgagtacaagcgggtgaccgcctggtgtaaaaatcctggcgcttcgccttcttacctgcaacactatataaacagacgagtaggtgtgaagttaccacagcattca

SEQ ID NO: 31830 - DNA, 325 bp, Zea mays
  unsure (1)..(325): unsure at all n locations
agctagcccagtccactaccttctctgttaataggtccctggcacacgagcaaaccggctgctttatgctctactgaaatcaatcagacaattatctgagctgatgaagctacgcaccacctaatctctctatccatccgttttgcaccaatagtaagtttaccttaattccaatagtaagctttttcttctagcatttatntacttgatcacatggaatgtattatgggtcacatgttttgtttttatgaatggatatntcacgggaatacggtttagtttaccctatgcctatatgcaatatgtacactnctatgctttatct

SEQ ID NO: 31831 - DNA, 355 bp, Zea mays
  unsure (1)..(355): unsure at all n locations
cagcttatctctgatgtagaggaatgccttgctgttctatatatagatagaagaattaaaggcatcaaatgctggttagtgagcttacagtttctctagctactttaattgatcaacttatctntaatcacacattccctttcagctacattatcatatatggcccaatgattgtctgaccttgaggagaagtattcttagagtcagaccgacttatctcagacttctgcctttctggacagtgcatgctctctgaactcttctatgaatgcccagcttgattctgaaaggatggcatatgaagtaaacttccttggctgacccagctctgttattatagctttactgctgaatg

SEQ ID NO: 31832 - DNA, 440 bp, Zea mays
  unsure (1)..(440): unsure at all n locations
agctnttaagttttctcaattagagttgagtcttacccctttaatccctatttagggttaagttccctatccagggttctatttgcaaaacattaatacaacttgtttgaaatttttgcctagtgaatgcactctaggtgtatcaaacatatgcaatgccaatgcttatgatgccatgctcaagttttagtttcagtaacaccaggggtgttacatcctttcccccataaaagaatctcgtcccgagattaaaagtcctagggtaagtaatggaaaaggaaacacagcatacttttatttccttatgtctggtacaaagcaagggtgatgtaggggtcacttcttttattacacagttatacaggctttacaatntgcaagaagctaaaagcctgngaaattcttactaaaaagtcttgagtttccatgtacctcatttc

SEQ ID NO: 31833 - DNA, 403 bp, Zea mays
  unsure (1)..(403): unsure at all n locations
agcttcggaatacaaaccgacttatatgtagaatgaccttntagttcataagtgtgtgagtcgttgttgtaaacttttatgaggggcatgattgtaattcctcacaggctgtgtcttgtgcctataaatagagaacaatattcctttactgtgcacgcattcctgtaattgcaattgcatcactcatgaattaatctttgtcaaggcagaggtataaatgtatctaatatttgaatacattaagttgatataatatgaaagcgatgttgttcatttataatttatttgtctttgatgcttcatattttgtattattttatataatctattagagttcaattacaaagatctaaccttcgtaattgtatcgtctttaaccttcgtccgaagttcattaatcctt

SEQ ID NO: 31834 - DNA, 227 bp, Zea mays
  unsure (1)..(227): unsure at all n locations
acttctaaaggagaacacgtgatatgtctaactcttgttcaattcgaaaaagatagaccttgtgcagctngtcaagcacggaaacaggtgggaggagcgcatcacagcaagaatgtgatgaccacttcaagacccctggagctgctgcatatggacctcttcggacccgtcgcctatctaagcatagggggaagtaagtatggtttagttattgttgatgaattttc

SEQ ID NO: 31835 - DNA, 498 bp, Zea mays
  unsure (1)..(498): unsure at all n locations
atccttagagtcacctgcggcatcaagcttgtcaagcatatttggtacccaccgcttgatggtgtccatcacggntagtcaacaaagatctaggaacccaagagtcctttgtgttagcactaggtaagctcattacctttctagcacaagttgcaattttgggttgcctagttacatgaaaatcaattgacaagttaggagtagaattgttaccagtgggacaatccttgcatagatgtcccttctttcggcatgtgtagcatagtcttttttcaagttttgaagctttcttctttccttgtttgttgcttgctacatggttagtaaaaactttcttttctaaccctatgcctttttgttttaaatggggacaagatctaagtaagtgtcccttcttagagcatttaaaacaaagtctatcatccttgttaataatcaagccattttaatgtanggacatgacctaatcaagtgtccctcttcaaagcattcactaca

SEQ ID NO: 31836 - DNA, 94 bp, Zea mays
  unsure (1)..(94): unsure at all n locations
actcacacaccccccaagattgtcctgacccaaaaanaanaaanaacaacaaaagaaaaaacaagaaccgcacaccgaagccggcaccaaaaac

SEQ ID NO: 31837 - DNA, 500 bp, Zea mays
  unsure (1)..(500): unsure at all n locations
gtcacctgcggcatgcaagcttctanagggagaacacantttgagactaacaatatgttcatttgagaaaaaacaggatntgtagcgcatgtcaggcagggaagcaagttggtgttcatcatccacataagaacatcatgacgaccgacaaaccactcgagctcctacacatggacctattcggcccgattgcttacataagcatcggcgggagtaagtactgtctagttattgtggatgattattctcgcttcacttgggtagttcttttgcaagaaaaatctcatacccaagagaccttaaagggattcttgagacgggcccaaaacgagttcggcttaaggatcaagaaaataagaagcgacaacggngcggagttcaagaactcacaaatcgaaggcttccttgaggaggagggcatcaagcatgagttctcttctccctacactccacaacaaaatggtgtagtggagaggaagaatagaactctattggacata

SEQ ID NO: 31838 - DNA, 468 bp, Zea mays
  unsure (1)..(468): unsure at all n locations
agcttaatgccggaatagccatcaaagaagctccctctctcttctcatccncncattgcctcatggcaaagggagatgctaaggtaaaaatcatcaccgatttaaatgatataaatgatgatgatgatatcgatgatgttgatgatgatggctattcatatgatgatcttgttagaatgttaggtgaggccgatgactacatgcacaaagaaaaagaaaaatttaaggccttgaaggaattgtataaaaacctccaagtgtcttttgaggagctcaagacctctcacaatgatctcaaagaaaattgtgagaagcttgcggatgctcaaaaatcatctattgtgcatgaagttgaggtggtcactaaagatgttggagtcacttgtgacttacttgatagtcttacaagtgaaccactacctactaactctatttgtgataaatgcannaattctctcaatgataaca

SEQ ID NO: 31839 - DNA, 377 bp, Zea mays
  unsure (1)..(377): unsure at all n locations
agctntggtttatacgtgtaatataagtctccaaatagtgtgcttagttagacgggcattgcctaaagaaaatggtgctactcaaactgaagtaccagcagatctttctccaaattctgttgcagaaaagctatccgtggcaatggaacgtcttggagaactagctggttttgaagtaaaagcttgtaatgggcatctaaatttctatttggcctccaatcaggcaatgcagaaccataccagcgttgttgtacctgtgcaagcttcagacaaatctagtggttcaaagccaagctctgtgaaccaaactaatgcaaaatatcctctgaaaaggaaaaacctggagatangttgacacatctcatttgacctgagag

SEQ ID NO: 31840 - DNA, 396 bp, Zea mays
  unsure (1)..(396): unsure at all n locations
acccaccaaaacccacaagagaggtttcaatnttcctaacaagatgattcctagttattgtattctcacgtcttaaaggaactgttggaggacttcttctctgccgaaggtccttaaggcagaaacaccttctgcaagataatacagaggctcggtctagcccctcaagaagaagactctgcgtagaagcaacaatgcataatgtcgaagctcaatagcttctgcccagaccaagttaagaaggaaaaaggactagatagaccttattagttcgagttgtttcgtaacaaatattcaagggcatgaatgtaattntacccgggttgcgctccgtgtctataaatagatgaacaataccccatactgttcacgctgggatatattgactctctcgca

SEQ ID NO: 31841 - DNA, 505 bp, Zea mays
ggaccttaagtcaccgcagctgcagctagaaaatctggttaaatcgtcggtaatatctctctcagccaaggaaacttctgacttgatgaacagtggtcgggtgtttccactccaaaatgtccttgactttgctgggaatctaccgcaatcccctggcagacagtacatgtcccagaaatatgaattcctccagccaaaacgcgcatttactgaacttggcatataactgatgttctctcaagcccgtaacacgatccgtaagtgttgggcatgctcctctcatccttggaatatattaaaatatcgtttatgaagaccaccacaaacttgtccaactcgggcatgaataccagagtcatcaaatacataaagtgggcaggagcatttgtcaatccgaaagacattaccagggattcaaataatccatactacgtagtgaatgcggtatttggtatatcctcgcgccgaaacggatatagagataccccatctgagatcaaatttg

SEQ ID NO: 31842 - DNA, 430 bp, Zea mays
  unsure (1)..(430): unsure at all n locations
acctctgagtcacctgcggcatgcaagcttgtatcacgcattagactcgttgcacgggaattagaataataacacaaccgacttgtttaccttgtggtactagaaaaggaaaaaatgagcacacagatgtgaagaatatcaacaccaactgtgtttaggaagtgtctataagttgtcaaatctgaagaataaatagagttgaataacaattaactaaatttagcaagtctatttaaataatcattagaaaagtatttttctgttcacctcataaaatctaaaatntagaaaattatttagagaactattaaatttgctctaagatctgaacgatcatccacgtcaagtaataagacattactgatggctagaaaacgactgctccacgtcacaaaagacaagtttaatactccatatgtagggatggata

SEQ ID NO: 31843 - DNA, 407 bp, Zea mays
  unsure (1)..(407): unsure at all n locations
agcttggtgccaatggagaagcagaaatccttgaattcttggctgtcaaactgcttgccgttgtcaactatgagttcggacgggactccgaagcgacaaacaatgttttgccagaagaatttctgtgcagtctttgatgttattgtggatacagccctcgcctcgatccatttggtaaaatactcgacagcgacgaaagtgaacttgaggttcccctgagccgtgggcaggggcccaacaatgtctatgccccancgctggagaggccatgtgtgggcgatttgtttcgtgaattgtgaaaggcttcctgatcgaagagaaaacttttggcaggcttcataagaccttgtgatctgattagcggcgcagatcattgcnggccagtagaaaccttaacggatcacctt

SEQ ID NO: 31844 - DNA, 395 bp, Zea mays
  unsure (1)..(395): unsure at all n locations
agctntaccaaatggacgtgaaaagcgtcttcctcaatggaccaatcaaggaagaggtctatgttgagcaacctnccggctttgaagatagtgagtaccctaaccatgtctataagctctctaaggcgctntatgggctcaagcaagccccaagagcatggtatgaatgccttaaagatttccttattgctaatggcttcaaagtcggaaaggccgatcctacactctttactaaaactcttgaaaatgacttgttcgtatgccaaatttatgttgatgaatattatattgggtctactaacgagtctacatgtgaagaatttagtaggatcatgacacaaaaattcgagatgtctatgatggnggagttgaaatatntcttangatttcaagtg

SEQ ID NO: 31845 - DNA, 428 bp, Zea mays
  unsure (1)..(428): unsure at all n locations
aacatagattntctatggataaactcaacataagagatggcattagtagcacaagcactattttcttatttagcaaccctttatatgtgaaaagcaaacaagttgcttaaatagaaaaacctcataatatggactaaatttcccttgagccctcatgcacaatatattttgaatgacatggataatatgcatggttgttcaatgaagtctaaagggctgacttaatccacattatggtgagtgtctaatatagaagaatcaaatccacaataactagagagagagtacatcacatagttttggatgtgttgaccatatgataattatcatttatcttccattataccttatttcataacaatgactgatgatatcctcaaggcttttttccctagaggtacacaatcaaaaagagatagatttgaaat

SEQ ID NO: 31846 - DNA, 311 bp, Zea mays
atgttagtcttagcaattaagcaagtgtcgagttcagctctatcaaaatctaccaagtatagctgaccctctaacactcccttaaaagctattgaatcatcactttttctaaagacagtgacacctatatcagtgaatagacagttgtagcccatttgacataattgagaaacggaaagcaaattgtaatctaatgaatcaacaagaaaaacattggaaatggaatggtcaggtgagatagcaattttacccatacctttgaccaaaccttgatttccatccccgaatgtgatcgctctttggggatcttg

SEQ ID NO: 31847 - DNA, 450 bp, Zea mays
  unsure (1)..(450): unsure at all n locations
agcttcttatcatctctaggtacctgcaaaaattattaagtacattttggtacccatctcatgatgggtccatcaaggttagccaataaggacttaagcacccaaatagccttggtcctagaatgtggtgaactcatcacctttctagcacaagagtcaaatttgggtctcctaagcatatttgaatgtattgccaagttaggcttaagagtnttaccctttggacaaaccttgaatagatgacccttttcacggcaattgtaacaaatgcggtgcttgtccttgcaatgcatttgccttttgctttcattctttntgatggtcatctttcttgatcgtgcaaggctntggttcttcatgtgggggcatgaatcaatttcatgacccttctccttgcatccatagcaccttctatcgcttctctttgatcttttctttgtgaagcacata

SEQ ID NO: 31848 - DNA, 389 bp, Zea mays
  unsure (1)..(389): unsure at all n locations
gtggagtctttaatacccaatggttgtttcgtataaacgtattcttcagaanatacatgaagaanagcattttaaatgtcaatctattgaagtgacaataattgggaaattggcaacaataataaaagatggatggtgggtgtcttcacaactagacccaaggtggcatcataatcaatcccatattgttgctagaagactttggcaagcaaatgagccttatagcaatcaacggatccatctaacttgtatttaatgtgacctcctaccatatatattattactaattntatatgaatgtatgacttgcgtgaatttttgaagtcaattgagagtacatgttacacgttttaccgatagaatttagatntcgatcgtaaccggtgtaa

SEQ ID NO: 31849 - DNA, 440 bp, Zea mays
  unsure (1)..(440): unsure at all n locations
agctntaagtgggacatggactcccataggtaagacattcttatagaagaagcgaccacttgagcccttgaccctttacgaacaacaggcaagacctgtctgaaatcaccaccgaagacaatggttttaccaccaaatggcagtcccggtcgacccattatatcgcgcatgctattgtccagtgcctccacggcttgtctcttagtcatagaagcctcgtcccagataatgagggatgctttccgtagcaactctgcggttccactctgcttcgtgaagctacatacagcgccatcgtcaatagtgagaggtatcttgaagcgtgaatgggcggttcttcctccaggcattatggaagccgcaacgccagatgtagttgtgccactgcaatcttgccctggctgcgtagcgtcgtgagcagcactctatatagataagtc

SEQ ID NO: 31850 - DNA, 362 bp, Zea mays
  unsure (1)..(362): unsure at all n locations
agcttgtgaaggttcttcatccacacatgtgctaagcggcgatgccacagccagcccatgctagtcttagctatcaagcatgcatctagaccggcctcttcttttgcaaaatcaactaaataaagtttgctgtctaatacacccttaaaagctagtgaaccatcacttcttctaaagacagacacatctacatttgtaaatagacagntatatcccatattgcataattgactcacagatagcagattatatccaagagactcaactaanaacacattagatatggagtgctcattagaaattgcaatttttcctaaaccttttacctggccttgattcccatcaccgaatataattgaatc

SEQ ID NO: 31851 - DNA, 427 bp, Zea mays
  unsure (1)..(427): unsure at all n locations
agcttctgactagtgggctcgccaggatgtccggtgcgcactcggacatctactgttccttgtccggtgcgccagtatgggcgcgcctgccttctgcgtgcgcagagcgcgcaataaatgcgttgcaagtagccgttggcgcgatgtanccgttgctccggagttgcaccgaacagtccggtgcacaccggacatgtccggtgaattatagcggactagccgttggagtttcccgaagctggcgagttcctgaggccgacctcccttggagcaccggacactgtccggtgtacaccggacagtccggtgaattatagcggagtcgcctctggaaattcccgaaggtagcaagttcgcgttggagtcctctggtacaccggacatgtccagtggtgcacctgacactgtccggtggcacaccggacag

SEQ ID NO: 31852 - DNA, 338 bp, Zea mays
  unsure (1)..(338): unsure at all n locations
agcttagcanaagaaatntctagaatcaagaatattgagctcatgcctaagtttggtaaaagtttgttcatcaagaggcttggtaaagatatcggctaattgatctttattattaatgtaagaaatctcgatatcccccttttgttggtgatccctaagaaaatgataccgaatggctatgtgcttagtgcggctatgctcgacgggattgtcggccattttgatagcactctcattatcacatagcaaagggactttgtgttaattgtaaccgtagtcccgcagggtttgcctcatccaaagcaattgcgcgcaacaatgtcctgcggcaatgtact

SEQ ID NO: 31853 - DNA, 308 bp, Zea mays
tcaatatctacgtgcgcaagatgaaccactctgaaccaatccaaccgtttataaactttagactaaaatctactcgaaaaagtatttcgcgagttcttgtgagaagtaagatatagctaacgtagaatgaaaagatgaacatgttaaggctatttcacctttacataaactctatggaaaaaaatatatgtcaatcttgcgagtaaaaactatttaagttaaggacaatcaagaacacaagacacaagaattaatccgaggttcggccacaccacaaaggtgtcctactccccgtggaggagcccaca

SEQ ID NO: 31854 - DNA, 455 bp, Zea mays
  unsure (1)..(455): unsure at all n locations
acctctgagtcacctgcggcatgcaagctngccatgtttccactgttctcaacttgagttattctattcatcaacgcaatgtgaagaataccttttttctctaagatcctcattgatactatgtactgcatgcagtcatctaatnttgatgacctatccttgcccaatcatgtctatcacttgactaagtctctctacagactcaaacaagcacctcggtattggagtagccgcttcgcaacttacatgtagcctattggcttcaacactgccaaagtagatacctccttatttgtttatcatcatggttcaaagactacttaccttattgtataaattgatgacataaagttgactaccccaccagtttccacgctttagcatgtcatcaatgctcttcgtcaaaaaatntctttgagacatgagcctcttcatcnactttntcatgtctctat

SEQ ID NO: 31855 - DNA, 365 bp, Zea mays
  unsure (1)..(365): unsure at all n locations
agctngaacgcgagtaaaggagatagctttagctttatgtatatgtacagngagcagatcagcacaatgcacagcgaacatgtgttgtagctcgtccgactcgaatgcccaaagaacctttacttgttcggtctatttcaatccatatagattggaagggattgatacagattgggagaaattttgacttactatggattgaaacccccctcaatcccctcaatccatatggattggggtagaaccgaacaagccctaagtgggggaagcttgaactcgaagcctgctggaagctactgttcgttggtggtgggtggtgacgacaaccatcgtagtagtctacttctttgccatgtcttgatgat

SEQ ID NO: 31856 - DNA, 404 bp, Zea mays
  unsure (1)..(404): unsure at all n locations
agcttcggattcccaactntagaaaacggactntctgtgctgtcaaanaacgatctggctgacagtctagcttacaacagtttaaaggtgcgacaaatggaattcttgtatttnttgtcgagttcaaaatttttcgtttgtttaaaactattgacacagacatgctcctgtttgcagggcctgatactcagcaatgccctcagggcacagaaagatgctgaagacgaaggttgtactatagccctgagcaaccttcgttccgaagtaattgaactgaggaacgaaggtctcgaaaaagacaaaatattatactcattaatagataaaataaaggaggacgaagctgctnttaaaagtcaagctgaagctcagaaacgcgaaattgaagaccttcggaaaacact

SEQ ID NO: 31857 - DNA, 400 bp, Zea mays
  unsure (1)..(400): unsure at all n locations
atccttaagtcacctgcaggctgcacagctttaagggagagcacatgttatgttcttttttgtntcttctgagaaagacagaatntgtagtgcatgtcaagcaagaaaacaggttggagtccacatccacacaagaacataatgatgaccgacatgccacttgagctactccacatggacctattcggcccgatcgcttacataagcatcggtgggagtaaagactgtctaatcattgcggatgaatactctcacttcacttgggtattctttttgcaggaaaaatcacaaacccaagagactntaaagagattcttaagacaagctcacaatgagttcggatcgagaatcacaaagataagaagcgactatggaccacagttcaagaattcctcaaatt

SEQ ID NO: 31858 - DNA, 356 bp, Zea mays
agcttgtcttcgactcatctttccttttcatccagatttgatgataacctgagtagtaatccgataagctcatgagttctgaagtagctgctgcatccactagggaatctattcttggcaatgggaattcatacttcggacatgccttgttaagatctgaaaatcaatacacattctccatttaccgttagcttttttcacaatgacagtgttggccaaccactctgggtatgttacttctctaataacatcaacacttagaagtctttttacttcatttcgtgcacctttgactttatcatcggacattttccgaagtctttgctttcttggtctgaaagacgggtccacaatga

SEQ ID NO: 31859 - DNA, 328 bp, Zea mays
ttgcgttcagttctgatatttttgctttagcttccgccagtaaaccttcggctgcctggagctcaaagttctttttctcaaaagcatctgattgctcctttattttgctttccaaatttccaattataacttcatgctttttatcttcaagatcttgctgcatttgcaaggctttgctcaatagcatgctctacataaacacaaccttcgtcaaacatgtttttattagaagcaataaaagttaagggacaagtcattcaccttgaagttggagtaaaataaactaccaacgacatgttgtcgtcggtagcggctgatgtctgtttct

SEQ ID NO: 31860 - DNA, 344 bp, Zea mays
acgcaagcatgcacaccgacggagagagccctatgttgtatattgacccagaccctaacaagcaaggactgtgccatccatatttgtacaagactacgcctgatcggcggacctaggaaggtaacctgaacctttccatgcgcgacgccttctaaaacatactgagcatagaaagcgcacggccgtgagtgcttatgcaaaggagttggtggttgagctttgcaagtgggggcaaaaagaccagaataggcacactcaaagcatgggataggcgtgcgagtccgctttggctcgtatagagggagagctctctttggcacaaaagcattgtatccaataccaca

SEQ ID NO: 31861 - DNA, 307 bp, Zea mays
catgggctactctgcggtgccagagccgacccatgttagtcttagcaattaagcaagggtcgagtacagctctatcaaaaactaccaagtatagctgaccctctaacagtcccttaaatgctattgaatcatcacttcttctaaagacaggaacacctacgtcatgaaattgacagtcgtaccccatttgacatagttgagataccaaaagcagattgtattctaaagaatctacaagaaagacgttggaaatggaatggtcaggagagatagctattttacccaaacctttgaccaaaccttggtt

SEQ ID NO: 31862 - DNA, 357 bp, Zea mays
agcttgctaaaagtcttttattcgtttgtgcttggtgaaaatatcggctaactggttgtgtgtgctaacataagaaatttcgataacccccttttgttggtgatctatcaaaaagtgataccagatgtctatgtgcttaatgcggctgtgttcaacgggattatccgccatgcggattgcacttcattgtcacatagaagagagactttgatcaacttgtagccatagtccctaagggtttgccttatctagagtaattatgcacaacaatgtcctacagcaatatactctgcttcggcggtggataaagctactgagttttgtttctttgaagcccaagacaaaaaggacctacct

SEQ ID NO: 31863 - DNA, 338 bp, Zea mays
actcaagcttgggaagatgctgcatcccaacatgtgttattcggcgatgccaaagccaacccatattagtcttagcaattaagcaagtatcgagttcagctttattaaaatcaactaagtatagctgaccctctaatgctcccttaaatgccacagaatcatcatttcttctcaagacagttacacctatatccgtaaaaagacagttgtaatccattttgcataattgagaatctgaaaacaagttataatctaaagaatctacaagaaaaacattggaaaaggaatggtcaggtgatataacaattttaccaagccttttgaccaaaccttgattt

SEQ ID NO: 31864 - DNA, 359 bp, Zea mays
agcttggttaatgagttggttttttatgtatgagtaatttaggctacataatcaagaatgcaatatgtagcgtattttattttcgagacctacaaataatatttttctttgtgtcgaatacgaaaaaatatagaatacaaaatctggtatcactattcatatagagaacataatttagagtatactgctggagaaggagaagatataaaggatgaaatcttttggagtgtgctgtaaaggacatagaatattcttttagtggatgaaatttatgggacattgctggagatagcctaaacatccttacaggacctataggggtgcaagaggctacctgccacgagcaggggcggactcag

SEQ ID NO: 31865 - DNA, 329 bp, Zea mays
tgtgaagacaatcacaagtttattgaataacgatactaaatttaattggtcttcaagatgcaataaagccttcgagcagctgaaggtgttattgaccactactccggtattagctcaaccggacattgaaaaattgtttgatgtatattgtgacgcatcaggcagtggtttaggttgtgtcttgatgcaagaaggccgagttgtagcatacgcctcaagacaattgcgccggcatgagaaacattatccaactcatgacctggaattagctgatgtggttcataccctgaaaatatggcgtcattatctgctggggaatatctgtcata

SEQ ID NO: 31866 - DNA, 334 bp, Zea mays
attttttttttattaccatttaccagcacagctactgcagaccatacccgtgacatggccatttgcgggctggggattggacattattggacctttcaagaaagctcaaggaggatactcttacgtgttggttgtcattgacaaattcaccaaatggattgaatacaaacccattgtttctttgacattcaccaaggcagtggagctcataccagatataatatttaggcttgggataccgaatagcatcataaccgacctgggatccaacctcactatctctgaattctttgatttctgcgaacaatggaagcttccaaataaaatatgcatc

SEQ ID NO: 31867 - DNA, 155 bp, Zea mays
gaatgctgagcaacccccactcagaaatttctgcagtaaagcaaacccctatttacctagcgaacctttgatttgcctgggacgtgacaaagacttcaaggcacactatcctggaaacgaatgtccacaaaccggaaggtttgaccttgttccaa

SEQ ID NO: 31868 - DNA, 263 bp, Zea mays
cccggaactaaatgacgcgctgcactataaattttttattggctgcgggaccaaccacccagtgtcttgcataaactggtgagtcaccttaaagctacaagatgctgaccttacacccttaatgcttgaatatatttttaaacggaacctacatataaagacgtgacccatttgactttgaatacgaagcaatgtatctaggaatcacaaaaaaattgaaaatatgcaggaatacattacccaatcttgacaactgatcatcc

SEQ ID NO: 31869 - DNA, 317 bp, Zea mays
tctaaggggagaacacgtttttttttttttctacatgcaattcgaaaaatatataccttgtgcagcttgtcatgcaagtaaacaggttggaggagcgcatcacaacaagaatgtgttgaccacttcaagacccctggagctgctacatatggatctgtttggacccgtcgcctatctaagcatagggggaagtaagtatggtttagttattgttgatgacttttcccgcttcactagggtattctttttgcaggataagtctgagacccaaggaacccttatgcgctttctaaggagagctcaaaacgagtttgaac

SEQ ID NO: 31870 - DNA, 351 bp, Zea mays
agctttgcttttattgtgttaatatcttctagcatatgaagagcttcgctttgctctctcactctttttagaagtttgagcatgaccgccttatcttcttggcttatatgagcgtagagttgcatgaggcttctttcatcctcctcatcctcatttgtgcttccactgtcattttcattagcaacacaacatatgtgggaatcgagatgggaagacaaaccttttggagaggtggattcatcgtttggtctccaacgttcattttcttcttcttccttcaaagggttagtttcacaaggactaaaggaagttgaagcatcaaatgaactaacatgtttggactcatcaaat

SEQ ID NO: 31871 - DNA, 324 bp, Zea mays
taaccttgtaacgaggataggctacctttgtttctaaggtggaggttccttaagtctctttgaaacatcaagggtaaatgcatcaaatatctataacatgctttcttaagtgcatagtctgtcatgcgcatcacacctatattatgacacattgcacttcacattctctatgatatggatatgttctcattaacctaattatgtgcatttggcatttaaggccaaaataggtattcctctcaaggcacagatttagggggagcaatctatattatataaaactatgattaagcttaattgacatatccttcgatcatgtctctt

SEQ ID NO: 31872 - DNA, 351 bp, Zea mays
  unsure (1)..(351): unsure at all n locations
agcttcagctccatctatattgtggatggctnnngagtctgtccaatttccctcagccttcctggcagcttcctgacttccatgaattgtaataggcccttgtttcgaaggtatcttcatgcataggtatgctggatgaagaattgcttcgaaagcattaagtgtcccacgaccaatgattgcattgtaggggtattccatgtcaacaatatcaaacacaacctgttcagtccttgtgttgtggacaaatccgaaggtcactagcattgtgattttgccaagtgctacgatctgccttcctttgaagccacaaagagggtgtgtagcatcatgaatcttgtcctctggctc

SEQ ID NO: 31873 - DNA, 326 bp, Zea mays
tggggaggcgcttcatacccacatgtgctaagcggggaggccacagccagcccatgcaaggcttagccattaagcatgcaactagaccggcctcttcttttgcgaaatcaactaaataaagattgccgcctaatacacccttaaaagctagtgaaccatcacttcttctaaagacagacacatctacatttgtaaataaacaattatatcccatttgacataattgactgacagatagcaaattatatccaagactctccactaagaatacatttgatataaaatgctcattagaaattgcgattttacctagcccttttaccttg

SEQ ID NO: 31874 - DNA, 357 bp, Zea mays
agcttggatgagtccaatctatctctgcttatattaagagatattgaacactttcttttcttaaaataattaaaaaataaaaaaatttagtgaacctgtcagaacaataggccaattaacagccttcttcgtcaaagccattaagttctgttggaatgtaatgttataaacaatggagaagcacctaggattgagaacatgacggacatcttctaacgatggatcattaatctcaaatccatcagaaagataggtgcagatttctcaatcctagggggtgttaagaaaatctctagtccaatcataaataattaaatactctctttttcaaaatctaggaaacataattaatagggg

SEQ ID NO: 31875 - DNA, 329 bp, Zea mays
tcttcttagcttgtcaattttttttagaagccatttctgcgcaggaaaaaccatcagatggtataaaggctgagcagaaatcaccgctttaaccaaggtttccctacctgcctttgagagtagtctgcctttccatcctgctggccttttattaattttgtcaattagcggttggacatccattctcctaacgtttctgacatgcagaggtagaccaagatacctccccggaaattttgagtatttgcccgggaacacatccatcagatctggccaaagagtttgggaatatcgaatcgggaaaatttcagttttatcaaaattaatct

SEQ ID NO: 31876 - DNA, 348 bp, Zea mays
agctttaacctcccctcactatacctttcccggttccttctaaccataatgaatgtgatatcgaatgtcatacttgatgcatattcactttaatggttcccttgtatgatgtactgtttgtttcccaatttgaatgaatgaatgtatgtatgcttgcaatcgcatagagaacgatccggtcgaagagcctgaagaactcgcaggagaagcccctgagcagcagtcggttggtggaggcaagtgtcccttgacctatctctgtcctattcattctttaattcaccccccccccccccgcattacacatttatacctaaggattgactagcttttgttatccatgtcctt

SEQ ID NO: 31877 - DNA, 314 bp, Zea mays
  unsure (1)..(314): unsure at all n locations
ttcgccaccgngatattcttcttaccgacgccagcccaactacggtcagctcccgtcccctgcttcctcgtttaagctttctcacatacccgtaatgctcatagacccgcccaattgaaataaaccgtcaccaatcaccaggaacacgatgggttagccgtagtacgtgctgtcctcgtgggcagagcgaaatagatcaccaagcatgaaattgattggggggaaatggtccttagaactcgaatttggtttaatccaaagctgggcattaatccttgtcccaatcgaccggcgcagacagctcgccggagctc

SEQ ID NO: 31878 - DNA, 349 bp, Zea mays
agcttcagctccatctatgttatggattgcttttgagtcagtccagtttccctcggcccttctggcagcttcctgacttccatgaatagcaatgggtccttgatccgaaggtatcttcatgcaaaggtaagcaggatgaagaattgcttcgaaagcattgagggtgccacgaccaataattgcattgtaagggtattccatgtcaacaatgtcaaacacaacttgctcggttctggtgttgttgatgaagccgaaggtcactggcatggtgatcttgcccagtgctacaatctgtcttcctccgaagccacaaagagggtgtgtagcatcatgaatcttgtcttctggc

SEQ ID NO: 31879 - DNA, 321 bp, Zea mays
tctgcatttaaattgtgttaccttggttgcgtgattttcctttctagcttataggctatttgatggatttgaaaactaggttgcatatctctgtatggtagagatatcaacacatagtcaaacctgtagctatagttgcacataatatactttatttatttcataggttttgactaggataaaaatatagaccataattttagagaaaaaaataggttgccttatcatcctcttagacgtcactatttctttcagttatgctagacagatggcatatatttttacaaggttgtgggttactgatgcatttaacttggaaaa

SEQ ID NO: 31880 - DNA, 338 bp, Zea mays
  unsure (1)..(338): unsure at all n locations
agcttgatcatcgactcctttaagctcagaaaacatatcacgtcctattcacgacatgcaaccaatcacgaacaggcatgtgaaaaaacaaataaacatactgaaagagaaattgggttaaccatttcctataattaattttggtggntgacgaccaacgcaaacatgtggactaactaatttgtctagaattcatgtattacaggtgcataaggttcaacacaaaccaagaaagaaatcagttagggacacaattttattggagcaaaaaggacttgattgtgctgaaaaatggcgcaccaaactgtccggtgcaccaatgccgtacagatgtcaac

SEQ ID NO: 31881 - DNA, 331 bp, Zea mays
tgtcgtctagtacacccttaaattttttgaaccatcacatcttctaaagacagacacatctacatttgtaaacaaacagttatatcccatattgcataattgactaacagatagcaaattatatccaagagactctactaaaaacacattagatatagagtgctcatttgagattgcaattttacctaacccttttaccttgccttgattcccatcaccgaatattattgaatcttgggaatctttgtttttgacgtaggaggtgaacatcttcttctcccccgtcatatggtttgtgcatccgctgtcaataatccagcttgaacccccg

SEQ ID NO: 31882 - DNA, 357 bp, Zea mays
agcttggtcattttattgcttactgtcccgacaatgatagtgatcaggatcaagggaacaagagggagaaaaagaaaaactataagaaggcaaagggtgaagcgcatctatgcaaggaatgggattcggattgctcctcttccgattccgacaatgagggactcaccgccaccgccttcaacaagtcatccctcttccccaatgagcgtcacacttgccttatggcaagggagaaaaaggtatgtactcgaaactctacttatgcttcttcaagtgaggacgaatctagtgatgaggatgaaatagactattcatgtttatttaagggcctagatagaaccaaggtagataaaatta

SEQ ID NO: 31883 - DNA, 331 bp, Zea mays
ttactccattaaagcaggcgcgttttattctattcgaaactatgccacgtggctatggattacttgcgttgcgttgctccgccactactgcaatagaattaagaacttttttttttaaaatgttcgttcccattacctaacgtgccatagataaagtagctaaaccttgcattattattatggcctacaaaagcattggcatgcatgcatgtttttttccttccttccttattctatgtatcgatccacccacccaggaaaaaagggtacggtgttatgatataggcatactttgatggcatgatgtgatgtcgtccaaaagattagtagt

SEQ ID NO: 31884 - DNA, 356 bp, Zea mays
  unsure (1)..(356): unsure at all n locations
agcttctcctggacaagtgtttcacttaccgttgagagcgaagctaccacatataacaaaagaggagcccctaacgttggtggagttagtgttgttagatctatcaagtattgcttcagctcttcgaaggctctctgctgaactggtccccattgaaaaacttcggttgacttcagtacttcgaaaaatggcaaatttctctctgctgatctagatatgaatctgttgagagatgccagtcttcctgtcaatctttgagctcccttctttgtacttggtggttccattcaaaggatagcttcgattttgtttggattaacctcaattccttntgttgaaactaggcaaccaagaaa

SEQ ID NO: 31885 - DNA, 330 bp, Zea mays
tgaagaccacttggtgatgtggatctttttctctatggtacggatccatctaagtcgaacggtggtcgattcagataattggtctgtaggcctatcaatcgatccggtcataaccgatcgcattggagccggtgtaggtcgatatagactgagcgttggatgatctggtcgataccgatataaagcaattgatactagccaccatttacgttttacaatatgacatgttataattggtccatacatgtgtcatatcagccatcatctacatgttttttaatagattaaagtctaaaaataaaaataaaaacaaaaaatgaattatgtact

SEQ ID NO: 31886 - DNA, 354 bp, Zea mays
agctttgaaggaggaacagctaaaataatggcgcctataaactgcgaagcccacttctttgcaagagagcgaaaaccggaaaacccggtcagatagctggagtggcctgaaaagctttgcagaaccgccaatgaaggattgaagcaggagacccacagattcttcacacaagcgtgaggaacatctaccgaaggaaacgacaagaaggaactcatggtggtcaaatttgcccgggagagggttaatcgaacgattaaacttgcgaaaaatccaatcttcaaaatgaaggccgacagaaaaatccaacaaaagactccccattactccaaagcacacggagagacggagcgcaag

SEQ ID NO: 31887 - DNA, 329 bp, Zea mays
cttcaaaaggtgccatctttagactgtacttttttctgctattataagaaaactctgccaaagaaagacacttgtcccaatcctttccgtagtgcagtacacatgccctcaacatatcttccaaaatctggtttaccctttcggtctggccatctgtttgaggatggtatgctgagcttcatattacatgggtcccaagtgattcctgcaattgttcccaaaatcgtgccacaaatggtgctcctctgtctgagactatagtccttggtatcccatgcagacgaactatctggtcaatgtagatctctgcatacttctctgtccggtgg

SEQ ID NO: 31888 - DNA, 356 bp, Zea mays
agcttcttgatgaaggtcacttcttatacttctgcttctgggacgagtgccacaggcagatattctccaccctcttcggcattccccagggccctatgaaccctgcaccgcaacccagcgaggtcgtttcagagctcaacgaagaaataacagtaccagacaatgtcacagatcaggaacaaggaaaatcaggcctgccctgatcaagatcagttttcaggatcaacagtatagatacaagacattactactaaacacaacacctcatatcgacgggacaggcttttcgtcgctgcttgtggactgagctgctcctcttgcggagtcttgaaggatgaaggcaaagtattggatag

SEQ ID NO: 31889 - DNA, 332 bp, Zea mays
ttctcgactaagtcggggacagggttctcatggacgggtgaaagtacgcgtaagcggcaaggccgaccgagccgagggattcccacgcctctgggatacggatacctcactcgtcccttccgcgagaagcaactctcgctcacacaaacatccctgttaccgacatagtccagatgctcgaaacaagaggaaaaaagacgcagcttctcaagcgcggcgagggtgtgttttctggcctcggcggccgcagaaggcacacgctacaagacggtctgatcctgcaggctcgggtcttcacgctgaagggagccgtagcaccctcggcatcgacg

SEQ ID NO: 31890 - DNA, 348 bp, Zea mays
ggctttataaggattgtttttcctaacccctctgacggggcctgatgcggggagaaaagaccttacaaaaacctgtctttattcacgaggaagatgacgggggtgcttttatgggcaacaaactccctgaatcctatagccggcacaagagctatgccgacaacaggagaagggaactcatctttcaagaaggagattatgtgtatctcacagtttccccaacgaaaggtattaaaagatttcccgcaaaacgaaagttatccccgcgctacgtggacccctaccctattatcggcagagtagggccagcagcttacctgcttcagttaccagaatcaatgtcagata

SEQ ID NO: 31891 - DNA, 330 bp, Zea mays
aagcttagtgaatacgcattacctttttattttcaccgggcaatttaaaaagggttttgctggttgggctagggtgacactaatttccactattaatttcccctttttcattttctatttatgaatcctaacgcgggtttgaactacaacagtggtttaactttttccaaaaattctgtaaaaattacagtgggttaccattggccactatagtctgttctatgaatttgaggtccagaataaaaagagtatgccttggacaaaaataacaaaagttgggcaaaggggtcactttgcactacaactcttaactaggggtgggttctgtcc

SEQ ID NO: 31892 - DNA, 369 bp, Zea mays
  unsure (1)..(369): unsure at all n locations
ggaacacnagagccgacccgcaggcangcaagcaatatcaaaaggttgttttatgtgcctgcctcaatggaccgatcaagggaacaggctatgttgaacaacctcccttcttagagaacagggagtagcctaaccatgtttataagctctctaaggcgctttatgggctcaagcaagccccaaaagcatggtatgaatgcccaagagaatttcttattgctaatggcttgaaagtcagcaaggcctatcctacactctatactaaaactctcgaaaatgacttgcttgtacgcccaaattatggagaagatattatattagggtctacataacaaatctacatgtgaagagtggactaggatcatcaca

SEQ ID NO: 31893 - DNA, 352 bp, Zea mays
agctttaaatattatttataatccttgggtaaagattggtatgatttggacaatgtttggtgcctaaacccccaaaaccctaatcttctagtgaagtctgccctaggaacttcagttctaactccaaaaaccttagtttcctggagtcccgtgaagaaaaattgtattcaagacctaagataatatacttttattatctttgcattttcataagcattacatgagcattcatgggtatatatgtggtatatagaaaccgaagaagaagtagaagttgaagaagcaagagctacaccaccaccacctgaagacccaccggccgagaactgcttttactttgacatttgtggag

SEQ ID NO: 31894 - DNA, 174 bp, Zea mays
cggaggaaacaaagaccccccatgccacaatgaccagctgaagcgtccaaacttggacccgcactaagctgaatacaaaaatattgcagaacacatcggcactagagaataagtgcatgaatctctgggcttcagaggatttccaacaatgaaggagcggactatgccgaagcc

SEQ ID NO: 31895 - DNA, 325 bp, Zea mays
cttgagaaaggaaaaaccgcagcattttgttaatctcaataagaaaaatgttcctaaagatggagaaatcaacatgagcttggaaaaaggtaaagattcaattaatcatgttgtttgcactgaccctctctccatgtcattcaagtacaaaaagggaaaaggaaaaaggaggtgtttcaagtgcaagaagttaggccacctcatcgcgtcttgtccgtacaaagacaagaatgaagggacaaggagttgttttggatgcaacaataaggaccacacgatcacttcatgtccggtcatgaggaatcaaggatgtgcatcctccaag

SEQ ID NO: 31896 - DNA, 350 bp, Zea mays
agcttctaaagggagataattgtttatgtctaacaaatgtaactttcgaaaaagatagaccttgtgcagcttgtcaagcaggtaaacaagtggaaagtgctcatcacatcaagaatgtgatgactacatatagacctctggagctattgcatatggacctcttcggacccgtcgcctacctcaacatcgggggaagtaagtatggtcttgttattggtgatgatttttcccgcttcacttgggtattctttttgcaggataaatctgaaacccaagggaccctcaagcgctttctaaagagagctcaaaatgaatttgagctcaaggtgaagaagataagaagcgacaac

SEQ ID NO: 31897 - DNA, 326 bp, Zea mays
tcttaagggagagcacatttttttatttacaaatgttcattttgagaaagacaggatttgtaacgcatgccaagctgggaaacaagttggtgctcaccattcacacaagaacattatgacgaccgacaggccactggagctcctacatatggatctattcggcccgattgcttacataagcattggggggagtaagtactgtctaattattgtggatgattattctcgcttcacttgggtgttctttttgcaggaaaaatcttacacccaagagaccttaaagggattcttgagacgggctcaaaacgagttcggcttaaggatca

SEQ ID NO: 31898 - DNA, 341 bp, Zea mays
cagctagcggtccatgatgcctgctggcaagagaagacctcttaatgctgccttgaactctccccattccaccatgtgatcaaccggttgcatagcgagaaagtgatcccaccatgttcgtgcgggtccgtgaagctgctgggtggcgaaacgaaccttggccacatctgaacaaactctattaagcagtgggaatttggattccaccaccctgagccatacatcagcatcaagtggatcctctgcccgagtgaacaatggcggctgagtgctaaggaactcctgataggtggccgctgctgggggacgctgatggtgatcaccaccaccataatgctttg

SEQ ID NO: 31899 - DNA, 324 bp, Zea mays
  unsure (1)..(324): unsure at all n locations
tgacaacatcattttacttcttttataaaanntctgagatcaagtatatttaattcattcctcaacatgcaaaagcgggttttatcaagtggcttagtgaaaatatctgttaattgatcttccgaccttactccttctaaaatggtatctcctttcgcaacatgatctctaaggaagtgatgacggatatcaatgtgcttggtgcgagagtgttgtacaggattattatcaattttaacaacactctcgttgtcacacaacaaaggcaccttttctagaactatgccatagtctacaagagttcgtntcatatataaaatttgt

SEQ ID NO: 31900 - DNA, 330 bp, Zea mays
tcagcttcggcgacagtttcggtttttaacttatgcatcattttcaccttcgtcatcctacataaatcaaggaatcgtgagtaaaaatcaagtgcaaagaaaaaggtaagtacgaagtattatttcttactggttcaagatgacttcgggcttcgtctccagctttctctcgaccgccctttgtccataccatttttataaatctattggagatacttcgggcgaggtcgggcatatcatccaggattgatgaagataaggtgaaattgggcctgttgacaacctttccatgttcgcagccggctttcagaaatgcagcaacggtaccct

SEQ ID NO: 31901 - DNA, 355 bp, Zea mays
agcttattattgctattagatgctattctaaataacctttaggacagaacccacccgtaattaagagatgtagtgtaagtggctcattttacacaactcttgttatttttgtctaaagcaaaaccttcacatgtagagcctcaaattcttaaaacaggctagaatagcaaatggaaacccactgtaatttttatggaatttttggaaaatagtaacccactgtcatagttcaaacctaccctagaagccataagtagaagataaagaaaaggaaaagtgaataacaggaaattagtgtcatcctaaaaactctttatatcttgtgcactgaggtatacaaaagcaatacatattc

SEQ ID NO: 31902 - DNA, 334 bp, Zea mays
  unsure (1)..(334): unsure at all n locations
taaatntgtatacttgactcaattgtttttattcaaatncaaaatctaaattcaaaataattaggaataaaataaaacagaaaataaaacataaaagaaaaaggaaagggaagaaggcttacctgggcttcggaacctgctttcggcccaccaagaaaacatctcccgctcggcccagcatcaacgcaggcgcgccgaccggtgggcccggcacgtcagtctcacgttcacacacctgcacgctcgacctctgcttctttgggcccgcccgtcagcgacgatcccatcttcttcctcaacctcccgcgaacttcacgctgctaccccgcatggg

SEQ ID NO: 31903 - DNA, 365 bp, Zea mays
gcagcatgcaagcttcgaaagggagaacacttttattgttttactaacgcgcatatcgaaaaagatagaccttgtgcagcttgtcaagcaggtaaacaagtgggagtagcgcatcacagctagaatgtgatgaccacttcaagacccctggagttactacatatggacctcttcggacccgtcgcctatctaagcataggaggaagtaagtatggtctagttattgctgatgacttttcccgcttcacttgggtattctttttgcaggataaatctgaaacccaagggaccctcaagcgcttcctaaggagagctcaaaatgagtttgagctcaaggtgaaaaagataacgagcgacaacgggtc

SEQ ID NO: 31904 - DNA, 285 bp, Zea mays
gtatgggtgatgcaatggttagaaatggccgtattttgagaacttgtcgacgaccacatgaacacagtcggcgtggccagatttatgcaggcctgtgacgaaatccatactgatggtgtgccaagctgctggtggaatttcaaggggctgcaacaggcctgggtagcgagagcggtctggtttgacttgttgacaagtggtacaagttttgacaaaagaatcaacactggatttcataccatgccataagaataactgtcggatacggcgaagagttactggtat

SEQ ID NO: 31905 - DNA, 359 bp, Zea mays
agcttgtgaagggtcttcattccccttgtgctaagcagcgatgccacagccagcccatgctagtcttaacaattaagcatgcatctagaccggcctcctcttttgcaaaatcaactaagtaaagtttgccgtctaatacacccttaaaagctagtgaaccatcacttcttctaaagacagacacatctacatttgtgaatagacaattatatcccatattgcataattgactaacagataacaaattatatccaagagactcaactaaaaacacattagatatagagtgctcggatgaaatagcaattttacctaacccttttaccttgccttgattcccatcaccgaatattattgaa

SEQ ID NO: 31906 - DNA, 326 bp, Zea mays
  unsure (1)..(326): unsure at all n locations
tntaaagggagaacacaacnnaatactttcaaatgtacatattgagaaagacaggatttgtagcgcatgtcaggcagggaaacaagatggtgtgcatcatccacacaagaacatcatgacgactgacagggcactcgagctcctacacatggatctatttggcccgattgcttacataagcatcggcgggagtaagaactgtctagttattgtggatgactattctcgcttcacttgggtattatttttgcaggaaaaatctcatacccaagagacctttaagggattcttgagacacgctcataatgaactcagcttaaggatca

SEQ ID NO: 31907 - DNA, 358 bp, Zea mays
  unsure (1)..(358): unsure at all n locations
tgcagcatgaagctnaaactaaacaagtggtatttttttaaccgcgcacctttatagcttatctatagaccagtggataggtttgaaacctacgttgcataactctctgcggtatagatgataacacttagtcaaaatcatagttgcacataagataacttagatctctacatatatcttgactacgagaaaaatagagacagtctattatagaaaaaaatagtttgcctaatttaccctcccatttatatatcatgtatcccgtgcttgtttggttgcatatgcatcgaaagggattggaggggattaaattcctccatagtcaaaattgaattgaagaagatttacggcatgtttg

SEQ ID NO: 31908 - DNA, 250 bp, Zea mays
cattttcccattggccttgttactgaagcatatcataccattcttgatcatcagataccaatttgcctaggctaatgtttctaaacataaggcttcagtcgaacctgagaatcaccttctacacacccctcaaaaatccaaaccttgtccttttttttattgcggaacatgtgatctaattgagagcacccaggagaaacaatcatggtgacgaactatatatggaaaagggaaatcatgtaaatcatta

SEQ ID NO: 31909 - DNA, 334 bp, Zea mays
atccttcacaagctagctaccggccgggacctttatctccataggaggaaccttactggaacactaccccacttaaaaagaaagagggtagatctccggaatcacggggatccgaactccttgagggaccacaaaacaagggtgttaccgggccttcctcagctaatgctgcttgagcacactgcagagagatgactgacacagggatgattctgggacaaccatcaccttaacttctcttcactatcttcttttcactgaccctttcttactctttgctcttcccactggaggattctatcatagaggattaccagcatacactagatgaaac

SEQ ID NO: 31910 - DNA, 295 bp, Zea mays
ttcgccatataccaacggccttcttcaccataacagcattggctagccactctgggtttttgacctatatgatagctccagcgccaaaaaaccacttaactgcattccaagacccttcagttttgccatcacacattttccaaagcccttggtttataggcctgaaagaaggatacacattgaactaatgctcaatgacatctttgttgacaccactgagaacaatggcgggacaatcggacacatcactgccgttgcatgtaaatcttaccctatcttaatttgctcattcaga

SEQ ID NO: 31911 - DNA, 347 bp, Zea mays
  unsure (1)..(347): unsure at all n locations
acataaagcccctcttatttattgttaaccttgngaaggacaaacgccctatgcctcaagataatgagggttacattcaataccccgccggctatccctgagcacaaaattaaaaaaactcactctaggaagcctcactctggctctcatcatgctattatgtataagagcgaggcatctagttctaggcaatcaacacatgatgcatcaaacgaacctaatatttcattcaaaacctttgacgcatcttatgtgcttactaacaaatcaggcaaagcacttgccaaatatgttgggggcaaacacaaaggggcaaagacttgcggttgggtacccaaagggcttgt

SEQ ID NO: 31912 - DNA, 330 bp, Zea mays
aataatcaagcatggaagagggcgaccttacatggttttttcggcgaagccagagccatcccatattggtcttagcaatcaagcaagattcgagcccatctctataggaatcgactaagtatagccgaccctctaatactcccttaaatgctactgaaaaatcactttttctgaagacaggaacacctatatccgcacaaagacagttgggacccattttgggaaattgagaaagacaaagtaaattgtgatctaaagaaattagaagacaaacattggaaaaggaatggtaaggtgatataacaattttaccacatcctttgggcaaac

SEQ ID NO: 31913 - DNA, 349 bp, Zea mays
agcttggaggcatccactggtttcctacttgctggggtagactctttcttcttttcttctgctgctttgaatgcaacgggttgcaccttgggtgtggaggtggccccttgctccaagttgacaatatgtttggagtctttgatcataagtttaaagctcacaaacttgccacttacctcctcgagagacaactatttatatctaggatctccacggattagttgcacttgagtgggattacgaaaacaagagaccttagaataaccttgaccatttcatgggcatcccacttggtgctcccgaggttgcggacttggttgacattgtcttgagccagttgtacattgcc

SEQ ID NO: 31914 - DNA, 351 bp, Zea mays
agctacactcacaagctccatgtcttcctcattgcgacgtccaacatcgacaccctacattttgcggagctagtggccatcaccagcggcgacacccttcccgtccacctccccgttagggcatttgtttattaatatgtcctacccgattaatcagagtacatcgtccattgactagctcgtaaccccggtcactctaatcatgttgatttgcatattacactgtggtttgcaagttgtaaaacgtatgcatggagcagtgactagctcattctactgcgagttgctactctttttcattgatgtgaaaccaattgattgttatggtatttaaaagtgtccctattgttc

SEQ ID NO: 31915 - DNA, 319 bp, Zea mays
ccaattctacccaaacgcattttttaattataacagaacctaagggaaaggcaaaagcgcccatgggccattgcaataaaaggcttggtgataaaacgcccaacacaagtgactaaggcgtactaagaggtcgagagatgccaatcaaagaatcaagggatgacactggccttagaaaatcgccaagggtactaacatattcctctaagggctaggaacctctgataatcgaaataaattacatcggagaagtttggctaagtccaactaaacttgcgctagccttccgtgcaccagactgttcggtgtgcaccggaca

SEQ ID NO: 31916 - DNA, 287 bp, Zea mays
agcttgtactccttgttgtatagctcctcccggacgacctgctcttctcctgtgggggggggggggagttataaataccaacaccaaactcccccaaaatcatacctcaaaaaacacaccgaaaaaacacccaaccaaccacccaaagcaacaaatcaactcaactataaccctcatcaacacaatatcacacaaccccacacaaaaaaacaacaagcctaaaaaccctactcatataactaactccaaacccataccaaaccaaacttacaatccacaaaacacta

SEQ ID NO: 31917 - DNA, 325 bp, Zea mays
tagagtatggagacgaggttttttatttatataaagcaactcctacagatgaatatcccatgcccatatccgacacattaatcaataatgcatcatgaaatagaattattagcttccttgatggaaatgccggatataatcagattttcatggccgaagaagatgcgtccaaaacggcctttatatgtccaggcttcattggtttttttgaatgggttgtcatgacattcagtcttaaaaatgctggtgctacctatcatacggctatgaatctgatctttcatgaaatgttatgaaacactgtggaagctacattgatgatatt

SEQ ID NO: 31918 - DNA, 362 bp, Zea mays
cccgcacgcatgcaagcctgcattacaatattcatcaattccgggtgagcatcgcgcaaaagactttctgggcaaaattgatatatacacataatgaatatcgataatatatgacaaatataactcaacaatgcgtcactagatttctgtttctgaaagcttctttactacttttgcgtccatgcatcaacacattagataaattatgtacttatgtatgacgagtttatataaatttaaataccaaaaccatattgccattgacgagcttcacaaacttataaatcaatctttagatgtcatagatcaacaaattacattactgaacaaacaccgacttgaagaacacaataatttggctt

SEQ ID NO: 31919 - DNA, 323 bp, Zea mays
tgagatgatatggacattttttttttaaaaaccaaataactagcctcctagggataagttacttaatactaatagaataccaaattaggaaaccctagtaattagtttgtacagtgaaggaaagttgtattcaagatacaacttagtatgtttctattgtgtaactgcatattcatgacatcgcataagcattcatgtacatgtattgtcatgtatagaacacgaggaagaaactgtggtagaagaagaggttgtctcccgtgctgaaaatcctccagcaaagaacaacttttacttcgacatctgtggtgtggaccctgaac

SEQ ID NO: 31920 - DNA, 354 bp, Zea mays
cggaacttagatcacctgagcagcaagctagccacaatgttctttaacatcagcaaggtttacaataccatcatctccttaaaactttgccgcaaattcgtcagcagttgataacgacttcgtcaaaattctttcggcatgtaataatttccgctggttcttttgcctctggctcgatcaatgactcgaagggctctgggggaggagatagttcggctgcggtagaaaacgtaaataagtttgaagtcacaaaattaaaaagtaaagttaaaagctattaagcaatacctatccgcctttcgagtttcgcagcttattcagctacccttcgtgcttcccttgaatcgtgagtat

SEQ ID NO: 31921 - DNA, 239 bp, Zea mays
gtcccaaaaagtgaacagagggaaaagtccacccaccttgacctggacagaggcagagaaaaaggacctgaaggagaggaatattgaaaaagaactcccccgggataagaaagggtggaagagtgccattcacgtgccagaaccttgaaatatagtcccgcttttcctccttaatcgtttgaccttttcttgtgcccatttagaccatgctggtacttgcgggttttatctcttttatg

SEQ ID NO: 31922 - DNA, 358 bp, Zea mays
agcttgtgaagggtcttcattcccacatgtgctaagcggcgatgccacagccagcccatgctagtcttagctattaagcatgcatctagaccggcctcttcttttgcaaaatcaactaaataaagtttgccgtctaatacacccttaaaagctagtgaaccatcacttcttctaaagacagacacatctacatttgtaaatagacagttatatcccatattgcataattgactcacagatagcagattatatccaagagactcaactaaaaacacattagatatggagtgctcattagaaattgcaattttacctaaaccttttaccttgccttgattcccatcaccgaatataattg

SEQ ID NO: 31923 - DNA, 330 bp, Zea mays
tctaaagggagaacacgtgatatgttttacttatgtacaaatcgaaaaagatagaccttgtgcagcttgtcaagcaggtaaacaagtgggaggagcgcatcacagcaagaatgtgatgaccacttcaagacccctggagctgctgcatatggacctcttcggacccgtcgcctatctgagcatagggggaagtaagtatggtctagttattgtcgatgacttttcccgcttcacttgggtgttctttttgcaggataagtctgaaacccaagggaccctcaagcgcttccttaggagagctcaaaatgagtttgagctcaaggtgaagaa

SEQ ID NO: 31924 - DNA, 396 bp, Zea mays
accccaacgaaagcaaacgccgcgcagaactcccaacaggaacaattgtaaacaaaaaacaaaacacgccgggctgaaaacgcacgcccacgagaaagcacatcaacgcggaacaaacaaaaggcaacgccaaggcccaaagaagccctagaccaaacaggtaacggaccagaaacacacacgggcgagaccgaaccccagccgtagcccgagggagccaaagcccccatgaacgaacaaaacacgcaactcgggcataaccttgtgccagaaagccgaaccctggttcctagccaccaccccctgctcctcacgtacgaagcagaacaccccacacggatcccacaaaatgcgcacgggaagaagtaacaaagtccaaacaacaaaacctgtgaa

SEQ ID NO: 31925 - DNA, 330 bp, Zea mays
ttaccaaatggacgtgaagagagtttttttttaaggaccaatcaaggaacagggctatgtttagcaaccacccagctttgaagatagtgagtaccctaaccatgtctataaactctctaaggcgctttatgggctcaagcaagccccaagagcatggtatgaatgcctaagagattttcttatcgctaatggcttcaaagtgagaaagtctgatcctactctctttactaaaacaattgagaatgatttttttgtatgccaaatttatgttgatgatctcatatatgggtcgactaacaaatctatttatgaagagcttactaggatcat

SEQ ID NO: 31926 - DNA, 305 bp, Zea mays
ggatttgaggattgccatgaggaggaaacaaaaaatgaaattcaacaccttctccaaaagccttaaccacgcctccacaaaaggtaacatccaaggtaatgatcaagccacacttcacattaagaggtgtagtgaatgctttgaaatggggcacttgattaggtcatgtccctatattaatggcttgattattaacaaggatgatagactttgttttaaatgctctaagaaaggacacttgcttagatcttgtccccatttaaaacaaaaaggcatagggttagaaaagaaagttcttactaacc

SEQ ID NO: 31927 - DNA, 312 bp, Zea mays
cggcgtaaaagatgtttatgcatgtgtccccgtccatcaggaccatggtgagcctgacgtcgccgacaacggggtcaacgactagcgggtatttccccgggctcggcacatggtcggggtggtcggcccggtcgaaagagatgggcttgtcggaccagtctaggtagactggcgccgccaccttcaccgagcagacctcccggcgctcttgcttgcggagacgagccgaggtgttcgccgcatgccctccataaatcatgaaccagtcgcagacctcggggaacccccctgctgggtgatcttcgaacttgt

SEQ ID NO: 31928 - DNA, 360 bp, Zea mays
cagctgcagcttcgcttcttcatctcttttcttgggaatactctgctggctaagtattcttggacgaaatccctaattccaatatgttcaaacacaactttaaactcgtacacagcaatctaagcatgatgcccccgacgtcatgttgcactgaggcctattcagcccgaaggttatctccagcgggctctgaactagcttctcctttttctcatcaatcttaacataaaaccattcagatttccaaccggtcggccatttagtgcgatagctgaccactggtgtcttcatgtctttgcgataagcacaattatagtagccgaagttctcatgcaggccaccttctctagccttcatctg

SEQ ID NO: 31929 - DNA, 296 bp, Zea mays
aagctatacctcgaatgccaaacgccagcatatttttgtgagacgttacccttcgaggggtaagacttccgaaagtacactccgtactcagggattacaaacccaaggataataggcgacgaaaatgctgagttccgtaggttctgatccaaggcggttctcaagctggaggaggagaactaaaaattacctagggaaggtgtctagccttcccatgatgtaataagtctaagcactcaggacccgttatgtaataatcaactcatttctgagcactcaggacattttaattatga

SEQ ID NO: 31930 - DNA, 356 bp, Zea mays
agcttcttgaccacctcaacgttcaccaagttgttgcagctaccaccgtcaatgatggtatgtacacggcagtccttgacgatgaggaacatgttgaagaggttgtggcaatgtctgttgtcgtcgtcactagccgtggcactcaaagctcgttgcacaatcaaggccttataggtctcggtcgctgttgtaccaagaacctcttcaaccatcataagtctctgcaatgttagctccaacagtatcttcatcttccacatcagaagcactaacatacccaccatcaccagtagcaatgtatgcccgtttgctggggcaatctcgctgaatatggccaagtccctggcagcggtggc

SEQ ID NO: 31931 - DNA, 279 bp, Zea mays
ataatcaatctgacaaatataaatcttaattaaatctaggtatgaaaactgtttgaaaaaccaagaaatgattattctaacttagggtccgaagggagctgtggacaaaattattataaaaaatcataaacggctaatcaaagccttgcagttgatagttctatttttaaatgatttattgagaatgggcttttattcaatagtttgatacatggcctcgatttcacatgataaaatttctcttggacaggtagtgtagtaggataaaatatgctatgt

SEQ ID NO: 31932 - DNA, 380 bp, Zea mays
gggatacaatagagacgacctgctagcatgctaactttattcaatggtatgtttttagcgcctacctcaatggaccaatcaaggaaaaagtctatgttgagcaacctcccggctttgaaaatagtgagtaccctaaccatgtccataaactctctaaggcgctttatgggctcaagcaagctccaagagcatggtatgaatgccttatagatttccttatcactaatggatccaaagtcggaaaggccgatcctactttattcactaaaactcttgaaaatgacttgatcgtatgccatatctatgttgatgatattatattagggtctactaatgagtttacatgtgaaaaatttagtccgatcactgacacaaaaatt

SEQ ID NO: 31933 - DNA, 327 bp, Zea mays
tcatcaaatggacgtgaatagtttctttctcaatggaccaatcaaggaagaagtatatgttgagcaacctcccggctttgaagatagtgagtaccctaaccatgtctataaactctctaaggccttgttcgtttacatcagattgcacccggaatcgttccagctaatcaaaatttatataaattagagaagcaatccggctaggaattattccgatccaccaatccgacacaaacgaacaaagcctaaggcgctttatgggctcaagcaagccccaagagcatggtatgaatgcctaagagattttcttatcgctaatggcttcaa

SEQ ID NO: 31934 - DNA, 355 bp, Zea mays
agcttttgtaaaacaggtgatcaaggaaggtaatcaaattcaacgaaggtaatgcatgaatggttttatcaagcaactcctatcacctaatgcagcaatcaagtgagaaagattttgaaatagcaagggaggtggcaaatgcaccggggcttgccttcgtttacaggtgattcaggctcggatccacaaatgtcgaagtagaaactattcccggcctgagtgtccaaaggtggttgcacttgctcttcagtgacttctgtctcttcttcacgttctaatcataaccattcacaagtataagaatggatgccatgggaagctcatgaggatgcaaagatagcataaacttgttatt

SEQ ID NO: 31935 - DNA, 325 bp, Zea mays
tgcatgaagcgggggaccctattttctctgtcgtaacgggaggaccttggagtgtgttggtgaaaactcagtccgcgacggctgaggacgcaagtggggagagtcgcatttaaaaagggggcgacccccttggatggcagccatgccttcgcactcccctcatgcattgcgcccttccacctttcaagcccccagatggggagcgcccgcgttgctttcatcttgctgctgttggaggagcacaacttcgcggaagttggtacctttcaaccatcgctcggcttcaaggattttcatcaggcagcctggctgcattccctcgccg

SEQ ID NO: 31936 - DNA, 350 bp, Zea mays
agcttgtaaagggagaacattttataggtttaactaacgtgcaattcgaaaaagatagaccttgtgcagcttgacaagcaggtaaacaagtgggaggagcacatcacagcaagaatgtgatgaccacatcaagacccctggagctgctgcacatggacctcttcggacccgtcgcctatctgagcataggaggaagtaagtatggtctaattattgttgatgacttttcccgcttcacttgggtgttctttttgcaggataagtctgaaacccaagggaccctcaagcgctttctcaggagagctcaaaatgagtttgaactcaaggtgaagaagataaggagcgacaac

SEQ ID NO: 31937 - DNA, 269 bp, Zea mays
gtttgtagcgcatgccaagcagggaaacaagttggcactcatcatccacataagaacataatgacgaccgacaggccactagagctcctacacatggatctattcggcccgattgcttacataagcatcggcgggagtaagtactgacttgttattgtggatgattattctcgctacacttgggtattctttttgcaggaaaaatctcaaacccaatagaccttaaagggattcttgagacgggctcaaaatgagatcggcttaaggat

SEQ ID NO: 31938 - DNA, 355 bp, Zea mays
agcttttacagaagaataatgatccttttgcagccaagaagtctgctgggccaaaaaggcagaggattattattgtaattgaaggtattgaagaaacgccaccgctggcctcaacatcaaagatgacacctgctgccgaagatgctacagctaccgaagctacaactgccgaagctacaactgtcgaagctgcaacggccgaagatacagatctggagagcacattttctgatattgataaaaggctattgaatatggccgcagaagaagccgctgcagctgccgaagaaaccctggccatagtgcctgtaaaaggggaggagatcaccgaagatattttcgatgaaaaggactt

SEQ ID NO: 31939 - DNA, 295 bp, Zea mays
cgcggcccacacgaagagaggtagccctaaaaacgcctcgggagcaagatgatgaagatagacttcgaagaatttcaacacctccacgacgaagctgctcaaggggaatcgcaaaccagctttcaaaaagctccgatacaccacaacttcattttcttcagggggtggacaagatttatccccttcggccgccctcacaatggacaggtcccggaaataccttcctttcatattaacaagacgattctctttgatagttgaattaccataaactgaatggcttggacgccagggg

SEQ ID NO: 31940 - DNA, 354 bp, Zea mays
agcttcggaagacacaacttctttttcttcgggagcaggaacgaccctgtctacatcagccctcacgatagacatatctcgaaaataccttcctctcatattatcaagatgactctatttgatagttgatttctcgaagactgcatgacttggtcgccagggccgatcttcagagtcttcgcctccactctccatatcatagatgtcgctatcattagtatcttcagacaagccttccagtatctctttagtaatcttctctgtatttggtttttctattgattcaacaaatccagcagtcttctcctcaaggagcttctcctctacggttagcttcgtctcagcaattgtctt

SEQ ID NO: 31941 - DNA, 262 bp, Zea mays
gtcaattcaggttaagcagtatacaagtgaaccatagaatcagtaatgcacttacatttagctgtgacacaaagctgttgtagtatttctggtcgtccttgtaatctttccaacgagttaggataggcatggtttcccgaataatgatgtcagcctctgatgcaaacttggcagcttgaacaggttcatgtggcctttttttgccttcctcaacagctatgggcagtctcctttgcataactttagtcatcctgtccaattg

SEQ ID NO: 31942 - DNA, 317 bp, Zea mays
acttgatggtaacgctttatttttttttatattaaccaacgggcattatgagatataatgaaatacttccttcgaggtaacgccggatataatcagatttacatggccgaaaaaaatgcgcttaacactacctttatatgtccacgcttcattggtttatttgaatgggtcgccatgacattccgacttaaaaatggtggagctacttatcatagggctatgaacttgatcttccatgagtcattatgaaacactgtggaagtctacattgatgatattgtacacaaatcggctgaatttaattcttatatatctga

SEQ ID NO: 31943 - DNA, 340 bp, Zea mays
  unsure (1)..(340): unsure at all n locations
aacataatgtatattttcttttaacaacaagnacaagaagtctgtgggcgagatggtcgttttatccccctaaggtgcaaatactaccgctcattttatattctatatagcatgtgatattaaaatatttaaatattgagccaagtctaaataattttttaaagatttcaactcctccctgggcgtgaagtcatgtgggcgtgaagccatggaggcatagacagttgttgctcctgcgccagaaaggggaggaaagggtttacgcctccaaagtaacaacaaggcgtgagggggtatgaaaggcttcacgccttcaagatttcagacgattccttgccaa

SEQ ID NO: 31944 - DNA, 71 bp, Zea mays
ctaggggggacgggaggttttttttttttttacacgcccgggaggagcggtggtggaaaagcgtgttggca

SEQ ID NO: 31945 - DNA, 354 bp, Zea mays
agcttgtctgttagaaccgtttgattctgcagtttgaaacctgcttcggaggaagaaaattttaaagtttcacaagttcataattgaatggccagagtccgctctaccgccagggttgagcgcgagggagaagaaactgaagcttcggagactctccccatctccgaagccatgcaacgatcgggtctagtgacttcgggaaagatccctcatgatgatacagaacaagcaatcgctgaaggagaggaagaagatattgaggaaactgattccgaagatgattaccgcattgccatgccaagcaagccgagccacttggacttcggaaaatctactgtttcgaagactgatcta

SEQ ID NO: 31946 - DNA, 337 bp, Zea mays
ctcaagcttctgccatgccgtgatagtcccttgtttgttagaagagtaccatgtgtaggccacacttcggactgccatgatgaaggacttcgccatgaccgcggtattgcccctgtacgaagatatagttgcttcgtagctcatcaggaattgcttcagatctgagtgcccatcatacatggggagctgaggtggcttgtatgatgggggccatggggtagcctgcagttctgctgatagaggagaagcatcatcaaaagaaaaatttccatgatggaaatcgtcataccaatcatcatcattgtaggaattatcttgacgaagttctcttgtggac

SEQ ID NO: 31947 - DNA, 356 bp, Zea mays
agcttgcgctatttattaattggtacattgactttcgccatgcacccccaagtgcgcaagtatgaaagtgatggttttctcccaacccactctcataaggggttttctcttctttgcccataggaattctattcagaacatgacatgaagtcaggactgcctcccctcaccatgccttagataaaccacaagtgtctaacatggcattcaccaggtcagtcaacgtacggtttttcctttcagcaatcccgtttgactcgggtgaatagggaggagtcctctcatgaataatgccatgttctgcacagaaatcatcaaagactttgggaaagaactcgccaccacgatctgatcta

SEQ ID NO: 31948 - DNA, 70 bp, Zea mays
cccaaagaagtggacgacacaaccgcgagtggaccagcctacatacttcccccctccccaatgatgacgc

SEQ ID NO: 31949 - DNA, 359 bp, Zea mays
agctagcaaagcagactgcgcacttgttctctattggagcatcgggtggaattcctattgccttgtgatgaggactcttttgatattactctagttacttacgcttcaacctacccattatcaggtcgagcgagctctacattggaggatgtggtttgggacctcacggctgtatatggcccccagcaggagaacgaaaaaatgtgtattctatctgagttgtggtccatctctaacttgatgaaacctgaatggttgattttaggagacttcaacatgatcaggagagtgagggaaaaaataagggagcaatcaaccaaagagaaatgaggaagttcaaccaaactattgacgctcta

SEQ ID NO: 31950 - DNA, 310 bp, Zea mays
agatcttgagcaaacaaaacaagggagcgagtctcagactctcattaaaaaactacacaagtaataggctgacgcctactaacagctcccattaaaaggcgtattgagaacaatcactctctgtctaaaggacagtggacagcctacactcaggtgaactagacaaggagtagcaccattctgacactaattggcgatacaggaacagcacatatgtagatcgaaagcaatctacaaggaaaaaacattggaaatcagaatggtcagcgagatatagcaaatggtaccaaagacctttgaccaaaccatg

SEQ ID NO: 31951 - DNA, 360 bp, Zea mays
aacttactcttccctgagaatggtctttcttcatcgccaagattttgaagcttggaacatacaagctggccaacgatcaaggcgaggtctacagcaacgcttggaacatccgacagctacgtcgctcttacccttatgatgttttcaagtcgttcatatacctcgttttctttacatacaaaaataaaccctaaccgtcaaggaagggtcacccttgcctcggaaaagcccgaccctccctctggggctaaaaggggggaaccccctctgcgtcaaaacttttcttggaaaaaatcttttgccagaacgtctttcacgctttttgactgcttcgatagcggggtccttaaaacgacggga

SEQ ID NO: 31952 - DNA, 313 bp, Zea mays
gggacttttttttttatgagactgcccgggcggatatatggcattgatcctcacatggtgcaaaccaaagtataaagacactttcacaaaggccagggacctaaaagattaatcacattttattgagactgaacaatggggacacacccaaggtctttcttgaagctattcccaggagcaactgttgctttggagactccatattggacggtgaaatcttcagcaaatatgtcaccaaaactacgtgaaatgggccccatgaggttgtccacacctacacgatagactgtctaaaacctacctatattattca

SEQ ID NO: 31953 - DNA, 360 bp, Zea mays
  unsure (1)..(360): unsure at all n locations
gcagcatgcaagccacacaanctttactttttctgctgcatcactctttggtggtggccaataaaaaccagacctgaagactttcccaaccagagttctggatgctgcgtgtattccacattgtccggcatgaatctcatctagtagttgtctcccagtagtcgaggaaatgcacttcatgaggactcccattgcaccccttctgtacagtccaccccctatgagggtgtaatgggccgactgtcttgcgatgcgttctgctgctgcttatcatccagttcttctttgtttattatatacttgatgataggctctctccagtctttagaatccgactctggcttggtcaaaactctgcac

SEQ ID NO: 31954 - DNA, 334 bp, Zea mays
atactcaagctaacttcatttggaaaagtttattttttttctggggccaaaacggcgggatacttttttggcataaaagaaaaccaatgctatatgagaccactcacgggattccatttattgtccatttcattaactctctcttgggacattctttcttactccgtttgaataacaaacggtaaaaccttgaaaagcttgtacttgactccagtacttatcatcatagtacccacgtgctttgaaatccttggcaacaatataattgaacactttaattgtaattctttacaatgaaacgacgcattaccaatcatttggttccctcctctct

SEQ ID NO: 31955 - DNA, 373 bp, Zea mays
cgacctgcccgcacgcaagcttggacaggggaacaaattcttcacaacgatcctgcccaaattcgcgaagaattgcacccaatcggcgcttgaacatgggcagaggcaacgggaacacgtgttcgaccgtggctgacacccccggttcacgcccgttcgcgcaccgtgcctcccagtgcacgcccgcgcgcgctcgccggtccacgaccgcccgtgcaccgcgccgtgcctataaagccttcccaggcgcgccccacttcgccccgcactcaccaacaccggccggccgctttcccttagctccggcgagctcaattccgcccgccattgccgccagagctttcgcccaccgggctagcccactccagccatc

SEQ ID NO: 31956 - DNA, 251 bp, Zea mays
gaaacactgttgggaggacgcgccatcctagcaattaatgtgatgaccacttcaagacccctggagctgctgcatatggacctctttggacccgtcgtctatctaagcatagggggaagtaagtatggcttagttattgctgatgatttctcccgcttcacttgggtgttctttttgcaggataagtctgaaacccaagggacccttaaacgcttcctcaagagagctcaaaatgagtttgagctcaaagt

SEQ ID NO: 31957 - DNA, 365 bp, Zea mays
gcaggcaagcaagcttaaagactcgagtatattcttcagcacagggagtctgagaattataacgtgctattgactacaccatatacaagggccgataagaagggctaatcactaggggaggcgaaaaattagttcggaatagacaaaaatgactagctctttatagggaggattaaccagccagtgggctaataacaaattgaaagcctggctagaaaattagctaacctgctaaactcttgttcggagggagtaggggtaaattagctaatttttatccgggtaacacataggaggcgtacggttcgcgaaaaagaaccgaaatgacaacgaaaaagacacacactcgataaatagcgggaaca

SEQ ID NO: 31958 - DNA, 309 bp, Zea mays
aggggggacgaaatgggatttcttgaaatcacacacccgaaatcaaaccctgagccaaagacagggatgttcaccctgagccctaactcgaaacccaaaggccccaatgacaaaaaagggactaactaacccccccgacgactgccacaagatggcattgggacgcgagccctatacacgacaaaaccttggatttgccacgggattgggcagggagacagaccagatttcctggctccatatcactgcatctagtaggcaaaatcctatgacccccacacaagattggcagcctgaacggaggacaag

SEQ ID NO: 31959 - DNA, 354 bp, Zea mays
agcttggaggcggtttttgtttttttatttggcgtaaactcctccttctttttttccgtcgccttgaatgcgacgggttgagctttctgttgtagatggatcatcaagctcggtgatctttctcgagccctcgatcatgcactcaaaacttacaaaatgcccgattactttctcgggggtcattttagtatatctaggattaccaccaattatttgaacttgagtggggttaaggaaaatgagagatcttataataacctttaccattttgtggtcgttccacttgacgctcccgatggtgcgcacttggttcaccaaagtcttgagccggttgtacatgtgttgtggctcctc

SEQ ID NO: 31960 - DNA, 315 bp, Zea mays
agcctgagatgcctatttctatttatagaagaacgaccctaaaatcaattggtcttctaaccgtaatgaaacccttgaactactgaaaacactattgaccactgctccggtattggctcaaccggacatcactaaaccttttgacgcgtattgggatgcatctggcagtggactcggctgcggactgaagcaagaaggccgaatgattgccgatgctccaaggcagctgcgccaacatgaggagcactatccaactcatgaactggagctaactgctgtgcgtcatgccctaaagatttggcctcactatctgct

SEQ ID NO: 31961 - DNA, 319 bp, Zea mays
tgcggccaagaagaaaattttgtttaagaccaccaaccaagggtgccgacggtgaacaagaagaagacccctccagccccacctccccccaggaaagatgatcggtctgacgccgaggatatatccctagcaagccttgaagatctcctaaaggaatttggggatactttagagaaagagctcggtagtacctcagggaacgctctcgtgtagtacagcctgcagaagccatatgcttgcaatgtattggtggaacgaataaaacaactaggttgaaaacaatatgcatgtgcataaaagtgactctcttccctggcag

SEQ ID NO: 31962 - DNA, 358 bp, Zea mays
agcttagccatggcaattctatgttaatttattgtcaaccaatcatttttagccaaaagggtgaactaacaattaaatgagtgcttgcagatttttgggacaacagcacaacagttacttgttttaatcataacttttccaatattaatccaaacatagcaaactaggactttctggaaagcttaaaatgttctctacaactttggtattttcaccttaacaagattcaacacttagcaaggttaaaagtgctaacacaacagatctgttcagatttggacagattcagacttgcagcttcaaaaattcacaacaaaagattcagacatccaaataaagtgatcctaaactttctgga

SEQ ID NO: 31963 - DNA, 328 bp, Zea mays
tataacaagagaatagaggcaagagctcgaccatatgttataatagaaggggagttgtacaagcatggactctgttctccactactcaaatgtttatctagagccgaaggtatagaattgatgaaggaaatacacgcaggcctgtgtggatctcacattggatccatgcctttgttgggaaaagtttttcgtcaaggattttattgaccaaaggcagcttcggatgcagcggaattagtccaaaagtgtgaaggctgtcagaaatgtgcaagagatcaaaaacaaccttcgtatttaacccagttaatacaacccacttggccattgc

SEQ ID NO: 31964 - DNA, 352 bp, Zea mays
agcttcggcctctctttttcttctctggccctcagcatccttggtcagctgcgcatagtcaggatattcgaagcccagtgcatcgagcactcggttcagccttcgcttcggacgggtaccgaaggctgctgtcatcagttgatcttcttttttcgaataatttccaagaatttcattacacatcacctcaactgtgtccagccactcttggcagggcttcttaaaatatttcttgaatttgaagtggtaaggaagccggacaagatccccttccttcttctccccctttaactttggcatttcccattttttcagagtagggaagactttgaatgctaagaattcttgaacc

SEQ ID NO: 31965 - DNA, 327 bp, Zea mays
tcgcgagagagggtttggccttaaagttagtcgtctgagttagcctcctccgcctctcttgggaaggccctgggcatccccttttatagatacaaggggatggtccagctgtacatatgggggtgtagctatgtgctaacgtggctggcaaagaagtgcttgagccctgtagaagcgtaactggcagtgcggccctgggtcctgctgacgtttctttgccttcgtagagagctgagaacaatcgacgtcatggacgcatgcagggaaccatcattacctgttgccggagtaatctagatgtgacatcggtcttgttccttcatagcc

SEQ ID NO: 31966 - DNA, 357 bp, Zea mays
agcttggccttttaaacatctttatttttccccgcttagctctagcaacattgtcgcctctttcttgtctctattgatgaattgatatttctccatcagtcaattgtacctgcgtagctttttccattattttttcgctctcttgactgtttccttgctaaacttgcaccaatattgatgttattgcagtgatgagggtgttcactgggcagtgcaaaatggtctccatttatcaagaagcactgtggtgtacttcaagcacaatgatatggtttcacttgcaagcactttggaaaaacttacacatggaaataaacgtgctgaaaagattagacgctacattgttgtagaatccat

SEQ ID NO: 31967 - DNA, 333 bp, Zea mays
aacaaagcttggaccaggtcgtcccagatggatatctttcccggaggcaggtgctccaaccaggcgcgagcggtgtcagaaaggaacaaggggaggttgccgatgatgaagttgacgtcgtcccttccacccagttggcaggccagacggtagtccgcgagccacagttctgggctcgactcccccgagtacttcgtgataggagtcgggggtcaaaaccgggtcgggaacggcgcccgtcgtatggcccggctgaaggcctgtggaccgggtggttagggcgagggactccgaacctccccgctgtcgtaccacccccacgcctgggggggt

SEQ ID NO: 31968 - DNA, 356 bp, Zea mays
agcttgagcggtggctagtttattttttttatacgcgcggcggccgacaaaagagggggtcagtggcgcgcgcgattggtggcaattaccgtggtaagcttcccggcgaccaccggacgggctaacgtgagtcacggcagtgtggttaacgtgccaaggcacgtgtcgcaagacagcgaagtggctatctccggcgaacccatccaaagcaactgtgatctgctcgagtactgcggccgaagtaaaatagtggccggagtgtatccacggtgtgatatttacttacccccagcgttatctaactgatccgagcgcgaatcaccatggcgagcgcgaattcgatcgcacgggttatc

SEQ ID NO: 31969 - DNA, 325 bp, Zea mays
ctcaagcttaacgatcagtccatagcctcatttatttttctcttccaaacattattacaattaaacttattcttctctaaagactttatccgcaacttcgttcaaaagttaatcgaccactttgtcaataatggagcctgccatgcttattgatactaacgctttcttcattattggatcagctaagggatcctacagctttggacgcggggatacctcacctgaagctggttaaacagattagttccaagccttgaagcgagtgcccaacctatataatctagaaacagtacctatacgcctttcacattatgcagcatcttca

SEQ ID NO: 31970 - DNA, 351 bp, Zea mays
agcttctaaagggagatcattgatatggttaaccaatgtgcaattcgcaaaagatagaccttgtgcagctcgtcaagcaggcaaacaggtgggaagctctcatcacaccaaaaatgtgatgaccacatcaagacctttggagatgcttcacatggacctctttggacccgtcgcctatctaagtataggaggaagtaagtatggtctcgttatagttgatgacttttcccgcttcacttgggtattctttttgcaggataaatctgaaacccaagggaccctcaagcgctttctaaggagagctcaaaacgagtttgagctcatcgggaaaaagataaggagcgacaatgg

SEQ ID NO: 31971 - DNA, 326 bp, Zea mays
tcctgttgcgaaccttcatctgttcacataatgaaaaactcctttattacacgtatgcccatacccacacacacctaaattggctaccacaagattgcaatttaactcagaagtgcaaatcaaattgaatagctacaacaccaatgcgaacgaactccaattttgctagcgcatccaaatgtgtggttgaatttcacttatcaagctgaaaaccaaacagctacatgatacccccaattttatcgtttgtattcactgtgtgcattaaacacatattttctgcaccatgttaaatccacagaatgcaaaacattcattttttgtgt

SEQ ID NO: 31972 - DNA, 348 bp, Zea mays
agcttaacggatgattaatttttatccgaagctcaatggatgttaatgaagcttgaatagatgactgtacaaaaaactcaagaactcttgtaataaccttttgtaaagaataatgtaactaaattttactctgagaactttgtccataccttgtaatttatttttacccttccgttgatgtataaagtgcttcggtgtgaacgaactgagcacttttgagccgaaggcgaaaaacaccttccctttttttcgtacacagtgaagcataaaactgcttctttttctttttgccgaagctttaactttaaagccgaaacaactgactgtgttatgatgatgatgatccta

SEQ ID NO: 31973 - DNA, 329 bp, Zea mays
ctaaagaaaagctgcagcaaacttttgaatgtgcattgaaatataaaactacctcaccaccattctgcaaacaaataaacgatatcaggttaaaagtggttacaagagaagggaagcctcaggaattagttccataccgatttgagtaaagtttcgggtcttccatcaccaagccaacccttcgtgcacctttagcccaatcctatgtaataaatctgctctctatgctccaggcttcactggggatatcatccaaatctgttggagacaggctgaaggttggtctattcacaatctttgagtgcgtgcagctagccttcaaaaatgct

SEQ ID NO: 31974 - DNA, 334 bp, Zea mays
agctataaccgatttatagtttcttggtggaagatccccacgtttagcttctccatttcatgacacaaaggggtctcggacaagggaactctagggtctaggggagaaaacatatgcaacaaaacaaacaaagggtcagtacaaaagtacagacacacaagtgaactctagggcctagggtagaacactacggctaagggtctactgttctctaaccaggcctatttcaataaatcgcttactgaaagaaacttattccaaggatgggatcacattaaaagaaaaacgcttacaaggttaatcatttgaacattcattagggctttacctttta

SEQ ID NO: 31975 - DNA, 324 bp, Zea mays
tgaacggcgacgaactcgatcttgtttctctcgtaacttgatctggcgggagcacctccgtccatgcaggtatacatctctgacatgcttccagcctggtgcgcacatgtgcaaatgttggtattagggtttggcagatgcactctgggtctgtatataggtttagggttacatatttcatcgagaagcgccataatccttctcatactgaagatcctggtgcaatcgaactggttggtttgatctggtgatttcgatttggtggacacacgctctctaggtctgattagggggaactggaatgtttttggtcgatggaatcac

SEQ ID NO: 31976 - DNA, 352 bp, Zea mays
  unsure (1)..(352): unsure at all n locations
agcttctttgagccaattcttttagccgccatagcagatacttgcttgggaaattataagaccatcttgatctcccttatgaggnnnctatttgtnngtttatcttttcctgctcagctgcttgttcttattcacctttccatttcgagtttggtagactattttnnntaatagaatgcaaatgctcattgcagggaatagtactaattacagttgcaacgttcatgccttctacttcagtcttgtgcgacgtcagttcatgcttgtcatcaaatggaactcaaaccgngattttctttgctggtttgtatctcactgctgttggatgtggaggaataagatctgcattgct

SEQ ID NO: 31977 - DNA, 276 bp, Zea mays
cgcgtaagcggcaaggccgaccgagccgagggattcccacgcctctgggatatggatacctcactcgtcccttccgcgagaagcaactctcgctcacacaaacatccctgttaccgacagagtccatatgctcgaaacaagaggaaaaaagacgcagcttcacaagcgcggcaagggtgtgtttttctggcctcggcggccgcagaaagcacacgctacaagatgatctgatcctgcaggctcgggacttcacgctgaagggagccgtagcaccct

SEQ ID NO: 31978 - DNA, 339 bp, Zea mays
  unsure (1)..(339): unsure at all n locations
agcttatgaagattcttcatctatttgggctagncggcggtgccagagccaacccatgttagtcttagcaattaagcatgtggcgagttcagctctatcaaaatctactaagtatagctgacccttcaacacacccttaaatgctattgaatcatcacttcttcaaaagacagtgacccctatatcagtgaaaagacagttgtagcccattttgcgtaattgagatacataaagcaaattgtagtctaatgaatctacaagaaaaacattggaaatagaatgggcaggagatatagcaattttaccaagacctttgaccaaaccttgatttccatcccc

SEQ ID NO: 31979 - DNA, 255 bp, Zea mays
  unsure (1)..(255): unsure at all n locations
gccttttttctgcgncctgcgcgggcaggcgtcaccatgggaaatatggggagtttttgaaatctttgatcaatacggccaggaattactctttttatactgccacctgtgtgtgtgactcactgataagaaatcgcagctgatttgctaaaaccaaccaagtgggggcaaaggatgaaccatatatgcccaaattgaatacaacttaaatttattttatttggagagagtttgcacccgttctagatgctttat

SEQ ID NO: 31980 - DNA, 344 bp, Zea mays
agcttgttgtttgtttcttttatgacttgccgcttggggatttatttaactatatcacgtcatgcgtctcaattcgtccgggaatcgaactctgtactatgcttggacctgagttgctctaactcatataggtaccatccgctttgtcataatggcattagactttgcaccatgcccaaacacttaactcaactatgtcgctctaactcatataggtacgattcgttttggcataaatggcattagactttgcaccatgcccaaacacttaactcaaacgggtatgggagagagtagctgaacacggaaacattttgcattacaattcgtttcgaaatggaccc

SEQ ID NO: 31981 - DNA, 321 bp, Zea mays
cagcttataacacgagaatttatgcaagatccccaccatatgcaataatacaaggggagctatgcaaacatggagaccgctctccattgctcaaatgtttatccacagctaaaggcatagaattaatgaaagaaacacaccgaggtctgtgtggatctcacataggaactaggaccttgctgggaaaagttttttgtcaaggatttaattggccgaaagcagcttcggatgcaacaaaattagtccaaaaatgcgaaggctgtcaaaaatgtgcaagagatcaaaaacaacattcgactctgactcagataatacagccca

SEQ ID NO: 31982 - DNA, 366 bp, Zea mays
  unsure (1)..(366): unsure at all n locations
ccggggaacaataaaacgacctgcagcatacaaactaagtttatcctccttttgaacctgtccctcattctctcgttggtgtctgcatgatatccggcacactggcacaagtcattgatagcctgagcatactgtaacactgatctgttaccttgatagagtgccccaaactcattgagcttgcggtccataatgcctgctggtatatggtgccccctgaaagcnaccttgaactctcttcattccacctcaccggtcagctgggtgcataacaagaaagtgggctcaccatgtccgcgcgggtccgccaaactactgtgtggcgaacctgaccttaatcacctctaaccaaactccatggagtaa

SEQ ID NO: 31983 - DNA, 320 bp, Zea mays
tctaaaaaccaccaccttattattcttgggaagaggaacaatattctcccctctggccctcagaatagaaatatcacgaaagtatatgcctttcatcgcttcgatctgcccttgcttaacaattgatcttccaaaaacaacatggctcggcctccatggccggtcttcgacatcttcatttccactctctacgtcaaaactctcactatcgctggagttctcaaacaacccagccaacatctcattggtgatgttctccgtgttggtcttctccatagcttagtaaaacccggccagtgcggggttagtgatcttcttct

SEQ ID NO: 31984 - DNA, 357 bp, Zea mays
agcttctccaagggtattcttttgctcggtaacaaagtgtccgtttttaagaaaggttaagggatttcttttttgctgttgttgaaacaaatgaagtaatgctagcaaagaaaccagttatgtatcgtatattattatgctatgggtaacactagaccttcacctcaattcccttaattaacataaacaagcaagagggagcaagagcaaccactacaagttaatacagccaccgccgatcaccaaattatactacaaccaccgaccaatatcatcatgtacagacacaagaaaaacaaactgccacacctaagcttctttcactcacaggtcgccccaaatcccatgatagacata

SEQ ID NO: 31985 - DNA, 330 bp, Zea mays
tgaagctgggttaagcgccatgattaaagaggatctcgcagacagcctcgcgtacaacagcctgaaggtataggaattaaacacttgaaaaatccccttatttttacgcaactcaatccttttttcttatatgaattctttttcgtatagggcctgatcctaagcaacgcactaagagcccaaaagagcgccgaggatgaaagctatgaaattgcgtttaataatttacgctccgaagttatcaaactgagaaacgaagctttggaaaaagataaaattctacttacactggtagataaagtgaaaaaagacgaagctgcttcaaaggct

SEQ ID NO: 31986 - DNA, 331 bp, Zea mays
tttcttctgtggatatgtgtctaacgccatcagcgatagttgtacttcgtaggtacacaggttggtctaaaaagaagtgtatgcatgattaattctacagacaattattctatactccctccgtcctaaaataaacccacatcacactcaaactttataaagtttatctacaaatatcagaaatgtataatatttgcatctctaaataattatagtataaaagtatattctatatttaataaaatgatacatattatacctcatatatatctgtattttatataaaattagttaaactttaaaatattgtaagtcttggaaagtatgtaag

SEQ ID NO: 31987 - DNA, 327 bp, Zea mays
tcacgaagaggaaccttcggccattttatacaaacagcttccgccgaagaacgctacttcctgtaagaccttcggcgacgaagcataggcccaacagatagttatctaattccactagtaactttttaaccaactaactgttagctctaatgattcaaacactctctacaattgtctataacaatgtcgcctaaattttatcctttaaaataatattctctgtccattatagcatactttaaaagattctagcatctatatttttatcatctctagcaatgtctccctaaattcggtccccgatatcagtgatatgagtgccagatt

SEQ ID NO: 31988 - DNA, 355 bp, Zea mays
agcttatgaagatacttcattcctatatgggctagacggcggtgccagagccaccccatgttagtcttatctattaagcatgcgtcgagatcagctctatcaaaatctactaacgatagctgacctttcaacacacccttaaatgctattgaatcatcacttcttctaaagacagtgacacctgtatcagtaaaaagacagttgtagcccattagacataattgggaaacagatagcaagttgttatctagagaatctacaagaaaaacgttggaaatagaatggtcaggagatatagcaagtttaccaagacctttgaccaaaccttgatttacatccccgaatgagatagctc

SEQ ID NO: 31989 - DNA, 331 bp, Zea mays
tatgaagattcttcatcccaacatgtgctattttgtgatgccagagccagcccatgttagtcttagcaattgagcaagtgtcgagctcatctctatcaaaatttactaggtgtagctgaccctctaacactcccttagatgatattgaatcatcacttcttctaaagatagtgacacctacctcagtaaatagacagttggagcccattttgcataattgagaaatagaaagcaaattgttatctaaagagtctacaagaaaaacattggaaatggaatggtcaggtgaaatatcaattttacccagtcctttgaccaaaccttgattttc

SEQ ID NO: 31990 - DNA, 357 bp, Zea mays
agcttcagcagcggcggcggttattatcggcgtgagcttgaagccaccgtcggcggcaggcggtgggcggagcggcctggcgtcgtgctcgtgcgttctcgccttggattggttaaatcaaatcggccacagactttacccgatcgtgatgatttctcattcagtataggtacaagtgcaagtataatgatttaaagaaacagaatacttattatgtggatagcttaggaatagtggagacttttttaaaaagattttggattggagctgaatattttttggtgaatggatcaaaaaatatttttgataagcttgaagagaaacaactgccaggtttcaagctgctgaattggtaag

SEQ ID NO: 31991 - DNA, 329 bp, Zea mays
tgtccgtggagctggagcgtgcgttttatcctggcagcactgttgcgatgctacgagtccatacaatacatggcgtggcaagacatgggatggctttcgtttcgcctccagatccgcatctagtggaaccaggcaggcaagcggagcggatggtgcagctgctccactgatgcacacagttcagtggcggcgctgtgcgggcagagagacagggcaattccgaacggagcagcctgatcatcatgcgtcgccttttgccctttaaaaggtccgggcttcatcattgtcaggacggagtctccggtccctcgcactcacgctgcccctct

SEQ ID NO: 31992 - DNA, 304 bp, Zea mays
acaaaatgagcatgctgattggctagctaagtcaacagcacagggggtgcctttaccttcggatgagttcttcgaaacaataaaagcaccttcggtggaactacttgaaagagcaagccttaatatatctcctgtttttagcgaagattggggaaccgagatcatctcttaccttcagggtaaattcctttcagatgaccaagcttataacaagaggatagaagcaagagctcctccctatgtcataataaaaggggaggtgtacaagcatggagtttgggctccgctactcaaatgtttgtcc

SEQ ID NO: 31993 - DNA, 332 bp, Zea mays
tcatcatctgagagacagaagcttttttttaaatgatatataacccgggcctccagtctttactatgtacaagtgagattgtgagcactgctctttccatgagctcgattgagggtgcttttattgtttcaaaaaatacttttgaaggcaaagggagcccttgtgccgctgatttaactaataaatctgcatgctcattctctccacttgggatattttttacagaaaaatcttttaaagaagcttccaatcttttaactgcattcaaatacttttcaagcttctgatctcttgccttgctgctcttatacacatggcccgaaaaaacatgc

SEQ ID NO: 31994 - DNA, 367 bp, Zea mays
  unsure (1)..(367): unsure at all n locations
ggaacactagaccgaccagcaagcatgcaagctaaatagggggtataattttcactgacacctgngaaaatggcggccgagggatggcccatgaaataatgaagaagagcgaaaaagacattcatgacgcctgagaagcaacaaaagcagctaaaaaagctgcggaactcgaaagacggataggcatcatttaatggcttttaagtttgtgggttatctttatgacttcgaaataatttatgtcttctaccgcagctgaactatctcccccccagagcccttcaatccactatccgacccagaaatagagaagacaatagagattatcaatacgaccgaagctattgtggatgaaactgttaccaag

SEQ ID NO: 31995 - DNA, 309 bp, Zea mays
cgcggcggcttttcataacctgcgcgctgcggagccgccgagctgctgcgcgccatctggcgcgtccccaagtgcctgtgtgacgtcatgctgaccggcaccagggagaggagcgccgtcgagcgctcagcgccgggcagagaagaccgtcgggccagggagctccaaccaatcagcgatggagcacagggccgaggaccggggagagggagcgctcggggagaggaggagcgcccaggagagccgtcggacaagacgaactccagctcgagcgccgatccgttctaagaaacgggacagtgagatgga

SEQ ID NO: 31996 - DNA, 353 bp, Zea mays
agcttgtggtagaggtatgctatgtaatgtaatggcttgatgtaatgaataaaataactagttaaaaaaaatggcatgtgcataatagtgactctcttcccatggcagatggcttcggatagaaccacgcctaccgcctccgggattggagcaagacttcctctaggagctgagggagaggctggtggagaagggggtgaaacccacctccccgcacctccagaactaccactagacctagcccagattctggccaatcaaaccagactcattgaagtcctcactccaagtctggagaaccagcgcccaagcggtggaaggccccacgacaggatgggagaattcctgagact

SEQ ID NO: 31997 - DNA, 353 bp, Zea mays
ccgaccggcaggcacgcaagccaaaggagcactttatactcgagggagctcatcctcgctcgctaagacattcacttcacaagcactctactatgaccctcgctttgggccttagcgtgaaacgaagaccaataatactctagaccgtgatccaggtaaggataaatttctaggtcaggcacttatgatgcacgctaaccgtcatttatttgttcattaccgactttgaaaagatggcaatcgactaaagagggcgaccaatgacagatccacaccacgagatcagaaatcaacgggcgacttattggcgtacatctacaaagcgactcaccgaacaccacacaccctccccg

SEQ ID NO: 31998 - DNA, 329 bp, Zea mays
cgcctttagagacatgagagattttttattacaacaacatccattaatccacatggatatgctgcgtaaggataaaatttgataaaacaacatcatgaacctcggagaaggagtatgagaatgatcagaaatgagagacttaggtagatccaccattcgacacttgacaacgggttatagcagataaccagatgacgggcagaatcattggatgatctatagatttggatgacaaggccacaacatgattcacaaaggaaaagattactagatctaggtgaaaagagacgtcatcaagcaagatcagccaggatgatcaacacaaatgc

SEQ ID NO: 31999 - DNA, 371 bp, Zea mays
ggaccataagcgaacgagcatgcaactgtcgcgcatgtgtttattctaccctaacaaacggctgatacccacccatcataactcacacctagaaggaaggagccaacaaccatctatggctaaaacatgtgtgaaaaaaccggaagcctacatatagcttccttggtgattatgcactccagcgaacctccacctacacccactgatctaaaacaacatagtcatgcacgttgagatgctagattaaataatcggattgcagaccttaaaatgatgtcttaaaagctactctggttagtcctaatgcacttgcccgagcacaccaaccactcaccacaaacatctccgaatgtataccccaccatgaacca

SEQ ID NO: 32000 - DNA, 341 bp, Zea mays
  unsure (1)..(341): unsure at all n locations
gacacnaaaaaaaacacaagcccgggcatgaagaaccaatttctggtgaccacaaaggcgccaaaggggcaaggcaccaagacctaggtatggttcgcctgcagggccacgtactccataatgcgtccccagctggggtcggagagcgcagcatgaacggacgacggcttgggggagagcgcccgagaggatgctgagaggaccacacactcgattgaacggaggacactatcggcccatcacgtgaccatcaggtggacgtggacgggaacaccgaggagggccacagggaggaacaccggtggctccgtgctggaaggagccagggcagaaacccgaac

SEQ ID NO: 32001 - DNA, 339 bp, Zea mays
taacaatactcacacttgacagtgactttttgttttttattcaaagccaaccctaatgccagggtagtcccccattataaagcatgcttctaacaaatttaaacatttcattaccaatttcatgctcattaattttagcagctttttgagctatatgatcattttgttgcttaataagggcaaggtgatcattcatagcatcaacaataacatctttacatctagtataaatagaaacatgatcaacaatagaagtatagggagtgcaaacatttaattcatttatcttaccatctaatatggtcatcttatctggaagacatgaaatataatcattgc

SEQ ID NO: 32002 - DNA, 346 bp, Zea mays
agcaatacctttcaattaattcttctcagaagggtaatccaaggaataacataaagaatgtaaacatatgtataaaagcatatatgaaagacaaacaataaggaacaagtcatgttactcatcttcgggattccacacttaacatttcattccttgcactgtatcaaataattacaaacatacctttggctttacaccaattacagcttgaaagtactttgaaggctgagttagatgaagctttgagctctcaaaaggtgaatctatgcctggcattgttcctctatttacaggggaccggaaccactccttattagaccccacgtatgcccatgaagtttacaaa

SEQ ID NO: 32003 - DNA, 301 bp, Zea mays
ataatttgccatatcggaaccttcgggatatgtggatggggcccgaagataattatgctcaaagagcttcgaagaaagagcattccaagccaatagagagaccgtgggcagcaaaaaggtagaccctttgagtgggcactgtacacctaatagaagggacacagtgacacacatctttgactgaaataaaaattgtgcccctaaactatatacacacaaactacggaatccaatgagggtactttcctttacaaaacatgtcgtgcaagtctgttcaacctgccttagctctggtgacacc

SEQ ID NO: 32004 - DNA, 323 bp, Zea mays
tctagtagctatttatgatagatattgagaaatttgctattttgccactctcaattttagctgcctgttattatgccatcccgtgtctatgactggtgagaccgtctgtgtctatgatttgtgggtccgatcgcatactggcgaagcccacaaatgataatggcaaaattgccaatggctcataagaaaaaaaataatactcacaacagcattcatattttcggtggtcttgggccaccaaaaatattttagccaaaaatagggctcagttttgtccagagccaccggaaatacctaactttcggcagccagccttataccgc

SEQ ID NO: 32005 - DNA, 358 bp, Zea mays
agcttaataggcgaaaaaaatttcactggcatctgggaaaatggcggccgagggatggtccatgaaataatgaagaagagcgaaaaagacattcatgacgctcgagaagcaacaaaagcagctgaaaaagtgaaagggaaataggcttacaccttttcctaaatttattttggtggttgaattgaccaacacaaataattggactaactagtttgctctagattatgagttctacaggtgtcaaaggttcacaacaaaccaataaaaggaccgagaaaggattcaaatatagagagcaaaagtcagccaaagtgtgccctggtttggcgcaccggacagtgtccggtgcaccagggac

SEQ ID NO: 32006 - DNA, 330 bp, Zea mays
tgagaagatatttccacccggcttttttaatccaatgcagcatttgattcttcatctcccctatgaggcacgaatgggggggcccgtgcagggacgttggtgctatccaatcaagagatgtctaaagactattcgaaagaaatgtagaaataaatgcaaaatcgaggcttccattgcagaggcatacattctagaggaggtctcaaacttcacaacaacttattatggtgacaaactgtcgagcgtgcataatccaccccctcgttacaatgatggcgacaatgaatcgaaccttagcatatttcgaggccaactcggaagcgcaagtgg

SEQ ID NO: 32007 - DNA, 334 bp, Zea mays
agcttctacccgtttgccccattgattggttaagcatgtttgaatagctctatggtaagtcgctccagcattcttgaggccaaacgacatggaggtataacagaaagctccaaacggggtaatgaatgcagttttttcctcgtcttcttttgccaggctgatttgatggtatccaaagtaacagtccaagaatgacaacatagaacatccggcggtcgaatctaccacctgaatctattcttagaagtccaatggatcctttggacaatgttggtgagaaatgtttataaaaacacatgccgcaatcactttattctttttagtacaaaacatg

SEQ ID NO: 32008 - DNA, 328 bp, Zea mays
tcagcggctggggctgcagcactacaaccgctggaccacaaccaggagaccgtctctcttcgggaggccagaagccagaagagaaaagctgttagcccgacgcttgaggaagaagagctagaccaagaaatcagagagatggagatgctacatcaacaagtgcagaggaagaaggaaaagatggcccgcctagctgagttgcaaaggcaaattgacgaagcttctgaggaagttcgccatctcactcacgatgagcagaacagaaggcctcatcagaaagacctccatcaggagggcttcgtcaacgaagacgactggtatgataatt

SEQ ID NO: 32009 - DNA, 370 bp, Zea mays
acctgcagcatgcaacttgtgaaaccaatcacaattttattgaataatgataccacacttaattggtctttgaaatgtaatgaagcctctgagcacctgaaagtattattgaccactgttctggtattggctcaaacggacattgaaaagccctttgatgtgtataatgacacatcatgcagtggtcttggctgtgttttaatgcaaaaaagccgaatgatagcttatgcttcaaggcatttgcaccggcatgaggaacattatcctactcatgacctagaattagctgatgaggttcatgccctaaaaatatggcgttattatctactaggaaatatctgtcacaattatacagatcattaaaagttga

SEQ ID NO: 32010 - DNA, 340 bp, Zea mays
ccataaaactcagcttggaagatcttcattccactttttctattctgcgatgccagagccagcccatgttagtcttagcaattaagcaagtgtcgagttcacctctatcaaaatctaccaagtatagctgaccttctaacactcccttaaatgctattgaatcatcacttcttctaaagacagtgacacctacatcagtaaaaagacagttgtagcccatttgacataattgagatacggaaagcaaattgtaatctaaagaatctacacgaaaaacatttgaaatagaatggtcaggtgatatagcaaatttacccaaacctttgaccaaaccttgatt

SEQ ID NO: 32011 - DNA, 358 bp, Zea mays
agctttatctcccttacatttggcttttaacttcctagcaaccaccttcttattctttctataaatggcaaaagaagcattgcaagcatgatatattgtataaggttcactaactctcctaggaacattaacaacatttctcctaagcatattatgaacaacatttttcctaccaatatttctatcatgcacataggaagaactagaagcaaacatggcatgagaatcaaaagcatcatatgcattataactcctataagcatttctagattgtctcctgtcatggtacataaaagcatggtttttttgcacactactagccataggggccttccctttctccttggcggggatggga

SEQ ID NO: 32012 - DNA, 331 bp, Zea mays
  unsure (1)..(331): unsure at all n locations
tgtgaaggttcttcatccccacatgtgctaagttgcgangccacagccagcccatgctagtcttagcgattaagcatgcatctagaccggcctcctcttttgcaaaatcaaccaaataaagtttgtcgtctagtacacccttaaatgctagtgaaccatcacttcttctaaagacagacacatctacatttgtaaatagacaattatatcccatattacataattgactgacagatagtaaattatatccaagagactcttctttcaaaacaatagagacagagtgctcattggatattgcaatcttggctaaacctttcaccttgccttg

SEQ ID NO: 32013 - DNA, 331 bp, Zea mays
agctttcactcacttgccctattgagcggctaagcatgtctagatggccttttggtaagtcgctccagcgttcttgaggccgaatggcatggaggtataacaaaaggctccaaatggtgtgatgaatgcagagttctcctcgtcctcctttgccagactgatataatgatacccggagtagcagtcttggaaggagagcatatagcagccaccggttgagtcaactacctgatctatcctatggagtccgaagggatccttcgggcaatgcttattgagatcgatatagtcgacgcacatgcgccaatcaactttattcttttttaataca

SEQ ID NO: 32014 - DNA, 337 bp, Zea mays
ggacacttaaaactcagcttacccatttgatttttagcgttttccctttggcctggacttgcttggctgccccttgcgaacctttagcgccgtcttgaatcttttgatgatgagggccatctcttcatcattaagtcccgccggctcaatatgtgccaccttgctaagtagcgcctccttgctttttgttgccttgaaaacaaggggttgaggctcgttgattggaccattcaatgcgtcgaacacgtatctatgcctccttgatcatcattcgcccgctcacgaattgttcaaagacttcttcgggcgacattttggtgtacctgggattcttacg

SEQ ID NO: 32015 - DNA, 351 bp, Zea mays
agctttcaagatgttttctttattcttgatgtaagccacacatccgaacacacggaggaagtgcacggagggcttcttcccgtaccacgcctggtaaggggtcttgccgtcgagcgcgctggtgggcgcccggatgaggagaaagacagcagtatgtactgtctccccccagaagtgcccgggcactccacgtgcccgcaggatgctcctcgccattgctactactgactgatttcggcgttccactacgccattttgctgtggcgtgtatggatccgagtggtgacattgtattccttctcctgcgcagtatttaccaaatgtgacaaaggtgaattcacctccattgtc

SEQ ID NO: 32016 - DNA, 330 bp, Zea mays
aacacaagctcgaccatagtgacacgatttttttttccgaccaaggaatgagcacaaaattacataggagacggtgcactttattatggggttaccaaaagctggaggatggactaacttgggcattattgaaacttttgctgtcaacaaattaaaggctgaacttggtttatcgaaagaatataatggggctgcaactcttcaagatcacgtgaagaaagggtctgacgatgatctaaccataatatccttcttactgacaccgctcaatacgttgttgaacacaactgcaatctggtgattaaccaaccatgaagtacttttaacaga

SEQ ID NO: 32017 - DNA, 352 bp, Zea mays
agctttagctgatttatagttccttgttggatgatccccaggtttagcttctccatttcttgacacaaagtgttctcggacaagtgaactctatgttctagggtagaaaacatatgcaacaaatcaaacaaaggttcagtagaaaagtacagacacacaagtgaactctaggttctagggtagatcactacgtttaagggtctactgttctctaactaggtctatttcagtaaattgcttacttaaataaacttattccaaggatgggatcacattaaatgaaaaacgtttacaaggttaatcatttgaacattcattatggctttaccttttattttaccctttaataaat

SEQ ID NO: 32018 - DNA, 283 bp, Zea mays
atctggcgggagcacctccgttcatgcaggtatacatctctgacatgcttccatcctggtgcgcacatgtgcaaatgatggtattagggtttggcagatgcactctgggtctgtatataggtttagggttacatatttcatcgagaagcgccataatccttctcatactgaagatcctggagcaatcgaactggttggtttgaactggtgatatccatttggtggacacacgctctctaggtctgattagggggaactggaatgtttttggtcgatggaatca

SEQ ID NO: 32019 - DNA, 326 bp, Zea mays
tttacggtgttttgcctcttatctattacaggtatagcaatccgaacaactaattctaatatgaaacgaacagccccgtttggggagcacagaacagacaaagctagcgctccgctgccgacctgccggctgccgcccgccgctggctaccctggcagtagcttcttctactacttgtgagcaaacaaaccaagcacttggcccgcagcagcagatggacacgagttgacttgcagttgagccagcgtgtgtaccgtcaactagcgtggctggcagctggctctcgcttgatgagcgtgcgcttgcagttgcagttgcagctgggc

SEQ ID NO: 32020 - DNA, 362 bp, Zea mays
gacctctaagtcacctgcggcatgaagcttcacgggttcaccatttcttctgacacattttggtttgggcataacaaggcccgtggagtgggtcaacggtgagggggtcacggcggtgttcttcatagcaagcacacgttccggtgaaagctttcggcttaagttcgattatttggtactgggagcaatagggggctattatctagcaagaacatgaaacaattgggtaagtactcactcgaggaaggctagccacggagatgttcttcgcggcggagttataacagagaggaaatatgctcgtgggttattccggtgagtttgagttgggcgcttagtggctgagaggtgggatactgtga

SEQ ID NO: 32021 - DNA, 350 bp, Zea mays
gcaagcttgactgtaattttttaacacgtcccagtgtattttgtatctgaagttcttagtatatcaaagaaaaactatacagagttagagaaggtgttatatgctgttttgatggcatccaagaagcttcggcattactttcaagcatacaatattattgttccttcttcgcagccgttgaaggatattatgagaaatagagaagctactgggcggattggaaaatgggctgcagagctcaatgaattttgcattgattatgtgcatagatcttcgatccagtcccaagcgttggcagattttatcgccgattggacgctatgggcttatgatgaagaaacaaataaaga

SEQ ID NO: 32022 - DNA, 324 bp, Zea mays
tatgttgccttttacaacgtggtgtacataaaatcgaaacttggatattctgggagggacttcttgttttacaagaaacgatgtggcattgatcgatccaggctattggcacttgattacatccaccaagaagaggccatgctgtctgataacatggatgagagaaaaataagttttgtgctcacaaaagatccacccagtgatctagaggtaagcataactcccatcaagcgtccaagacagcgaacaaatgttgatgaagaaactatagaagtgtcgattgatgcatataaggagtggcttgcaatactacaacatgataat

SEQ ID NO: 32023 - DNA, 351 bp, Zea mays
agcttgtgaaggttcttcatttccacatgtgctaagcggcgatgccacagccagcccatgctagtcttagcaattaagcatgcatctagaccggcctcctcttttgcaaaatcaactaaataaagtttgtcgtctaatacacccttaaaagctaatgaaccgtcacttcttctaaagacagacacatctatattagtgaatagacaattatatctcatattgcaaagttgactcacatacaacaagttatatccaagcgactcaactaagaacacattagaaatagagtgctcgggagaaatggcaatttttcctaaccctttcaccttgccttggttcccatcaccgaat

SEQ ID NO: 32024 - DNA, 321 bp, Zea mays
ttaaaactatcaatcaaaaatagtgaatcaaacaatctgtgtgtccgttttcaagttaagttacgagaatccaagatatttaattcactcctaagaaagcaaaatctagtctcatcgaggggttttgtgaagatatcggttagttgattttctgtgtttacatgacataatttgatatctccttttgcttcatgctccctcagaaaatggtgtcttatatctatgtgtttggttctagaatgttgcacaggattgttggctagtttaatgacgctctcattgtcacaaagtagtgggattcttttaaactcacagccaaaa

SEQ ID NO: 32025 - DNA, 347 bp, Zea mays
  unsure (1)..(347): unsure at all n locations
agcttgaaaaatatttggatatggntcgaagagttgaagcttccttcgaaggattttctgtcaaaaatatccctcgaggacaaaatgagcatgctgatttgctagctaagtcagcagcacaagggctgcccttaccttcggatgtgttcttcgagacaataaaagcaccttcggtggaacttcttgaaagagcaggcctcaatatatctcctgtttatagcgaagattggagaactgagatcatctcttaccttcagggtaaattccattcagatgacgaaacttataacaggaggatagaggcaagagctcgtccatatgtcatgatagaaggggagttgtacaag

SEQ ID NO: 32026 - DNA, 322 bp, Zea mays
tggtgccaatggagaaatcttaatccttgaagtcttggctgtcaaactgcttgccgttgtcaactgttagttcggacggtactccgaagcggcaaacaatgttttgccaaaagaatttctgtgcagtctttgatgttattgtggaaatagccctcgcctcgatccatttggtaaagtactcgacagcaacgaaggtgaacttgaggttcccctgagctgtgggcaggggcccgacgatgtccagcccccagcgctggagaggccatgtgtgggcgatcggttttgtgaattgcgaggggctgcctgatcgtagagaaaactt

SEQ ID NO: 32027 - DNA, 329 bp, Zea mays
atgaattcgaattattgaaaacttggaaatattcttgtgctttttaaagtcggtatggtaaatcattggggtgtccatgttagacctccatactccagtagctcatggttaccgtcgtgcgaaatgatcaatatgtggcactgtgcattgcgcatctggttgccagctaatcacgcatagacaattagacatatctcatttcagcccgtggattatttccaagttagtacttgcatcaaatattgttctggtacattattgatttcttattacacagttcagtgcctttgatatgtatcacacttcggaaatgtacagaattgttcttt

SEQ ID NO: 32028 - DNA, 307 bp, Zea mays
aaaaaaaacatcaggatttatattttcatcacccccacccatcaaccccttcattttattataatcatcatacgacttatcattgcatgtttcaacatcttttaaactttctcaataacttcattacgcaatcattcatatctcccccttatatattacttctctacttttactctaattaccccatccaaaacactttccaccccttactcatatttccaatctttaaaacatcattaattcaacaatctatttaccattctcaaattattcctccatttattctccttccactattcttcatttt

SEQ ID NO: 32029 - DNA, 287 bp, Zea mays
  unsure (1)..(287): unsure at all n locations
tcaatatttctcctgttcatagtgaagattaaagaactgagattatttctttccttcagggtaatttcctttcagatgacgaagcttataacaaagagaatagaggcaagagctcgaccatatgttataatagaaggggagctgtacaagcatggagtctgttctccactactcaaatgtttatccagagccgaaggtatagaattgatgaatgatatacacgcaggcctgtgtggatctcacattggatctangcctttgctangaaaagttttcgtaaggattta

SEQ ID NO: 32030 - DNA, 219 bp, Zea mays
taacccaaggggggggggttttgcaagaaatggcaggggggggttttttatagcgcccccaacaaaattgtgatgcgcgggaacaataaggtttgcagcttatgttgatctagttgaacctagcatgctacgttaatactattaaaactctttgctcttggcaacgttattaaattttgaaataaggctatacaaaaaacattttgctattttggggaa

SEQ ID NO: 32031 - DNA, 325 bp, Zea mays
taccgcaaccaatctgccttaagtttcatctgattttgtgcagctgccaattttctttcaacatctccacaaaatgagccctttcaatcaacatctgtgccacagtcacctctgtgtctgaatgaaccatatggcctgttaaccaccatgtgctgggcataatgctgaagcttgagaagaaccaaatccccaacctgaaattgcttctcaaatcgcaaccaatctgccttaagtttcatctgatttcgtgcagctgccagtttttctttcatcatatacacaaaatgagccctttcagtcaacatctgtgccacagtcacctgtg

SEQ ID NO: 32032 - DNA, 200 bp, Zea mays
aaataccggcgtcatatagttattataatgccactgcttttacatgaacttgaagataagtctacgcataattctagtatgtgatgttggaaatgatttgagtacatgctgtgctacaatcgcatttctgcaatgttaactatatgcaatttctctgataccatgaagtttggtaactcaaatttgtgttccctgttatt

SEQ ID NO: 32033 - DNA, 357 bp, Zea mays
  unsure (1)..(357): unsure at all n locations
ctgcagcttcttcgtggatgacgaagcaggactgccnaangnggtcgaaaaggattcaccggaggtgggcgccaatgttggggactcgttctcaaatgctatgaattaagaaacaaggcaacacataaaatgttaaacgctaatgaccttcgtccttcgaggcattatttcccttatgatataatgaccttcggacgaatgttgtgaaggacataccttcattagtgcagcatatgataatgaaaagagaatcatatgaaatgtataagacacatgaacaattatatattattatcaactcatttctatgttattatcatggaaaaatagaaatgatatcaatttacatatgtacct

SEQ ID NO: 32034 - DNA, 361 bp, Zea mays
gcccatcagaatgaagcttgttcatgcgattctcacttatatgacccaaacgacagtgccacatgtaggtaggacttaaatcattaggccgaggccttttatcacttatattacagataggtgcatcatcaagatttaaaatgaataacccattcataatggatgcaaaagccacaaacatgccattcttagagatcacacaaccattggtttcactcgcaaatgaataaccatccttcatcaaacatgaaggagacataatgtttcgactcatactaggaactagataacaattatgtaactccaaaataaatcctgatgggaggtggagttgcatcgtcccgacggtcaacgcatcaac

SEQ ID NO: 32035 - DNA, 99 bp, Zea mays
ttatgggagagagagtccctctctcaaacagatccagatcatctcttgaatggacatgcagcaagatggaaatcctccatcgactttatttatggttta

SEQ ID NO: 32036 - DNA, 256 bp, Zea mays
caaaaagggggtttttttttgtatcaccccccctaaaatcatttattattaccttatattttaagaatatgatgtctttttttaataactttactttttttaaatatgcttttattataaaaattaactttcttataattataactatattatatttagaattaatatctcttattataataaattttaacattttcaattctcatttttttcttattaatatttcatcaattttttatttaattttatataatat

SEQ ID NO: 32037 - DNA, 385 bp, Zea mays
  unsure (1)..(385): unsure at all n locations
ctcatcaaagacgacggagataaagcccgcctggtctagtaacagaaaagagacagaagaggttttaccatacagagaggccaagattcttggaaccagagaccacaaacatcatagtcattgaccccaccaactaaccgtgctccccgcacgcgtgcttnacctacatgcgcactaccaccgccccacgttccctttgcagcgcacccaccgtcaccatcatcgtcggcaacaccatcccccctaccccttgtcacacctgcttgcgcgtagcacctgctccatcaccaccactccacaaccaaacaccacctctcacctatatatactccccactagctccctcagttcccatcccaagcaatatacacctgataaaatccac

SEQ ID NO: 32038 - DNA, 234 bp, Zea mays
acaaaaatgaggagcggggcattggcataagctgtaaatgatttgggatgacgtttatacccagacgttgaaatgaagaccactgcaggaatgtgctttctacaaaaggaagtgtttttagacctcgcaaaaccttatcctgtcgcaatctaatttatatttcaacaaataatattgcgaggggctactattggggaccttccgcatccgaatgtcctcaaaacacgatttaac

SEQ ID NO: 32039 - DNA, 427 bp, Zea mays
ttataggtgattcttctgcgtgcttctgattgatctgccgaaaatgttctcttgcgttaggatcttcggctacgaagcatacccccaacagtgacggttgtaaacctatttgcactgatattttgtcgtaaccattagtaataggagccgatagaaataatcttttttacaggtaggtaactaagaaccgtcaatggaaccgttctacatacggtttttttaagaaaccaccatttaaaatagcactgatgacagttgataacttaaatccgtctgtatatattataccatgccacaggcttagaactttttatactattggtattggtctgcacttcactcggcttggaccgatcggacccgatgagttcctgcgccacgttcttacctaatagatataaaccgctgtggtgagtgctgtggtgtt

SEQ ID NO: 32040 - DNA, 104 bp, Zea mays
tcaaaaggcaaaaaagtgttttttttatataacccacccctaccttagctttttatttttaaaaacatttctcccaaaaaataggttaatttattccaaaatta

SEQ ID NO: 32041 - DNA, 325 bp, Zea mays
acccggcgacactgacggtaccatcacatctcgatcttggccaagcgtgggaccggatgtacggctcgatgcccgtcccgatttgcggttatcgcgccgacagacccccctgaccgtgaccgtgatcgcactcacgccaccgacctgacggacacaatctccaagcgaccaccttgcgactcctccgcggagcgcccgctttttccgcgtctgttatgaggaagactggggaagaaaagtagggttggtatgatgccaggatatgcggggtattgaaggttattaacaggcccggaacgttcaaactataatgttaatgcgactt

SEQ ID NO: 32042 - DNA, 111 bp, Zea mays
tgactgttacagctccttgctgaggtgtctggcgaagagatccagttggcacctctgacgctacaagacttgctgaccgtaccctcaaatgtgcttatataatgttagcta

SEQ ID NO: 32043 - DNA, 237 bp, Zea mays
actgttccagatggttttgctcttatacataaaatgtgcccttaagaaaggtttgcagaatgtcaaaagcttatttttacttaactagattggctacaatatagcttaaccaatcctgctttaagattcttatcagatacaatatattgctttaacatcacctgacacaaaacatctcttcctacgctctgaaactaggaggagctactttctgctagctggacttggaagtgtata

SEQ ID NO: 32044 - DNA, 377 bp, Zea mays
  unsure (1)..(377): unsure at all n locations
caaagccggacaccatgtagttaaaaacatatatagagagatgtgcatcgatcaccctggaatccattattttgttgaaaagctttatagtagcattntattaggctatctccattatcttacacaatcacatacccatatatactagagtgaattcactaccatgttctaactntaaaattntcacagcatcaattgttgttttggaaacgagtaaataatgataatattcaattatgcgtagcagatagctagatcatctgtgctcatcttacaagcaacctttatttaacgctggtttatacttaaattttacnaagaatcgactttttggagacagcaaacatatatgctattgtggtacggatggtatatca

SEQ ID NO: 32045 - DNA, 182 bp, Zea mays
tggatggacctccttcaaaatttggttcccagtggacgggagaacacactctttgatgatgcctgacgcgccccttctgaactattgcttccccatgagttgttttgagcctgcttgtttgatctgtgattttgcaaatggttctcttcttgttgtataattattatatcgtaataatagtc

SEQ ID NO: 32046 - DNA, 298 bp, Zea mays
  unsure (1)..(298): unsure at all n locations
tcttctgtctcaatgatatgntgggtgaggcctacgagggtaattcttcgtctcctatcattaatttataactcttctttctttttcagntaaaacttctctatctctactatctaaaacactagttntctacggttctacccggcgtctttctcttgtcgcttaaagcaataacgtacaatcgtcgaattgtgagtttgaccctattcgttgctctatattcgtactccctgagaatataacacatactttgtgattattaaacaagaatcgcacaatgcatgacttatattatttt

SEQ ID NO: 32047 - DNA, 311 bp, Zea mays
  unsure (1)..(311): unsure at all n locations
agactatattcagcattacttacatgtcttcttcaacattnggttagactatatntcatatcatatacnttcatgttgctacacatgccataagtggtaaatcatattctgttacctatgcataaggaagntagtctaatcaaatcatatcttgcacctctatttatcacatnngcttttctaagtagaagatctctgtcacgaggagtatttcttcgtctctaanaggggagaaagttccttctaaagggaacactttattacggggagtaacaatntggtgtttaattggtatcctacaattagtatca

SEQ ID NO: 32048 - DNA, 357 bp, Zea mays
cacaattataggcgactaccaaaaatcacatgatttcaatctggcatatcatgaaaacatgtccctgatggtaaaaaaatactatttatgtacaacatattattgcaagaacatgatatgaggtgccatatctgatagcagaactcaaaaggcaaaatgatacacaaaccaaacaaaatcaaggatcctttatttgtctatcattctagcgtaaggataaatcaaaaaggaaaaaagatattttagctgtctccacagtcatgagtgtaaccacagactaataaaggaacttttaaaccctatacacacagaacgatgttgcttacaccaatcgattgctgctcaatgctctgatgt

SEQ ID NO: 32049 - DNA, 212 bp, Zea mays
  unsure (1)..(212): unsure at all n locations
gactctagtaacttagatgtacgtgaaggagagttgtattcaagacacaacttgatgtatctctattntaatggcatattcatagcatcacatgagcattcatgtatatgtatgantatgtatagaaaacgaagacagtagtgttgaagaagaagagactacaccaccaactgagaccccacctgccgggaatggggtttattttgatatct

SEQ ID NO: 32050 - DNA, 413 bp, Zea mays
tctgtgtggtctaaccactgatatggtacccgtccctatccttggtattcactcggcttagcgtagcactagcagggattacggatggggcactagaatcctagatcactacgcgccggcgaacctccatcgcggggagcagggcaacgcctctctgctcgactgaaacgagggagacgccctcagccatcaattgcctgatgggcgactgagattagagataaggaaagcaattcgccccaattgcttatgaccatcggatctagaacgggcaagggagattacatcatggcatgggtagttttgggccgttgatccatcgatgtgcgcccaggaataaatgagtagataccccttcacgacttcagatccgggccggatatcttcgatcctacgactgctagtgcgtaccg

SEQ ID NO: 32051 - DNA, 358 bp, Zea mays
  unsure (1)..(358): unsure at all n locations
atcatgatcngactggcagatatcgatcctatactcaatctgatacccgacctgaataccaatataattcggatagcaatgaaaactcaactacacaataccaaattaaaacataagggtggagaatataaatatattggatgatacataattatatacctataatagtggttaataaataaactgatgatttaaacgtgttttgttaatgctactaaatattaaatggttggttgaatttactaatgggaaccaatcaaccaaatngtcccaattcagatatttaacaaacgttagttaactaattattctcatatcacaaattgaacctctcaatataactttatttcctcccgcc

SEQ ID NO: 32052 - DNA, 226 bp, Zea mays
cactccatatgtttctctgcccttcacgaacgcggcctgttataacgcaccaacctggcgcggctcacatttgttaacttatcatttgctttcgtaatattatagctcaccgcgtaggccaacgctaaaataccccctccttgaacgtgatattacttgcactgactcaacgtagactatgccgatacctgcctgttatttgctggaagggaaatgcttgcactta

SEQ ID NO: 32053 - DNA, 99 bp, Zea mays
gttgatccaattatgtgagatatatattggctactataatcactgtgaaagttagtggacatgatcaaaatcagatgctatatggggagtgaagatttc

SEQ ID NO: 32054 - DNA, 195 bp, Zea mays
  unsure (1)..(195): unsure at all n locations
cccatggttagtctagcaagtaagcaagtgtcgagttcagctctatcacaatctatcaagtataactgactctctaacactcncttatatgctattggatcatcacttcttctcaagacggcgacacctatatcagtgaatagacagttgtagcccattcgacataatagtgaaacagaaagcaaattgtaatct

SEQ ID NO: 32055 - DNA, 310 bp, Zea mays
agctaaggcatggtgcactgagagatttctttttctcgagctgagcaccgtggcttgcgcgaggcctctactcagattcttgacttgaatactcagctacaattccttacttctggagactaggttattagatactcaatatgactgcgggataaaaacgaggttatatactgcctcttggctccttgggctcagtgcctggtacaagcttaacgtgctgttgggtctcctggaaccgagcacactccctacgctcgtgggattgcaccttctctgcgctgaactcaattttggcttatctgcctgttcc

SEQ ID NO: 32056 - DNA, 350 bp, Zea mays
tcttttatatgctatgactaatgtgttttcgagtgtatttcaaaccaagtcataggtatattgaaagggaattggagtcttctgcgaagacaaaggcttccactccgtaactcatacttcggcaccactccgagcaactctctcttctttgggggagaaatgagcataaaggaaaaggacttcatccttgggggagagagtaaaagctcaaacgcaaaaggacttctcctttggtataatcttaactcacttatttatgaccaaaggggaagattgcacttctagggctctattgatttcgtttttggcgaatcatgccaaaaaggggggagaaatgagcccaaagcaaa

SEQ ID NO: 32057 - DNA, 223 bp, Zea mays
  unsure (1)..(223): unsure at all n locations
agttcctcttcccggagaggccantccgcgctcggcggagttattatccccgccggagcacgtggaccgggtaagccacttcaccatacctcgattccttgtgcacacagttgttacgtgaccccgtgaagcttaccgtaccctcggattgaaccaattcgccgtggtttggcccgtatactctccgtcggcatggacacccgtctttacgcgtggaccgggc

SEQ ID NO: 32058 - DNA, 434 bp, Zea mays
  unsure (1)..(434): unsure at all n locations
acattaaaacaatacaacttgtgtgaaatatttgcctagtgaatgcactctacgtgtgtcanacatatgcaatgccaatgcttatgatgccatgctcaaagtttagttatatgtacaccacgtggtgtacatccttcctcccatcaaataacacttctgcaatatgggagtcgactgtgaacatacctactatcatgccggggtctcctgaactgcttatcctccaagtgattcatctccatgattgaacgtggtgatacggttgctgctcagctgaacacatctgcttgctgggcattgggctgatgctgtggctgcttctcgacatgcataccatgccttgttcacatgaaatgcctgttcactactgtctgctactgctctggtgtgggcagaacagactgtatctcctctaactactctactatgttaca

SEQ ID NO: 32059 - DNA, 305 bp, Zea mays
  unsure (1)..(305): unsure at all n locations
agctggactacnatttgaggtgtgcgaggggtggtgtncacgngctcacaacatttgaaatgttccttcagcaacttattcccgaagcaatcatcaggatgaatatcttcgtgtgggccgtgaaaagccagtgcttggaacctgatgcgaaaagcttctgttacatacatgaattgttgtacgaaacaaaaccctgtggtccggtacacgatctcgacaattttggctgctcagctttcgctcccggcctgggtaaaacttgcccatgccgaccttttaaaaaagtggcctgtttactggatgac

SEQ ID NO: 32060 - DNA, 381 bp, Zea mays
  unsure (1)..(381): unsure at all n locations
tcacttgcgacnacgctattgtgggacaggtccaagttcaancctcgnngcaggagcacaatgtcgaactttaagagctccgtgccatcgcgagtgaggtgtgtgaccacctctcccctcctctttcaacctatacgaccaaccctgactgactgcgggcgctaccccgccacgtggagcatgtggtcttctaaggggcgttccacgagggtagtccggccctgggtcagatggtatcccacttcgctgagatcagcacaagcgtaattgcctaagggttcgttgtctgccggagtgacgatgacctaaatgaaatcgaaaagcaagtgcgttcccacgctcgtttccttgccagccgagtggacttgaagtgctttttgt

SEQ ID NO: 32061 - DNA, 198 bp, Zea mays
  unsure (1)..(198): unsure at all n locations
tgtgatgaccacatcaagacccctggagctgctacacatggacgctcttcaacccgtcgcctatctaagcataggaggaagtatgtatggtctagttattattgacgactnttcccgcttcacttgngtgttctctttgcaggataagtctgacacccaagggaccctcaagtgctctctaatgagagtctcaaatga

SEQ ID NO: 32062 - DNA, 251 bp, Zea mays
  unsure (1)..(251): unsure at all n locations
tctgcagagcacgtaggcagcaagactgccgtgcagatcangagccacgctcagaagttcttctccaaggtctcgttgcctctttgcatataanaaaaacacacacacacacaccatctaatccncactctgcctggaaaaaaaatccatggattgtgttgcttgcaaggcgatgtaagtcagctcaaccatggacagcangtgctatccatgcttgctgtgtcactgaagacgtacgggcttctgatcgc

SEQ ID NO: 32063 - DNA, 370 bp, Zea mays
  unsure (1)..(370): unsure at all n locations
atgccagagcccacccacgttagtcttagcaattaagtaagtgtcgagttcaactctatcaaaatctactaagtatagctgaccctctaacactcccttaaatggtattgatcatcacttcttctatagacagtaacacctacatctgtaaaaagacagatgtagcccattntacataattgggaaactgaaagcaagttgtaatctaaagagtctacaagaaaaacatttgaaatggaatggtcaagagatataacaattttacccaatcctttgaccaaaccttgatttccatccccgaatgtgatagctcgttggggaatcttggttttctcataagaggagaacatcttcttctnccctgtcatgt

SEQ ID NO: 32064 - DNA, 321 bp, Zea mays
  unsure (1)..(321): unsure at all n locations
cgaatcgttcacaatctcagaaatctgattaacagagcagatgtctgaagaaaattccacataatnattgctatatggtcaagaacagagtgcatgccaactgaaactgtgtattatgattgcatctgaagaaactatggtgctgtgacaagtgctagtactgaccacgcctctttggacgccgtcnggcttgatggcgatgaaagtgcgctccatctggaatcacagcagaggagtgttgtgagctcgagaaaaaaaaagggagaanatntctgtcactaggatgacanaatcacatgggagcccactcgatcattttga

SEQ ID NO: 32065 - DNA, 304 bp, Zea mays
  unsure (1)..(304): unsure at all n locations
ctgaagacactattgaccactgctccggntntggctcaaccggacatcactaaaccttttgatgtatattgtgatgcatctggcagtgggctcggctgtgtactgatgcaagaaggccgagtgatagcgtatgcttcaaggcagtngcgccgacatgaagagcactatccaactcatgatctggagctagctgctgtggttcatgccctanagaattggcgtcactatctactgngaaatatctgtcatatatatacagatcataaaagttngaagtacatctttacccagtcagagttaaata

SEQ ID NO: 32066 - DNA, 367 bp, Zea mays
  unsure (1)..(367): unsure at all n locations
tcctcgctccacccggtgtgtgttgcttgggtactctcctgaccaccaagggtaccggtgtctggaccttacctcccaccgcatcatcatctctcgtcatgtcatcttcgacgaagatgtgtttccccttgctggatccaccccacccatcgatcttgactccctcctcgagtccgatccgattcctcccccacctccggcgccccatcttgcgccgttacctgctcctcgtgcggccacgacgccaccgctcacgacctctttcgcgccacgcacggccccgtcgaccccgcctgcgccacgcgcgaccacgtngatcatgcctgcgccacgcgtggtcccgtcgaacccggttcgcttcgtcaac

SEQ ID NO: 32067 - DNA, 313 bp, Zea mays
  unsure (1)..(313): unsure at all n locations
ggatcattannngcacatcccgnggcttgcgcgtgcaggcttgtgctacccatgcatcttggctatcgtgaataaaagagttcgcctgttgcatctgtcacttgcgaaatacccgcgctctgaaatctcgccctagttggtaaactacaactggcttgcccccaattaagactacgttggataccttgggattagagtgctatggagggattggagagggtgtaaatccccactagatcacatacttctctcatacatagtaatccattccaatcccactcattactagagtttccaatcttccttttgtgac

SEQ ID NO: 32068 - DNA, 160 bp, Zea mays
ggatctaccttcatgagctatctcctaacgctattcccacgccttactgtttacatttggacttttccaagccaagggggggagcccattgctgaatgcttctacccagtgcacgaacttcctttccataataaagctttatgagatgggcttcattaaa

SEQ ID NO: 32069 - DNA, 209 bp, Zea mays
ctccacgtactcacactcatgtgtaacgcttcacacgtggtgtaaacttacacctagtgcgtgatgcgctaagttacacaatcttacaccacgcgtgtaatgatatacacaggggggtgctatatacaccacgagtgtatattcttcaccaaaagcccttacagttatatataatcttataccctatcaatttccaactaactccgtat

SEQ ID NO: 32070 - DNA, 277 bp, Zea mays
  unsure (1)..(277): unsure at all n locations
acaacagtgctatgtgtatgaaagctgttgtaactctgcaccaacccatctgtttatatagtggtgtaggtggaaaggtgaaccgtcaaactgcctatactcngtgaacagtggaccactcagtactcggaaggcaaaccgctagattgtctgccttcactgaacggcggaccacttgacgactggagtatattaatcgtttctcagcaacgagctcagggaatggtgttntctgaccttcggcattccgaagcctctgagatttttcgtggatcga

SEQ ID NO: 32071 - DNA, 243 bp, Zea mays
  unsure (1)..(243): unsure at all n locations
actcttatctctcacaagcctctcatnntgtcttcaatggtccgccattgattgtcaattggtaactntgagaactatattggcaccatttacatgtcttctccaatatttggntagactatatttcatatcttatacttctcatgttgctacacatgccataagtggtaaatcatattctgttacctatgcataagggaagttagtctaatcaaatcatgtcttgcacctctattcttcaca

SEQ ID NO: 32072 - DNA, 345 bp, Zea mays
cataccaggacttgggctgttggatgctggggactggatatgattggacctttcaagacagctcaaggaggatacacttatgtattggtagctatcgacaaattcactaaatggatagagttcaagcccattgcttttttaacctcatctaaagccgtggaattcatacaagacataatattcatattccggatatcaaaacacatcataactgacctatgatccaactttacaagttcataattcttcgacttctgcgagcacaaatgcattcagatcaagtatgcatcttgatgcacattcaacaaccaattggcttgttgagcgagccaacgggattatact

SEQ ID NO: 32073 - DNA, 515 bp, Zea mays
  unsure (1)..(515): unsure at all n locations
gcttacaatatactgagaatgtcttgtgaacatactgcataaccaataccggtnngtgtgtcaacttctgcttcaacatctcatatgattcttggcatgctggggcccacttgaactcaaccttctntgctagcaagggtgtcattggcctgncaatcttggagaaaccttcaatgaaatgccgatagtaactggccattccaatgaaactcttgatcccttggacatactttggtgctttctagtccagaatcgctgctaccttctttggatccacagctagtccatcttcggttataatatgacccaagaacagaacttcgctgatctagaactcgcacttgctaagcttggcgtacaactggcattctcgtagcctctgaagactctcctcanatgtcttcatgctctngctcattcttggaatatataagaatatcatcaatgaacaccactacgaacttgtcgaggagtccatatcacactacggagctaccataaatagtaccgaatca

SEQ ID NO: 32074 - DNA, 335 bp, Zea mays
  unsure (1)..(335): unsure at all n locations
gccctcggacccngccggatgtgagggaagcccgagatctacctcaccggacttctgtcttccggcgccgcgcgtggaccaaactatccccgagcctccgacctattccttgcacccatgtcttctctggcaccccatgaacctctctgacccatccaattgctctatctcgccgtgaccaggccggactccttgccgtcgacgagcatctccgcctgcgcgcgtggaccgaccgactccggccatcttccactgtgacccccacaccgttgtgatccccgagacctcccctacgttctcgaccacttaaccggagcaatttcgccgccggtaag

SEQ ID NO: 32075 - DNA, 203 bp, Zea mays
tagtcacctgcggcatgcaagcttgcacgggcgggggccagtctcgcctgccaacgcgctcatgagctatagtcgaggcttaacggcctgcacaaccgcgtggacatagccgagacctcgacacgcgcggaagtcgggcggacgcatgcgcagttcgtggacgtgtactcggagctgggtgcgcggacggccgccttctatgc

SEQ ID NO: 32076 - DNA, 128 bp, Zea mays
taaaatctgcatactctagtgctttaacaagcataaccatgccaacagcccggaaagtgatagtgaccactgcatcaccatctaatacaggcccaacaagcttgtcgctgtcatcaactatcacaaat

SEQ ID NO: 32077 - DNA, 427 bp, Zea mays
ctctcaaatggacgtgaagagagtcatagtgaagggaccaatctaggaagagggctatgttgagcaacctcccggcttttaaaacagtgagtaccctaaccatgtctataggctctctaaggcgctttatgggctcaagcaagccccaagagcatgggatgaatgccttaaaaatttccttattgcaaatggcttcaaagtcggcaagggcgatcctactttatttactaaaactcttgacaatgatttgtttgtatgccaaaattatgttgatgatatcatatttgggtctactaacgaatctacatgtgaaaaatttagtaagatcatgacacagaaatttgagatgtctatgatgggggagttgaaataatttttaggatttcaagtcaagcaacttcaagaaggaccttcattaaccaaacaa

SEQ ID NO: 32078 - DNA, 340 bp, Zea mays
  unsure (1)..(340): unsure at all n locations
gagcccatatntcatattgaggcactaaattgagacattgttgaagatgatcttatatganaattgactatccagagtcaataaaaaaactggaagtactagcaggaatacaaacgacgtgcttatcataccttggcctcagcacttgcgctcatagtctgatggtgcccctctctttcctcgtatctttcaatcacagaatccatggctggtcgataaaatcagttntttcggttagaaagtcacgtcgatcacttgtgctgtantaacatataaagaactatgtgtgatcacagttgcgagcctgctgtgcgtaagacataacaacatgccgatcata

SEQ ID NO: 32079 - DNA, 277 bp, Zea mays
atcttaaaaatattttcccccacacaatttccctcattctttaataatctttattatttttaattactaaaatttttcttctttatattcaccctttattaattttcatatttttacttgaacccccctctataaattttcttctcaaaaatatatattattttcttctcctcattatatgcttttttccattctttttttctacattacttgtttttaaaacacaactaatatcctcttaaactgtaaaattcttaaacccattatatttcttatt

SEQ ID NO: 32080 - DNA, 238 bp, Zea mays
  unsure (1)..(238): unsure at all n locations
gctggtctcttataccancaatgcggagaagtgggtctatggngtgaattaaccagcgactaaatctattganggttgctcntttcttttcagttntcacataattgccgacagaccaaggctggatgtaataaagtagctaccgtcacctattactnttganngtggataattgtggtgcagtaaggcacaaggaaaggaangaatacaccgtgaaattttgtaatcttcatgagtc

SEQ ID NO: 32081 - DNA, 161 bp, Zea mays
aatctcggccactcaccacacccctattgctctggacgttagcaaccatcgtcgtttccgctgtgagattgctccctcatcgcctgtcatgctctaaactctatagtggcctcttgcgcggacagtgaacttactcctatctcctgtaccttgtgtgtggc

SEQ ID NO: 32082 - DNA, 186 bp, Zea mays
  unsure (1)..(186): unsure at all n locations
gcatgccaagcanggaagcaagttggtgttcatcattcacataagaacatcttgacgactgacaggccacttgagcttctccacatggacctattctgcccgatcgcttacataagcatcggcgggagtaagtactgtctagttattgtggatgactattctcgcttcactttgcgtattctttta

SEQ ID NO: 32083 - DNA, 439 bp, Zea mays
  unsure (1)..(439): unsure at all n locations
acgtgagaatattggtgcttntgtgcatgcactcttacttgctaagccagtgggcttaaagaaaagtaagtgacgcactgacactatntaagtatttatggcaacattctgttgtacgttagttcattaatttttatttgtgaactcccgacatgaaatgctaaacagttttatgtggtatgtttagtgcaacactgagaaagttgctgttttcttttgacccaatgtcagatggtgtctgggttccttaatgctttccctcntagctcaagagaacatattgtattagtctcgaatactctaggcatgaatatcatgtagttcttgtgtagtactactagtaccnnctctctttcaaatgtgtcatttattgcctaagctaacttcttaacattatagaaaccaccatattacactctcacatcaaatagttcattaa

SEQ ID NO: 32084 - DNA, 307 bp, Zea mays
  unsure (1)..(307): unsure at all n locations
gatctgggncnnccctcagcaccaccctgaggggctggattatccttagcggcacccttggaaactgaaacacccttngttgtaccgaaaggagccgggtgaccttggcccgcaacgtcaaaggtcaatatgtcctcgtgaactagaccacgttcccagggtcacgaaacgtgaaaaactgttcgggttatctcttgcccgataggattactatcctaagggacatctttcggaacctctaaacgaacgatagaactttcaacttctgatgcgttaataaaagggctttatggataatatcttttac

SEQ ID NO: 32085 - DNA, 269 bp, Zea mays
cctatgggggaacagcactgcagctgtgaacaccgacaagaagcagtagccttttgtcgtcatagaagtatacactatgtttggctcccgtctcaaaagatacgtctgttttagtaagttgatggtcggtcacccacagtgcccattatctatttttattaatgctaatatattacaatccggttagagtaacatacaattatgatctcgtgtagatcaatatagtataactataagttcataactgcatatatacattctttgatatg

SEQ ID NO: 32086 - DNA, 362 bp, Zea mays
  unsure (1)..(362): unsure at all n locations
ctaactttcactttacgccctataggaaacggacacccacgaaaaacgctaataacgtttcttggaaagcttgattggacccttgaactaccaattaaagagccacaactctcccaatttttaaactttgcttaacaaggcaattggccttctaagcaaaaagaaagagttgtcagatcataatacgaagtaccaagggcagaccaatangaatacccggctaaacaactcccaaggttcttagttccgctctcaaaatcaaagtgggaactacaactatctagcacagcgctctctactacaaggtctgatgaacaaccaataactgaaccagcctagtagtcactctcataacggtcaaa

SEQ ID NO: 32087 - DNA, 352 bp, Zea mays
  unsure (1)..(352): unsure at all n locations
atctcttagtcacctgcggcatgcagcttctcaagtcttcacaaagcgctcgtggacatctgtgtgcgtgatctgcagtcgtgcggaggcaatatcttaccggagcctcaacgccgccgcaggctcgcaatccgtcgtggacagcatctaccggacctctattgtcggtgagaaccacccctccctattctctatgttctgcgcttcacgtagcacccttatgagcggggattgtggcatctgcgcaccggcatggctattgccgacgagccctccgccgtgcggcactatagcgccgccgtgcccaatgtcagatagnggaaagagttgtgcaccgtagatctcaatggac

SEQ ID NO: 32088 - DNA, 340 bp, Zea mays
  unsure (1)..(340): unsure at all n locations
aagtgtattactagtggaccaatcattgaggagggctatgttgagcaacctcccggctttgaagataatgagtaccctaaccatgtctataaactctntaaggcgctttatgggctcaagcaagccccaagagcatggtatgaatgcctaagagattttcttataactaatggcttcaaaagtcggaaagccgatcctactctctttactaaaacaattgcaaatgatttgtctgattgcaaatttatgttgatgatatcatatttgggtctactaacaaaactacttgtgaagaagttagtatgataatggtacaaaaattctatatgtctatgatggg

SEQ ID NO: 32089 - DNA, 459 bp, Zea mays
  unsure (1)..(459): unsure at all n locations
cttctatggaactcatctgacgtgtagactactatgcatatgtngatgcgagcacatcatgaaggctttcaaatacatgcttactcattctaaacatattanagcactctatangctcattaagtgtcatcactacccaattatatccagtgacttgaggttccctacgactctctttattaaacaaggtagcatcatattacatactangtatatgcccgtgcgttgcgacnggagtaaaaattttgtacgaaatatagaaacggaacgacaaatatcactatgatatgcaaaatatcatcgtaacactgatgtgtgttgctactggttcccaaaataactaagtatcacatctttgatgatgttgtgacatagatatagagaataacctgctacagcttatcaagacatcaacacatgcatctgatgttagtagacacttagatccctcacatatct

SEQ ID NO: 32090 - DNA, 335 bp, Zea mays
gccgttcccccctttccagaagccacactggaatggccctgaattaagcaaaacgaaattccgtgacaaatatggattcgtagatcgatatatagttccgtgatagaactttggtattttttagtcacactacatgcatgtataccttgtgatcctttttatctggcaactctttttttcctggaaattcaattacagatctgagactagctaatgaatctagtcctccacttctgcacgcttgagaaataatactgctcatatactctgcagtacaacatgttgattatatatcatgacatgctcctgagtctattatacttattaatgggaaa

SEQ ID NO: 32091 - DNA, 185 bp, Zea mays
  unsure (1)..(185): unsure at all n locations
tcaatttcatctctcacccgcatcactaccggtaatttggcttttgccgagtgtcatattctctgccgagtgtttatttctggcactctgccaagagctctttgccgagtgccacgcanaanaccctctgtataagagaacactcggcgaagacactcttcgccgagtgttntatttttgacact

SEQ ID NO: 32092 - DNA, 277 bp, Zea mays
  unsure (1)..(277): unsure at all n locations
gtcgtgcagcgaccttggaatgggtggttagcgaccgaccgtatcgcaggcgcaattaatgcggggatcgcgtgacaccttatattgacacacacacctcattcgggaaggtcgaaatgaccgtagtcactttgcccctttactgatcgttctgacagggaaacaacactattcaccccgtgtcgactactgtgccancaaccagggtgaaactgagtcacgatcttccccgagttcaaccctgggtgcaaaaaggagctgcgccttgcccgaactc

SEQ ID NO: 32093 - DNA, 300 bp, Zea mays
  unsure (1)..(300): unsure at all n locations
cgttgaaagggtggaacatcaatgtggaacgaagatattctagacttacaaagaattattgcaaaacattgatagcttagaataaaaagtgaaagtactggtatttcagtctcggaaagacttgatcagctcgatatggaatggaatntacaaaatatgatggctgaagaanggtgtaagaaaaagcacatggcgagagaacaattattaatganggtgatgagaatttangtactttcatctgagagcacctagaggngnggtgaatatgtgatcctgtcaaacttgaacttaatgcca

SEQ ID NO: 32094 - DNA, 276 bp, Zea mays
  unsure (1)..(276): unsure at all n locations
atacaccttaaagcttatgaccatcgcttcttctanagacagacacatctacatctgtgaatagacnattatatcccatattggcatattgactaacagataacaacatatattccagagactcaactaanaacacattagatatagagtgctctgatgaaatagcaatttacctaacncttntaccttgccttgattcccatcaccgaatattattgaatcttgtgaatacttgttttgacgtagggaggaacatcttcttctcncccgtcatat

SEQ ID NO: 32095 - DNA, 299 bp, Zea mays
tgtgtgagaagcatgtctctgcatatatagtctatctgctactgagggaacagacaatgtatgcgatcactcagaaatacagctccagcattacatgcgaggagaacgctacctctctgtaacttgcatttttacttcaaccgcatgctagactttgcctgtgaacatattggcctgaaggggagtacgtaaagtctataacaacagtggcagatctacgagttgcatatcttacaaagtcacttagctatacaaaagcagagtgaaatttggtcggattcggtttgtcccgaatacac

SEQ ID NO: 32096 - DNA, 321 bp, Zea mays
  unsure (1)..(321): unsure at all n locations
atcctgacctgaaaaccttgccgactaatgttctggatgctgcatgtgttccgcactgccctgcatggacttcctccagaagttgctttccgggggacgggagaacgcacttcatgaggacgcctgacgcgcccctccggtataatacctcctcaatgagtgtatagtgagctgattgtctggcaatgcgctctgctgagatcttgtcatctggctcttcttcatctctatatacttaataatcggttgcctccaatcatcagagtctgactcgtgttggtctatgatgctgcactcttnctattgatccgtcgagatgct

SEQ ID NO: 32097 - DNA, 284 bp, Zea mays
  unsure (1)..(284): unsure at all n locations
atgaagcttcttcatgcgattctcacttatatgacccaaacgacagtgccacatgtaggtaggacttatatcattatgccgaggccttntagcactaatattacagataggtgcatcatcaagacttaaaatgaataacccattcataatggatgcaaaagccacaaacatgccattcttagagatcacacaaccattgttgtcactcgcacatgaataaccatccttcatcatacatgaaggagacatatatgttctactcatactangaactacataacaat

SEQ ID NO: 32098 - DNA, 218 bp, Zea mays
tccgagcgctagttacttatcgcaaaaggggaccactcacgcctccctatcccttgagcgtttgagtccctttgcttggtcagccttggctgcttacctgtaccccgtccttttcaggatcccctttcccagttttctatactccccaataaacccgcttaaacacgtccttcttcttgaaaaatttctacccacaggggtctccctctttatatccc

SEQ ID NO: 32099 - DNA, 275 bp, Zea mays
ggtgaagttggtcttaaaacccaatttggcaccaatatatttttattaatgatcttatcaatattaataatttatataagcgccacaccataaacccctccatgaagcctagagatctctttaactaattggtcacttaatatgggtattcccgcgcctctttttaaatcggcaaactatatatgatacgacttcttttttattctattaaatgggaattaaatctaaactgcttcttcacccggtcgtccttcataatctaacttatttcttca

SEQ ID NO: 32100 - DNA, 372 bp, Zea mays
  unsure (1)..(372): unsure at all n locations
acctgagtgaagccgggcgcggactntatccctcatgcgacctgagactgngtctcccatgctagctatggtgggtacaagtgcggtcactgcacggcggcagccggtgtcagtggagcattgtatgccaaggcggtgaggcctggacgcgaacggngaatcaatggngaacggtgtcttgtgtggggtcggagtaccctgacttgacgtgtgtntanggttaccntgcaagggttanaaacttgattcgaatcgtctggttctcgcagctaatgagactgcttgattccttgtactgcatcgagtaagaagtgaaatgtggactatatgagataatntgttgattgaactacattgatggtaccatgtatg

SEQ ID NO: 32101 - DNA, 221 bp, Zea mays
atggttctggtgggaatttaagaataggactgctctaatttaattataatatttattcaataaacaacattactcgataaggctatgaataagcacatgacagacaattagacataacatgtaatactctaagccattcatataacatggtgcaataaaagcaatatccataacatatgttattttgattgctctaatagcgctgagtataaaccctcacc

SEQ ID NO: 32102 - DNA, 147 bp, Zea mays
gatagaagaatgaatgattgcaaccctctacatctactgttgaacatgtcactatttgtactagatgtagagatgctaacattgaagctattgatgatcaccttgccatgattaaacaacacaatgatcacatagctaaattaactg

SEQ ID NO: 32103 - DNA, 143 bp, Zea mays
taatacccccgcctgcactctcgagactgtgaatcattaacatctgcgcaggaacctacaacggatgataattgacgcacggatcaccctgcgctggtaatattgcatgggaacggggaaattgtctatgcccttaataaatg

SEQ ID NO: 32104 - DNA, 330 bp, Zea mays
  unsure (1)..(330): unsure at all n locations
ttcccccngcgggggggtttctggtttttccccccccccttccccccccccctcttgagttttgtttttcttttttttttcccccccttcctcctccctccctttcttccccctttccgtctcctctctccccccttcctctccttctcttctctctccttctccctctctcctcctcctctcttcccctcctctctcctctctcttctctcctccctccctcctcccccccctctccccctccctccccctcctcccccttctccaccctccccttccctcccctccttcttcctccctctcatccctctcctctccccttctctccct

SEQ ID NO: 32105 - DNA, 283 bp, Zea mays
gtagtcttaacaattaagcaagtgtctagttcatcttggttatcattaacatcaactaaatatctgaccatctaacactcccttaatgctattgaatcatcacttcttctaaagacagtgacaccttgatagctctcttgtgagttctggtggttggatgaccactcaattaaaggactaacaagtgtactaagtgttgaacacgtgcttaaggtagagctcacaggattcaacacaagtgaacaacagtgatggtccgagaactggattatgaatacataat

SEQ ID NO: 32106 - DNA, 214 bp, Zea mays
  unsure (1)..(214): unsure at all n locations
catgttagtcttagcaattaagcaagtgtcgagttcagctctaccaanatctactaagtgcagctgaccctctaacactcccttatatgctattgaatcatcacttcttctaaagacagtgacacctacatcagtgaatagacagttgtagcccattttgcataattgcgaaacggaaagcaaatggtaatctaatgaatctacaagaaaaaca

SEQ ID NO: 32107 - DNA, 340 bp, Zea mays
atccacagaacaccgtagaaaaacatgaatactctcaacaatgcaatattccatacaaaccattatgataaaatgaacgaaaatattcttaaagcctgagctgcagagatccttctatgcggattcttgctcatctattgcttttggagttctagaaagtcattgtgccttattgttactgcgagacattgatagtccaaccgaatatgttctatttatttgcctcccaaaatgtgttatcttttcaaaaatacaaatatgcgtatgtcccattgctcaccaaataacttttgggactatgtaacatatgcaatctccaataataccttttgtctcttaa

SEQ ID NO: 32108 - DNA, 167 bp, Zea mays
gtatttgctattgctccatgtggtcttgagtggtatgatacatatgaatcatgatcatacttagtactatcaatggatcatctattggtcattggaaaattatattggtttattggaacatgtagtgaccacccgagaaaaacaatgctatcacaagggtggaacga

SEQ ID NO: 32109 - DNA, 321 bp, Zea mays
  unsure (1)..(321): unsure at all n locations
ctgtgtcagtgctataatagtgaacagattattactgtcaccattccttaattgtaacgcgcactcngaattattgcaggcagaggataatgacttaccgtgatcaaaatctaattatatataaatgccgaatgggcattgtttaaaactaccttaatgttatgtctaactcactttgatatcttattgctaatacaaagaaacctctacattatgtctgacctcccaagtattaatctgtgaatatgttcgcgacaaggctgtatatactcatgtgcttgctaattacattaacagtccacctcttgagataaattacct

SEQ ID NO: 32110 - DNA, 215 bp, Zea mays
ccccccccccttttacttttttttctcccctctcctttcttttcttttccctcccttttctttcttcttcctcctcttccctcccttctctctcctcttcttactctttccccttccctctttctttctttctttccctcccccctctctctttcctcttctctcctttccttccttctcccctctttctcttctccccctctatcctcccccct

SEQ ID NO: 32111 - DNA, 103 bp, Zea mays
  unsure (1)..(103): unsure at all n locations
ttgtttcatcccgatgtatgctcttgggacttgtntctattgaggacatctttcttccgctgtgttggaccgtgcatatcactgaccccgtgtaactcaacat

SEQ ID NO: 32112 - DNA, 219 bp, Zea mays
cccaaaaaaaaataaaagtaaacaataaaaaaaaaaaaaaaaaatcaaaaacaaaaagaataaaaaaaaaaacacaaaaaaaaaaaaaaacaaaaaaaaaaaaattaaaaaaaaaaagaaaaataataaataaaaaaaaaaacaacaaaaacaataaaaataaaataaaaaaaacaaacaaaccaaacaaacaaaaatacaataaaaacaaaaaaaaaa

SEQ ID NO: 32113 - DNA, 207 bp, Zea mays
ggatttgttaaaatattttattcactatggatcattaatgtttttcaatttgattaatttatattaaatttatgttttggtggttaaagctatttggaaagaaattttaatttggtaaggggtaatttatgatttaagtggcatttttttatgtgtttttaaaagaattgatgtgggatattttaagtggaaatttttttgagatat

SEQ ID NO: 32114 - DNA, 325 bp, Zea mays
ctgacctgaaaacgttgcctgctaatgttctggatgatgcatgtactccacactgccctgcatggactttctccacaagttgcttcccgggggaccggagaacgcacttcatgatgacgcctgacgcgccccttctgtataataccttcccaatgagtgtataatgagctgaatgtctggcaatgctctctgccgagttctttgcatctggttcttcttcattctttatatacttaaaaatcggttgcctccaatcatcaaagtcttacttaagttgatctattatgttgccactctctatttgatccatcaagatgctcggctg

SEQ ID NO: 32115 - DNA, 242 bp, Zea mays
  unsure (1)..(242): unsure at all n locations
acatgattgtctattacaagttatttatttacacaaaccgataggtacctatgacactgacgcattagcaatagaatccctaanagcactcatgtctaacttatgtgacggggtgctgctattctcacctacagctatgtcatcaacaagcctactgctaggtacgtactcgtcaaagtcgcgatcgtgtatcgcactatctggaatgaagttatacaacgtcatgcatcctataattatct

SEQ ID NO: 32116 - DNA, 111 bp, Zea mays
attttccagcgactcttctcgtttttgtgtggaacatgatattattccttagaggacaccgccatactctccacaattccatgagggtgctgagagaaaaaaacatactct

SEQ ID NO: 32117 - DNA, 416 bp, Zea mays
  unsure (1)..(416): unsure at all n locations
tactagacgtgtttctcgatgtacctatctcaacactctagccccttagcattcgcctactatagatgcaataccatagatggtgagttatgtaggtgactcatccaactctctaatagggtaagtgctctaactatctgactccctcataagcaactagaagatccaatggngataggaaagctagctatgtgacctantaccctctgctattgtgcctccatctctgagatgatcacatctagaatgccaaaccgggattgagacatgagggcactaagaagccattattggaggttagtcactactccttgtattcacaccttggaagcanggtcctccacatgaatgtgttcagaagacaatgcacaagtataagttcattagaagcgcatctagagtcgtctcttaacagt

SEQ ID NO: 32118 - DNA, 275 bp, Zea mays
tctgtggtactcacgaccgttttttggcgccaagggtccgcgcaatcctgtaatctttcctccgcttctgtctacaaaaaggccgctctggcaattaggactaaccaagtgatccctgtggtgagttgagacactatccagtatggacagacatggacttgttggataatgctcagaatgggagtttatattctccctctgatttagcgtctgctcagccactcctccagaggttaattgatgtaatggggtacccagttgagcaacaccattct

SEQ ID NO: 32119 - DNA, 275 bp, Zea mays
atgctagtcttagctattaagcatgcatctagaccagcctcttcttttgcaaaatcaactagataaagtttgcccgctaatacacccttaaaagctagtgaaccatcacttcttctaaagacagacacatctacatttgtaaatagacacgtataccccatatgacataattgactaacagatgagcaagtatatccaagactctctactataaatacattagagatagaatgctcattagaaatcgcaatttacctaaccctttaccttgcttg

SEQ ID NO: 32120 - DNA, 197 bp, Zea mays
  unsure (1)..(197): unsure at all n locations
ggggtttttttttcatngccccccccccccccccccttttttttcttttttccccttcctcttctcttgtctttccctctcttttctctttttttccttcctttcctcttttcccccctttctctcccctttccctcttcttcttttcttttctctcctctttcttccttccttcctctctctctttcctcctcctt

SEQ ID NO: 32121 - DNA, 399 bp, Zea mays
  unsure (1)..(399): unsure at all n locations
actatagagcatgcttctagcagattaaaaatttcattttctaagtcatgctcattaattttggcactaagttgagctatgtgatcattttggtgttaattaaagctaggtgatcatgaatagcatcaataatatctctacatctagtgcacatagtaacatgctcaacggtagatgtagagggtttgcgagtatttaattcaacaatcttagcatggtagataacattctcatctctaagaatggaaatagaaacatcgcanacatttaaatctttagccttagcacactaattttcattctcaattttaggctggagagagatgcatcaatttgtaatcttacaatcaaatagcatatatttctaggtgatagagaatatactatattaattctcac

SEQ ID NO: 32122 - DNA, 187 bp, Zea mays
agcgcatgtcaatcagggaagcaaagttggtgtcatcatccacacaagaacatcatgacgacgacagaccgcttgagctactccacatggatctattcgacccgatatgctacataagcatcagcgggagtaagtattgtcttgtaattgtggatgaatattctcgcttcactcgcgtggttctttt

SEQ ID NO: 32123 - DNA, 156 bp, Zea mays
ttctaaatttaagggaagcccaacccgaaaaaatggagtgtcttaacttaaatgatttggccgctctttgttgtgataaagaaattaattttttggggaccaaattacgttggccattttttctaaccgtgaacccccctgcaaccggcacttttc

SEQ ID NO: 32124 - DNA, 288 bp, Zea mays
  unsure (1)..(288): unsure at all n locations
ctagcttgcttaagtaacatagntcataagaaaattttgttgaaccctctgttagtacacaagaaatgcatcacattnntatttatacaaacaataagaacttacaanaatcctagaagataaccctaaggagaaaccaccccaacccttgngataactatcgatatgctagtatgaatctaggagaaatacaacgtttgttgtttgatattttacatgacaacgtagtattagtgcctttttacattaaactttggaaaccacaactaataaccttaaataccttct

SEQ ID NO: 32125 - DNA, 222 bp, Zea mays
  unsure (1)..(222): unsure at all n locations
taccactatttangggtaagncccttaacaagggttctttttgtaaaacattaaaacaatacaacttgtttgaaaattttgcctattgaaagcgctctatgtgtgtcacacatatgccatgctaatgctcatgataccatgctcaagatttaattatagtaacaccacgggggttacaatgatattgggcacctctgtgcgctgcttttaaaatctccggat

SEQ ID NO: 32126 - DNA, 237 bp, Zea mays
gcttctgcgcgctgggcatagagggtcgcggcaggttatacttttgcgaggggggcgccatggaggaacccgagcttgcaagggagaagttagggcgtctagctgctgctgagccaaggatagctgctccctgcgccatgctccatgggggagacagcatggacgccgatccacatcatggagagctcctgctcgatttctaaggatgagggggaggcgccatggctggccggtctc

SEQ ID NO: 32127 - DNA, 243 bp, Zea mays
atgcccatcattcctcggctatcaaggttgctccacaacaaggaaaaagccctgcatatgacgcggccaaagaatggagtacgtctacgcactgatccagacataatcggccatccgtcggacggtgatgcgcggaaggcatttgacgagcctgaacccgaaaccgcaaacgaccctaggagtgacggattggtcaatcgacggacggattcacaccattcaataccagtgcaagcccttact

SEQ ID NO: 32128 - DNA, 430 bp, Zea mays
  unsure (1)..(430): unsure at all n locations
agcttctaaagggagaacacgtgataggtttgactaacgtgcaattcgaaaaggatagaccttgtgcagcttgtcaagcaggtaaacaagtgggaggagcacatcacagcaagaatgtgatgactacttcaagatccctggagctgctgcatatggacctcttcggacccgtcgcctatctgagcataggagggagtaagtatgtgaaagggaaatgtgcccttgggccatttctatgtattttggtgattgagtgccaacacatgtgcttaattgggaatttatgtacaaggatgaacaaagtgtaaatcacaagtaaaggtatgtttctaagccttagtacattgngtttaagtactaatatatttgtctaagtgttagaaaccgaaagaagaagattagagaanaggagaagggacttggctgtgtg

SEQ ID NO: 32129 - DNA, 323 bp, Zea mays
  unsure (1)..(323): unsure at all n locations
agctngacaacaccatntgacatcttaaataagatttcttgttatctattatatttaattcattcctcaacatgcaaaagcgggtcttatcaagtggcttagtgaaaatatccgctaattgatcttccgacctcactccttctaaactgatgtctcctttagcaacatgatctctaaggaagtgataacggatatccaggtgcttggtgccagagtgttgtacatgaatattaacaattttaacatcactcttattgtctcacagcaaagggtccttttctagaactacgccatagtctataagagtttgtttcatatataaa

SEQ ID NO: 32130 - DNA, 402 bp, Zea mays
atgctgaggccgatatcagccgctaccgacgactgtatatcatctataggtgattctattctaaattcaaggtaaaaacttttcttcgactgtgtcattagtttaacaacgaaggtgttttctgacgaatgttgtttctgcacagagtatgctattaagtaaagctttgaggatgcaacatgaccttgaagataataaaacatgaggttataattgaaggtttaaagagcaaaataaaagatcaagcagctgctcttgaaaagaaagatttctaacttcagacagtggagggtttactggcagaagctgaagccacaattgcaagattgaatatggaacttatcttaaagtaagaatgctttgaacaagacaagcagaaatttgatacgaagtgtgaggctg

SEQ ID NO: 32131 - DNA, 372 bp, Zea mays
  unsure (1)..(372): unsure at all n locations
agcttgaggtgtcgcgtcacaaagggacgactgaagaacttcccctgtcccgcgccttggtgaaggacggcgccgaagcccgtaccggaggcgtcgcagtccacgacgaaggtcttctcgaagttaggcatctgaaggaccggacccgtggtcaaggctgttttcagctgctggaaggcggcctgngtgtcgtcgtcccaggtgaaggcatcgcgccgcaaaaggcgcgtgagaggtgccgcgatgacaccgaagtcgcggatgaactttctgtagtagccggcgaagcccaagaagccccgcaagccacgagcggagtgcggtgctggccacgaggagacagcctccaccttggccgcatccatggccacc

SEQ ID NO: 32132 - DNA, 425 bp, Zea mays
  unsure (1)..(425): unsure at all n locations
agcttcgcaccttngaactaactcgggtgcactatttttttttgttggtcaatnaaaccccgacctgaagacctttccaacttgtgttctggatgctgcatgtattccacatagcccagcatggacctccttcagaagttgcttcccagtgaacgggagaatacacttcatgagaactcctgatgcaccccttctgtataatgtttccccaatgagtgtatagtgcaccgactgtctggcaatgcgctctgccaagtttagtggactggttcttcttcattcttaatatacttaatgatcggccttctccagtcatcagagtctgactcaagttgatctataacgtcgccctcttctgtntgatccattgagatactcggctgatggatttctagcaccaaactcctgttggacctgattcgacc

SEQ ID NO: 32133 - DNA, 183 bp, Zea mays
ttcttatcatgccaagaatgtgatgacaacattcagacccctgaagttacgttattggaaccttttcggacccggcgcctatcttagcatatgaggaagctagtatggtcttgctttaatcgagatttattccgcttcacctgggtattctgtatgcaggataaatctgaaacccaagggacc

SEQ ID NO: 32134 - DNA, 438 bp, Zea mays
  unsure (1)..(438): unsure at all n locations
agcttcagcaaattgctacgcgtaattgtacctgaatcttgacaagttaatgtggagggctgncactctctctctctctctcttttacagccttaggcctaatatatttgccttttgtaatatctaatatcatatagttcataggttaactgtttataatatataaggtatgtgtccgtacgttgccacgagagttaaaaatagtataaaatatagatatagaacgacaaacatcactatgatatgtaaaattatatttgagtcggcgtatactcgtgcgttgcaacgacacaaattattcaataaaatgttatagcacaaggattacataaaaacaaacaacacatattatcattaagcttaatctctataataatttatccaggacggcagatagtgttatgctactgtcttttcgtgaggcagctagagaaagtg

SEQ ID NO: 32135 - DNA, 158 bp, Zea mays
aaaaagagaaagagagggaagaaaagggaagaaaagggaaaaaaagggggaaaagggaaaaaaggaggagaaaaagggaggaaaagggaaaaaaaagggaaaaaagggagaaaaagaggaaaaaagagaaagaagagagaaaaggggagaaaaagagg

SEQ ID NO: 32136 - DNA, 426 bp, Zea mays
  unsure (1)..(426): unsure at all n locations
agcttctaaagggagaacacatagtgggactaaccaatgttcattcngaaaaagacaggatggtagcgcatgtcaagcaggaaagcaagttggtattcatcatgcacacaagaacatcatgacgaccgacaggccgcttgagctactccacatggacttattcggcccgagcgcttacataagcatcggcgggagtaagtactgtctacttattgaggatgattatactcgcttcacttgggtgttctttttgcaggataaatcacaaacccaagagaccttaaagggattcttgagacgggctcaaaatgagtgcggcttaaggataaaaaagattataagcgacaacgggacggagttcaagaactcgctaattgaaggcttcttgaggaggagggccttaagcatgagttctcttcttcctac

SEQ ID NO: 32137 - DNA, 384 bp, Zea mays
acgctttgaacgtactaagcacatgccgggaaaaatggtaaccgtgtaacctagtacctgagtgaagccgggcgcaaactatatccctcatgcgacctgagactaggtctcccatgctagctatggtgggtacaagtgcggtcactgcacggcggcagccggggtcagtggagcattgtatgccaaggcggtgaggccaggacgcgaacggtgactcgatggggacggttgtcatgtgtggggtcggagtaccctgacatgacgtgtgtttaagtttaccttgcaaggtttaaaactcgattcgaatcgtctgcttctcgcaactaatgagactgcttgattcctcgtactgcatcgagcaaagaagagaaatgtggttatatg

SEQ ID NO: 32138 - DNA, 436 bp, Zea mays
  unsure (1)..(436): unsure at all n locations
agcttctaaagggagaacacattntaggactaacaaatgttcattttgagaaagacagggtttgtagcgcatgacaagcagaaaagcaagttggtacccatcatccacacaagaacatcatgacgaccgacaggccgcttgagctactccacatggatctattcggcccgattgcttacatgagcatcggcgggagtaagtattgtcttgtaatagtggatgattattctcgcttcacttgggtgttctttttgcaggaaaaatctcaaacccaagaaaccttaaagggattcttgagacgagctcaaaacgagttcggcttaaggatcaagaaaattagaagcgacaacgggacggagttcaagaactctcaaatcgaaggctttcttgaggaggagggcatcaagcatgagttctcttctcctacacccacaac

SEQ ID NO: 32139 - DNA, 431 bp, Zea mays
agcttgtgtttacaagaaggatagtgggagcgctatttgttttctgatcttgtatgtggatgacatattattgattgggaatgacattcctatgaaggacttatgggaagcaacatatattttgggcataaggatctatagagataggtcaaagaggcttataggattaagtcaagatacgtacattgataaggtgttgaaacggttctacatggaacagtccaagaaagggttcttacctgtgtcacatggtatacaccttagccaaaagcaatgttctgtgacggcatatgagcaggagcccatgagtaaggtaccatacgcctcagcaattggatcaatcatgtatgccatgataagtacacgcccagatgtttaatatgctataaaggctacgagtaggtaccatgctgatccatgtgagggtcact

SEQ ID NO: 32140 - DNA, 430 bp, Zea mays
gcttcatggtagttttctgaagcttcatgaaaacttgtcttccattttcacttcacaaaaggctagtggaggtcttgaagaaatttgatatatttcttcatcagttgaccccaaatgctctggtaagtatggagatctttatctaggtagtaaggaaccaaggcgtggagccaaatactggctgcttctgcaacattcatgagctccattaccagatgaaggaaaatagaatagagcagctttataacaacttcggtctgtacaccttcgcgtactggaaggatgtccgataccctgctttggcgtaccatagccaatggccagccttctagacgaatgaatgtgtttacgtgaagaatgacttatagaagagggaatacatcatggatattatctagaggctcgtgacaccacacttcggcgtaaagag

SEQ ID NO: 32141 - DNA, 424 bp, Zea mays
  unsure (1)..(424): unsure at all n locations
agcttcggtggtggttaaaaattntggcagcaaaacagtgtttatagcaatgaatgttgtggtaacttcacacctactcgtctgtttatatagtgttgcaggtaagaaggcgaagcgccagtatttttacaccaggcggtcactcgcttgtactcgctgtgcggtgggccgcagaaaccaaacagtaactctgcaaggtgggaccgctacgcgctgggaaattgaatcgtttctcggcaacgagctcagggaaggtgttttttggaccttcggcttcccgaagcctaagagacttttttcacggaccaagctcgttacgaaaaacgatctatcacaacgaaaggtgctactgttgggcctatgcttcgtcgccgaatgtcttacaggaagaagcggtcttcggcggaagctgcttgtattaaat

SEQ ID NO: 32142 - DNA, 435 bp, Zea mays
  unsure (1)..(435): unsure at all n locations
agcttatagatnttctgagatgactaggtgctttggagggatagtccttctctaggcacgtcagatcaatccatagctctagtcagaatgacgacaaaggaagccagaggccgcaacacacctcacagtctccgggacagcaacaaagctccttcaggccaccagctccaaggggcagaggcgccaggggcttcagaggaagatatggggatcagcccaggaagatctattgcttattctggggtgaggacaagggccatactataagaatgtgccaaatcactattctgaagcaaaaggagatcgccaaagccgaagctcggcagaatcagccgaagcaagtcttgcacactgcttcatgtcactctccctacataccagaatatgtgggcaatcatcctgcagcttctgttgcttcggcaagccattcacagg

SEQ ID NO: 32143 - DNA, 391 bp, Zea mays
  unsure (1)..(391): unsure at all n locations
agcttgttcctcatcttgagttggtggagatgctttattttaatatggcggctgatcttgtgcttgtgtgggctcttccaattccttaggacacacatccctaatggacatgttccttagcgcgacgcatggagcctcttcatcatctagctcatcaagatcaacttgctccacttgggagccattaatctcatcaaacacaatgtcacaagaaacttcaactaatccagtggatttgttgaagactctatatgccattgtgtttgagtcatagctaaaaaaaaagccttctacaaccttatgagcaaatntagaattttcttcctcttttaacaagaataaaacatttgctaccaaagactctaaattatgaaacatttcgtcttttatc

SEQ ID NO: 32144 - DNA, 413 bp, Zea mays
  unsure (1)..(413): unsure at all n locations
agcttatgaagattcttcatcccaacatgggctattcttgggtgccatagccaacccatgttagtcttagcaattaagcaagtgtcgagttcagctctatcaaaatctaccaagtatagctgaccctctaacactcccttaaatgctattgaatcatcacttcttctaaagacagtgacacctacatcagtaaaaagacagttgtagcccatttgacataattgagaaacggaaagcaaattgtaatctaaagaatctagaagaaaaacattggaaatggaatggtcaggtgatatagcaattttacccaatcctttgaccaaaccttggtttccatccccgaatgtgatcgctctntggggatcttggtttttctcgtaggaggagaacatcttcttctcccctgtcatgtg

SEQ ID NO: 32145 - DNA, 431 bp, Zea mays
  unsure (1)..(431): unsure at all n locations
agcttatgcnttcatcagaatgctatattggtgctttgtttttcgtatgcagtatctcatgtgttgctacctttacgatgcaggcgggtttttggtcgcagttatttactaagtaagacaccttgcggtgaccattaaagagtaaccaatcaccctgggtaggtcaatttttatctgcaagaactgatgaggccgcttggtaggagtaaatcgctattcctgggaacgattgttggttagcgccgctactgtatgtatattgagataccttaacgattggtcttttggctgccatttggttacatgtatttgtatttggaggcataagtatcgtgtaatttgtgttatgactagtgtattgactattgaattatgagaagagctgctttagttgtaagatcacatgacacattcaagaattcccaaaaaat

SEQ ID NO: 32146 - DNA, 367 bp, Zea mays
agcttgggtgaaatcatagaacgggacctattgttatgtgtttcctactggagtggatggcgggttgaatcacactaaccatagtgtctatttagcaaaagaagacgacgatatggtacgcatatccgcagtcgtccgatctaactttaatagtccatattagatcaagacatatctgaaccgtgaaacaatgctatccatttgatttcagatctacgatcaatagaccgtccacgccatgatttaaacctgatccgattggttgtccatctgtgctcaatttaaaaacatgaaaggatacacatctgttctaatccacgttacccagacccagatgaacatccatcatctttcttcctcctctgaa

SEQ ID NO: 32147 - DNA, 361 bp, Zea mays
  unsure (1)..(361): unsure at all n locations
acctgcggcatcaagcttatgagcagaacgacgccaattatttattactttgttacaaggaatgaatgcatgcctcattcaacatcggttagtgtaactgaacggttacttatattaaataacatgcaatgacatggatagcttttcgagataacagactatntttattatcatattgtgaaacggcaagacttggggctctgtttacacttcctcttgtacagtacacacttagcagactctatggagaaagtaaaatcaaatgcatcttatcatgaagcaacatttccagttgatgggaggagatgagggacaacaattatttttatctaagccttgctaattgtcacctgcctcgctg

SEQ ID NO: 32148 - DNA, 375 bp, Zea mays
  unsure (1)..(375): unsure at all n locations
agctttgggctttgaggatgcattacctctgtcatctatcatatgaagctcttttcttatacctctttcttccaaatctactctagcagcaattgtgtccttagtcttgtttggaatattgagtagagttgacaaaatattttcacatatgtttttctctatatgcataacatcaaggttgtattgtagcttcaattttgaccaatatggcaaatcatacaagctaaccttcagatgccatacgggttctccatcacgacgtcgttgtcttgatctcggcttatctggattcttgccaggaacatagcaaacttcatccaatattgccataacctcatctgcactaaatttccttggtggttctctatnttcatg

SEQ ID NO: 32149 - DNA, 244 bp, Zea mays
  unsure (1)..(244): unsure at all n locations
acaaaaaaaaggaaaagaagcaaaggagaagggaaaaaaagcgggagaaagggggaagaaaggaagggaggaaacaaagagagaaaaaaggggagaaggaagaagaaaaaaggggggaaaaagaggggaaagaagaggagagaaagagggaaagaaagggggangacggaagaaaagcgggagaaaacagagagaaaaggggaagaaatgagaagagaagggaggaaacgaggggaaaaggggg

SEQ ID NO: 32150 - DNA, 430 bp, Zea mays
  unsure (1)..(430): unsure at all n locations
agcttatagaacagccttctgaggtccttgaacagcgtctatgtcgcttgacgcatgattcggtaataggagaagccctgnggtaagtgcactaaaacttgtttttcatactagacactaaaaatgccagaggcaggaaagggagggcaaccattccatcaacaagttcaggaaatattacaaaagcataagggctgtcatgcctgaggcatcccacaaacgaagcgacttgcgggcacatcctaaatatgtggatctgtttattacatcctctagcgaaaggatgtcaaacggctatgctgaagtcatcctcgaagtcctctagggcgctagtggtcacatcctccgataaatcgctagcgtcgagctcgtagcccggttggaactatacaaaggccagagcccatgcgacaccacaataagcaccacg

SEQ ID NO: 32151 - DNA, 332 bp, Zea mays
agctgtaccttgcctcaacatggcctaattggtgattgtttcgctgttttagcacgtctactgacgcgcccactgtcaatccaccttcggtcacgtcaactgccatatctgtccccgtggctgactaacccacggtccccacgcctggtggtttcgtcgggccacgcgcgggacaccttgttgccgctgcattggcttaaaataaccttttgtcttctgcagcggccccaacgaggcgcgttatcgcgtgcggcggttcacaccccgctcttttcgcacccgaaatccggcacacaaactgtatgacctgtggacccgggcccccgtgtcac

SEQ ID NO: 32152 - DNA, 442 bp, Zea mays
  unsure (1)..(442): unsure at all n locations
agctatgaagattcttcatccctacgtgggctagtctgttgtgccagaaccaacccatgttagtcttagcaattaagcaagtgtcgagtntagctctattaaaatcaagtaactatagctgaccctctaacactcccttaaatgctactgaatcatcacttcttctaaaaacagtaacacttatatccgtaaaaagacaattgtagcccattttacataattgagaaattgaaagcaagttataatctaaagaatctacaagaaaaacattggaaatagagtggtcaggagatatagcaattttaccaagtcctttgaccaaaccttgatttccatccccgaatgtgatagctcgttggggataatggttttctcataggagaagaacatccttttctccccagtcatgtggtttgtgcacccgctatcagttatccaactt

SEQ ID NO: 32153 - DNA, 438 bp, Zea mays
tgcaagctggagaggatccaattatccgcgatacattttatcatacaggcacaaacaaacaaacacatatatatgcttaagaacattacaccatacaaatacaaacataataaaacatgcaaaacgaaatagagcacgttactacggtcacgcgaggaaaaagaaatgtcgatctcgaagcgtcagtctggaagatatcacgtttacactaaataaatattaagtaaaatatttaattcgacattatcaaatataaataatagctatcatttagttcgattaatatgctatactaacacttgtcagttaattaaataatttaattaaaacaagagattctaagcgagatgaatttattacgcgtgaaacatcacgacaacgtgcaaacgacgcgcagacacgcgcgacacaatacgctgacgacacacgaaacagcgc

SEQ ID NO: 32154 - DNA, 252 bp, Zea mays
agcttcgtgtgtgagcgattggcttcttccgtttcggtctctttcgtatgacgtgtgggatccagcccccgcgtcggagggtgagaaccctggagcgcgtcggtggagactttgcccatgacgcttgggggtgcgagtgaggagatatgcctttaaaaggggtcgatcccccgggcagtagccatgccttcacacttctcgcattcatcgtgccctttcaccttccgagcccccagatggggtgcacctgcg

SEQ ID NO: 32155 - DNA, 411 bp, Zea mays
  unsure (1)..(411): unsure at all n locations
agcttctaaagggagaacatatgttgggactatctatttgtttatttgagaaagacagggntcgtagcgcatgtcaagcatggaaacatgttggtgttcatcatccacacaagaacatcatgacgaccgacagatcgcttgagctactccacatggatctattcggcctgaacgcttacataagcataagcgggagtaagtattggcttgtaattgtggatgttaattctcgcttaacttgggtgttctttttgcaggataaacctcaaacccaagagaccttanagggattcttgagacgggctcaaaatgagttcggcttaaggataaaaaagattacaagcgacaatgggactgagttcaagaacctctcaatagaaggctttttgaggacgaggcataagcatgatt

SEQ ID NO: 32156 - DNA, 428 bp, Zea mays
  unsure (1)..(428): unsure at all n locations
agctttgntggcgacacatccaaatctttggtgcttttaatgtttatatcagcctgctcacttgtgctctccccaagcaacatagcaagccccctgcaaaaatgattgaattagaatgcagttaccattatctgcaacactagaatgcagttcacaaatagtgcagaccttctagtcaatctaatagggctgtgctgtaatattgtttctctatttggtctgataggacttgatatgatagcatttgcctcttgcacattttggtctgcattagctgtctctagtgcagctgagtcttccacattatggcctctcctttttgttggcaagttggcattctctccatacttaatggtattctttccaggctttctctttctcttttagttccatttagcgaacacttgtagcttgtttcttcgtgtcct

SEQ ID NO: 32157 - DNA, 436 bp, Zea mays
  unsure (1)..(436): unsure at all n locations
agctngcacttacgaccaaaccgcacccgcattcttatttcattcaatggcttaacaatagtggtaaggtcaaggtaaccaagctggtacgaattaattttgctattggttcatatcgtgatgttgctgactgtgatgttgtgcctatggatgcttgtaatattctgctaggtagaccatggcaatttgattcagattgtatgcatcatggtagatcaaatcaatattctctcatacaccatgataagaaaattattttgcttcccatgtcccctgaggctattgtgcgtgatgatgttgctaaagctaccaaagctaaaactgagaacaacaagattattaaagctgttggtaataacaaagatgtgataaaattgaaaggacattgcttgctcgcgacacatactgatgttaatgaattatttgcttccactac

SEQ ID NO: 32158 - DNA, 427 bp, Zea mays
agctttagggtaaaagttataaaatgaccccaaatattatttttaatcacatttatacccctaagataccagaaaccctaattggaaccttggaaaaccctgaaaccaaaccctaggggcttatgtgcaaaattagtccacttttgggctaaagtgcagaaaccaagctaaataagtatttaaagtcatttggttcacaaatatgtggacttgaaagccaaaccctaagttttggaccacaatgcaaaaatcacttcttaaagcactatagaggctaagtctgaaattaagtgttgagggctcaactttggagcattggatctttcaaagtattgagaatttgccctaggtcaccacatcaatattgtatatctatggaaggagagtaactttgttatagaactcatgccttggtaccataagggat

SEQ ID NO: 32159 - DNA, 437 bp, Zea mays
agcttcggatgtgcatcgactacaccagccttaatattgcttgtcccaaggacccgtatccacttccacgcatagatcaaatcatggattctacctccaggtgtgacctcatgtccttcttagatgcttactctagtttccatcagatccagatgtctagggaagataggaagcataccgcttttgtaatagtagatgggctttactgttatatcgtaatgccttacggtctaaaaaacgccttgccaacatttgtacgggcgtaaagtaagacttttggggacctgattagggacagtgtggaggtgtacgttgatgacatcgtggtcaagactaagagagggtcgaccctagtggaagacttaaccctggtcttcgacatgctgcgggcaacccgcacgaagctgaacccggacaattgtgtctttggtgtctct

SEQ ID NO: 32160 - DNA, 205 bp, Zea mays
gggggggaaaaggaagaagaaaaggggaagaaaaagaaaaagaaaaagaggaaaaaaaaaaagagaaaaggaaaagagaaaaggagagaagaagaaaaaaagaagaagagaaggagaggaaagggagacaagagaaaacaagcgggaagaaagaaggaagaagaaagacaaaagaggaaagaaaagaaaaaaaagagaaggagaa

SEQ ID NO: 32161 - DNA, 408 bp, Zea mays
  unsure (1)..(408): unsure at all n locations
agcttccatcgatatcgccgnagactgttgataactctttgtaagtcttcgaagaagatttccgagttctccgttttgattaccacatcatctacataagcttccacacgctngccccagtgatcggctaagcatgtttgaatggctctctgataagctgctccagcgtttttgaggccaaacggcatggaggtatagcataaagcaccgaacggagtgatgaaacgctgtttttcctcgtcttcctttgccaagctaatctgatgatatccggagtagcaatccaggaaagacagcacagaacatccagcggtggagtctaccacctgatctatcctaggaagcccgaaggatcctttggacagtgtttgttgagatccatatagtccacgcacatgcgtcaatcca

SEQ ID NO: 32162 - DNA, 431 bp, Zea mays
agcttttgaagaacagcaactgggctcatttcttttctacgccaactatatgttacaatgcttctatactgtcaaatcagcaacgagcattcattctttgaaaagaattggaagctcatggctgatgatattgaatataacatacaaagagcatttagttgccctaaatttcaaatggcagataatgaactcagagatgaattactagagcgattgactattctctttaacaaaaggggtgggaatatacatgactttaacctacctcaaaaggtacatggaacacaacagcaagaattcaatcgtttaattgaagaagaaacttcttatgatcgtgaaaatcttcacaatgaatcccacagtctcttctcacagcttaatgctgatcagataagtgccttcaatacaattggtgaatgtatcctttctgg

SEQ ID NO: 32163 - DNA, 432 bp, Zea mays
  unsure (1)..(432): unsure at all n locations
agctntaaatattatntataagccttgggtaaaatttggtatgatttgaaccatgtttggtaattagaacccaaaaccctagtcccctgccctatgaacttcactatagactccaaaaaccctagtttcccggaggctcatgaaggaaagttatattcaagacattagataataaacttttattatctttgtattttcatgagcattacatgagcattcatgattatatatgactatatctagaacgaagaggaaataaaagttgaagaagcgaggactacaccaccaccacttgaagaaccttaggccggaaactggttttactttgatatctgtggagtagagcctgattcacctatcactcaaggcaagccccggtggcatttgccacctcttgctattttaaattatttctcacttacttgatgcatt

SEQ ID NO: 32164 - DNA, 407 bp, Zea mays
  unsure (1)..(407): unsure at all n locations
agcttatcaagtcagctntccaacgcaatcagtcccacgttatttggagattcctaggagaagttattatcaaaatactgaagactacgcagaagtgaaacagacacacgaaattcagttcttcagatctcccgaagaggctccttcacattagcacgtgaaaatacttttgtttcgtgtttatacctcgctaaggctggttgttactagtataaatacccccctatgtctatgatgtaaggcagtttatgataatctaaaatagacaccccttgttcagctgtgtgctaacaaatattgagagtgatctctacccctntgctcttgtgaattccttcgcgggattgcagaagcggtggcttcatccactcacaagtggtgctcctactcccttcgaggtctcctcg

SEQ ID NO: 32165 - DNA, 308 bp, Zea mays
  unsure (1)..(308): unsure at all n locations
ggaacttcacacctactcgtctgtttatatagtgctgcaggtaagaaggcgaagcgccatagtttttacaccaggcgcacacccgcttgcgctcgctgcgcggnggaccgcaaggacaaacagtaaactctgcaaggtgggaccgctacgtgctgggaaattaaatcgtttctcggcaacgagctcagggaaggtgttttttggaccttctgctccccgaagcttaagagacttttttcacggatcaagctcgttacgaaaaacgatctatcaccgcgaaaggggctactgttgggtctattgcttct

SEQ ID NO: 32166 - DNA, 436 bp, Zea mays
gcttagagcaatggtgggcaataaggcaagagttgattgttgtattgtggaacaatttaaactgaaggaggtagcacacttcacaagttgttactttgcagaaaaacataatgtatttgctcgaaagaagaggttccctgatgatgaacgagagatgcctccatgtagtgatctttcgatttttcagacaaacggcaaatccattggtccacccaaggcatatcacctaactatggaagaacaaaagtctgctttactgtacatgttcacgaatatgcctgaagtggagaaatactttgtgtaagactcgtttccttaaattgttcatatgtgaattagtttatgttaacaaatatctcatgtcatacaataatatttgacaacgagtttgatgaaaaaaacatgaggtgtcttggtaggccaacagcgagagaca

SEQ ID NO: 32167 - DNA, 388 bp, Zea mays
  unsure (1)..(388): unsure at all n locations
agcttaaagccatggtaagtaacataggctaataatatgctaattgactcaagcctagctacgggtgcataggtttcaccgaaatccaaaccttcgactngggagtatcccttggccacaagtcgagctttgttccttgtcaccacgccatgctcatcttgcttgttgtggaagacccatttggttcctacaacattttgattaggacgtggaaccaaatgccatacctcattcctagtgaagtngttgagctcctcttgcattgccaccacccaatccgaatcttgtagtgcttcctctaccctgtgtggctcaatagaggaaacacacgagtaatggtcacaaaaatgtgcaatgcgagatctagtagttaccctcttatgaatgt

SEQ ID NO: 32168 - DNA, 405 bp, Zea mays
  unsure (1)..(405): unsure at all n locations
agcttgcctactccacgttgtggcgtcccaacggacttatttttcactcaacacctctcaagtgatccaatgatcaacttgaataccacggtgttctagcttttattttctcaatcccgtttgcgaggaatctccacaacttggagcctctcgcccttacaaaagatgttcacacagaatcacggagcaaggaaggattagcaactcacacacacacaaagatcacagcgaatacgcacacacaagacccagacttgagctcgaaagactagcacactagaacggagctcanatcactagaatgtcgaacaagtgcgcaagattgatgtgtgagtgatcaagagtgctcaaggaatgcttgggttatctcctccatgcgcctaggggtcccttntatagccccag

SEQ ID NO: 32169 - DNA, 429 bp, Zea mays
agcttgttacggtgaggttggggaagaacccgatatgttttctctctatgccagtggaaggaggaatcggtgcgcgtggtggagtccgagttactgagaccggacggtggggcccaagggcaaggagcgcggagtgcatgtgacggctgggcctactggtgggagaagatgtgagatgggccgaaaaggtgggaaagccggcccaagagcaggttactcttatcaatctttctatattttctactttatttccatttctactcgttttaaacctttccaaattcaaatatttgttttgaattaaagagttacaatatccaacataatcctaattaatataaatactactatttgcaacattattatttgtcttccttcgcattatttaattatgggagaaataatgaattcaatatcatttcctttcct

SEQ ID NO: 32170 - DNA, 328 bp, Zea mays
cccaagcgacgagctgcactttaagtgtcgaaccatacgagattttttttttttttcaggctggtaaagccagtgatagggataccgggctgctatcacgaacgggattgggttacaggttgcaggaaggcaagccgtgccgccggatcttcgattgacagccacagtcactgccagacttacagtacccgaacgacgcacaaccgccgcgcttttgctgaaagtcccgtccgccggcggcggcaaacatgctgggaccttgctcgccgcgccccggccagttaatgttatctgtcggaccgggactggctccactggggggcaccac

SEQ ID NO: 32171 - DNA, 246 bp, Zea mays
aaaaagaaaaagggggaaaaagaggaggggaaaggaggggagaaaagagggggaaaaggggaagaaaaaaaaggagaaaaggggaagaaagagggaaagaaaaaggggagagaaggagggggagaagaggagagaaaagaggggaaaaaagggggggaaaaagggaggaaaagaagggaagaagaaggaaggaggagaagggaaaggaaagggggagggaaggggagggaaagagggagaaaagaa

SEQ ID NO: 32172 - DNA, 435 bp, Zea mays
agcttgatggccaagtcaagaagcaggttcttgtatattttgtatctgaggttcttagtgtatcaaagaaaaactatacagaattggagaaggtgttatatgctgttttgatggcatccaagaagctttggcattactttcaagcatacaatattgttgttccttcttcgcaaccgttgaaggatattatgagaaatagagaagctactggacggattggaaaatgggctgcagagctcaatgaattttgcattgattatgtgcatagatcttcgatccagtctcaagcgctggcagatttcattgtcgactggacgccaggggcacaggatgaagaaacaaataaagatgccgaagtatggacagtgttttgcgatgggtctttgggaaccttcggagcaggagcagctgctgtgttggtctcaccatccaaag

SEQ ID NO: 32173 - DNA, 424 bp, Zea mays
  unsure (1)..(424): unsure at all n locations
naagctgttcttactgttagatgccaactttttaacttttatgacagaacctacccctagttaagagttgtagtacaaagtgttccatttacacaacttttgttatttttgtctaaagcatagcctttttattttgaatctcaaatttctagaacaggctatagtgaccaatggcaacccactgtaatttttacagaatttttggaaaaagttaaaccactgttgtagttcaaacccacactagaattcataattagaaaatgaaaaaggggaaattgataatagaaacttgtgtcacctagcccaactagcaaaaccctttttaattgcccactgaaatatgtaaaaaaaatacaaatccactatgcttatccgtaccaaaacttaaacctagaatgataagcataaactaccaaaagccacg

SEQ ID NO: 32174 - DNA, 412 bp, Zea mays
  unsure (1)..(412): unsure at all n locations
agcttctaaagggagagncatatttgggactaaccaatgttcattttgagaaagacagggtttgtagcgcatgtcaagcagggaagcaagttggtgttcatatcaaaaagattagaagcgacaacgggacggagttcaagaactcacaaatagaaggctttcttgaggaggagggcatcaagcatgagttctcttctccctacacgccacaacaaaatggtgtagtggagaggaagaataaaactctattggacatggcaaggaccatgcttgatgagtacaagacttcggatcggttttgggccgaggcggtcaacaccgcttgctacgccatcaaccggttatatcttcaccgaatcctcaaaagacatcttatgaactcctcaccggtagaaagcccaatgtntcatat

SEQ ID NO: 32175 - DNA, 400 bp, Zea mays
agcttaccacattggaaacatgagcgcctacaccatggtagttcttgttcggaggccacatgcgggcttaaagtgcgcgcttgatacccatgatgatgacagccgtcctcttatcgttaagatcggccgcctcaattggtgcacccttgctatgaagcagaacctcgcttcttgctgactcgagagcacaacgttgaggctcattgataggaccgtctatagcgtcctctacgtatcacgcctccttgatcagtcatccgcccactgacaaatgtttcgagtacctcttcagacgtcgtcatcgtgtacctgggattcccacgactattgtctaccagatgaggatcaagatcggaaatcgaccttaccattaggctgacgacttcaaggtccgtccatc

SEQ ID NO: 32176 - DNA, 435 bp, Zea mays
  unsure (1)..(435): unsure at all n locations
agcttgagtgcagaggacagcgaggcaatggtgtggtgctgntgtggtttcanngccggngaccacagctgaatcgccggcaaccaccgtcaaaaagaaacccacccacctagggaggtttattccttcttcgataatccaattacattcctaaggtttcctttatatactaggtgccctttcctaacaaactcaaatcaatctcctaaatatcatccctctattcctttttctaaaacaggcgaacctagccacagttgggttgctggacgcctaggccagcgcctgtactatcgccctatgaaggcatccacaacacactgtgtgtagccatgtttactagatctatgagttttcttttaagtaatngtgtttatgaaataccaccttgctttatcatgtttgaaaactactgtgattactaaaattctgtca

SEQ ID NO: 32177 - DNA, 428 bp, Zea mays
  unsure (1)..(428): unsure at all n locations
agcttcctctagcattcttgagcccatcaggcatcctgttttatcaatacacattctccattgttcgctagctttcttcaccatgacagttctggccagccactctgggtatgttacttctctaataacgctggcacttagaagtctttntacttcatttcgtgcaccttcggctttatcatcaaaaattttccgaagtctctacttttttggtctgaaagatgggtccacattgagtgagtgttcaatgatgtctctattgacaccacaaagatcattggctatccaagcgaaaacatccttgttgntaaacaaatatcttagcagagtcttttcttgttcatcaaatagttgagatcccagcaatactttttgctcggctatgtcttcacacaagagcatagactttggttgatctgccgaaacag

SEQ ID NO: 32178 - DNA, 340 bp, Zea mays
cctgtccacatcagccctcacaatagacatatctcgtacaaaccttcctcttatatactcaaaatgtactctgttacgatagtctgatattccattgaagactcgtatcgactatggcatgcctagtgccgcatcttcagagatctttgcctccactctccacaacatagctagcgctatcatcggaatcttcaaacatgccttccagtatctctctggaaaatcactctgacttcgttattgctatcgactcatcaaatccagcagttttcttctcaaggagcttatcctcttcactaagccttgtataagcaactgtcttcttgtctcgagacatttt

SEQ ID NO: 32179 - DNA, 404 bp, Zea mays
  unsure (1)..(404): unsure at all n locations
agcttgnacaaagcccgctggaattaatcttcggagtaactctgtcctcgctgcaacatgacacccgaaggtccaacacaacaagcaatgagtgaattcagaatcattgcagagcatatcagcacaagggacctggttcaagagtttttagcattcaaagtttttcccagtttgaaagaatgggaaatgccgaagctacagggggaaaagaaagaaggtgaactcgtacgtttaccttactatntcaagtttaagaagtactttaaagcaccttgccaagagtggctagatacgattgaagcaatgtgtaatgaaatacttggcaattattccaaaaaagaagatcaattgatgaccgcagccttcggcacccgtccgaagcgaaggctaaatcgagtgttgga

SEQ ID NO: 32180 - DNA, 229 bp, Zea mays
  unsure (1)..(229): unsure at all n locations
gaagggaaagaaggaggagggggaaagaaataaaagaaaaagattgatgacacgaaanannannnnnaaaaagagggaaaaaggaaaaagagagaaagaaaggaagagagagaanaagggaggaggagagaaagaagaagagggggagaaagggaaggagaagagggaaagagggaagagagggagaaaangaaggagaggagaaaggaaagaaagaaaaaaagaaaaa

SEQ ID NO: 32181 - DNA, 424 bp, Zea mays
tgcttcatcgaatcccaaagtggagggagcagctggctcatctcttatattggccgaaatacccagggatattatttgcacttccgaaacctccgtaaccatatagtgatgatgtgtgtggtacggtccaagcaggatggctgctcttgtattgtggcatcagatacttcataccagctccaggcacggtaggagcagcacattgatggaaaggcccattacctgattatgcttgctggaatggcgctgaaggtaagtaatagttctgacgcaaatttggatagccaaccatgccggtaaaatgcccaacgcgcatagttggctgataatatacatgcaattgttgtgtgagaggaagacccgatgaattgctagaactgagaacatgttgtgtatactatatattgaggaagccttccttgtt

SEQ ID NO: 32182 - DNA, 441 bp, Zea mays
  unsure (1)..(441): unsure at all n locations
agcttaaggacatgctggtgaccagtttccaaggtttttatactataccagtcacagctcaggccctgttccaatgcatgcaagaccatgaagaatacctctaggcgtatgtccgaaggttcttgcgattgagggcacaagcgctcacagtgcccaatgaaattgtcattgaggtcatgattaagggcctttggccagaacctacgactcaatacttcgccaggaagcccccacaaactcaggagaagctgctccagaaaatgaatgaatacatctgggctgacaacgacttccgccaaagaaaggaggaagcttacagattcttggaaatgaccaggggcttcagaggaagaatccatccaaggcatgtcaggtcaatccataattccacttagagtgatgacanagggagtcagcctcagaggtcgcaatacacctcac

SEQ ID NO: 32183 - DNA, 433 bp, Zea mays
  unsure (1)..(433): unsure at all n locations
agcttacagattctccgagatgaccagtggcttcggatggagaatccatccaaggcacgtcagatcagtccactctgcccagaatgacgacagaggaagtcaacaacaaaggccacaatattcctcgcaggcttcggggaagcaacaaagctatcctcgacccccagctccaaggggcagaggcgccaggggcttcggtggaaggtttggggatcaacccaggaaaatntattgcttattctgtggtgaggacaagggccatactacaaggatgtgccatgtcaccattcagaaacagaaggagatagcagaagctgcagcccaacagaaccagccgaagcaggttatgcacactgcttcgtatcactcaccatacataccagagtatgtgggaaaccattctgtagcttctcttgctttggcaagccaacca

SEQ ID NO: 32184 - DNA, 362 bp, Zea mays
  unsure (1)..(362): unsure at all n locations
agcttgttaaaacttagaacagggattgttgtatctatatttgngtngacctgagaaattatggtaattgatctcagacaagctggaagccctgtcctttacttgggtctttacacttcacattttaggctcactctgtcaggatcatgaactttcacagacttgaccaagcagtgattgaatattgtcaccctttgatagggtaggcagatgaaggacatgttccttaagatctatttaatgtttcgctagttttatagatacaactatatcatatttattgggatggataaacaatgagacacttttcaggctcggaaaagaaacttggattgctccacgatgatgaaattgctatttgg

SEQ ID NO: 32185 - DNA, 410 bp, Zea mays
  unsure (1)..(410): unsure at all n locations
gcttgcacccaggtacattggtccaatccctatacttgagctatgtggaccagtggcataccgactccaactacccgaaacattgtctgctgtgcataatgtgttccacgtgtcacaattgaagaagtgtcttcgggttcccgatcgaaccgttaaagtgacagatgttgtccttgaaccggacttgacatattctgagcaccctattcgagtcttggatcaaaaggacagggttacccggagaaaaactctcaagttctacaagatacagtggaaccaacattccgaggatgaggctacttgggaaactcaagactttttagataagaaattcccgggctttttagcctcttgttatttgtaaagcatgtataacttgtgtaataaaggggtgagtctcanacccccct

SEQ ID NO: 32186 - DNA, 432 bp, Zea mays
agaagttatcattattaagtcagaaagcaatattttattttataaatccatgcaatccctgcttctcgcacaccaaaggcctgacggcacgaagaaccgttgagtaatagcatgaaaattttttgctgccgactgaaatttttaacacgagatcacaacgttcctgcactgggaacataacagaataaactggcattggccatgtcgcagaataaactggcaacgtaggccctggcaggctggcagcgattttttttactaccaggctagaagcctctgcccactgagccaaaaagtaaattgatttgcaattggcaaaatagcaactgaccaatgggaccgatagatttgtttattaaaacgagaccacaatttcggcattggcaacatttaacaacaaaacaaggccaaaataaccccacttcaaaaaag

SEQ ID NO: 32187 - DNA, 365 bp, Zea mays
  unsure (1)..(365): unsure at all n locations
agcttcttgagcaaaggctgcttacatggctcacgtttatattcattttctttcanacgaaccaagtaacatcgaaccttatctacagacaaaaaaggatgatcatatcactgtacttctaccaacatgggtgttgccacctgtttaaggtaccaatgcaccgtcactgattcaaaaaaaaaaaaatatgttacacaagggagtatttctcaaatagcatcatacgaaaattatgaacaagcattaatgccttaaacaaaaatcaaatgcatgccactgttatcaccgaatatatcattgacttaataagaagccttactaattaccaaacctatttttcaaatccatattccgagttacataca

SEQ ID NO: 32188 - DNA, 362 bp, Zea mays
  unsure (1)..(362): unsure at all n locations
agcttctaaagggagaacacattgtaggactaacaaatgtttattttgagaaagacaggatntgtagcgcatgccaagcaggaaagcaagttggcacccatcatccgcataagaacataatgacgaccgacaaaccactggagctcctacacatggatctattcggcccgatcacttacataagcatcggcgggagtaagtactgtctagttattgtggatgattactctcgcttcacttgggtattctttgtacaggaaaaatctcaaacccaagagaccttaaagggattcttgagacgggctcaaaatgagtncggcttaagaatcaagaaaataagaagcgacaacgggacggagttc

SEQ ID NO: 32189 - DNA, 348 bp, Zea mays
  unsure (1)..(348): unsure at all n locations
agcttcaaccgtactcccccgcgcgctctcgaccttatgtgtttatagatcaccagtgtttgccctgcagacgacgtgccagcggccgcccgattccccgccaccgtagaccggccagcagagccatccccaaccccgtccaaccctcgaaatagactctacgtgcctcggtgaagctcccagagcgaggaatcaagctctgcctcaccggagacgccggatcaaggtcgccggacttcacccgaccgccggtgaatgtaaaccgagttccacggtgagntgttcttcgattccttgacaggtcgacttttagcaccccgtgaagcttcccgtgcccttggattgact

SEQ ID NO: 32190 - DNA, 433 bp, Zea mays
  unsure (1)..(433): unsure at all n locations
agcttcttcatgcgattctcacttatatgaccttttctattttgccacatgtaggtaggacttaaatcattaggccgaggccttttagcactaatattacagataggtgcatcatcaagatttaaaatgaataacccattcataatggatgcaaaagccacaaacatgccattcttggagatcacacaaccattgttttcactcgcaaatgaataaccatccttcatcaaacatgaaggagacataatgtttcgactcatactaggaactagataacaattatntaactccaaaataaatcctgatgggaggtggagttgcatcgtcccgacggtcaacgcagcaactcttgcattattgcctacccggaaatcaacttctcctcttttcacgcttctacttcttatcattccctgcatcgaattgcaaatat

SEQ ID NO: 32191 - DNA, 431 bp, Zea mays
  unsure (1)..(431): unsure at all n locations
agcttctaaagggagagcacattttaggattaacctattgtttattttgagaaagacagggtttgtagcgcatgccaggcaggaaagcaagttggagcccatcatccacacaagaacatcatgacgaccgacaggccgcttgagctacttcacatggatctattcggcccgattgcttacataagcatcggcgggagtaagtattgtcttgtaatagtggatgattattctcgcttcacttgggtgttcttttgcaggaaaaatctcaaacccaagaaaccttaaagggattcttgagacgagctcaaaacgagttcggattaaggatcaagaaaattagaagcgacaacgggacggagttcaagaactcacanattgaaggcttccttgaggaggagggcatcaagcatgagttctcttctcctaccccc

SEQ ID NO: 32192 - DNA, 411 bp, Zea mays
  unsure (1)..(411): unsure at all n locations
agctnttacagaagaaggacgagccctcaactactttatttgtggatgggcagaaaaagcaaaggatcgacaccgtaatggaagcaattgaacggacaccaccatcggccctggccagtgccaaagcaaacatttctgccgaagctgcagttgccactgaagctaccaacttggaggccaccctatctggaattgataaattgatattgggtatgcctacagaagaaacagctatggctgcagaacaggtcacggccctagtgcctgacaaagggaaggaaattgtcgatgctgcttcggaagaaaaaggtttcgaccttnggaacctggtcggagaagaactatttgaggccgaaaagaaggagctacatgaatatgtgcatttctgtggctaccaaccaggaaccatgc

SEQ ID NO: 32193 - DNA, 387 bp, Zea mays
agcttcggcagataagagtagcagacttacacgttttgttatgtatataaaagctccggcaagaaagagccgcagacttctatgcttcgttatgtaaagaaaagcttcggccgataagagtaccagtcttgtatgttttatgtaaggaatggctccgacaaaaagaggacaccgtcttttatgcttcgttgcgtcccaaaagaagggaacgtgctctttcgccttctgctcaaaatactggtttcgtacacatctaagcacctctattgaagggtaggaatatattacactgtatgtactaagttccttgaagaacactttaattctgtttacaagacgtgttacacaattatcctgaagttttctaatgcgcacttctgctagtct

SEQ ID NO: 32194 - DNA, 221 bp, Zea mays
  unsure (1)..(221): unsure at all n locations
aaaaannganaaaaaaagaagaaaagagagagcggaaaacgggggaaaagggggggaggaaagcgaggagaagagagggaagaaacgggggaaaaagggaggaaaaaggggggaagaaagggaggaaaggagggaacggcggaaaaaagggagagaaacgggggaagagagggaaaaaaggggaagaaagggaaaaaaggggggaaaagggagaaaagggg

SEQ ID NO: 32195 - DNA, 427 bp, Zea mays
agcttgaaggattgcaagcatatgggtttgctgttttttatctacatacacaacagtaagttcagagttaattatttaagacaggaggaatgaaacacaaaggaaacattgtatcacttttgggcatattacttgataatagaaggataaaaccggctactccaataagattagcatgacatagaaatgtatggcgctacacactactttctgattgccaggctatcaagtatagactgactggtaagcacaaaataagttcattttgccaatatttcgagtggtgcaaacaaaatgagcattgaaacagcacgtctcaaaaaaaaacatggcccgttagaaaacacaagacaaatgccttgtattgctggacagctagagaaaggtttaatagggaattttttgataccttactttgcaatgcata

SEQ ID NO: 32196 - DNA, 405 bp, Zea mays
  unsure (1)..(405): unsure at all n locations
agcttggccgagggtcctcctaaaacactcttcaatgtatatattnnnnatgncgcccaccaaactgtttatgttatgttcctacactatgtaaacctacatgtaccattttgagacaattataaaagtgttttatataactattagatttagtttggttattcgaatttcttcggaaaattcacatttgaactgcaagtcattcgaaacttggaaaaccgtgtatggaaaaataatatgcatgttatttagcacaagttataactgtattcaggagcggaccggaaacttcgagcaccatgctcactaaacatggtcgtgaacttgccatccagctgtttaaaaattgttaaaacataaacaagtgttgtggccctggcactcggcaaagaagcaaactttgcc

SEQ ID NO: 32197 - DNA, 268 bp, Zea mays
  unsure (1)..(268): unsure at all n locations
ccccccaccccgcccgccccggaaaaaacaaaaacccgaatgtctcccccaaaangaaacacgcccaccacccccccgcccccacccccaccacccccccgaaccacccccccacccccccccccccccccccgcacccccccccacccccccgccccccccccacaccccccaccccccccccccccccccccacacgcccccccccccccccccccacccccccccacccccgcccgccccgacccccccccccccccccccgccc

SEQ ID NO: 32198 - DNA, 401 bp, Zea mays
  unsure (1)..(401): unsure at all n locations
ttccaccttctgtgttncttttctgtagaaaaatataatgagaaaacttatgacaagggataataaatcaaatatggattgcaaagacaccaaaattcctatgaccaggaacacaggatgaaaagtaagtttttaccttctatgcatcagcaagtaccatgactgattatagaacaataatggacaaataattttgcatttaaataaaataatagtcacgattcagcgtagcagaacttaaaataatcaccgcttgatgcgtgttcaagtatttttgggacaaagatataaacagcatatgactcatatcctaaacaaatctgaaattcatcgtagtgaaataagcaaaactatttaaatggaggtagtgatccacgccatccggtttgaaataagtagtc

SEQ ID NO: 32199 - DNA, 434 bp, Zea mays
  unsure (1)..(434): unsure at all n locations
cttgcaggacctcagctnggctgcgatacaacctgatttttctattccacctgagctgggtgacctcaacttcttgttcgatctcaacctgagccacaactccttttccgggccgattccgacaagtctggggcacagttccaaactgcagaaagttgatttgtcggagaacatgcttaatgggaccataccagtgagcgttggcaaccttgggtcactgacgtatcttgatttgagcaagaacaagttgtcagggcagataccaagtgaaatcggcaacctgtttcagctgcaggccctgcttgatctgagcagcaactcactgtccggccctatcccttcaaacctcgtgaagctgtccaaccttcagaaactgaatctgtcacgcaatgagctcaacggttcgattccagcaagcttctctcgcatgtcga

SEQ ID NO: 32200 - DNA, 438 bp, Zea mays
  unsure (1)..(438): unsure at all n locations
agcttgtgaagattcttcatcccgacatgggctagtatgctatgccatggccaacccatattagtcttagcaattaggcaagtatcgagttcagctctattaaaatcaactaagtatagctgaccctctaatactcccttaaatggtactgaatcgtcacttcttctaaagacagtaacacctatatccgtaaaaaagacagttgtaacccattttgcataattgagaaactgaaagcaatttataatctaaagaatctacaagaaaaacattgtaaatggaatggtcacgtgatatagcaattttaccaagtcctttgaccaaaccttgatttccatccncaaatgtgatagctcgttggggatcttcatttttctcgtaagaggagaacatctttatcttccctgtcatgtggtttgtgcatccactatcaattat

SEQ ID NO: 32201 - DNA, 428 bp, Zea mays
agcttcggcattgaaaacagttttttagtgtttccgatttgtctgaagataagaaggttgctgccgagatgaagctgagtctcgatgaagagaagaatctggggtttcttatagcaatgtcgaagaccaatacagaaaaaatcaccaaagagattttagaaggtttgtctgaagataccgatgacagcgacaattatgatgtggatagtggtggtgaagactccgaagatcgcccttggcgaccaagccatgcggttttcggcaaatcaagtatcaaggaaaatcatcttatcaacatgagaggaaggtattttcgggacttgtccgttgttagggtcgacgaaagagaaaagacttgtccgaaccctgaagaaaatgaagtcgtagtgtaccgaagctttttgaaagctggacttagaattcccctg

SEQ ID NO: 32202 - DNA, 416 bp, Zea mays
agctttaaatgtgttgtcatcaatcaccaaaaatgttttgattgtaagtgcattcatcccttttgcgagttttggtgatttgtataacaacacatttaaaggtctaacaagtttgctaagtgttgaacaggaaattcagtatgatgaacatacttgaatagtgtataatgatcagtgaacaaggttcaacacaaggtcaaataaccaatgagacaatgcacatggatataatatggtctctatattggtttgaatatatggacaagtcctgagaaatcactatgcataaatatgagcataatagaggttgaagggattaagaggattgatcacgccacagtgaatacttatgaggaatcgtgaattggcttgaccatattactattaactcatatatgaatatatgagaatcaaac

SEQ ID NO: 32203 - DNA, 390 bp, Zea mays
  unsure (1)..(390): unsure at all n locations
agctntacttanttgattntgcaaaagaagaggccttgtctttttcatgtttaattgctaagactagcatgggctggctgtggcatcgccgcttatcacatgtagggatgaagaaccttcacaagcttctaaagggagaacacgtgataggtttaactaacgtgcaattcgaaaaagatagaccttgtgcagcatgtcaagcaggtaaacaggtgggaggagcacatcacagcaagaatgtgatgaccacatcaaggcccctggagctgctacatatggacctcctcggacccgtcgtctatctaagcataggaggaagtaagtatggtctagttattgttgatgacttttcccgcatcacttgggtggtctttttgcaggataagtctg

SEQ ID NO: 32204 - DNA, 438 bp, Zea mays
  unsure (1)..(438): unsure at all n locations
agcttgaagccatggtaagtagcataggccaataatatatgaattgactcaagcctagctacgggtgcataggtttcaccgaaatccaaaccttcaacttgggagtatcctttggccacaagtcgagttttgttccttgtcaccacaccatgctcatcttgcttgttgcggaaaacccacttggttcctacaacattttggttaggacgtggaactaaatgccatacctcattcctagtgaagttgttgagctcctcttgcatcgccactacccaatccgagtcttgaagtgcttcctctatcctgtgtggctcaatagtagaaacaaaagagtaatgctcacaaaaatgtgcaacacgagatctagtggttacccccttatgaatgtccccgaggatggtgtcgacggggtgatctcgtnggattgcttggtggact

SEQ ID NO: 32205 - DNA, 438 bp, Zea mays
  unsure (1)..(438): unsure at all n locations
agctttcatgtcaacatcaaggccactggaactactttatatttatttattcggacctacaaattatgtaagtgtcggtggcaacctctattgtctagtgattgttgatgacttctcaagatacacttgggtgttctttctccatgacaaatctaaagttgcatctatattcaagaagtttgccaagaaagcacaaaatgaatttgattgcaagatcaagaagattagaagtgataatggcaaataatttgacaacaccaacattcatgagttttgtgatgaaattgggatcaagcatgaagtatctgcctcatacacacctcaacaaaatggagttgttgaaagaaaaataggaccttgatcactcttgcaagaacaatgattgatgagtataacacaccggagaggttntgggccgaagctgtcaacactgcatgt

SEQ ID NO: 32206 - DNA, 395 bp, Zea mays
  unsure (1)..(395): unsure at all n locations
agctntacttagttgatattgcaaaagaagaggcctgtctatatgcatgcttaattgctaagactagcatgggctggctgtggcatcgccgcttaccacatgtggggatgaagaacctccacaagcttctaaagggagaacacgtgatatgtctaaccaatgtacatttcgaaaaagatagaccctgtgcagcttgtcaagcaaggaaacaagtgggaggctctcatcacaccaaaaatgtgatgacaacatcaagacccctggagctgctacatatggacctcttcagacccgtcgcctatctgagcatatgaggaagtaagtatggtttagttattgttgatgacttttcccgcttcactcgggtgttctttttgcaggataagtctgaaacc

SEQ ID NO: 32207 - DNA, 403 bp, Zea mays
  unsure (1)..(403): unsure at all n locations
agcttggaggcgtcgattggttggctacttgttgtattctcctccttcttttcttccgtcgccttgaatgcgacgggttgagcttcggatgtggtgggttcgtcaagctcgttgattttcctcgagccttcgatcatgcactcaaaacttacaaaatgcccgattacttcctcgggggtcattntggtatatctaggattgccacgaattaattgaacttgagtggggttaaggaaaatgagagatcttagaataaccttaaccatttcgtggtcgtcccactttacgctcccgaggttgcgcacttggttcaccaaggttttgagccggntgtacatgtgttgtggctccttccctttgcgaacccgaaccgaccgagctccctctcgatcggttcccgctt

SEQ ID NO: 32208 - DNA, 449 bp, Zea mays
  unsure (1)..(449): unsure at all n locations
acctgcggcatgcaagcttctaaagggagagcacattntgggactaaccaatgttcattnttataaagacagggtttgnagcgcatgtcaagcaggaaagaaagttggtgttcatcatccacacaagaacatcatgatgactgacaggccactggagctactccacatggatttattcggtccgattgcttacataagcatcggcgggagtaagtactgtctagttattgtggatgattattctcgcttcacttgggtattctttttacaggaaaaatcgcaaacccaagagactttgaaaggattcttgagacgggctcaaaatgagttcggcttaaggatcaagaaaataagaagcgacaacggaacagagttcaagaactcacaaatagaaggctttcttgaggaagagggcatcaagcatgagttctcttctccctacacgccac

SEQ ID NO: 32209 - DNA, 378 bp, Zea mays
ctgtgaaggttcttcatccccacatgtgctaagctgtttgccttagccagcccatgctagtcttagctattaagcatgcatctagaccggcctcttcttttgcaaaatctactataataaagttgtcgtctaatacacccttaaaagctagtgaaccatcacttcttctaaagacagacacatctacatttgtaaatagacagttatatcccatattgcataattgactcacagatagcagattatatccaagagactcaactaaaaacacattagatatggagtgctcattagaaattgcagtttacctaaaccttttacctcgccttgatgcccatcaccgaatataattgaatcttgtgagtccttattcttgac

SEQ ID NO: 32210 - DNA, 332 bp, Zea mays
agcttcctagccaaggctgtgtgcaggtccaggtcccattctagactacctcctaggggccaggtcaccaattcttttttaagtatactggcatccaacatcgacacatcgagcctgcataccaaggggccaagtaccaaggaaaagttggtaacgacgcacatagcaaagacaaatagcatacagataagttttgttactgttagaataatacttctcaaaagtatcttacaaaaccaaaaaatattacaaagccgcttcccagcgggacccttgccttctctctacagatccagctactcatcatcagcaggatcccgctggaaacgttc

SEQ ID NO: 32211 - DNA, 229 bp, Zea mays
ctgagctcgctaaagtaaccacagcgtggttttatctatttttgatgacacagcagtgaatcgccatggctggatttattatccccatgctcaatgaggccgtgattatgtgttttacaagaaggtttaacttgtaagctcccttgaatgaatcttttaacatattggagctctgtgggtttgttcaagctaaactatacagtcgatatcatacagccttgctgtcacc

SEQ ID NO: 32212 - DNA, 406 bp, Zea mays
  unsure (1)..(406): unsure at all n locations
agctttgcgacttagtgcatctgccactactttggccttgcctgngngataatgaatatccaattcataatccttaatcagctcaagccatctcctctgcctcatatttagttctgactgggtaaatatgtacttcaaacttttatgatctgtataaatatggcagatatttcccagcagataatgacgacatatcttaagggcatgaaccacgacagttaattctaagtcatgagtnggataatgttcttcatgctggcgcaactgtcttgaagcgtatgctataactcggcacccttgcattaaaacacattcaagaccactgcctgatgtgtcacaatacacaccacaaggcttttcaatatccgcgtgagcttatactggagcagtggtcaataacaccttc

SEQ ID NO: 32213 - DNA, 219 bp, Zea mays
agcttccggcgatgtggtgtcgtagataacaactcttttcctcttccagcttcggcaagccaatgcttgtggaaagggatctaacaattttggcttctgtgcgcgctccgacagcatgataatttcccttcgccgaccccaccaaaaagcatagtccctgatttccatccgcaagaataggcatatgtgtgcaacacctctgtttcggcatccgggaat

SEQ ID NO: 32214 - DNA, 168 bp, Zea mays
aaaagaagagggaaaggggagaaaagaagggagaaaagagagaaaaaggaggaaaagggagagaagagaggagaaaagaggagaaaagggaggagaagaggaaaaggggggaaaaggaggaagagagaaggaaaagggaaaaagggaggaagagggaaaaaaaggaaa

SEQ ID NO: 32215 - DNA, 418 bp, Zea mays
agcttgtgaaggttcttcatccccacatgtgctaagctgcgatttcacagccagcccatgctagtcttagctattaagcatgcatctagaccggcctcttcttttacaaaatcaactaaataaagtttgccgtctaatacacccttaaaagctagtgaaccatcacttcttctaaagacagacacatctacatttgtaaataaacagttataccccatgttgcataattgactaacagatagtaaattatatcccaaggactcaactaaaaacacattagaaattgagtgctcatttgagattggcaatttacctaatccttttaccttgccttgattcccatcaccgaatataattgaatcttgggaatctttattcttgacgtaggaggtgaacatcttcttctcccccgtcatat

SEQ ID NO: 32216 - DNA, 433 bp, Zea mays
  unsure (1)..(433): unsure at all n locations
agctntntatcttcagacatcttcgaaaatgctgtgtatttgctctcgaaactgaagcttaaaaatttaaaaaaccaagcaagtgttgttgcgcaagggctacaagtcgagtgagcaaaagcagatggcaagaaagcgtgccaaataaactcgcggtgagctcttatttatacacctagtgcgttaaaaactggagggtcccgcttgtcaatgactgttgctattctatcaaagggaaggtgttttttcggaccttcggcttaaggccttcgtccatgtcgcaatatgaatttatcactaataaactaatattgcgaggggctactgttgggggccttcggcttccgaatgtcctcaaaaacatgatctgacattatgttttccatgtgaaatatgtgaacaggtatcttcggtatcgggtcatgagtataca

SEQ ID NO: 32217 - DNA, 434 bp, Zea mays
  unsure (1)..(434): unsure at all n locations
agcttgctccatggcagctggtgcctgaaacaatttattctctataaagaatttcttctctccatatttcatttgaaaaanttatacgcaataaagtttggcgtccttgtaccctgataagaaaagagcaaaaaatcaggtcaggcacgggccttatttttagtcaatgggccggcacaagtaaaaaagaaatgtatttttcacatgaaatgagttggaagcaaacaaaaaggcaaaaacgatggcaaagatgtacagggtcctttcaaatcacagtgagatgagaggtcaccatcgtctgttcttcattcgtacaagttggaaatctgaacccgtggacatgcatggaccggaactgtggcanaagtatggcccaaaaaagatcggaccgtgccatgcatcgttttgtctccgtacagtacggtataacttga

SEQ ID NO: 32218 - DNA, 433 bp, Zea mays
agcttgccagtacttgtcaaagcaacaacatctaccattatagcaactgcagaccataccagtaacttggtcgttcgcatgctggggactggatatgattggacctttcaagaaagctcaaggaggatacactcatgtactggtagcaatcgacaaattcactaaatggatagagttcaaacccattgcttctttaacctcagctaaggccgtggaattcatacaagacataatattcagattcagaataccgaacagtatcataactgacctaggatccaacttcacaagttcagagttctttgatttctgcgagcaaaagagcattcagatcaagtatgctttgatggcacacccaagagccaacgggcaggttgaacgagctaacgggatgatattagaggcactcaggataaaggtcttcgataaaaat

SEQ ID NO: 32219 - DNA, 409 bp, Zea mays
  unsure (1)..(409): unsure at all n locations
agcttgtgaagattcttcattccaacatgtgccagtcttctaagcgagagccagcccatgttagtcttagcaattaagcaagtgtcgagttcagctctatcaaaatctactaagtatagctgaccctctaacactcccttaaatgctattgaatcatcacttcttctaaagacagtaacacctatatctgtaaaaagacagttgtagcccattttacataattgtgaaactgaaagcaagttataatctaaagaatctacaagaaaaacattggaaatggaatggtcaggtgatatagcaattttacccaatcctttgaccaaaccttgatntccatccncgaatgtgatagctcgttggggatcttggtttttctcataagaggagaacatcttcttctcccctgcat

SEQ ID NO: 32220 - DNA, 57 bp, Zea mays
gggaaaaaaggggggaaaaaaagaagaagaaaagagaagagagaagggaaaaagggg

SEQ ID NO: 32221 - DNA, 431 bp, Zea mays
agcttaatgcccctaagaaattatctaactttgttaatggcaaagctcccatggctcaggataacgagggttacattttataccctactggttatcccgagcacaaaattaggagaattcattctaggaagtcgcactctggctctcatcatgcttttatgtataagagtgaggcatctagttctaggcaatccactcatgataaatttcctaaaaggaaaactcattttgcatcaaatgagcctattatttcatttaagatttttcatgcttcatatgttttaactaacaaatcaggcaaagtagttgccaaatatgttggggtcaaacacaatggctcaaaaacttgtgtttgggtacccaaggtgcttgtttctaatgtgaaaggacccaagacagtctgggtacctaagaacaaggcctaaatttgt

SEQ ID NO: 32222 - DNA, 407 bp, Zea mays
  unsure (1)..(407): unsure at all n locations
tttgtctagcccggacggggccatcgggaccctacttgatgtagactcttccttcttctccctcgtcgctgtgaaagcgacaggttgcacctccggtgtggaggagacccctctctgatttgcttggagcccttgaacattagttcaaagctcacacactttcttattacttccttgggagacattagtttatatcttggatcaccacaaattaattgaacttgagtagggttaagaaaaacaagtgatctaagaataacctcgaccatttcatgatcatcccattcggagctcccaaggttgcgcacttggttcaccaaggtnttgagccggttgtacatggtctgtgactcctccccttggttgagcataaagcgaccgagcttcccctcgatcgatncctcttg

SEQ ID NO: 32223 - DNA, 361 bp, Zea mays
  unsure (1)..(361): unsure at all n locations
atcaaatggacgcgaagagagcctttcttaatggaccacacaaggaagcggcggaggatgagcaaccttccggctctgaagatagcgagtaccctaacnatgcgtataaactctctaacgcgccttatggactcaatcacacgcccagagcatggcatgaatagcctagaaacctccttatcactaatggagtcaaagaccgaaaagccgatcatacactcttcactaaaactcctgacaacgacttggtcggatgccaaatctatgaagaagatattataattgggtccactaacgacgctacatgcgaagagcttangaggatcatgacacacaaattccagatgtccatgatggggga

SEQ ID NO: 32224 - DNA, 426 bp, Zea mays
  unsure (1)..(426): unsure at all n locations
cagcctaacaaggcaagcaaagctacatacattatattatgctcctttaccaaagcagtcagtgaataaagttgctgaatatgcaacgctttatatgcagcccacactaagaaaaacaaatgtatagtacgtaaaaacatgtaactcggagcggagggtcggcaaatcaagggatatttttgttctggtcgcaagcacatgtttcaaccaagagagccgtccaaaaacttttgttttagtcgctttaaaccaaatcttcaatattcataacctgttctggcttctacgaacccatccatctccttgtcgcacgattcttactgagcgttgtgaacgagatgctaagacgctcagccttaccgatcgaacattgnaacgagtatcgcggtgacataaatggactttaggaatctaggactctaccta

SEQ ID NO: 32225 - DNA, 410 bp, Zea mays
  unsure (1)..(410): unsure at all n locations
ggaggctcccttataaaatatcgcgccactggctctggtctgagccccttgataatggcttcaatgactatctcattgggcactgtatgcgccagagctctcattacaagaacctcaagacatacgcctgaangcactccacatggtcctgcatgcactggaacataactagcgcagagactgatttccgtacgaaaccctcgcaactggtgactagcatatccttctggttatgccataaagtaattgattctggtcgaagagaacaataccctacttctgtaacaccccacgtctactatacatctaacagctagtatggattatacaaaggaaataacagtctgtgcttaatctgaatcgttgacgtcagtcaacaatatgatatcgtgcccggcttacctattcat

SEQ ID NO: 32226 - DNA, 382 bp, Zea mays
  unsure (1)..(382): unsure at all n locations
catattttttttagcgaacaaacattcaaaccatggggagagcactaaaataatgccccgacaaactccacaacatcggtaataggtcaacaaagaggcccataccggaggaaagggaacaattacatgctaggtgttaagcgatcataccacaagattcctacaagttcgctaggaataacaagggggcgaactaaggagcatgagttgaagcccatggcagaaaaaggtcatgaggggctcctctaaagaaatgctggaaatggctcaatgatgctagaatcaatcaactatacatggtcgccattntactcggtttgactctacgcatccaaaaggaagcacccatctcaaaaaaggccgccgccctgaaaatgcatct

SEQ ID NO: 32227 - DNA, 360 bp, Zea mays
  unsure (1)..(360): unsure at all n locations
agaacacattttatgattaacccacgcggctcccgacacagacaggagctgatacgcatgccacgcacgcgagcaagttggagtccatcatccacacacgaacagtatgaccaccgacaggccgcttgagctaccccacaaggatctatacggcccgactgcttacataagcatcggcgggagtaagtactggccccgaatagcggaagattattctcgcttcacttgggtattctntttacacgagaaatctcaaacccaagagaccttaaagggattcttaagacgggctcaaaatgagtgcggcttaatgaccaagaaaaatataagcgaccacgggaccgaggtcaagaattctca

SEQ ID NO: 32228 - DNA, 472 bp, Zea mays
acaccgacctgcggcatgctagcttgacgggaagctgttcttttatatcttattaagcccctacctggcgcgccaactgtgtgtgtttcgaccccggagggtccatggaccgacgagtaaattgtcgctgcgtgtcccagcccagatgggtcggcgcgagacggaacacaagggggaacaataaggggaaccgcgactcgtgttgtcccgcgcccatagcggatgcgcttgcagtagggggttacaagcgttcacgacggagagagagagcttgttcgtcagcccgtcctcccgcgcggtcacctgttcgtacgagggccctggaccttccttttatagtcgtaaagagagggcccagtgtacaatggggggtgtagcaaagtgctaacgtgtctatcagagaggaaccagagccctatgtacatgccgacgtggctgtcggagaagtgttggtgccctgttcacgtgatgt

SEQ ID NO: 32229 - DNA, 404 bp, Zea mays
aaccctactgaagcaccccggtgtttataatataagcctcaccccccctcgtaggtgccatcttgcatcaatccatctaagtaagggcacgcggcacaaaattcactagtctgtctggtagagaggcccccgggtctgaaacaccgacagtttcatgtaaagtgtagcgaacaccctcacatataagctactcctctcttgtcttgatgagtaatatgagactaaagcctcacataccatctctacaccacgatatagaatttcttattcgaaatagcaagaccgttcctggagggggcgagaggtgcggccgcccttgccctcagtttagcgacacctcacctctggaggtcatatcaacaaccgattaatatatatatctagtacttagttctaactcccac

SEQ ID NO: 32230 - DNA, 338 bp, Zea mays
  unsure (1)..(338): unsure at all n locations
ggagatcttaccacacacctcatacttacaaaattgatgagggcatactatgtcatgagcatcacgtttattttatgacacactgcacctcatgaatagtatgatataagctgtctccatactttgacccagatatgtgcttctggcatttgagtactaaaagtgtattttctaaaatgcacatatttagggggaggaaactatatcatacgattcacaatcttatctatcacatcttatgtaagctctaaatgtgttgtcatcaatcaccaaaaagggggagatgtgaagtgccttcatcccttttgtgagttntggtgatttggatacaacacatt

SEQ ID NO: 32231 - DNA, 443 bp, Zea mays
cagactaataccagaatattttatcacgctatgggagtggtgagatggcgagtgtagcgtgtaccctccgtggcaagaggctggacggaggtgtatctgtgctctctgctggcgagaacctgatctggtcttaaaaaccccgcgggcgagttgacatatgcaagggttaagtgctacatatgtcgtgtgattggagatcctcagctgagtattaaacgattcagatcatagttacttcttggacatgaagactcggtcactgccctacacgtagcaatccagtgaacaagaagggttgttaagaaattggctagtataggacaagcgcttgaactatggtagaaagaactctagatgcaggtaactctacttaacctgaccagtaaactggattttaacgatccactttagaaacctctctgcaacagagtcttgatcttgat

SEQ ID NO: 32232 - DNA, 422 bp, Zea mays
agcttaaagccatggtaagcagcataggctatttatatgtgaattgactcaagcctagctacgggtgcataagtttcacccaaatccaaaccttcgactagggagtatccctcggccacaagtcgagctctgttccttgtcaccacaccatgctcatctagtttgttgcggaagacccattcggttcctacaacattctggttaagacgaggaactaaacgccatacctcattcctcgagaagctgttgagctcctcttgcattgccaccacccaatccgaatcttggagtgcttcctctaccctgcgtggctcactagaagaaacaaaagagtaatgttcacaaaaatgcgcacacgagatctagtagtcacccccttatgaatatccgcgagaatggtgccgacggtgtgatctcgttga

SEQ ID NO: 32233 - DNA, 233 bp, Zea mays
ctaacgcgaagacctgttccggccacagagtcgcattaaccgaacgcgagccacttaccgcacaacgcgatgagagaggaatccgtgtcccggaagcgtacgagcccctcggctcgggcaggctaggccggtacaggtactccggcgtatccaggagccgctctccgaagtagtcaagaagcacgaacgaaatcccgctaaagagaccctctcttcaagaaaaaacaccacgc

SEQ ID NO: 32234 - DNA, 406 bp, Zea mays
gcctcagcggaagatacggagatcaacccagaagaaccatgatgtgcaccacgcttggcttgcggtgagaacaaaggccataccaccaggatgtgccatggtaccatccaaaagcaaaaggaaatagccgaagccgcagcacaacaagctcagccgaagcaggacatgcataccgctccgaatcatccgccttacatcccagaatatgtgggcaaccaccctgcagtttctgttgcttcagcgagtcaacctcaagcttcctgggaacagcctgcgactccaccttcgctgcaacaaggccaacagccagaaaggagccagtatgctccacaccaaagggacttcagagagcagtccgaagctcgtacagccaacagcatggcgccagagtcaaagcacatctatc

SEQ ID NO: 32235 - DNA, 344 bp, Zea mays
agaaataaccataagggagttgtgtataacgccacatcctctcaaaagaaagtgcagctctttgttttgggcccgacagtccgcgctataaggctggactgtctgaacccacctggcggacggtcctcaccgatcagtggcgatttttataaccctagacgcccatacattcaatcaacgattcgacagagacgtaaccatgcatacttgttcaatagttcgcacaacatttacaacgagtaacacttgctagttcaccaatcttatttgtgaatctcactgctcacttctagatcacagagaaaatccgaataatcccccaattttgagaaatcatataatgt

SEQ ID NO: 32236 - DNA, 434 bp, Zea mays
atagcccatccctatatttttatatcttcgaaagccaaaaactccagcggccaattcctagtgccaatgtgctctgcactaattctgaattcagccaaccgccggtgggtcggaccttctggcgtcatattgcactgagggcgggttctttccaagattagcttaagcggactctgcacaaacttcttcctgtcctcatcaactttgacgtaaaaccattccgatttccagcctgccggccacttgctcctatagctgatcatacgaaattctgtagttttccgatatgcaaacgtgtatcaaccaaaatgctcatgtagcccatcctttctggccttagatcggcagagtagctccggtactcggcagaaacctccagcacatgacttcactgcttggcttctgagagcccacatatcaacgctaattctaac

SEQ ID NO: 32237 - DNA, 450 bp, Zea mays
agctttagagaatacaaaaacattgttatgtcttgtctcgcacaaaaaaacatggaatgcctttattccatactaatatacacgtacgtaacgctaattggccctactaccagattgaggctgtgttccttgaactctagcactgggacaaataatctgcacaacagtggatcacgtccaacaaataatctgcacaacatcttcactccacttcagatttcatatttcagagacgggagtcgcataatttctaggtaacaacctacccataggtaacaagcttttatgcgcaactaagcgttatctgattgactattccagaaccagcaaggtaaggaaagaagctgataacacaatgcaagggtagagaaataaccactgcccatttagcgcatccggatctcgcattggtcacagacgtaatcggaatatatgctcgcctacctcaat

SEQ ID NO: 32238 - DNA, 381 bp, Zea mays
  unsure (1)..(381): unsure at all n locations
tgagcaacctcccgactctgaagacagagagtaccctaaccatgtctataggccctctaaagcgctctatgggctcaagcaagccccaagagcatggtatgaatgcctaagagatntccttatagctaatggcttcaaagtcggcaaggccgatcctactttatatactaaaactctcgacaaagatctgattgtatgccaaatttaagttgaagatattatatttgggtctactaacgaatctacatgtgaagaatttagtaggatcatgacacagaaattcgagatgtcaatgatgggggaggagaacatttcttgggattcaagaaagcaactccaagtggcaccttattagccaacgaagatactcagacatctaac

SEQ ID NO: 32239 - DNA, 262 bp, Zea mays
cgtgtgcattgactatagttaaagggtgagggcgccttcttacaaatttttggcgctcgggcatgcatttggttcagggggcggcgacctccttacgtgatcccctcttaatgaaagggaaggccccaagtggccaaaggttacgggccacggttctcccaaccattggttttaaggaaaactgaaccgcaagggttttctattgccaagtgaggaactctttttcatggccaaccccgaaggttaaagctaaacattttgg

SEQ ID NO: 32240 - DNA, 234 bp, Zea mays
cagccagcccgcaaaaaagcagcagctgtgccccgagaagataccagagcgcagaagtcagcgcgcccaccaataacgtcggcaagggcagcaactgcgccttcaagatgaccgaacgcccgggcaagtcgcagctgaaggcgtaacactccgaagagccagcggcgacagagggaaacacggcgcccagccgctgcacacaacggatgccgaagcctaagcattgctcccgaa

SEQ ID NO: 32241 - DNA, 309 bp, Zea mays
cacccgcaacaacgagcactccaacccaccgaagagctgccaaaaccacacaccaagatagaaccggactcacgccaccaggagagccccgccaaggtcacagagcaaaaagaaagagctacccgggcaagggcacacacaaagcataaacgccaggggagccaccaaccagcagaggaagccacaagggagactgatgattctctacgccctcgcggccccgacttcctagccaaaggaggcggacagaaccccaaaacagcacccccacccgcctcggaaaccaagcataagaaaacggacaaacaa

SEQ ID NO: 32242 - DNA, 352 bp, Zea mays
ccaccacacaaccgcaaaagatgtccaacgcctcagagaccaagacgaccaccgccacatcccagcgcgcacagctctccatctccaacagcaaaaacatcgcctggaacaacaccatcatagagaaaggactgcacaacagcgaacgctctctctctgatctccaaccacacttcctcacagcagtctgcacttcgaggaagaaaaaatacaattggcatcccacgcacctgtgatcaatgaacacacaacaagtatcaaatcatctgcttgaaacatgactttcctattagcgtactataagcacagcaagcatcacaagtgcaaaggaagaaaactataaacctgccac

SEQ ID NO: 32243 - DNA, 308 bp, Zea mays
  unsure (1)..(308): unsure at all n locations
ccataaccaccccatgcgagtcatagctattaagcatgcatccagaccggcctnctcttttgcaaaaccaactaactaaaagcggccagctagtacacccttataagctagtgaaccatcacatcttctaaagacagacacacctacatttggtaacaaacagttagataccatattgcataatcgactaacagatagcaaatcatatccaagggactctactaaaaacacattagagatagagtgctcatttgagactgcaattttacctaacccttttacctcgccttgattcccatcaccgaata

SEQ ID NO: 32244 - DNA, 343 bp, Zea mays
  unsure (1)..(343): unsure at all n locations
atactgtgttagctcaccttcttgttttctgtaaatatcgtcagatgtgatgttgtgcataagtagtgtatcattgtcatcttcatctaaaacagtcaaacctagttcttttgaaccctgaaatcaacccaagaataaatcatataaggtccaaaaagtaagcccacatattagaaatcataacacaatgacagaataccatggtgccatagactacaagtattctctgcttgcttccatttgtattgaactattgctttacttctacacagggacattgatccatgagaccatgaatcaccttncaagtaattgagctcattttcatttgtattgaactact

SEQ ID NO: 32245 - DNA, 365 bp, Zea mays
gaacacgttatatgtttaactaacgcgcaatcccaaaaggacagacctcgagcagctaggccagcacgccaacaacggggaggagcgcatcacagcaagaatgtgacgaccacttcaagaccccaggagctgccgcatatggacctcttcggacccgctgcctatccgagcataagaggaagcaagtatgggctagctatcgtcgacgacttttcccgctccacttgggtgccccttctgcaagataagtctgaaacccaagggaccctcaagcgctccctcaggagagctcaaaatgagtttaagctcaaagcgaagaagataaagagcgacaacgggtccgagctcaagaacctccaagcgga

SEQ ID NO: 32246 - DNA, 299 bp, Zea mays
actaagaacctcagaaacaaaatatagcggggccagcctctagtctagaccaccgatcatttcctggacaagggcggcactcaccgctgagtgcgaagctgccacacataataataaaggagcccctggcactggcggaggcaaagttgttaggactatcaaatactgggtcagttcttcgaaagccttctgcaggagagggccccatagaaagacttcggcagacttcagcacttcgaagaaagagaagtctctctccgctgatctagacatgaatccatcgagagatgcccatctcc

SEQ ID NO: 32247 - DNA, 383 bp, Zea mays
ataagacactcccgctatgtaataatatttatgacatttatctctatacacttggtcaatatatgtgctgtgcttctttggcacacatatgagacgcacctggctttatcctttaaatctgggtgtgacagaagtggtatcggaggaaatgttgaccgtaggatgaaacctatatagaactggacaaaaccctgacctacttaccttactctgattctttccatacttttcttgatccttctcaccttcggctgttctacactgactactcttatcttgcaactctagaaagacaagacaaattccacacctcggaattctacatctaagactccctacagagataggagacctaagacaaatatatgcgctctatctaaagc

SEQ ID NO: 32248 - DNA, 296 bp, Zea mays
aaacaagggaggacgcacacacaagaaggaagacctcaagaccccgagcagtgcaaaggaccttcggacccgggcctactgacataagagaagaaagaggctagtatcgtgaaactttcccgctcactggggtcttttgaggaaagtctaaacccaaggacctaagcgctcccaggagagccaaatagttaagctcaaggaagaaaaaggagcaccagggccgagtcaaaacctcaagggagagcccttaggagaaggacaacacgatctccgtcctacacaccacaaaaggggga

SEQ ID NO: 32249 - DNA, 447 bp, Zea mays
  unsure (1)..(447): unsure at all n locations
agctnccacattcattgagtacataagtgttatcttattattcttagctcagaacataggcgagttggtaggattgaaactcaagttgctgaactccttttacggtagagatagcaacacagacaaaattgtagtgcacattcttgtttagcttcttgcataggctttgtttaacagaattgttattgccctatattagagtgagaaaatagaagttctaattcatcccctcttacgcatccgtgttcctttcaattggtataagatcctcgttagcgtctttaagaatcttttggcttaaccttcattgagccgacactagataagagggaagggatgggtatccataggccatcatgctctgataacactaacttcccctggtatagagctagaatggctagtacctaaaaccattgattaggtgttagagaacattccaacgag

SEQ ID NO: 32250 - DNA, 392 bp, Zea mays
  unsure (1)..(392): unsure at all n locations
taatacaccctcaanagctagtgttccatcacttcttctaaagacagacacatctacatttgtgaatagacagttatatcccatattgcataattgactaacagataacaaattatatccaagagactctactaaaaacacattagagatagagtgctcattagaaattggcaatttacctaacccttttaccttgccttgattcccatcaccgaatataattgaatcttgggaatccttattcttgacgtaagaggtgaacatcttcttctcccctgtcatatggtttgtgcatccgctatcgataatccagcttgaacccccggatgcataaacctgcaaagcaaatttaagctcgggacttaagtacccaactcttggtgggtcctaca

SEQ ID NO: 32251 - DNA, 310 bp, Zea mays
cacgacaccggctcctctctagaaaatcaactaaataaaggtcgccgtctaatacacccttaaaagccagcgaaccctcacttcttcaaagacaaacacaaccacaatcgtgaataaacaaggatatgccacatgaccaaatagactcacagacaacaaatgatatccaagtgactcaactaaaaacacactagaaacagagtgcgcggatgaaatagcaacataccctaaccctttcaccttgccttgagtaccatcaccgaacaagatagagtcctgggagcctctgctcttgacgtacgaagagaac

SEQ ID NO: 32252 - DNA, 308 bp, Zea mays
gctcgaaaacgtgacaaagaactcataacgcaagcacacgatctactggaaaagttccccaagctgaaattccgaaagactcctcactgctctaactacgctgaactggaattcgcactaggggtttctaacaagtaaactccttaactaaaggtggattttggtctcgccatcgacgtgtcctttctgacggaggcgttgttaggtagcgacaaaatcatcaatcaaagactcgaattatatagcgtcgctgctgagatcaactcttaagatgtcgtagcaacgcacgggcaccctactagtgtaat

SEQ ID NO: 32253 - DNA, 418 bp, Zea mays
tttactatggctaggacactaaaacggtgtagtgtcggcgcttaacgctacggcttaaggattggatctggggtctaggttaccataaaaacatgtgctatagctcacttgtggcaaaaaatgtcgtaacggcctctccggtctaaaacgtaagcggcaggtcggatacacgaaataggctctttggccacgaaaacctgtgctacagctcgtgggaggccaaggaccactttaaggtgctctgggaaccaaaaaacgggtggtggaacacgtacttaaaaatgcgcgctcgaccatgaaaacgtgtgccataacctacgagaggccataatcacccctagcagtctcagtggccaaatcatgggtggcggacgggaggcatgaaatcgtcgttcgacgatgaaaacatgtgtcacgg

SEQ ID NO: 32254 - DNA, 377 bp, Zea mays
cgcagctagccaggcacgcaaacacgcgggaggagcgcatcacagccaagaaagtgatgaccaccaccaagacccccggagctgctacatatggacctcctcggacccgtcgcctatctaagcataagaagaagcaagcatggctcagctatcgccgaagacacttcccgcatcactcggagggcctttctgcaggaaaaggctgaaacccaagggaccctcaagcgcttcctcaggagagctcaaaatgagcctgaactcaaagtgaagaagaaaaagagcgacaacggcgccgacgtcaagaaccttcagtagacgacgtccttgaggacgaaaggtacaagcaccagctctccgcgccctacacacctcaccaa

SEQ ID NO: 32255 - DNA, 207 bp, Zea mays
acactcaacaacgcctcaagggcgcacaagaacgccacagacgagaggtgcactacagctctcaacaacctccgaccacaggcgatcaagctgaggaacgaagccccggaaaaagacaaaagcctacccacatgacaggacaaaggaaaggggggcgaagaccaccgcaaggcccaaccggaaaccaaaggaaagagatggaaagcc

SEQ ID NO: 32256 - DNA, 319 bp, Zea mays
  unsure (1)..(319): unsure at all n locations
gaaaagaagaccgagagcagcaatcaagcagaaaacaagtgggaggagcgcaccacaccaaacaagtgatgaccacaccaagaccctcggagaagtcgcatagggaccccttccgacccgcccgctatctaagcacaggaggaagcaagatggttcacgtacggaagggaccttgccccaccactagggcgtnctatagaagaaagccagaacccaaaggacctaagcgcccccacgaagccaaaagagcgagccaagcgaagaaaaaggacacacgggccgaacaaaacccagggagaggtccgagagaagggaacac

SEQ ID NO: 32257 - DNA, 385 bp, Zea mays
cccaccataaggaaggcggattcgaaagtcatacctgacgcatattcactttattcgttcccttgtatgaagtaccgtctgcttcccaattcgaatggatgaacgtatgtatgctcgccaccgcatagagaacgattcggtcgaacagcccgaggaactcgcaggagaagcccctgagcaacagtcggttggtggaggcaagtgtcccttgacctatctctgtcctatacattctttaattcacctcccgctttacacatttatgcctaaggattgactagctttgttatccatgtccttgtttacctatctggagtggattattattggttagctttatgctattgctcacactctaatcaatgaacatgatgagattatccat

SEQ ID NO: 32258 - DNA, 472 bp, Zea mays
  unsure (1)..(472): unsure at all n locations
catgcaagctttatcatcatctgttgagcttcgaattttctgctttagcttcggntcagtgttcctcgacttcgtcatcctgtacatattaaagcattataaggaaaattcatatttcaaggaaaaggtaagcacaaggtatgattttattaccggcttgaggtgacttcgagcttcgtcaccagctatgcttcgcccacccttcgtccagattttctttataaatctgtttcctatgcttcgagcaagactagggatatcaatcaaatctgctggtgataagctgaagtttggtctattaacaatcttcccatgcctgcaaccagacttcatgaaggcaacagctatgccccgagaagctagcagggcacagaaatcgtcgtgtccagctataacttcatcaagagcatcaacttcgccctcaatgtgttcgaaggtccctagcaagtcttcaaccaaaggactgaaattc

SEQ ID NO: 32259 - DNA, 476 bp, Zea mays
  unsure (1)..(476): unsure at all n locations
tgcggcatgcaagctagagcaatggtgggcaataaggctttatttgtttgatgtattgcggaacaatntagactaatggaggtagcatacttcacaagttgttactttgcagaagaacataatgtatttgctcgaaagaaaaggtaccatgatgatgaacgagagatgcctccgtgtagtgatctttcgatttttcagacaaacggcaaagccgttggtccacccaaggcatatcacctcagtatggaagaacggaagtctgctttactgtacatgttcacgaatatgcctgaggtggagaaatactttgtgtaagacttgttttcttaaactgttcatatgtgaattagtttatgttatcaaatatctcatgtcatacaataatatttgacagcgagtttgatgaacaaaacatgatgtgtctcggtaggccaacagcgagagacatacacaatttgcgacgcgatggtatgcat

SEQ ID NO: 32260 - DNA, 427 bp, Zea mays
  unsure (1)..(427): unsure at all n locations
attcacccncctctaggtgctctcaactgttcgggcttatcctccggacagtccgtaatacaaatcccaaaaactcacacagttcctgcctaaaccaatcttggcacctgcagacgcgccaccctacaaagccagacggtccgcacaataatacagggactgtgccgagagcagccttctctggtcaagactgcgacggtccggccccaaggcccggacggtccgcagtacaaatgaataggaccagcccgaagtaaacatacttcagaccccactggagggtcgcagacagtccgcccgcatatcccggacggtccgcacatcccaagacttggcaatntttcaaatatgctctcgaagagaattttaactcttgaaattggaagtgctattagtcctcatgcatatgcaaccactagatgctcta

SEQ ID NO: 32261 - DNA, 442 bp, Zea mays
cgcaagctcagcaaaagaaacgtctagaccccatattatttagctcatgcctaactctggtgaaagagggtcatcaagaggctaggccaacaagtccgctaaacgatccctaggactaaaggcagaaaacccgacatccccctggtgccggcgatacctaagaaaatgataccgcatggctaagcgcttacagcggctatgctcaacgggattgtcagccatcttaactgcactctcattatcacataccacagggactttgcgtaatctgtaaccgtagtcccgcaaggattgcctcatccaaagcaatagcgcgcaacaatgtcctgcggcaaagtactcggcttcggcggtggaaagagcgaccgaatcttgcttcctagaagccaagacaccaaggatcttccaagaactggcaagccccgacggctctcctatagat

SEQ ID NO: 32262 - DNA, 393 bp, Zea mays
ctgctgactcactcaccgtcaatccgccttcggtcacaccaactgccatatctgtccccgcggttgactgaaccgtggcccccactcctggtggtttcttcaggccacgtgcgatgcgccttgttgtctgtgcattggtaaaatattaccttttgttttccgcatcgactctaaagaagcgcactacaagcgtgcgtgacggttctctctttaccacccgaagttcgcacacaaaccgtatgacttgtggacccgggccctcatgtcatagactgggtttgtcttctgcagtggtcccaatgaagcgcactacaagcgcatgcggtggttctcactacaggcgcgcgcggtggttcgtcttttcctgacctgaagttcaacgcacaatccgta

SEQ ID NO: 32263 - DNA, 396 bp, Zea mays
ctcttcaccaccgaaacaaatcaggtctttcttcgctccattgaaatagcccaaattcaacatcttaagcaaatcatccttggagacggtggatttcccaaaatccaggcgactgggttcactaggcactgcgctataatcatcttcagactcagtctcctcaacatcagcttgttctacctcagaggcaggtgctccctccgatgctaccagcctggagcacttcatcacttcagaaattggtgcaatttctagatcttcggcttcttcttcgtcgcgcgtaaccctagctgtggaacgcactctggccatctgatgattgaactctttgtttttgaatgaagtgaaaattttcttactttgccaaactcttcgtttacaagccagagcaacaaa

SEQ ID NO: 32264 - DNA, 324 bp, Zea mays
gtccctgactgccttctttacctacactctcttacctaaaaagattctgagctatgctcaggatctcttcagcctgaagccatagcctcaaaataagtcctaactaatagcaatgaagcttttctgcacgaagcaaaaggacgtcacatatgctccgaagtatgccagtatgatgctgatacatactggggcgaatgtctctgccgaaagtcctcacaatcaattacaaccgacagcgtctcataatctgcctcaagaataattaacatatggtagttcaaaaaagaacaccaccacgttggtggctcgctcaaaagaaaagac

SEQ ID NO: 32265 - DNA, 309 bp, Zea mays
  unsure (1)..(309): unsure at all n locations
cccccccccgccccgcccaggggcaacgccaaccccaggcccctgtctgactccactgncncccgcgagcgaccggacccacgttattcgccaacgccgcgacagccagtgaccacggaaggcctgtcacccgcagggcggccaaacacaaagaagcaagaccacacaagaggaaaccggtcaccagcgggcaccacgaacgccaaaaagcgcagacaacacacggcaagcaccggcaaaagaagcccgggatgggacccagccccagcacaaccggacacacaaaggcccgccaaggcccaccagaga

SEQ ID NO: 32266 - DNA, 428 bp, Zea mays
gagagcacattttatgatttatcaacgctcattttgagaaagacaggatttgtaacgcatgccaatcaaggaaacaagctggcactcatcattcacacaagaacataatgacgactgacaggccactggagcttctacacatggatctattcgggccgatcgcttacataagcatggcgcgggaagaagtacttgctagttattgcggatgaatattctcgcttcacttgggtattctttttacaggagaaatctcaaacccaagagactttaaaaggattcttgagaccggctcacaatgagttctgcttaaagatcaacaaaataagaagcgacaatgggacggagttcatgaactctcacattgaaagcttccttgaagaggaaggcatcaagcatgagttttcttctcgtacacgcccaacaaa

SEQ ID NO: 32267 - DNA, 460 bp, Zea mays
  unsure (1)..(460): unsure at all n locations
gcaagcttggngtgtttcctaaagctcctagttctttgtttctctattgtgacaacaatggggctattgcgcaagctaaagagcccaggaaccaccataaaaacaaacacgtactgcggaagtttcaccttatacgggaattcattaggcggcgtgagataaagatatgcaaaatacatacggatttgaatgttgctgatcctttgacaaaacctcttccacaacctaagcatgaggcacacatgagatctatgggtattagatatcttctacattaactctagtgcaagtgggagactgttagaaatatgccctagagataatcatagagatgagcatatttctttgtatccatgatatatatattgcttaactgaatatccatggaagccaccttgtattgattaacaattatgtgaattgttcgcgagattctttacttatatgggtattctaaatg

SEQ ID NO: 32268 - DNA, 359 bp, Zea mays
acaaaccgtaccagtcacttggccttctgcatgccggggaatggacatgataggacctttcaagaaagctcaaggaggatacacccatgtattggtggcaatagacaagctcactaaatggatagagtgtcagcccattggctccttaacttctgctaaagccgtggaattcatacaaagcataatattcagatttgggataccaaacagcatcatcactgacttgggatccaacttcaccagctcagaattctttgacttctgcgagcacaaaagcattcagatcaagtatgcatctagagcccatccgagagccaacgggcaagttgagcgagccaacggaatgatattggaagcac

SEQ ID NO: 32269 - DNA, 453 bp, Zea mays
  unsure (1)..(453): unsure at all n locations
agctntatcanatggatgtgaatatttgtttcctcgatggaccaatcaaagaagaggtctatgctgagcaacctcctggctttgaagatagtgagcaccctaaccatgtgtataaactctctaaggcactttatgggctcaagcaagccccaagagcatggtatgaatgcctaagagattctcttatcactaatggcttcaaagtcggaaaagccgatcctactgtcttgactaaaactatagcaaatgatttgtttgtatgccaaatttatgttgaagatatcatatttgggtctactaacaaatctacttgtgaagagcttagtacgataatgattcataaattcgagatgtccatgatgggggagttaaagtatttcctaagattcaagtcaagcaactccaagagggcaccttcatcaccaaaccaagtcactcaagaatacttaccaa

SEQ ID NO: 32270 - DNA, 450 bp, Zea mays
aagcatattctggttcttatcgtttgaagggtccatcaacggtaggcaacaaagatctagaaacccaagagttctttgtgttatcacttggtaaacttattacctttctagcacaagttgcaattttaagttgcctacctacatgagaaataattgacaagctagaggtggggttgctaccaaagggacaatccttgcattgatgtcccttctttcgcgatatgtagcaaaggcgatcttcaagtcttgaagatctcttctttccttgtttctttcttgctacatggttagtcaatattctcttttctaacactatgcctttttgattcagatatcggcaagtcttaattaagtgtcctttctttgagatattaaaacaaagtttatcatccttgctaataatcaagccctttttaatatagggacatgaccttaatgagtgtccctttc

SEQ ID NO: 32271 - DNA, 454 bp, Zea mays
  unsure (1)..(454): unsure at all n locations
tgcaagcttgatgctactgctgacaaaatgatatttatatgtccgcctctatctaatactggattctttgaaataccatgcaaacacacaatcccagccatgtatagaccggtctacaccgctctgttgtaagtggtcttgactggaatgaaaagaaccgcctttgtctaacagtccactactaacaagatggagctataatcaaataacaccgttatgctaaccaactatctaagtcattatgatataatcctatgtactctgaggaatctcgaacagttgcaacaattctgtatgtcttgattgtctagtttaatctatttagaagtaggatatacagtcacttactactatctatctcatttatatccggcctaatgaaatatntactagatattgggcaatttactactacctttgtcatacagatatgcgcatcatggctcccttgaga

SEQ ID NO: 32272 - DNA, 308 bp, Zea mays
  unsure (1)..(308): unsure at all n locations
cagcttanaaaaatctggtatgaatctgctattatatccagctagccccaaaaaactccggaggtggtgaacaatggttggacgtttccattccaaaaattccttgaccttgctaggatctacccgcaatttcctttaactgataatacccgcccccagaattgaaattctttcagccaaaatgcgcacttactaaacttggcatatagctgatgttcccttaggcgcggtaatacaatccgcacatgctgagcatggtcctcttcattcttggaatatattcaaatatcttccatgaagactaccac

SEQ ID NO: 32273 - DNA, 303 bp, Zea mays
acaaagagcccgacacccgaccaagagcaggatcccggcagaggccggggcctcacgactgtaagagctcctccctaagagcagtctgtcccttacgaggccccacaactagggggtcgctaggggcgactcaacagaaagccgcaaggtataagaggaacatctcctctcgaagcacgcaatcgccctcctcccaaagaaacgacacacagttctcccgcgagattcaaagggaaaaaaccgcgggttccatccacgaccgaacaagacgctcggagacctagacacatggctgaccaaaaa

SEQ ID NO: 32274 - DNA, 432 bp, Zea mays
agcttctattatcactgtacgtcaaattatttttctctacatatgaatccttccaaggggaaagttctttgtttccatacacacacagttcacaagaattacacggccgtttactaagatgcattgtgaagtgtataagtggactagctaccttctcccaacaatttaagcttctacgttaaactagttaatgcgtccactctaacatggtattaaagtcagaagtctaaagttcgaatcctcgcagagcgttaattcatgtctacacctatttatttccacgttagagtctctctctctttggctgcacgtcaatgagggtgtttgaatgaataattggactccctatcttctcctaaaccttaagcttttggttggactggtagtgctccactcaatatcatgtgggccatgggcagcttgtatctgaca

SEQ ID NO: 32275 - DNA, 464 bp, Zea mays
  unsure (1)..(464): unsure at all n locations
tgcaagcttgacattgtctccttgtaggaactcatttcctattcttaaagccacagcgatcgccagtataaagcatgctactagccaacccaattcttctattctctatcttatgctcattaattttagcagcaaattgagctatgtaatcattntgctctttaattaaagctagatgatcatgaataccatcaacattaacatctctacatctactacaaatagagacatgatcaaccctacatgtagagggtttgcaaacttttaattcatcaatcttaacatgtaaagtaccattctcatctctaagcttggaaatagaagcattgcaaacattcaaatccttagccattaacttatcattctcaatcttgagactacaaattgattcattcaattcgtcaatcttaccaatcaaactagcattatcatttctaagattgcgcactgaatcatcacacaca

SEQ ID NO: 32276 - DNA, 459 bp, Zea mays
  unsure (1)..(459): unsure at all n locations
tgcaagctcgagttatgttattacagttcatacttttttgagtgcatanaagtaatataatacgaaccatgggaggcacaaactcctcccgataagctaaaagcaaaagatcctaagtggaggaccgagtcctcccgcacttcactcttgattgtcttcttttggaaccaccttggcacagaagcagcaaaagtctgctactttctcacctaaaaacaacgaagggataaaccctgagtatggaattactcagcaagtcttacccgactaaataaaagactctcaagggtatgctggctatgtgggagtcaaagtaaggctcttcaatattcaaagactctgttttgcagaaatgcttactaaagtggatccttaaaaatccaattttatttgtcaagttacagaaaattacctgcactagagttctttctaccctagtcaatcactggtcctgactag

SEQ ID NO: 32277 - DNA, 383 bp, Zea mays
ctgccatcttctctccgcgaggcgtattttggccctgccctcgagctctcgctgcagctggtacatactctccatagccgcggcctgctggacccgctgctccttcacgatttcgttcacgcactcaccttggcctatagctttgcgaccacctcctccctctagtgtaaagttgtcctacttcttcggccagcctgttctcctttcgggtcgcctccagcctcatagcgcacaccttctggaggtcctctctgtagtctttgcggtcccgcgcccggtcacaccgctcaacgtgaactggtgggactcccccttggtgcactcctccatttgggtgcgccacctgctgacgcgctggtgctcagattccaccgcctcccatt

SEQ ID NO: 32278 - DNA, 331 bp, Zea mays
actcgctcactgttggttttaattctgcagctctatcttatgtgtataaatactcagtatatgtctaccatatttatttatactatgctttttctcatttgcgtaactaataggtgtttaggttaacattgctttgaaaccttgttaactatctttagataactatgatcttatctatcattatctatctcattgtactaatatgtctggtaccttaagaaccagtacctggggtcatactaatacttgtcaagatatcaatcagatcaatgtactatctatttgaagtttcattatgtgaaaatgtatgtctgtctacaacattaatccc

SEQ ID NO: 32279 - DNA, 402 bp, Zea mays
  unsure (1)..(402): unsure at all n locations
ctaagcttatcggattgtggttgcggttcatccagcctcaatggagcatgtagttattctcgtgagaactggtccatcaatcattgctattaaggaatgtcaagtcgtaaccgataaccattcttcctattaaagccaaacagataaaacttaanaaagtgaaagggacttagacatttttaaaaagcaggagtggaatttatattttttttataagtcccttgccgctaagtatggaaaaaaaatccgcctttcgtgggacatggattanaagggttttctcaatgtgtttgagagatgaatcttccatccncaactctgcaagtcgagccttactnatggtactataagaactgggttatntaattatttaaatgggtataatatctaatagtaccttct

SEQ ID NO: 32280 - DNA, 218 bp, Zea mays
catcatccacattagaacatcatgacgactgacaggccactcgagctcctacacatggacctattcgacctgatagcttacataagcatctgcgggagtaagtactgcctaattattgtggatgactattctcgcttacttgggtgttcttttcgaagaaaatctatacccatagaccttaagggatcttgaacggctcaaatgagtcggttgagatc

SEQ ID NO: 32281 - DNA, 179 bp, Zea mays
ctctgataatgaaggactcgtcgccactgccttcaacaagtcatccctcttccccaacgagcgtcacacttgcctcatggcaagggagaagaaagtaagcactcctaatactagtacttatgcttcttcaagtgagaatgagtctagtgatgatgatgagatagaatactcatgcttat

SEQ ID NO: 32282 - DNA, 277 bp, Zea mays
  unsure (1)..(277): unsure at all n locations
tacccatcattcacacaagaacatcatgacgactcacaggccactggagctnctacacatggatctattcggcccgatagcttacataagcatcggcgagagtaagtactgtctagttattgtggatgattattctcgcttcacttgggtattctttttgcagganaaatctcatacctaagaggccttaaaaggattcttaagacaagctcacaatgagttcgggttaaggatcaagaaaatagaagcgacaacgggacggagttcaagaactctc

SEQ ID NO: 32283 - DNA, 422 bp, Zea mays
  unsure (1)..(422): unsure at all n locations
tgatatgggagtggagagatggcgagagtagcgtgtaccctccgtagcaagaggctggacggtggtgtatctgtgcctcttggtggtgtgaacccggtctggtcttaagaaacccggtggagacttgacatacggaagggttaagtgctacatatgtcatgtaattggagatccctagctgggtattaataaagggtgtgcgttttagactattctatgttccaaactaatagaagtagcattaaatcaaatttctttttctcgttctatttcagaagatccattcatttgatactcatctgctcctaattcgactctctgaatcgaatacaagcttttcgagttttcaatggtcctttacgcaatcttccgaattcgaatagtacttaaatctctgtttcgatatctatanatctttaatg

SEQ ID NO: 32284 - DNA, 214 bp, Zea mays
acgaagcaaacccccaacaatacatttacatttatgatcacatgattctttgcattcatgtgagcatacattagacattcgtaggctcatcatcattgcataaagcatagacattaacaggaagaataagaaatgcctgtccttgatgagaaaatgcttcgttgcatacgaagatgcttagtcttcaatgagaaatgctttgatgcgaacaaaa

SEQ ID NO: 32285 - DNA, 323 bp, Zea mays
taagctgtggagcttctttcatggccatgtttaactatttatgacctacaggtcaatgaaatagcttcaacaactgggaatttcaacttgatcctggtacaggcatgacaaatggctcggctctacgtttctacccctaagcaaacctatgcaaatatcaactaaatgtcaaactaccgtttgctaagtgttgtatctcaccacacatcctaagttcaatcctaaataatctaactagaaagacaagattgacacttatatgcttaatataaatgcggaaggtaaagaataaggtagagatgcaaactctcgtggatgatgcc

SEQ ID NO: 32286 - DNA, 296 bp, Zea mays
  unsure (1)..(296): unsure at all n locations
ctcggaacnttgattgatatcttcacacattgctcacttatatatacgttnngatgngtctctttcatttgatacaaatgtatatttcttattcttcttgtgccaaagctaagactaatgtgcttccaagagtatttttatgcttagtcttagaatgaatgggaaatggagtaatatgcanaggcatggctttcactacgactctgtcngtatcacctatcctttgccttactcatgtacttacattcatatcttgtatacgacctctagttctcttcgttnttgcacttaatgcc

SEQ ID NO: 32287 - DNA, 147 bp, Zea mays
  unsure (1)..(147): unsure at all n locations
atacacccatgtattagtggcaattgacaaattcactaaatggatagagttccagcccattgcctctntaacctctgctaaagccgtggaattcatacanagcataatattcagatntgggataccanacagtatcatcactgactt

SEQ ID NO: 32288 - DNA, 228 bp, Zea mays
  unsure (1)..(228): unsure at all n locations
ctaagcttgctcacatacagctttatcatgaaggtcaagcctatacgatgtggctaatgatcctccacagtactgtggngaccgaattagggtaccccaatgcttttaatcggctggagacatcttagaacaaccataacgactgataagcgcggcctcgttaccaagggattgacctcatccgacccaacctcgggcaaggacagagtcccgaacggattcacgcct

SEQ ID NO: 32289 - DNA, 188 bp, Zea mays
  unsure (1)..(188): unsure at all n locations
catatcgtganntgtgtgactgtgatgttgtgcctatggatgcntgtaatattctgctacgtagaccatggcaacttgattcacattgtatgcatcatggtagatcaaatcaatattctctcacacaccatgagtagaaaattattttgcttcccatgtcccctgaggctattgtgcgtgatgatgtt

SEQ ID NO: 32290 - DNA, 306 bp, Zea mays
  unsure (1)..(306): unsure at all n locations
cgacatgaacgctccttaatgacacactttgtttgaaacaacgtatgtcgctgattctgctctgccttctccatttgtgcactaagcactcgctgtacaatgaggctctcataatgctctgcatcatctgcaccaatctgttcttcgggtggttccttagtgcctgcatcatcagccgcaagcaaagcaagtgtagcttcatccaaatcactagcagaggaatacccaccatcgtcttttaccaccanaacacgctgattatgacaatcacgctgcacgatgtcatagcccttgcattcgatacac

SEQ ID NO: 32291 - DNA, 345 bp, Zea mays
  unsure (1)..(345): unsure at all n locations
tcttaagagaacagaatctgcacagaattatgagactgagaaactgctataatcaaactgtaataactctctgatctaatgtctcgatgaggtgttctttgccgccacaganagatctacaaattatctatgactcatagatagactntnnntattttttaggccactaagaccactgaaaactatcatgaacagaaattgtcgaatctgccattctgcagagactgaattctagatcanaatctaacnccacatctaatccaacctctaatcatntataacccatgatgccacaacctcaaaaacacttaattacanggaggaacatggatctcatcattacct

SEQ ID NO: 32292 - DNA, 193 bp, Zea mays
tggtcccactatcaggcttgttagattaaagctaaaattgtgaagatgtcactctggatttgggagcctattgaccaaagcatttggaaaattttcgcaaggtttatggtgaagcagtgcagtgtacaattggtaaacagcaaactataacatctgcaagatcaaacacattattgcactcataattaccatg

SEQ ID NO: 32293 - DNA, 208 bp, Zea mays
gcaagaacccgcactggcccacaatgtccccatacaagaaatctacaagacgcggtagaaaatactagctgtgaactgtcgatgtaccagaaattccctccgcaggaagtgctgaaaagtgaaaacgttgtttcacatgtgaccgaaaagattttcttttttcaaacttatttgcgattaagccgtatttacatttatcacaacgtta

SEQ ID NO: 32294 - DNA, 250 bp, Zea mays
  unsure (1)..(250): unsure at all n locations
tgttgatcttctttgagcccttgatcatgaactcaaagctcacanaattcccgattacttncttcggactcattagtgtatatctaggattgccacgaattaattgaacttgagtagggttaaggaaaataagtgatcttagaataaccttaaccatttcgtggtcatcccattntttgcttccgagggtgcgcacttgattcaccaaggttttgagcccggtgtacatgtcttgtggctccctcccttg

SEQ ID NO: 32295 - DNA, 294 bp, Zea mays
tctatgacatagaagttgtacaccccttcataggcctcttttcactttagcctttgctacacccaactgataagctaaatttttataggttaacgaagcgacctttactacttgcagatgtgtgcatattagaatattggcactacatctgaaaatatgctaccaatcaagttatggagtaacttggatagacctcaagcctctccacatctaaattacatgagagtcacctaacctgacaggttactacgagaacaaaagtatgaatgtttttcttacgtattctctggaatc

SEQ ID NO: 32296 - DNA, 303 bp, Zea mays
  unsure (1)..(303): unsure at all n locations
atatcctggtgattatcccgaacacaaaattaggagaagtcatgctaagaaatctcattctgtgtctcaccatgcttntatgtataagaatggngcttctagctctaggcattctactcttgttaaaatgcctaanaagaaaactcctactgcatcaaatgagcctaacatttcatttannaactttgatgcatcatatgttntaactaacaaatcaggcaaagtagttgccaaatatgttgggggcaaacacaanggctccacaactttgtgttgggtacccaaggtgcttgttctaacatc

SEQ ID NO: 32297 - DNA, 196 bp, Zea mays
  unsure (1)..(196): unsure at all n locations
catgtgtcgagctcagctctatcaanatctactaagtatagctgaccctctaacacacccttaaatgctatggaatcatcacttcttcttaagacagtgacaccaatatcagtataaagacagatgtagcccacttgacataattgtgaaacagaacgcaagttgttatctaatgaatcaacaagaataacattgg

SEQ ID NO: 32298 - DNA, 355 bp, Zea mays
  unsure (1)..(355): unsure at all n locations
ctaagcttgccatacttgtataagcacaacacatgccagcacagctactacagaccataccagtnacttggcctttcgcatgcctgggactggatatgattggacctttcanaaaagctcaaggatgatatacccatgtattggtggcgatggacaaattcactaaatggatagagttcaagcccattgcttctttaacctctgccaaagctgtggaattcatacaagacataatatttagattcgggataccaaacaacatcatcaccgacttatggtctaacttcaccagttcagaattcttcgacttctgcgagcanaagagcattcagatcaagtacgcatctgtagcaca

SEQ ID NO: 32299 - DNA, 255 bp, Zea mays
  unsure (1)..(255): unsure at all n locations
ggtactctcaatacgcctaattctcatctggtaacccncatcagcatanagctgcagaggcctgatgggtgcgattaagtcangggtcagtccgtacgaacgactcgatcacgcctcgcccgagcctagcctcgggcaatggcagccgaccccgatgggttttcgtctcgcccgaggccccccttttttaacggcggacacatctacggctcgctcgaggccttgccttcactaagaagcaaccctgactaaatc

SEQ ID NO: 32300 - DNA, 174 bp, Zea mays
  unsure (1)..(174): unsure at all n locations
ggaagctctcatcatgctcaanatgtgatgacnacatcaagaaccctggagttancttacattggacctcttctgacccgtgcctatctaagcatgggaggaagtaagtatggtcttgttatagttgatgaattttcccgcttcacttgngtattctttttgcaggataaatct

SEQ ID NO: 32301 - DNA, 299 bp, Zea mays
  unsure (1)..(299): unsure at all n locations
ctgcagctatcttatcttcttcacggatctgaccttatctcanaatcgttctgagctctccgcaatcatcgtagagatatctggacgttctatattaacaagaattgttanatctgatntaagggggtgttagcaatatctttattgttngngttgtcatagtgaaaaaaaagggtntatgcccctgcctananaacagangaagaagaaaaaaaagaattgatagaaaataaaaggaaagaagaagaaggggctgaatctctaatctgttgttctcttttgctgtgctagtgtctttt

SEQ ID NO: 32302 - DNA, 327 bp, Zea mays
  unsure (1)..(327): unsure at all n locations
gctataagtctactntatatggatccggaatatagtcatatctgttctgatgccgccgtaatcattggtttcttaccgagacatattctgccttttctgcccatggtgctgcgtcaccctattatggcccaatgggtcgtgtatcaagttaagtccattatggacgcatcctacggttgcagcacgaccccaatacccttgtggtcgtcctcccatgtttataaaccccctatccgccaccaagaacagcgggttttggttagatcaagtttagctctcgctacttgcttgcaagcgcgcgtgctagttcagccgcccgtcttcttg

SEQ ID NO: 32303 - DNA, 220 bp, Zea mays
  unsure (1)..(220): unsure at all n locations
gcatgtgtcgagtgcagctctatcaaaatcatccaagtatagctgaccctctaacactccctctaatgctattgaatcatcacttcttctatagacagtgacacctatatcagtgaaaagaccagtgtagcccattngacataatngagatacagaaagcacattgtatctaaagatcaacaagaaaacattggnatggatggcangagaatacaattta

SEQ ID NO: 32304 - DNA, 396 bp, Zea mays
  unsure (1)..(396): unsure at all n locations
gctatgcgcataaaagcttcngcatgagagcagannaggggaaccgacttatagatgaataggcataataaaccccgaagaattactatagagttactgattaatgtaaagggcattaatgtaattctacacgggctgcgtnccttgcctataaatagatgaacagtactcccgtactgttcacgctgaactggcattcgcttttcgcatcacgcttgtacctnntatttccgtcaacccgaaggtacttttataaattgttattctgaatatgataatgaaaataaaaataagtcgatgataatatctatattattccttgtattccgtatatgaattctttcttatcatctatcgagcttacgaaaggttcttccttcataaccttcgtccgga

SEQ ID NO: 32305 - DNA, 274 bp, Zea mays
  unsure (1)..(274): unsure at all n locations
actgcctcggctggacggttatggccttcagaactaagagatcactctgtctggtgcatcacaattactaatggtgaatcaaccatgctcttgactcactaagccggatcatacaactatatcaatcggtacaacgctctactgacagatcactacagtcaagtctcacttgcacaaaacatcaacaattctctgtccatcaagcacgcagtgacaccangatatcgagcctcaaaaacttctaatgaatccagaatgataaatccttgcttga

SEQ ID NO: 32306 - DNA, 434 bp, Zea mays
  unsure (1)..(434): unsure at all n locations
gctttgatgaagtactatcaagagcaagtatcctctacccagaatngaagaattattctatcagttgagaggagccagtgtgttctcaaagatagatctgaggtcaggttaccatcaacttagaatccgaccttcggatataccgaagacatcattcatcaccaagtatggactatatgagttcacggtcatgttgttcggattgacgaatgcgccaacttacttcatgtacttaatgaatagtgtgttcatggactacctcgacaagttcgtagtagtgttcattgatgatattcttatatattcccagaatgagcaagagcagaggaagcattgaggaaggtacttcagaggctacgagattgtcgtttgtatgccaagcttagcaagtgtgagttctggattagagaagtcctgttcttgggtcacataat

SEQ ID NO: 32307 - DNA, 258 bp, Zea mays
  unsure (1)..(258): unsure at all n locations
gatcttacacgcgctcactgagtgttgctactcgtgagcctgctctttgatggctcctataacatgctcacaattaatttcattttactatgctcacatttagaatataattagccatgtgatcattctgttctttaatcatagcaaggtgatcattcatagcatcaatattaatatctctacatctagtgcaaatagtgacatgctcaacggtagatgtagaaacatngcaagcattcaattcttctatcttagcat

SEQ ID NO: 32308 - DNA, 159 bp, Zea mays
  unsure (1)..(159): unsure at all n locations
ggacccgcgtcaccggtatagcccaatcgtgctcatcggagttcaagaacccgccggcgcacgtggaccgggtaagcccctgcaccgntntcacattccttgcgcgcatggcctctaggtcattccgtgaagctcctcgtgcaccctaatcgaactata

SEQ ID NO: 32309 - DNA, 394 bp, Zea mays
  unsure (1)..(394): unsure at all n locations
tgcagcttatgatctgcgagagatgattcattctgttatgcnaacatacagaataaactagttcttgctgtcttatcaaacaaaacctaaaataagattcaaacagaatgctagattggcttgactggtgacatgacgacagctcgctctcttgatacatgtgtggaggtggcccttggtgtggtcgaatatagtgctgggggcgggactagccaaattggatgctgcaaaataagtgcgtggttcacttttggtgagggagggcaactggaaccgtcgtgttgcacttgttgattcttctaaaatgatactctgatggctgctcaaatacaactttggtgcctttctcacctgcgctcctggtggcaagatgttgccaatgaggctgcttact

SEQ ID NO: 32310 - DNA, 275 bp, Zea mays
  unsure (1)..(275): unsure at all n locations
cgcctacgcctctaanttcaatcttagtctgagggcatgagtgagtggctctaanntcacctcctggtgatcgaattaatagtttcttcttcaacggatagcattggatactactgtctctccacgaaatgaactntgttaccatatgagtgagatgctctcaaatcaaatatagctgatgcacgtatggagttaataataaacataccatacaccacatcggcatcttcatgaactgatttcgctgtcacatgatcgactctacctctattctg

SEQ ID NO: 32311 - DNA, 170 bp, Zea mays
  unsure (1)..(170): unsure at all n locations
tatgtactgatggaatgaatctattatatgagaggagcagcaagcatagcacatgggcgatgatcctcaccatctacaaccttcctncatggttgatgcagaaaccaagtacatnttgctaaccattcttatttctcgacctacacaacctgaagttgacatggatgtat

SEQ ID NO: 32312 - DNA, 358 bp, Zea mays
  unsure (1)..(358): unsure at all n locations
cgtcatctagctcaagatgagctgaaccgtttgcctcagcacagagagcttcatcaagtgtgcttcttcaacgaggatgactggtatgaggatttccatcatggaaatattgcttttgatgatgcttctcctctgtcagcagaactgcaggctacaccttagcccccatcttacaagccaccccagcttcccatgtacgacggacactcagacccgaagcagtttttgatgagctacgaaacaaccatatcttcctatggtggcaatactgtcagcatggcgaagtctttcgtcatggctgtcaagaatgtngcacanaccttgtactcttctcttctgctaggaacactcacgtcat

SEQ ID NO: 32313 - DNA, 363 bp, Zea mays
  unsure (1)..(363): unsure at all n locations
ctaagcttcngcattatttcaagcttacaacatannatgtccttctttactatctctgaaggatattatgaggaaccgagaagctactggaaggattgtgaaatgggctgcagaagctcaatgaatttgtattgaatatgttcatagatcttcgattcagtcccaggcgttagcagacttcattgctgactggacgccaggggctcangaggaagaaacaaataaagacgccgaagcatggacagtgttntgcgatgggtcttgnggaaccttcggagcgggagcggctgctgtgttggtttcaccttccaaagttaaaacttgttatgcggcanaacttgattntagttgcacaaataacat

SEQ ID NO: 32314 - DNA, 311 bp, Zea mays
  unsure (1)..(311): unsure at all n locations
tatgtngatgatgtggtgattaagacaganaactcagaanacttcattgaggatctgcagctggtcttcaacagcccgaggcggtaccggtggaagctcgatccagaaaaatgtgtctttggagtgccagcagggaagttgctcggattcattgtcagccaccgaggaattgaagctaacccggagaaaatcgagggtatcatgaggatggaagcaccacgatcacaaaagaaagtgcaaaggcttactggatgcatggcagctttaagcaggctcatatcaagggtaggagaaaaaggcttaccattcta

SEQ ID NO: 32315 - DNA, 473 bp, Zea mays
  unsure (1)..(473): unsure at all n locations
attaagctatgaaattcttatcccacatgggctagtcgggggtgccagagccaacccatgttagtcttatcaattaagcaagtgtcgagttcagctctatcaaaatctaccaagtatagctgaccctctaacactcccttaaatgctattgaatcatcacttcttctaaagacagtgacacctatatcagtaaaaagacagttgtagcccagttgacataattgagaaacgganagcaagttgtagtctaaagaatctacaagaaaaacattggaaatggaatggtcaggtgatatagcaattntacccaaaccttgatttccatcctcgaatgtgatagctcgttggggatcttggtttttctcataggaggagaacatcttcttctcccctgtcatgtggtttgtgacccgctgtcgatgatccaacttgagcccncggatgcataaacctacaaaacnaagttagttctt

SEQ ID NO: 32316 - DNA, 393 bp, Zea mays
  unsure (1)..(393): unsure at all n locations
ttatattaaaactctctcgtttttattgcggttatcaaataactacgacgaaattaaccgaaatcaatactgtacaccagagaaccaaggatttgattatggggactgttatgccagcacaacataaagatattgttgttttacatcatgtagggcagataaggaataaatgtcactatataaacaattaacatgcaagataatcagatatccaggcaataaaccaaataacatatctagtagtctctactgtcatacacaacatcaactgctcangggctgaggttgtatgaacaatatgaagctatatctacaacaactctgactatgacatactatgatatacatgctagtgcttatatcttaccaactctgacattgttatattacatc

SEQ ID NO: 32317 - DNA, 184 bp, Zea mays
actactgtgattctgagagcttgtagctgagatgttgtgacatgcgatagaccattctattttgccgacaacctttactgattaatgcacacactgccccgcagaccatgctgaagaaaaggtgcctgaagttctgttgacagtggcctttaccatattcatgattgacaatcatgggaccctt

SEQ ID NO: 32318 - DNA, 360 bp, Zea mays
  unsure (1)..(360): unsure at all n locations
tccaagttccattagacataatggattccatctcactccttactgcttccttccataagtcagcatcaggagaggaatatgcctcactaatggtaggtggtgtgtcttccacaaggtacactatanagtcattaccaaaggattntgcaaccctctatctcttgctctntcgagtgactatagtgtcatcctcctcacggatgtgcacgtgagaatcctcaacatgatctatangaatagacagttcgtgctcatggggaaatatagtctcatgacatgtatcactangtgtattcttcatgggaaactcatttctcaaaaatgtngcgtctcttgatccatgatagtataacatacata

SEQ ID NO: 32319 - DNA, 316 bp, Zea mays
  unsure (1)..(316): unsure at all n locations
tttgttgcattgctttcactcccccggtggatcaacttgcccaggagagcgtgtttcaacaagaggcattggaaagtggaaacaatggtaccaatcgatgtaggcatactacttgatcgaccttagttgatgtaggcatacacatcaatgagtggatgattggtgctatgtagtctcccaaacagttgcctggaagtagatgttgagtgagtagtcacatggacactccctaanaatcatactggccactgtcccgagcaggatcttcaatgggtagaaattccagaggccttggtgagcaccaaatttaacacct

SEQ ID NO: 32320 - DNA, 304 bp, Zea mays
  unsure (1)..(304): unsure at all n locations
ctgcagctgttgagtttatanatattggcagcttcattcttatgttctattaggacccaggggaattggctagccagattatattttatggctttacccttcttaatcactaattaccattaggtggtcttaggtccacctctccttttgcaatctattgttggactgatcttaatatcacttacactttttttaagtattgagctctgccattgatcatgaaatatcttggtagcacaagaacctcggacctggggacaaagaccaaagcatggcaccacacacatgctccacacaactttta

SEQ ID NO: 32321 - DNA, 384 bp, Zea mays
ctcagcttgagatgcgcagattaaagatagatctctatctttaatgaaattagagagcagataaagaacatcagctttttgaaagaagacttcactgcatcaccgaagcttgtggagaactgaaccaagtgcagaatgaattcaactttctgcatcaaacattgaacaaaaactaaactgattgaactgaaccaagtcagccactaattgaaaaatatacaaccttagataagttgatttacacaatgatcacactaaaaattttatattgacccacggaattacctcgtaaattaccaacctcacttaactgaatagactgacaattctggccgacttggccggtgcttggatgtgacatctgagtgtgactgaaatgtaagc

SEQ ID NO: 32322 - DNA, 226 bp, Zea mays
tgatatatgtctgatgaatccctgcttactgagtagagagcatgggttgactcttcattagtgatttgcgaagcaccgtcatgatgtatctctgaattctgaaggtcatctatcagtccaccacaacaccagtcagttgttgcgtgtggcggaatctgttttgatagactacagcttccctagatactcgtcatactctcgcgtgcagagaccaacctgaactcta

SEQ ID NO: 32323 - DNA, 305 bp, Zea mays
  unsure (1)..(305): unsure at all n locations
ccttctactgccttactatttgaaaaatggcaaacaatagaatttcatattttcctatgttcttcataacaaaacattaattatcccaaagggtgnggtgttttcactttgngggttaatttgtanggcttttttaagtttccctttgtttcttaaaataaaaggtatcctatnntatttatactaaacncgaggtataataatttttctagtgaactacactgaataagtagactaacaaaaataggggtgctcccttggtccttattaaaatatcttgctattntcttaacttaagcaaactg

SEQ ID NO: 32324 - DNA, 403 bp, Zea mays
  unsure (1)..(403): unsure at all n locations
tcagactcagtggtggcacgggtggaggggccttgatgtacaagttcatgaatttatacagggaaactctagtactgattctaactaagaactggtactatagacgtttgagtggaaaataaaagttntggacaggagtccaagaaatattagtcccctccaattncctggtgaccaaactagtcctaagagtgatcgaggtctaagtcaaccctcgtctcaacaacctgattcttttagagggtgttacatagttgcccctactcagagatgtggcatcgtttttacacgtgttttagagttatatgatacaacagntatcatatttgtatcacaataacatgtaactcatccgcacaagatgtacgtcattatccattgccctcctttataactattacaa

SEQ ID NO: 32325 - DNA, 297 bp, Zea mays
  unsure (1)..(297): unsure at all n locations
tcgcatctctgaactaactcggctgcgtcgntcttcgccgtctaccaatagaaccctgacctgaagaccttcccgactagtgttctggaggctgcatgtattccacattgccctgcatggacttcctccagaagttgcttccaagtggacgggagaatacacttcatgagaacccctgatgcaccccttctgtataatatctccccaatgagtgtgtagtgagtcgactgtctggcaatgcgctctgcgtgagtcttgtcggctggctcttcttcgttctttatgtacttaatgatc

SEQ ID NO: 32326 - DNA, 134 bp, Zea mays
  unsure (1)..(134): unsure at all n locations
caagagttgggtacttaagtcccaagcctaaatttgcctggcaggtttatgcatccagnggttcaagctggattatcgacagcggatgcacaaaccatatgacngnggagaagaagatgttcacctcctacgtc

SEQ ID NO: 32327 - DNA, 310 bp, Zea mays
  unsure (1)..(310): unsure at all n locations
cctccggctttgaagatagtgagtaccctaatcatgtatataaactctctaaggcgctttatgggctcaagcaagccccaagagcatggtatgaatgcctaagagattntcttatcactaatggcttcaaagtcggaaaggtcgatcctactntatttactaaaactcttgacaatgatttgtttgtatgccaaaattatgttgatgatatcatatttgggtctactaacgaatctacatgtgaggaatntagttggatcatgacacaaaaattcgagatgtcgatgatggtggagttgaagtacttttg

SEQ ID NO: 32328 - DNA, 327 bp, Zea mays
  unsure (1)..(327): unsure at all n locations
tcgaccggatcttagcactgngctgcagcttcctgatccacagccactatctgaagtctttcttatcggtagactgcaagtcactccgtctcaggtttcaaccatgtgtgagtataaacaccatttgtgtttgtgaaggggccaagagagccatactaacttgtgggggaggatgttacctcatgatatgaatatatgctatgcctcaaccccggtttgaataatacttctttatttattataatgtaatatgtattgtatcttcgctattctacttcatatgttgaatgctacggaggggaacctctttggcatatatacatcaat

SEQ ID NO: 32329 - DNA, 128 bp, Zea mays
  unsure (1)..(128): unsure at all n locations
ttgtgatccttgtccatttttccgtanaagaggtggacagtggagttctccgggtagacggatcctctgctcctggcttgcaggaggtagtcttcgctcggagcgctggaggttgcgctttttcctgc

SEQ ID NO: 32330 - DNA, 223 bp, Zea mays
  unsure (1)..(223): unsure at all n locations
tattagtcttagcaattaagcaagtatcgagttcagctttggtaaaatcaactaagtatagtngaccctctaatanctccttanatgctactgaatcatcacttcttctanagacagtaacacctacatatgtaaatagacagttgtaacccatttngcataatngagatacggaaagcanatngaatctaaagaatctacaataanacattggnatagagtg

SEQ ID NO: 32331 - DNA, 305 bp, Zea mays
  unsure (1)..(305): unsure at all n locations
ctaatatcttgcaagntatgcatccggnggctcaagctggattatngatagcagatgcacanaccacatgacggnggagaagagaaatttcacttcctacgtcaagaacagggattcccaagacactatcatctttggagataggaaccaaggcaaggttaagggcttatngcaaaataccatcacaaccgagcattcgatttcaaatgtgtttctactagaatcgcttgngtaccaattattgtctgtaagtcaattatgtcatatgggttataattgattatttacaaatattgatgtatctg

SEQ ID NO: 32332 - DNA, 160 bp, Zea mays
  unsure (1)..(160): unsure at all n locations
tcgggtcacatatacatcatgtgctggctattatgaagggctgtgngctcattcccatgggagattcanaaaaaaaagtagctcaagttgaatcagttcatgtttagagaggtctaccatcttctatgtggagtggtgaatcttatgatccacctcaata

SEQ ID NO: 32333 - DNA, 320 bp, Zea mays
  unsure (1)..(320): unsure at all n locations
actcagctaatgccctaaaattgctagctntgtaagggcanatctcccatggctcatgataacgagggttacattntatatcctgctggttatcctgagcacaatattatgagaattcatgctangaaggatctttctgtttcccatcatgcttttatgtacaagaatgaggcatctagctctaggcattctactcatgttaaaatgcctaanaagaaaactcctactgcatcanatgagcctaatgtttcatttaagaactttgatgcttcttatgtgcttactaacaaatcaagcaaaatagttgccaaatatgttgg

SEQ ID NO: 32334 - DNA, 200 bp, Zea mays
atattttcttaatagatacttattagatctacaaatggttgaccaatttggatgattaaacagaagtatgcatttcaaagttctgtcatttaaaacagattaataagttttggaaaacagttacccgagtcctggtttaactaatcaccttccaatctaccccacccactttccttgtgtttgacttacaaaaccctgac

SEQ ID NO: 32335 - DNA, 396 bp, Zea mays
  unsure (1)..(396): unsure at all n locations
ctcagctttgccnatctcagcaaggaggggaaagatacaagctctgctccatgaaagttngctacaagtgtggtaagcccggtcatttcattgctaaatgtccattatctagtgatagtgacaagggcgacgacaaganaggaagaaggaatgagaagaagaagtactacaagaagaagggcggcgatgcccatgtttatcgggagtgggactccgatgagagctccactgactccttcgacgacgaggacgccgcatacatcgtcgtcaacaagggtattctcttccccaacgtcggccacaagtgcctcatggcaagggacggcaaanaaggtaaaatctatagccttcactatatatgcaacatctagtgacgaggagaactctattgatgat

SEQ ID NO: 32336 - DNA, 288 bp, Zea mays
gttcttaaccgccacacgaatagctttaaaaatcttgagtaagtcacagctccagactctattttcaatattctgttcttggcagctaggttttgtcagccagacttatgctattaatactcggggaggaattatactagtctcttttcccatgacaaatatacatacttcaggatcagttttctctactcagttgcttcgcgcttcctgctaagttctctcagcttctacattcattagttcattaaattgcccacatagctcaacataggtccgaccttgtttccc

SEQ ID NO: 32337 - DNA, 403 bp, Zea mays
  unsure (1)..(403): unsure at all n locations
ttctgttgcttggagctcaaagatctctttgtcaacagcatctgattgctcttttatcttgttgtccaaaactccaaatataacatcatgctctgtatcttcaagatcttgctgcatttgcaaggctttgctcaatagcatactctacacaaacacaaccttcgtcagacatgtgtttattagaagcaataaaagtttacggacaagttattcaccttgaagttggagtaaaataaactaccaacgacatgttgtcgtcngtagcggctgatgtctgtttctatcttctgaaatccaatactcttggacagagtactgataactctggcccctgctnggtctcgaatacattctaatatctcatcatcaacgcctccgaagaggagagccccaggtttgtatc

SEQ ID NO: 32338 - DNA, 269 bp, Zea mays
  unsure (1)..(269): unsure at all n locations
ttttttccatttagactgtctctacttnggcttctcattgagccagaattactataaccgttcaataaagtggagcagtctttgatgcaacacnaatgaagtaaagtttatatgccgagtttctccgtattggagatattgtgatagaacttcaatatcatagaatactcaaatattcagtgtactgattaaccaagtacttatcgcactctttgtaacttgtagagctactctcatgtattgatgatctgagactatactctaacttc

SEQ ID NO: 32339 - DNA, 324 bp, Zea mays
  unsure (1)..(324): unsure at all n locations
attcattctatgaagtctcactctggctctcatcatgctttatgtataaaggagcattgtttaggcatcctctgtaaatgcctaaagaatctctatgcatcatgtatcccctttgaaaaactagaggagaaatcatatctttgtacttggtgcatctcatcttctatatgtggccatactaaaccataatgactacaagcatcctaatctgctcatgtgagttatngacatgcttggatgaaaataatggtatacattatatgacctggattactctctgaacaactgaatgagtgagaattcccgttaaatattataaactct

SEQ ID NO: 32340 - DNA, 360 bp, Zea mays
  unsure (1)..(360): unsure at all n locations
tctttcttttctncatgatatgaaccttattggaacactaccccacttaanatgaatgagggtagatctcctgaaatcttgggatttgaactccttgaagtacctcataacaagggtggtatggcgcctccttctgctgttgttgcttgaacaggctgcagagagatgactgacacanggttgattctgggacaaccttcttctcatcttttcttcactatcttcttttctcttctcacttataactnttcactgcctctntctttctctttgctcttcccactggaggaatctatcanagagtattaccatcatacagaggaggacaccatagactatgaaccatgtgcaacagtcttc

SEQ ID NO: 32341 - DNA, 327 bp, Zea mays
  unsure (1)..(327): unsure at all n locations
tattgtctctctctggggactccattntccttctatgagactactacatacaatagacttganaacaggtattagtctcaaagacttagtattatagagtaacctccccctataagtatgcatacacgttttgaatgattgtagcagacatgcacttgattntgatatcaagaggggtaaattatctataatccgagctttggcacatantaagtaaatgataccaattaaagtattataccacttgtagtatatgaattgtagtatatgtcatatgaaaataccaatcgatgtattcatttctaacgaatgttggataaattatgt

SEQ ID NO: 32342 - DNA, 210 bp, Zea mays
  unsure (1)..(210): unsure at all n locations
cattacagttttannaattattctgacagtggacagaacacaacaaccaatggtgtaaattcataactcctaatctatcacgcatatggttattgaactttaacacaagcaagaaaagaaagcatctctactttctttaatgactattgaacagatgttacagaaatacataaacaatgccagttttgtatctatcagaattcgacagat

SEQ ID NO: 32343 - DNA, 253 bp, Zea mays
  unsure (1)..(253): unsure at all n locations
gctggtctgaatatattcattttgctcagctntggagctgtatgcgtggcacttactaagcagtttngagctgatatctttataacaaaactggatatcatctattaatgaacaaattcctttaagtaagtatgggttgatccaacacataaaggaaatggagagctgtctgagagtcatcctgtcagattgcgcattcatagtctatttcaactaactgaaattatcgcttcacagaaatgtgcctcacttt

SEQ ID NO: 32344 - DNA, 349 bp, Zea mays
  unsure (1)..(349): unsure at all n locations
ctatatatgaatagctgtggagtctgtctcagtaccttctgcccttctggcggcttcctgacttccatggatagcaatgggtccctgttccgaaggtatcttcatgcanagaatagcangatgaacgattgcttcgaaggcattaagagtaccacgaccaacaatcgcattgtaaggatattccatgtcaacaatgtcaaacacaacttgctcagttctagtgtngntgatgaatccgaaggtcactgacatggtgatcttgcccagtgctacaatctngtcttctccgaagccacagagaggatgtgtagcatcatgaatcttatcttctggctcttgcatttgtctg

SEQ ID NO: 32345 - DNA, 332 bp, Zea mays
  unsure (1)..(332): unsure at all n locations
cattccaatccgagcccgcatcttaccgtggtgaccgtcacaagttggtgttcttctgcagtccgaatccagcatgttcaaatccttntccctttcggtcttctccctgattcctaagcaaaacaagagtgcacgggtctccatggtctaaatatgatggacatgaactcaagagtgtaatcacctgatggttgagttgacgagcacgagcgcgagtaatgggaccagaaattggtacttgtattggtatagatgcatcaatagtgtgcatgtcttcatcaanaggtaagaattatcagaagtaatccgaattgatgagaaaatattagata

SEQ ID NO: 32346 - DNA, 136 bp, Zea mays
tttgtgagttgcatcctcgctcactgcggcttgttcttctctcgcgcgtgtcagatgttgtgcttgacccaacggccacagtaattccaacctgctgtcgggcgaccagtacacacgacgtggtccgcacatcatg

SEQ ID NO: 32347 - DNA, 366 bp, Zea mays
  unsure (1)..(366): unsure at all n locations
aagcttgattgatgttaaattcttgattgatctanggcctgtctaacctagttgagataaccgtctacaaagcgagtgaaatagcttaactcgggtcaaacttgacaagtcttagttttaagcttttagcacttaaattcttactttttatgcaattgttggttcttaaaatatgcatgaggtactgcacttanggggagtattcaaaactcaaatcactcatganaacccctagtgcaagccaaaatgcaaatttcaccatttgcctattttctctaanaattatctagcctatggcaaaatatttngaatagtatatgatggagccaatacctgtcccaacacgtgttattntgtgtgattata

SEQ ID NO: 32348 - DNA, 90 bp, Zea mays
tctttttattaaataagtctcttctctgcaagagtatgcgtaataaaatgtgatatctttttattaattatattatggaactgaaatata

SEQ ID NO: 32349 - DNA, 294 bp, Zea mays
  unsure (1)..(294): unsure at all n locations
ctaagctgtgagatcttattcaacatgggctagtcggcggtgccatagccaacccatgttagtcttagcaaataagcaagtgtcgagttcagctctatcaaaatctaccaagtatagctgaccctctaacactcccttaaatgctatggaatcatcacttcttctaaagacagtgacacctacatcagtgaatagacagttgtagcccatttgacataattgggatacgggaagcanattgtaatctaatgaatcaacaagaaanacattggaaatagtatgggcaggtgatat

SEQ ID NO: 32350 - DNA, 257 bp, Zea mays
  unsure (1)..(257): unsure at all n locations
cttgaagtatgctatctagactccgaaatcgaatatgtaatagctcctaaccatttatttggaccaaattggagggtttcatgaggttgtccaagatgcttggtcttctgtccaaccggttggttgccctttcctgaccctangcatgaaacttanagagacagcgaagagattacagagatggaatgacaagaaggtggggctctatctcctgctaaattatgggttaaaattaagcttaagaagcagtccttatt

SEQ ID NO: 32351 - DNA, 226 bp, Zea mays
  unsure (1)..(226): unsure at all n locations
gtgggcgccctcggcgtcttgttgtagtcgaagcaccanatttctcattttatnagcctcgngccggatccttcnggcgtggtatcgtcgcagggactgctgataccgcgccgagtgtagcaaggtcacgtcctgagcctcttccaactggtctaatgaaccttctcggctggcctggttgctntggtcgtcgtaagcctttgcccttcgggaaccgtattccaag

SEQ ID NO: 32352 - DNA, 170 bp, Zea mays
agctcggacgggactccgaagcggcaaacaatgttctgccaaaagaattttgggcagtctatgatgtgattgtggacacagccctcgcttctatccacttggtgaagtattcgacggctacgaaggcgaacttgatgttccctgagcggtgggcaagggcccgacaatgt

SEQ ID NO: 32353 - DNA, 260 bp, Zea mays
  unsure (1)..(260): unsure at all n locations
gaagccgcagagaactaatggtgtctcccctcctatagaaccacttgatatggttgagataataccaacacgagatgggtaagagtaaccttgctttgttcttatgtcttacactattacgtgactacattttgtatttgacaattgttcttgtgcttgtagggcttgcgtggatagtnagttcactggcatatgtngtcgaatgcaagtcaagacagtgttgggcaacatatgtcgtatgaaatggcctggattgttga

SEQ ID NO: 32354 - DNA, 281 bp, Zea mays
  unsure (1)..(281): unsure at all n locations
aaaagatagaccttgtgcagcttgtcaagcanggaaacaggtgggaggagcgcatcacagcaagaatgtgatgaccacttcaagacccctggagctgctgcatatggacctcttcggacccgtcgcctatctaagcatanggggaagtaagtatggtctagttattgttgatgactnttcccgcttcacttgggtgttctttntgcaggataagtctganacccaagggaccctcaagcgcttcctcangagggctcanaatgagtttgagctcanagtga

SEQ ID NO: 32355 - DNA, 249 bp, Zea mays
  unsure (1)..(249): unsure at all n locations
acagccatgccgnccgtcgccatgcgcctacgtgccgttatccctccgttccgccatgcccttcacccaagacatacatattaccttcggtgtctntccacacgcttggacttagcttatttccgggccatgcncgaacctcgngtttcccgccctgcgccatgggcgaaccccttcgtattgggccaaacgcaaggtcgaacagccattgccgcccgtcgccattctggcctttacccaaggcatacg

SEQ ID NO: 32356 - DNA, 140 bp, Zea mays
  unsure (1)..(140): unsure at all n locations
acatctgctggtgcggcgcagtgttntagcatatctgctgacgcacgcaccgtcaatccgtcctaggtcacgttgactgtcatatctgaccccgctgctaactgaccgtgcccccacgcctagtggttntgtctggccac

SEQ ID NO: 32357 - DNA, 356 bp, Zea mays
  unsure (1)..(356): unsure at all n locations
cctgtttgcctggcaaaaaccgagcacgtctattcactggtgggtttcatatagtaaattgccgaatnggctcttccaactatggagatgtttgtagagggataatagttcttactgccagcaaaactntatanttttttgttgagtagtttgggagatatccgaatttgaatttaactatgttgctgtctgaaacagattcagtcagttatcttgtcggatattntagaacttatagatgacaaaatttaattatccattgaataccgaagttgtagagtattttgtgtaaatacctctagaggatttggttgatatctccctgtataatttaaagaatcaaattaacaacagcg

SEQ ID NO: 32358 - DNA, 98 bp, Zea mays
agctattcaaccaagcatcgtatattgaaggggattgggtcttctgcgaaaaaaaggcttcactcagtaactcatacttcgccatcacttcgagcaac

SEQ ID NO: 32359 - DNA, 408 bp, Zea mays
  unsure (1)..(408): unsure at all n locations
ctaagctagcatgtatatatcattctcacttctagtggtggagatagtaacattgcaaacatcanaatctttagccttagcagatcaaatttcatnttctactctaaggctagcaagagaaatgttcaattctttaatcctagcaagcaaatcatcattattatctctaggattgggaattgaaacattacaaacatgtgaatcaaccttagcatttaaactagcattttcattcttaaggttgtcaatcatctcacgacangtgcttaactcactagatagattttgacatttntctacttctaaagcataaagcattttaaccttaacatgcttnttattttccttgataggaagtactcttgggagtccaagaggtcatccttttcatggatggcactaataact

SEQ ID NO: 32360 - DNA, 328 bp, Zea mays
  unsure (1)..(328): unsure at all n locations
tatatcagtagacactgtgtgcncagcctctgtctcagcctgtgttattgtagcttcaacttctattngcttagtatcagctttgggttgcgttttgtcagcttcggcaaccttccctgtgtgagcggagcttatggaatcggttgtttccanaatatctaatacattcaccattctccttctcttatgagttgtggcagaacactnttctgccttcagcgctgctgcttctgttggaggacttaaaatccctggcatctntgacacttcttcagattttgacccttcagctttatctttgtcaaccttcatctcaactagctcaact

SEQ ID NO: 32361 - DNA, 132 bp, Zea mays
actgtttcccgggtgggtctccatgttccagttaacaatatgatcttatcatgaatagtagataacaaattgatgataaaagcatgatcatgaataatgtgtatctcaatacccaaaatcacataaagcaat

SEQ ID NO: 32362 - DNA, 272 bp, Zea mays
tgtgagcacctcccgctttaagatatgagtccctaccatgttataactctctaggcgcttatggctcagcaacccaagacatggatgaatgcctagagattcttatcactatggatcaaagtcgaaagccgacctacctcttactaaactctgaaatgactgttgatgccaattatgtgatgaatatattggtctctaacagctactgtaaaattatatgacataccaaaatcagatgtttatgggggtgatattctagattcagtaacact

SEQ ID NO: 32363 - DNA, 299 bp, Zea mays
  unsure (1)..(299): unsure at all n locations
caccgaaatccaaacctttgacttgtgaataccccttggccacaagtcgggcttgggtccttgtcaccacaccatgcctcatctgtcttgtgcggaatacccacttggttcctacaacattttggttaggacgtggaactaaatgccatacctcattccttgtgaagttgttgagctccccttgcatcgccagcacccaatccgaatcttgaagtgcttcctctaccctgtggggctcaatagaggaaacaaaatagtaatgttcacaanaatgagcaacacgagatcgagtgggtacc

SEQ ID NO: 32364 - DNA, 146 bp, Zea mays
tgcctatataacatgcatatcccgacctattttggtggcgcagctattagcctactaacacaatgtaagaatggggcagactaattgtccaccagatacacgtggacctacgtcttcaattggagctgaactctgacacatatgtg

SEQ ID NO: 32365 - DNA, 362 bp, Zea mays
  unsure (1)..(362): unsure at all n locations
atgctataaacagtcacatcgtagcttctttttatgcttcatgaaatgccctgatcatactcaccatanggatagagtgaaacttatgcttgagtctgcccacttgtgtngtttatcctgtctttccactttccagtggtgcatactgatgaatatatatctagcaggtaacaaagcatcagctactgttcaaccctgcctactgcttcatcatgatataattcctaaatgatgttcagacacttaatgatgcacttcgtctgttctctacttccaaatctatgtaaggacaccaaacaatngatgaaaaggtacataccttgtcaccttttttgttaagatatttttacatttaggttcat

SEQ ID NO: 32366 - DNA, 269 bp, Zea mays
  unsure (1)..(269): unsure at all n locations
tgcagctgctacactctcagcaaantgtctccttagttgctttatacatntatgtggtgacctanggcacagatcctatattntaaaatgtacaatggctccaagttgagccctcaacactgaatttcagacttagtatagaactcaaatgaggtcccattttgcaattaagtcacaatccagtatttggcttacaagtccacacatctngtaaccaaatgacttacgataccatactcntgatagttttgcacttattccaagtggac

SEQ ID NO: 32367 - DNA, 222 bp, Zea mays
  unsure (1)..(222): unsure at all n locations
tattagtccttggcattaagcaagtatcgagttcagctctattaaatacaactaagtacagctgaccctctaatactcccttanatgctactgagtcatcacttcttctatagacaacacctatattcgtaaaaagacagttgtagcccatattacataattgagaaacagaaagcaagttgtgatctagagaatctaccagaaaatattggaataaatggc

SEQ ID NO: 32368 - DNA, 435 bp, Zea mays
  unsure (1)..(435): unsure at all n locations
ttgagcccctactgcaagcaccccggngcatgattatattatcctcattcctcctcttgggatccatcttgcatcaacccatctgggcaggcgcacgcgacacactatatactagtcngcacggttgacggtccctcgggtccgatacaccgacatagaagcttgctgattcacatagttgtatctttcacaatctcccaacaatgtatgacatggaaaggtacattttgatagcattctctatctgcacaagttgattctgccagaaagttacatatttgaagtcaatgttgttgaaccaaataataaatctaagaaacccacataccctatcaacctcatatttactactttcatgccttctaccaatcatcgcttatgacgcaccagaatatttatacaacctttctgtatggatcattaccttccataaat

SEQ ID NO: 32369 - DNA, 107 bp, Zea mays
atctcttcgttgggatcttcccaccgaactttattatgaacccttccctgaaaacctcacaaattcaacatgtggtgtgtgaacaaagttgaaaccaatttttgtgc

SEQ ID NO: 32370 - DNA, 386 bp, Zea mays
  unsure (1)..(386): unsure at all n locations
atgtctgaatagccttcgtatccgtccttcttccttcggctcttctagtagcttcttgactcccatgcatagcaatgggcccttgttccgatggtatcattatgcagaggtatgctangtggaggatatacttgaatgcattgagcgtccctcgaccaatgattgcattgtatggatactccatgtcaataatatcaaagacaacttgctctgtccttgtgttgtgaatgtagccgaaggtgactgacattgttatcttgacaagtgccactatctgtctctcttcgaagccatatagaggatgtgttgcatcatgtantttgtcatctagctcttgtatntgcctgacagccttagtaaagatgatatccgctacactgcctgtg

SEQ ID NO: 32371 - DNA, 185 bp, Zea mays
  unsure (1)..(185): unsure at all n locations
gatagaccttgtgcagctggtcaagcanggtaacaagtgggatgagcgcatcacagcaagaatgtgatgaccatatcaagacctgtggagatgcttcacatggacctcttcngacccgtcgccgatctaagcatatgaggaagtangtatggactatntattggtgatgaactttcccgcttcac

SEQ ID NO: 32372 - DNA, 296 bp, Zea mays
  unsure (1)..(296): unsure at all n locations
ctccggcagacagagatctccttgctgtcttgtatacaatacaagaagncttcttctccgctgccgttgaatatcaatgccccttcttggaaatttaatttctgggcataatgatgagcttctcgctcttcctcttcagatagccttttgcccgaagcatgtcgtacaatataatcaggtactctggaagatgcttctggagttgaagagagaactttttcaggtagaaattgctttatagcctcttttttcgtttcccctctggtttccaaggatttctctttggcgggctctga

SEQ ID NO: 32373 - DNA, 224 bp, Zea mays
  unsure (1)..(224): unsure at all n locations
tgagaaggtaaactaggtatgaagcanggatatgcatagacatgctntctctntactnntatacaagatatgcaaggaatgtatagaagaggaagaattatgtacatgtataaatgagaggaagtagttntactccttttgtaccttcacatagagacgctctcttcattgtgttgtgccttagtcttagttacttaagacctatattcaagacagtgtatgga

SEQ ID NO: 32374 - DNA, 307 bp, Zea mays
  unsure (1)..(307): unsure at all n locations
atcgttatgggcacaactattgttggtgtcattcactgctgccagtgcctacttcaccttcgaagctagcttcgaacatctttgccactnttgaaccagccttagcaaaattggagatcacttgctattagatttgtgtgctgctaagatgtcattgacaccttcgtccaatgtgccacagacaagggctaaagaacttgctntagcagcgagagctatctgcactcgggtcgaggccggctctactaatctatcgcaagacagtgacaccgtngatattgaggaaaacacgatcatacgttccatg

SEQ ID NO: 32375 - DNA, 145 bp, Zea mays
  unsure (1)..(145): unsure at all n locations
acataaatgctatgaatgaatgcttatgtatgcacatgccatgatgtaatgtaatgtgcanatgaatgttcgaagcgtatattcgangccacactcatccatcattntcttangagcanaacacacgtcagctctgcattccctt

SEQ ID NO: 32376 - DNA, 263 bp, Zea mays
  unsure (1)..(263): unsure at all n locations
gaaatcttggctgtcaaactgcgttgccgtgtcaactgttagctcggacggtactccgaagcggcaaacaatgttctgccaaaagaatatttgggcagtctttgatgtgattgtggaaacggccctcgcttcaatccatttggtgaagtattcgacggctacgaaggcgaacttaaggttccnctgagcggtgggcaggggcccgacaatgtccatgccccagcgctgaagaggccatgtatgggcaatcagctttgtgtatt

SEQ ID NO: 32377 - DNA, 282 bp, Zea mays
  unsure (1)..(282): unsure at all n locations
ccgactagcgtcttggatgctgcgtgtattccacattgcccggcgtggacctcatctagaagtcgctttccagtagatgagagaatgcacttcatgaggacgcctgatgcaccccttctgtataatgtctccncaatgagtgtgtagtgagctgactgtctagcgatgcgctcgggctgcattttgtcatctggttcctcttcattctctatatatctgatgatcggccttctccagtcatcagagtctgattctggttgattcacgatattacactcttct

SEQ ID NO: 32378 - DNA, 298 bp, Zea mays
cttgctgtgatgtggcttgctgtcaagtctgcagtgcatgtgaatacctacatcggcaatgatgttagattgatatattacagtctccataactgattgtgtttgtggttacttacctatcattgttggacaaagcggtgtggatatttgcattgagcaggcggttatgggtagcgtcaattgaccacctgctactgacctatttttttagtgatggtgccacgaacgagggtggagaaggattgagcaatccgctgtggcaaacttgacagttgcgcagaatagcaatttaaaggac

SEQ ID NO: 32379 - DNA, 351 bp, Zea mays
  unsure (1)..(351): unsure at all n locations
cttcttcacgaagcatgaaaagaagggaagggtgtttttcgtcgaagactcanaaatggtacgtgtttaaagtttcatgcatcgtanagaattgaatcatanaacaagtatattacatacaggattacagaatattacacaaatcatatatcaaatgtgttttgcaatagcacttagtctttcctaagtactatctctacagcttcgttcagcagtcgatcgacaacctgatccatgatagcttcggccatctttttaatttcgtcgtcatctttaggctganggcccgaagatgcttgagtangatctgagtgatgaccggacacgactacattactattacatatcgca

SEQ ID NO: 32380 - DNA, 237 bp, Zea mays
  unsure (1)..(237): unsure at all n locations
ttcaagaatatcgacatttaacaagatacacacgatttgtattcggtcaacaagaacgtcaagatatgtatgcttctcttgttcatatagctctcttgtgtgaactctgaccgcgtattgatatgaaatatgaatcctactcaacaatagntttctatgatctcgcgtgatagtttcatgtggtctttctgatcctcgngaattctcatactatgtccaccactgacagatctgtct

SEQ ID NO: 32381 - DNA, 115 bp, Zea mays
atgatacttgattactattgccatttgctctttgactgatatatcacgagactcatctacaagaatagagaacatattatcacccatgtctttttttatggccctcgatattgtc

SEQ ID NO: 32382 - DNA, 315 bp, Zea mays
  unsure (1)..(315): unsure at all n locations
gatagcgatagttttgacgtggagagcgggaatgaagatgtcgaagatcgactgtggaggtcgagccatgtctgttttgggaagtcaactgtcaaacaacggcaagtcgaagcgatgaagggcaaatattttcatgatgtctctatagtcgagggtcgggggggggaagcatcgttccccttctcgaagctaatgaggtggtggtctntaagagcttcatgaaagctgggcttcgctttccgctccacaagatgttggttgaggttctgaagacattcnagatatatctttatcaacttacccccgtagctctta

SEQ ID NO: 32383 - DNA, 213 bp, Zea mays
gtctcacattggtaaactgactaatgctactatccagaagtgtgactctttgctgcacaccattgatctgaggcttcttacctggggtatagagaacaaaatacgtacaaatacacaccgacgatttccccttgattcccagatggtacgggactgtaatgctggatctggggcgctgactgtattctattgaatggctccctgcatgttctt

SEQ ID NO: 32384 - DNA, 324 bp, Zea mays
  unsure (1)..(324): unsure at all n locations
aagaagaacaaggataattaanataattcaattgatgaaggtgaaagggaaatgtgcccttgggccatntccataaatgttttggtgattagatgcccaacacatattattttggttaatatgtgctaagtgctaaagagatgcaaatcaagaatcaaggtatgactctagccttagtgaattgttttttgtactaatatattcctctaagtgctaggaacctcttgaagtctaatgagattggactagagaagtttggaccagcctgcggcgcaccggactgtccggtgtgcaccggacagtgtcagatgcatangctggtcc

SEQ ID NO: 32385 - DNA, 295 bp, Zea mays
  unsure (1)..(295): unsure at all n locations
atgtactctgcagctattagcctattagtctattactcagtgaggtgctattggtgctatgacagtatcaagagttgcaagtacgggtggtaatggactctagactttacactataaaatctaaggatcgaattggattatgatcgaacatggatttctaagatactaaagaatattatgctaatctttggacggtgctctcttgttaatgagggtctccgacacaacaaattcaaaattacgttgggtattgaagtattggtaattcacatgcttaanatgccctctataagtt

SEQ ID NO: 32386 - DNA, 269 bp, Zea mays
  unsure (1)..(269): unsure at all n locations
catgtgctaagcggttatgccacagccagcccatgctagtcttagctattaagcatgcatctagaccgcgctcttcttttgcanaatcaactaaaataaagttgtcgtctaatacacncttaaaagctagtgaaccatcacttcttctaaagacagacacatctacattggtanatagacaggtatacnccatgttgcataattgactaacagatagcanactatatccgagagactctactaacaacacactagatatgtagtgctca

SEQ ID NO: 32387 - DNA, 330 bp, Zea mays
  unsure (1)..(330): unsure at all n locations
ggcaactggctcggcgcgccaagtcgttaggttactgtgttatgaaaagagttgtaccaccgcagcccctcaggcattctncaattatgcatatctgtcgcccaaggactagagcttgtacaagaaatacactctggagcttgcggtcaccatgcagcacctcggaccctcgtgggaaacgctttccgacaaggtttctactggtcgaccgtggtggccgacgccactatgattgtacgctcctgccaagggtgtcaattctacgcgagacagacgcacctacccgctcaagccctgcagacaatacctatcacttggtcgtttgccgat

SEQ ID NO: 32388 - DNA, 206 bp, Zea mays
  unsure (1)..(206): unsure at all n locations
agcttattctattctaantttaaggtaaagntcttccctcaactntntattgttntgcgatgaaggtgatnntctgatgaaggttatttgcacagagtatgctactaagtaaagccttgatgatgcaacacgacctcgaagataagaaaaatgaggttataattgaaggcttgganagaatatcaaagatcatgaagctgctcttg

SEQ ID NO: 32389 - DNA, 123 bp, Zea mays
  unsure (1)..(123): unsure at all n locations
tgtcatttgagaaagacaggatttgtagcgcatgccaagcacggaagcaagtnggcactcatcatccacataagaacattatgacaaccgacaggccactggagcttctacacatggatctat

SEQ ID NO: 32390 - DNA, 180 bp, Zea mays
  unsure (1)..(180): unsure at all n locations
tgatgaatgcagtttttcttcatcttctttngccagactgatctgatgatacccagagtatcaatccaaggaagacaacatagagcacccggtggttgaatctaccacctggtctattctangaagtccgaanggatctttcggatagtgcttggtgagatctgtatagtcgacgcacat

SEQ ID NO: 32391 - DNA, 386 bp, Zea mays
  unsure (1)..(386): unsure at all n locations
tatagatgcaccacagaaccatattaagccttcaatgtccatacaatctctgtgatggaccacactcgttccttttgaacacttcanagcacttaactcactcagatcagatcttaagataaggtggactgtaaatctcattcccgatgatactcatcangtatccatcttatgggataaacatgaccaatagaattgttcgtaacttttcatttcatcccaacactgggatgaccaattcantattactccgcatgtcagtnacatcgcatgacgacgttatcacatgtcacacattgtacgagaggatgtatgtagaatacaatccataagatatgttgtnacaaacacatgcatatccatcactatcacttgtgttccacatg

SEQ ID NO: 32392 - DNA, 328 bp, Zea mays
tatctcaacctgagaggaaagcttattctaaggggtgatgtgttagtttaagccttgctagtgtgttattcatatgcttgtgtattaaagcttatctcaacctgagaggaaagcttatcctaaggggtgatgtgttagtttaagctctgctagtgtgttattcatatgcttcttcttgcagtattatatgtgttgcatcatatggactagtgcttgcgctgctatgaattaattggcatctattgtgttctttctgaaatagatagtcataaagacaatggtgcatatggttagatagtcatgtggataatggtgcatgtggttaatg

SEQ ID NO: 32393 - DNA, 321 bp, Zea mays
  unsure (1)..(321): unsure at all n locations
agttatcaaagaaaaattatatagaattggagaagggtgctatatgctgtttgatggcttctagaaagcttccgcattatttccaagcatacaatataatggtcccttcttcacaaccattgaatgacattatgagaaatagagaagctactgaaaggattggaaagtgggctacggaactcaatgaattcttgcattgattatgtacacagatcttcgattcaatcccaggcgttagctgacttcatttgccgatggacgccaggggctcaagtagaagaggcannataagatgccgaagcatggacagtattctgtgat

SEQ ID NO: 32394 - DNA, 230 bp, Zea mays
  unsure (1)..(230): unsure at all n locations
gcagttggcactcatcatccgcataagaacataatgacgaccaacatgccactggagctcctgcacatggatctattcnggccgatcgcttacataagcatctgcgggagtaagtactgtctagttattggggatgaatattctcgcttcacttgggtattcttnttacaggaaaaatctcanacccaagagaccttatagggattcttggaccggctcaaaatgagttc

SEQ ID NO: 32395 - DNA, 203 bp, Zea mays
  unsure (1)..(203): unsure at all n locations
cccttactactgtataaagacgcacgacccacgcggctatacttagtcgcgtggtaaagagctgtgtgggaccangccatgactcgccccagcctcntgcgactactctaggccagcaacagcgcctgaccccaccacatgggcgggtccagagccaccacgtgtccagagaaagtgatatactccaaggcatcaatagtgag

SEQ ID NO: 32396 - DNA, 231 bp, Zea mays
  unsure (1)..(231): unsure at all n locations
taagcttgatanggaacaaatctacatggcgatcgtgccaaattctcgaagatatacgccctatcggcgttagaacaggagcaaaagataccatgccacatgctcgaccgccgctgacgcgctagtgcacgccaacccacgcacccatgccgaaacgtgcgcgcccatgcaccacgcccacacctataagaacaatggaggcatgggcgtactcccttcgtgcctcacatg

SEQ ID NO: 32397 - DNA, 136 bp, Zea mays
ctgcactgtgtttgctcgcgtggcttctatagcttaattgctgctcagcacgtgctccaactcattatgactatcttctcactcaaattgtcttacccaagtttgtaggctgtacactgctttcggggagggattc

SEQ ID NO: 32398 - DNA, 414 bp, Zea mays
  unsure (1)..(414): unsure at all n locations
tctatccactaatgagagcagaattctactttntcaagagcttcattcctcgtgtgatgacctctgatcgaaggttcccaagtgcaatttgataactttcgtcatcagcttctttttgcgcccttaaagctttgctaataattaagccctaataacaaaaatatatgtgtaagaacataaaaaccgtaagagaatcaagaagcatagcttattttataagtaaaagtgtatagaccttcaagctattataagcaagggtgtctgcaagttcatccttcgacatcgcagataaaccaagctctagcttcgggaatcccatgttccttggcatttctcggcnaacagatatctncttattgtcaggtaggccacatagaaaatcatgtttgtcagaccattgatatcaatgatcct

SEQ ID NO: 32399 - DNA, 250 bp, Zea mays
ttgtcaaggccagacgggggagattaacactcacactagaactatatactaaagaagtacgtaatgctcaaaactactttaccgtctctctatgccgatctatcctcctgatttgcagcgagatccttctctctcctccgcggcattgtgcccctagcctttcggcctgcgagactgccggctctccctcgccttcactcgccgttgctagcttctcgccttcacgtcgcaccgaacaacagcccgcacc

SEQ ID NO: 32400 - DNA, 207 bp, Zea mays
  unsure (1)..(207): unsure at all n locations
cttcttcaaaatcagagagcttcaacaagagagaanaaacttgccaactaaatacgaagctgcagcaatctttgaaagagcttcggaacatgttgttgggttttggcagccactgcgtacaacgaattgaaaaggttntcaactcngtttgagccagtgcttgaaaatatacccttcgaccgaaacatataaagtaccttcgacaca

SEQ ID NO: 32401 - DNA, 231 bp, Zea mays
agcaccgagctgcactgcatctataagcgagcttctacttctctgtaccgccgacaggcattgggtgggctgactatgacctcagaactcaggagaacactcctgtggtgctttgcaaatattaatggtgagtcaaccctcgctcttgactctctagcagggaatctacagaaaatattccgtcaaaacgatacatttacgactggtcattatactcgatttgatttgaac

SEQ ID NO: 32402 - DNA, 207 bp, Zea mays
  unsure (1)..(207): unsure at all n locations
acatgaatgaacgcctgttgcaagggatntcaagcatttgggtagtggctctgggttangactagtgaagcctgcaccaaanacttactaacctttgaataatatagccgatgttgtgtattggttaccatggtgtcatganattatctaacatggaaatgagaacgccacttatgtctcaattaccgatgtaacttctatatacat

SEQ ID NO: 32403 - DNA, 356 bp, Zea mays
  unsure (1)..(356): unsure at all n locations
cactaganacttgtcggaacatttcttgcagaagacatggccacaagtgctgacccgccacagggacatnggtattgtgatagtggacttgcaactanggcacatgtagctcttttccactgccttcccgctcttctgatcagcagtttcctctgtgaatgagatanggaagagcgatttcaacttgagcttctcctgcccctccgggcagacagtgtcngtggagggcacgtctaccttgaccgtagcttcaggagtagctgaaaggagccagaatgccttcatacagcgaagggcttcgtcttcaaaagaagtggcattcacattatttgctccatgaaacccattcttgtctt

SEQ ID NO: 32404 - DNA, 231 bp, Zea mays
cgatcacttcatcttaacgcacctataacggcctaaactacatttagaggtgcattaaggtatctttgagtggtggtaagctaagtactgacgaacttttttggtgagaaattcctgcctatacctgagcaaatccctttaatgcacaataaattattaccccccataatcgagaatactttcgtggtataaacttatgtaacctgttactcagacttaactgagtgctcc

SEQ ID NO: 32405 - DNA, 288 bp, Zea mays
  unsure (1)..(288): unsure at all n locations
gaagatcaattgtgtatctgcttacgacttagcatgatnttctcctatttcacaacattcttctgaagatcaatattgtgtcctcttcttgtgccatatgcagcatgatgtatgatgcttatgctatgtgaaatgatgtaatgatgttatgctatgtaagatggtatttattccgaagacacaagcacattcctgcgataaaacacacaatctttttgaatcagcgttgactttntgctataaagcctccttaggagcttcttcgccttttacttcagcggaatcagc

SEQ ID NO: 32406 - DNA, 144 bp, Zea mays
ctcggccttaccgcggatgtgcaaccacgagggttcctcggtgagagcgcaacttgaaacgtcgtgttcacttgttgatttttgttaaggaggcgtctgggaccattcctaaacaaattttgtgacctttctcaacttcgctgc

SEQ ID NO: 32407 - DNA, 198 bp, Zea mays
caccctgggcaatcggttttatgataaagttcttataaatgaatgcatccctctacttaaggatcaaataataaaatttttcccaaggaacatcccttttccggaaaggatgtacaatgtttatgctcttttcaagagacccgaaaataactcacaaggcctattaccactttctttagctcgaaaagagtgttaaaa

SEQ ID NO: 32408 - DNA, 314 bp, Zea mays
ccatatggcccaccaagggacttcagagaacagtccgaagctcgcacagtcaacagcactgtgccataatcgaagcacatctattgacaaatatcctaccttgacagcagtctttttcattcaagtttattttccgtgtaataaaggacattttgcaaatttcatgcaatagtttcgttctttgccacaaagaaaatatattttcttcacaggcttaagtcgttgaagcttaaagatttccgataacaagaaggaccttctaattatcaaaaaaaaaattcttcatagcaacaaagagtcgttctaaggaacac

SEQ ID NO: 32409 - DNA, 264 bp, Zea mays
  unsure (1)..(264): unsure at all n locations
ttttttttanaacacccagagggaggaagacacgttattactcccaaatcgggccaagggctacaatactaaagaagatttttgaacaataaagcccttcgttaactcatggagagagacgagcaacatcttccggtcataagtagatcgacgaccgaattatatgttcctccaaataatttcttgatagacgaactattttagaaatggggcagaacataccattgtgaaatagagggagtagaccccatggggctgaaaccc

SEQ ID NO: 32410 - DNA, 298 bp, Zea mays
atgcttccttgcgccgaaagtcttgcgtgaaaaagcagcttctgctgatatcgttcccagaaaatgggcgaaggatcctttttataaatacttcggcgttgccaaaccgacctataagatagaaaagacctatgtggactcttgtcacgatcttcataagtcatcgacacatgtaatggacataaatgtcattttacgtgggctgcgtcccgcgtctataaatagatgaacagtacttccgaactgttcacaccgacttggcatttcttttgcgtcaccttgactttttaactttttc

SEQ ID NO: 32411 - DNA, 389 bp, Zea mays
  unsure (1)..(389): unsure at all n locations
cagtgggacaaactacgaagtgttcggatctttacgttacngnttgggtcattgcctcttaagcgcacactttcgtttntatttgaaaaaagctacaacaaacatataggaaatattttgatttttaagtattacttttgatatctatctatctatctaaaaaataaaatacctttgtaactagaacaaataaagtatgtattcttgtgttgacatccttctaatctctactacttattaaggcggtaagggataggttgtcattccgtattctgctattcccattccgctctatcattccgtattctgtcattcccattccgccctccccacaaagctcattctcattcccagctgtcattccgtgttattccctctccccgcaaagc

SEQ ID NO: 32412 - DNA, 432 bp, Zea mays
  unsure (1)..(432): unsure at all n locations
agatggcgctcatcaataagagctttctccatattctaaagcaaaggagggggaaggactacgagccccgctccaagaaagtntactacaagtgtggtaagtccggtcattntattgcaaaatgtccattatcaagtgatagtgacaggggcgacgacttgaatggaaagagaagagagaagaagagatattacaagaagggcaacgatgcccatgtttgccgggagtgggactccgacgagagctccaccgactcctcctccgacgaggacgtcgcanacatcaccgtcaccaagggccttctcttccccaacgtcggccacaagagcctcatgacaaaggacggcaagaagaaggtaaatctaaatcctccactaagtatgcaacatctagtgatgaggcctattctagtgatgatgaggatgatttatt

SEQ ID NO: 32413 - DNA, 416 bp, Zea mays
  unsure (1)..(416): unsure at all n locations
gagagggcggacatgtctacacgttggagaagaagataccaaaagtgcctcgcaaggacacaaganacaagcaagtgatgaatagactctcctttctggtcacataaggggcaagaactaggatggggaagacccctcttagcgagccagtcagccgtccaacatttattatgtaggaccaaccagaggaaaaactgacacttctgcggcgcccaggtgctccacactctttcaaagcccgccatggaggtagaaccacagaacattatctcataagcagatttggccgaatagataccattggaagagaacctccaataatgtttatctggaactcccagttgaagatcaacatcaaccacaacatctgccagcaaaatgaagtcagcaatgacctcccaagataccactcccct

SEQ ID NO: 32414 - DNA, 350 bp, Zea mays
atgtcaagcacggaagcatgttggtgttcatcatccacactagaacatcattactaccgacgggccacttgagctactccacatggacctattctggcccgatagctttcataaacattaccgcgagttagaactgtctagttattgtggatgattattctcgcttacttgggtgttctttttgcaggatatattccttaccctagagaccttataaggatttttgagacagtctcaaaatgagttctgtttaggatcaaatgattatatcgacaactggacgatttcataactcacaatacatgctccttgagatatgcatcaacataatctctttctacttcccatca

SEQ ID NO: 32415 - DNA, 399 bp, Zea mays
  unsure (1)..(399): unsure at all n locations
tagtccaatactttattgtaaacatgatgttttatttttaatcacacaacaatctaatatatcaaaagatagctttcaaatgatatggggtagtgtaacacaacctaagatagttcaacgcaatagtttaaatataattataaggtttaatcaaataatattctaacacaaaataagatagcccaacataattgttcgaatataacgacaatgtttaaatcacacaattgtctaatacaacacaagatagtttatatatgttaccattataattagcatatatatatattataggctaagaaaattactacaggcactaatatgttgtctttttaaaaaataagcaaattacaaccgttataagctttgatgtatagnctattgctttgatatacattt

SEQ ID NO: 32416 - DNA, 452 bp, Zea mays
  unsure (1)..(452): unsure at all n locations
agcttgacaatgaggagatggcgctcgtcatctatagctnccgccaaaacctctaacagaggatgtggaaagactacatgtcccactccataaagggttgctacaaatgtggtaaacccgggcaatttaatgctaaatgtcctatatataatgacagtgaccgaagcgacaaccatattgggtgattataggagaagaatatattttcaagaggaatggcggcgatacacatgctcgtccggagtgggattccaacgaaagctcaagcgactcctccgacgactatgacaccagcaacatctcctgtcccaaaggactattcttctccaactactgtctcaagtgtctcatggcataagaccggatactgataaaagttatattcaactcctcccctaataagagatttctagtgacactatgctcttgagaagatgataattgcgtagctc

SEQ ID NO: 32417 - DNA, 420 bp, Zea mays
  unsure (1)..(420): unsure at all n locations
gaaagccggactnnggttacctctgaacaaaatgatggtctatatcctgttaacctttgaaggctatcttcaccaacttgaatgtacttagtttggctgatgaaggagccctcttaagtatgtctagaaatctatcttcattccaaacttcttaagtatgtcttgaatgtacttagtttggctgatgaaggtgccctcttaaagatgcttgatttgaaatccaaggaaatacttcaactcccccatcattgacatctcgaatttctgtatcacgatcctactaaattctttacaagttgacttgttagtagatccaaatataatatcatcaacataaatttggcatataaacaagtctttatccattgtttattgaagagagtatggtcagcctttccaactttgaagcccttaatgata

SEQ ID NO: 32418 - DNA, 383 bp, Zea mays
  unsure (1)..(383): unsure at all n locations
tccgccgctncgaaggcagcgggttgggcttcagatgtggtggcctcatcaagctccgtgatcttcctcgagccttcgatcatgcactcaaaactcacaaaattcccgatgacttcctcgggggtcattttagtatatctaggattaccacggattaattgaacttgagtaggggtaaggaaaataagagatcttagaataaccttaaccatctcgtggtcatcccactttacgctcccgaggttgcgcacttgattcaccaaggtcttgagccggttgtacatgtgttgtggctccttccctttgcgaagccggaaccgaccgagctccccctcgatcgtttaccgcttggtgatcttggtgagctcgtctccctgcgcgcc

SEQ ID NO: 32419 - DNA, 390 bp, Zea mays
ggcttgtctatacccaaggagataaccgccaacggagcgagtgaaaaagcttaactcggatcaaacttgacaagtcttagttttaagcttttagcacttgaattcttactctttatgcaattgttggttcttgaaatatgcatgaggtactgcacttatggggagtattcaaaactcaaatcactcatgaaaacccctagtgcaaggccaaaatgcaaatttcaccatttgcctattttctctaaaaattatctagcctgtggcaaaatattttgaaaattatgagaaaagtatatgagggtgccaatacttgtcccaacaagtgttattttgtgtgtctataagttgggatatggtttggttgggaactaattagaaaaattctaaaaa

SEQ ID NO: 32420 - DNA, 325 bp, Zea mays
  unsure (1)..(325): unsure at all n locations
tgcagcttgttagggagaacacgtgatangtcttactaatgttcaatncgaaaaagatagggcttgtgcagcttgtcaagcacgtaaacaagtgggaggagcacatcacagcaagaatgtgatgaccactttctgacctctggagctgctgcatatggacctcttccgacccgtcgcctatctgagcataggagggagtaagtatggtctatttattgttgatgactcttcccgcttactagggtgtgctttctgcaggataagtctgaaacccaagggaccctcaagcgcttccttaggagagcttataatgagtttgagctca

SEQ ID NO: 32421 - DNA, 352 bp, Zea mays
gctaccccgacgtgttctagtgtcgtggacaaagtggaaactagaaccactaagacgacactcgaggtgtcaaccgtgactgcggccactagagtcgaatcccaagctgaagaggaaaaggcgaagaatgttctggctggtcttgataaagatgagtccgataaaggttgtgaggaacaagctgtgtttgaagaggatggcaacgacatccggctatacatgttcaaacgggctatgtatatctggcagcccatggcacgatatgtttttggtccgtcacgagcacaacatgactcggaggtgggcaagcctatgccaacacgacccgtattcatgtcatgcttgggtcatt

SEQ ID NO: 32422 - DNA, 154 bp, Zea mays
accaacttttcactattttattttacataaacgcaagaatatgcacatggtaaggagagatattaccctttctagccataacatattttctagcacatctacctgaacaagtgacttaagcaacatactgtaatcaagctcatatcatattcat

SEQ ID NO: 32423 - DNA, 395 bp, Zea mays
tcacaataaacatgtcccgaaaatacctttctctcatgttctcaagatgactcttgttgatggttgattttccgaagattgaatgacttggcctccaaggccgatcctcagaatcctcatccccactttccacatcatagctatcgctatcaccagggtctttagataaaccttctagtatctctctagtaattttctctatggttggttttgccatcgactcaacaaatctagcaatataaggattcacaaccttcttctcctcaaatagcttctcctcttcagtcagcttcggctccgccacaaaccttctttctctgagacatattttctccacaaatggtgaaaacacgtcttttaaaccgaagttcaaagagcttgaaatctatcagtgc

SEQ ID NO: 32424 - DNA, 155 bp, Zea mays
caacacctgctgctgggatttcaacatacccccctcctttgcaatattaataagttgcgattacacctaaaaatatgccaaatattttaaaaaaacattcctgaaatgacatttccctttcatattactgcaaattatattccataatcctaaac

SEQ ID NO: 32425 - DNA, 359 bp, Zea mays
  unsure (1)..(359): unsure at all n locations
acattttccccnnccagaaaatacaagagcattgcgccgttagtctgcataactcttctaacgaacttgggctttctttatataatgaattatcctctggactctctcttcagtacttttcaccatatcaagcctgaagaagtacctttcaccacgttcaaaccaatttaccggagtacgacatcgtcgtccatataaagcttacaaaggtgccaatctgatgctttcttgatagctattattatatgaaaattccgctaacggcaaacattcttccatttttgtgagaatccaatacacatgcccgcagcatatctccaagaatttgtgtcacttcttcacatcgcccactggtttga

SEQ ID NO: 32426 - DNA, 402 bp, Zea mays
  unsure (1)..(402): unsure at all n locations
taagtagtgatcatgatgggagagatactctatccttcatgtatctncacctatganaaaggttctaaaaccctaatttcccctcttgagccattaaactccaaacatttaattaaagggaaaaactaagcaaatgaccaattcatgaattgaaccctttaccaaagttgaaaaacattattagatctacaaaatatagtaaggggaggtattacaaaaagggcctacaaaaaccccaaatcaatcccccaagtggagagcacactatagccatccttttttctctaagtccaaaataagccctaacctaaagatcaaaaatgttcacccctttgttggcgccaaaaccacatggtccatataacaaaaagtagcctaacaacccaatgcacactcctgaaa

SEQ ID NO: 32427 - DNA, 349 bp, Zea mays
  unsure (1)..(349): unsure at all n locations
agccggcgnctagtagcttctggacctcctgacggatgaagtcctgccgctcacggactgtctccgaagcttctgactcaccgggctggcgtcagtgtggatcttaaaaaggtgcttgttggggacttgttctcaaatgcttcagcttctgcttggaaggagatgaaaatacatatgtgacgcacaagcaaatgccaagtcagcgtgaacagttcgggaccactgtccatctatttataagcacgggacgcaggccatgtataattacatacatgctctttacactcgcgagaaattctatagaaatccaccgaggtccgaatagccctttcatattaaagactgtttc

SEQ ID NO: 32428 - DNA, 285 bp, Zea mays
ggaaaacgccggtgtttttttactagggccacacctacccaaggagaccatattagtaaatctgctataaagtcataggcttacttactcactttgggcctattaagaatatcatactttgggtaaaataggtcatttcatccatatagactatttggaacctccatggtatatgttcttataagtgaacagcctcaggttaaatgttaaactcgataaatctggtttcatctggttatggctaatttgtatgactgcaaaagaatcaatgcgtggaaacaaaaa

SEQ ID NO: 32429 - DNA, 208 bp, Zea mays
cgctcggcggcactgaacaacttgaagatctcctttttttgatatccgcggttttaaattggcgttataacctgactctgagcttgtcctcaaacatagagccagcttctaacttgatgattggttagaaaacaactatttgtcatgtacagcaacacgtaatctatttggcaacccgatcaagactactgggctagttgatactaca

SEQ ID NO: 32430 - DNA, 435 bp, Zea mays
  unsure (1)..(435): unsure at all n locations
agggagaacacgtgataggtggagaggatgtgctattcttaaaagatnnacccngggcagctggtcgagcatgcaagcatgtgggaagctctcatcacaccaaaaatgtgatgaccacatcaagacctttggagatgcttcacatggacctcttcggatccgtcgcctatctaagtatatgaggaagctagtatggtcttgttatagttgatgacttttaccgcttcacttgggtattctttttgcaggataaatctgaaacccaagggaccctcaagcgcttcctaatgagagctcaaaacgaagttgagctcaaggtgaaaaagataaagagcgactatgggtccgagttcaagaaccttctagtggagagtaccttgaggatgaagggatcaagcaccagttctcgcttcctaccaccacagcaaatggtgt

SEQ ID NO: 32431 - DNA, 407 bp, Zea mays
aacaacacgggtgagcgagagttgctgtttttctatataaacccgacccgaagaccttgccgactagtgttctggatgctgcatgtattccacattgccctgcatggaccttctccagaagttgcttcccagtggacgggagaacgcacttcatgaggatgcctgatgcgccccttctgtacaatatcttcccaatgagtgtatagtgagccgactgcctggcaatgcgctctgtcgagatcttgtcgtctggttcttcttcattctttatatacttaataatcagccttctccagtcatcagagtctgactcgggttgatctatgatgttgcactcttctggttgatccattgagatactcggctacagaatttcttgcacgaagactccgggtgggacctgagtt

SEQ ID NO: 32432 - DNA, 399 bp, Zea mays
attctttctaaccaaggtgaattcagtatcgtatgtgatattctatgcatcatctactctatttgttcccttgtatggagtactgtgtgctctcctattttgaatggatggatgtctgtatgcttgctatcgcataaaaaactatctggttgaaaagctcgatgaactctcaagagaagcgcctaaactctatcggctggtggatgcaacgttctttgcctatccctgacctatcattttttatccacctccgcttacacatgtttcctacagatttactactttgttttcaagtcttgtatctatcgggtggatattatgttaacttagctatgctaacttattaatgacatgtgagagattataacactttccctttatatatatgtgactgggcat

SEQ ID NO: 32433 - DNA, 440 bp, Zea mays
  unsure (1)..(440): unsure at all n locations
taacccatgttatncatcatgtgtgggcaaacatatatcttcttgttgtctnggagacaataaaggagatcattctcgtcatttcctccatatactaaagacccccgggggtatttcaggtcctttgcgtaatgttgcacttcggcaatttgctcctctgataatcatttccctaaagcatggcgaacaatatattccaaatcatctcgagaaggcgcttcgggtataggcgatgttagctcttctggaagactttcctttgcctgctccactggcttatatcccgaaggtccagcttcaccgcaagtaggagaagcgcttgcagcaaccaccactaatttttcaacattgtctacggaagctttataagaaataggagttgataccttcgaagatttcagaacaacgttcaaaacattggccattctcctccctttctt

SEQ ID NO: 32434 - DNA, 422 bp, Zea mays
gagagagagttttgttttgtctccacaacccgaaaaccggtgaggagtctttacaacagagaatcaccaacacaagagcaagagcacaacaacacaaatgcatatcacaagagcacactcttcctagaatgactatctctactcaaatggggtgctgagatctctcataatgtcttgaaagtgttgcacaagtgtttgggaatgaagcacaactctagtggttattgatgtgtcgaatggattgtttggggacggtatttatagcccaaatacctcaattagtcgttgctagaaatctgcaaaatctactcttttctcgggtggcaccaaacctccaacgaccactctaatcaacggggcttgtcctaaacttgcctgtctgatggcccatcgggacctgccacggcagttagctgttggag

SEQ ID NO: 32435 - DNA, 396 bp, Zea mays
  unsure (1)..(396): unsure at all n locations
ttttctaatttttccancccacggcaggtgcatagttttacctgaatacaaaccttccacttcggagtatcccttggccaccattacggctttgtatcttgtcaccacaccatgcttcgcctgcttgttgcggaacacccacttggttcctacaactatttgatgatgacgtggaactaaatgccatacctaattcctagtgaagtagatgagctactctttcattcccaccacccaatccgaatcttgaagtgcttcctctaccctgtgtggctccatagaggaaacaaaatagttatgctcacaaaatgtgcaacacaagatcctatggtttccccttataaatgttcccaagtatgtgtcaaaaaggtgatccaatggattgcttgtggactc

SEQ ID NO: 32436 - DNA, 322 bp, Zea mays
  unsure (1)..(322): unsure at all n locations
cgcatgcaagcttacgggctactggcggagctagccttagcactggctgngcttgagggtggctggagtgggctggccacagcggccgatactctggcggcaatggcgggcggaattgagctcgccggagctaaggtgaagtggctggccggtgagggtgagtgctgtgccgaaaaaggtgctcccggggaggctatataagcgcgggcgaacactgccgatggcgtgggcgctcggcggacttgaccggacgccggggtgagcgctcgcgcgggttgggcgaactctggtgtgccaaccatagtcgaacacgtgtgcccgt

SEQ ID NO: 32437 - DNA, 428 bp, Zea mays
  unsure (1)..(428): unsure at all n locations
tccaagtctcggtttcaaatttttctagggggtgtcttaagnggnatagcacattattggtatagaacccaagtggttttggcgccattttcaaagagaacacggctggtctttgaattagggctaaaatgtgacttagagagaaatagagagctctagctctctatccacttggagatttgaaatggggtgtctccacgggcctttttgcaatatttccctcctctaattgatggttataatgttgcttaagggttgggtaaaagttacacatgctttacccacttgatcactctcttcccccccttacttatggttttggaaggtagggctatggagagatctatggttcttctccccctatggtccaagatagtaagtgtgccacgacttatggtaatggttcttatgttatgggcaacttaatt

SEQ ID NO: 32438 - DNA, 231 bp, Zea mays
tgttgtatgaaaaattgctttgaaggcattgagagtacccccacccatgattgcattgttagggtattccatgtcaacaatatcgaatacaacttggtcagtccttgttgtgttgatatattcgaaagttacttgcattgtgattttttcgaatgctacaatctgcttccttcaaatcacaaaggtgatgtgtggcatcatggattttgtcttcgggctctcgcattggct

SEQ ID NO: 32439 - DNA, 327 bp, Zea mays
tgtggccactacgaaagctctcgcgcccatcttgtaagaagtatttctcaccatggcaaatcacatcaccagtcacttgatcgtataactgcacccaatatatcatagaggcactgtgttaatttatggatgaaaatcatctctaggaaagaactatctgcacgcaaatgaatacaagtatacctgctttccatcaagaaagcatctccagaagtctggccttggtctccctactgcagtgtttattaaatcagtaaagaccaccattatctacacaactaaaagaacacctgtaggatttatatgaattattctacgacatgtgaa

SEQ ID NO: 32440 - DNA, 242 bp, Zea mays
cactcacaaaccaccagatactgcccttacattcctaatgcttgatatcctttctaagaaggacccaattcataaagacagtgtgccatttgatatatgggaacaaagcattgtattaaaaataaaagaaaaacatggaaggatggcggaataacaatttccaaatttgacaacctgatccatccgaaggaactgtggggattggtttcgagagaaacattttttcccgctggggtggaccc

SEQ ID NO: 32441 - DNA, 131 bp, Zea mays
  unsure (1)..(131): unsure at all n locations
ggaggacgaaaaaccngagaagagacggagacagggaaagaaagcaaaggagcagaggggaaagaaacacaacgacaaggggagaaaaaggaaagggaaggaaaaaaaaaaagaaacagaaagaaagaaaa

SEQ ID NO: 32442 - DNA, 435 bp, Zea mays
  unsure (1)..(435): unsure at all n locations
tccctactggaacatggcaaaaatggtatatttttccttcacattntcctctctaattccttttatacatagttttagttataagtactgtcaagggactcttttgacaactgaatccatgcttttgaccagagctagaactctcctcctaaatgtttggcaagcttgctgtctgagaaaataaaggattaaatgtcaagtatccgtaagaaaatagcaggcccatttcctcgccaagcaaaacaaatatctacattacctaaatcattctctaccaacgccattgagccacaaacaagttgactgattagaaaatgttacagggccccaaaaatattcagcttgcataatggcattaaactggccattatacaaccacatatcatttttcattatcacactactctaatcatattctgatcaataatttgctaa

SEQ ID NO: 32443 - DNA, 381 bp, Zea mays
  unsure (1)..(381): unsure at all n locations
cccaccacagagcgtgctggtggcaattttataataaatattctctaagtcaagctcattaatattagcactaagtagaactatgtgatcattttgtcgtttaattaaagctaagtgatcatgaatagcatcaacattaatatttntatatctattgcataatggtaacatgcataacggttgatgtagatggtctgcaagtatttatattaacaatcttagcatgtaaaatagcattttcatatctaatatcggaaatataaacattaacaacatctaaatattaagccctatatatctattctatattctcaatttttaggcttgagagagatgccatcaattgtcatactaacaacaaaatactaataatttctaaac

SEQ ID NO: 32444 - DNA, 319 bp, Zea mays
gcaggtggacaagtgggaggagcgcttcacacccaagatcgtgatgaccactttaagaccctctggagctgctgcgtctggacctctttggacctgtcgcctatctgagcataggaaggagtaaatatggtttagttattgttgattatctttcccgcctcacttgggtgttctttttgcatgatacagttgaaacccaagggaccctttagcgcttcctcatgagagcttaaaatgagtcgagctctaagtgatataagattagagctactactgatccgattctcgatcctttttgtgacgatttcttgaaaggagg

SEQ ID NO: 32445 - DNA, 339 bp, Zea mays
catgtatgggctcttcactgtgccaaaatctatctcttctgtgcaagttccaagcacaaatatggtcagggtcaaaaaatcttggggtgtcaagttggctctgtcagccgtgtcacccctgagacaaatcccataccaaatcatgtcaaacgattttggtttgatttcaaacttcaccagggtgtttctaaggtattttggagccactttgtccattgagccatgtggttttgggttttagaactaggtgaacacagttgatctttgcaaggggctaaaaatgaacttagagataagctaatttttcttttgagtctccacttgagtaacctttttggg

SEQ ID NO: 32446 - DNA, 280 bp, Zea mays
tctcagataaagaggaatggagaataatggggttccctactatataaattaactctattgacatagtttgtaaaccaaaaatgatgggatacccacactctggtgacaatgattacaaagatccaaccaaacatagttgattatgacagacataaatgcacaggatatagcaaactactctggctactaatactaactaagaccgagactaacgctaagactgaagcttctatgtatataattatatcgtattaattacaagatccaactctaacgatct

SEQ ID NO: 32447 - DNA, 380 bp, Zea mays
  unsure (1)..(380): unsure at all n locations
acaagtgtggtaagcccggtcactttattgctaaatgtccattatcaagtgacagtgacagggataatgactagaagggcaagaggagagaaaagaaaaggtaccacatgaagaggggcggcgatgcccacgtgtgccgcgagtgggactccgacgagagctccaccgactcctccgacgacgaggacgccgccaacatcgccgtcaccaagggactcctcttccccaacgtcggccacaagtgcctcatggcaaaggacggcaaaaagaagaaggttaaatctaaatcctccactaaatatgaatcctctagtgatgataatgatagtgatgaggaagataanttgcgtactctttttgccaaccttaacatggaacaa

SEQ ID NO: 32448 - DNA, 453 bp, Zea mays
  unsure (1)..(453): unsure at all n locations
gcacgcatgcaagctagttcactctcgcagtggtgttatcctgtggaggtcggatttgnttggctttgcctatcatgtcatacaaggccttcacaaggcaagccacctcttgctttaattgctcattctccattgcaatctcgtccaaacatgtttctataacaacattcttaacaacaacttgattgcaggggttagaatcatcaattaaatcaaagcaagaagtataagcatctttcttaatgatttcaggaatttcaactaaagatgcacctaagggtctaccaatgttttctagcttagtagttagctcattattgtgtatgctaagaatttcattntccctagcaaattntcaatagcttcttcagagctagctaacttagccttaagtttttcatttatgttaataaggccatcattagtagctgtggatgaagcactagactctaa

SEQ ID NO: 32449 - DNA, 422 bp, Zea mays
  unsure (1)..(422): unsure at all n locations
tattaaggattatgatttggaaattcactatctcccgggctatgcgaatttggttgcagatgccttgagttgaaaggagtatgttgattcagctgttgttgcccagctacccgatgagattgttgatgatttcatgagacttaacctggggatagttgctcacactgaaagagttactattgatgtggaacctactttggagcaagaaatccacaaaggacaaattggtgatgctaagatacaagagatcaagaatctgcttactgaaggtcgaggtccggaattcacggaagatgagcaaggcaccatatggttcaagaatcggatatgtgttcctgagaatgatagtgttcgtgagactattttaaaggaagaccatgactcagattattctattcatcctgngagtaccaagatgtgtc

SEQ ID NO: 32450 - DNA, 393 bp, Zea mays
  unsure (1)..(393): unsure at all n locations
aaaagtgctagacgtcgtagtggattatctttcttaacatganncaacacttagcggggtctttcagtgctaacacaacagctctctccaaatttggacagattcagaattgccacatccaaaattcacaactaaagattcagacatccaaatgaattgatcctagactttctggaaagataataaaatcgtccacacatcatttataatcatctcaaggtgattcagtatctaatttaggattaaagacactttaagacgttgctgtccagaactggacacgatcagtcttctcacttttaacaatcatatcttaattcttagaccacctagaagagtgatccagacgttgtggaaatctcagtagaagcactacataactggtataatcac

SEQ ID NO: 32451 - DNA, 265 bp, Zea mays
acgatccgagacatatacaactcttgccatacggcactgctataattggtcttgacaagtatgaagtgggctgacttggtcagacgggccactactacctaaattgaatcgtaacccgctcgagtgcgaggcaatccgactatgaaatccataccaatttcattccatttccactgagggatctgcaacggttgcaacaatccggcaggtctctggtgctctgccttaattcttctgcaactatcgcacatagccacatgctctg

SEQ ID NO: 32452 - DNA, 222 bp, Zea mays
  unsure (1)..(222): unsure at all n locations
gagagcctttctttttttaccaancaaggaagaggtcggtgttgttcaatcttccggctttgaagacaccgagtatcctaaccatgtntataggttctctaaggcgctttatgggctcaagcaagccccacgagcatggtatgaatgcctaatatacttcctgattgcatatggcgtcaaattccgcaaggccgaacctactttcattctaatactcttgaa

SEQ ID NO: 32453 - DNA, 253 bp, Zea mays
  unsure (1)..(253): unsure at all n locations
tcgcggccatcaccancatgggacccaatcaagacttaaaaggggtacacagggtcatgggatgcctcgcggccctgaaccgctttatctcacgcctcggcgaaagaggtctgcctctgtaccgcctcttaatgaaggccgagtgtttctcttggaccctcgaagccgacgaagccctccgcaacctgaaggcgctccttacaaaagcgcctgtcttggtgccccccgcggatggagaggccctcttggtcta

SEQ ID NO: 32454 - DNA, 213 bp, Zea mays
caactgtggatgggtaacacaatatgacaagagcgtccgatggccctcttgcgcaaactcttgtctctctctatgtccacttttgtccctgcctcaactacttgctccccacaaattctgcaagatgccacttcttcgactatttctcgcacgttatctaattcttggaccggctaccgtatgatcacattctatttctctctactctacccc

SEQ ID NO: 32455 - DNA, 322 bp, Zea mays
aaatccattctctactttatctcagataagcccaaccatattagcaggcaacaccctgaagataatcaacatggtttagtttttctaagggcatcccaaaaaagaccattcccaaaaagcgtgtctaatacgatctcgcgttgattgaaacccaaactccaaaaaactaacctccatatgaactgagcatagtgaccagcaaaaaacaagtgttgaatcgattcattcgagtgacaaaaggcacactttctatcaccatgccaattacgcctcacaagattatctcttgttaaaaccacccctctcattaaataccacataa

SEQ ID NO: 32456 - DNA, 398 bp, Zea mays
ttatttctcaacatgcaaaagcgggtcttatcaagtggcttaatgaaaatatccgctaattgatcttccgacctcactccttctaaaacgatatctcctttagcaacatgatctctaaggaagagatgacggatatcaatgtgcttggtgcgagagtgttgacacgattattagcaattttaacagcactctcattatcacacaacaaaggtaccttttctagaactacaccatagtctataagagtgtgtttcatatacacaatatgtgtgcaacaagcacctgcggcaacgtattccgcttttgcagttgacaaggcaacactattttgctttttggatgtccatgaaactaatgatctaccaagcacatggcatctcccacaagtacttttccta

SEQ ID NO: 32457 - DNA, 338 bp, Zea mays
  unsure (1)..(338): unsure at all n locations
ccatgttataggctctctaaagcgccttatgggcctcaagcaagccccaagaacatggtatgaatgcctaagagatttccttattgctaatggcttctaagtcggcaagggccgatcctacactctttactaaaactcttgaaaatgactagtttgtatgccaaatatatgttgatgatattatatttgggtctactaacgagtctacatgtgaagagtttagtacgatcatgacacagaaattcgagatgtccatgatgggggagttgaagtatnttctacgatgccaagcccatcaagactcccatgggaaccaatgggcatcttgacctcgacac

SEQ ID NO: 32458 - DNA, 342 bp, Zea mays
cgcgtgtgatggcttatagctctattaaccacgcctctcacgggcactgtgcggaggtatttataggtacctgaacgcccaacgccttgtgttaaagacgcatgtgccctcagctacctaggttatccccagaatattcccataaagcaaggttacagactgtaattacagggatgcctttacaaattaggcccgtaacacgcggcggccgcacagagcccgttacaatgggccggatcgcacgtgggcctctgagctggacgaggccgcactgtgggatgccttcatcgccggtcttcgtctggtgccgatcaagcgaagggtgttcctgcctgctttgtc

SEQ ID NO: 32459 - DNA, 429 bp, Zea mays
  unsure (1)..(429): unsure at all n locations
acatggancaaagacagaggtctatctcgtagtcgaacctgtcaaaggcttcacttatgcctctgcccctntccatgttagtggcttcctctctggctgcacgtgagtggagttgtcgaggtgtataaatggatggcttgtggattgtctatcttcttctaacagcttaatcttatggggtgaaccggttagtgtatccactgtgacaataggaagaactcccttagtgtaatccttctctagacccactcatgtggaagcctccaacattgggtctggccttttttataactgactggtgggcccgatgtcttattctagtattagagtgttctgnatgatcgaacttatgtcatatgcttattctctacacacttgacagagctgacgatggctctcgctctccaatctaacacatcaaacttgtat

SEQ ID NO: 32460 - DNA, 446 bp, Zea mays
gagcaacacgagtctgaagaatgccgcatagatcaacctgttcaatcaaatcattcttcatataaaaacacactctcgtccattcatttggccacttgctacggtaagcaagagccaggaacatcgagccccttcaataagcaaagttatagcaaccaaagttgttatgaacgcctctggtcgccttcatctgaaagtgtagctcatgaatctgacctaaggattcgcggaaagcttgagcatcaatgtcaaccccttgactccgaacaacccaaacgaaaatttctatacacactattgcgtttgaggtgagttgatgaacgtaaactttaaaccttgttatcaccgtgactattgtcttatgcagtgggaatataaagagtcttcataaagctccgaaacacgataagctccgctgtttttggattaggcactaactaatcacc

SEQ ID NO: 32461 - DNA, 385 bp, Zea mays
  unsure (1)..(385): unsure at all n locations
tttgacagggcactcggtgttattgttacattggttagcagnccggtacatacctgtgaggtcaattgttcctttcattcagagctgatgaattccaagtgtttttgatgtcaagaacaacatttttttgtgcatgcctgacagtatgccagcactaaaaatgcaatcataagaggcggcgatcaatttcttaacacacaggataaagttttgaaggaaagggataaaatttgaccggagtcaccagttggactgcacaacttttaaaaaattacatgttaagccaattaaggaatatacagcaacatgagaggcgataactacctttctttcttctccttccacctttgatctttggggagaaacgcagtactggttgggatca

SEQ ID NO: 32462 - DNA, 421 bp, Zea mays
  unsure (1)..(421): unsure at all n locations
ttcttttctgcattgcaggatccttgtattttactttcccacttaaaaagaatgagggtagaactcttgaatcttggggatttgaactccttgaagtaccatataacaagggtgttacgggtccttctgctgctgttgctgcttgagctggctgcggagggatgactggcacagggttgggagaaccttcttcttatcttctcttcattatcttcttttctcttctcacttttcacttttcactgcctctntctttctctttgctcttcccattggaggagtctatcgatgagtattaccatcatacagaggaggaaaccaaagactatgaaccatgtacaacagtcttcaacccaagaatcactaagcattgtgatcttatgggcgagggagtggaaaatggagttgcttgcgaattggc

SEQ ID NO: 32463 - DNA, 442 bp, Zea mays
  unsure (1)..(442): unsure at all n locations
cacgccggcagantcagccttctttatggcatcatttgtcattccaactagtgcataccctaacgactggttacgtgctgagaaaggtgcacgaagaaattggcagacttagaaaacgatttctttgggcgggacatgagaacttcatatgacgccaatgcaatgttactggttgatggtggcccaacctctatagcttagagggattgacattcttgaccttgaccattatatgccatggctctacggctctgttggttgtggcaacaatgggaagttccaaagcgccctgtaatgggttggagatcccctgaaacgacaccgacacactcttgnttgctgtagccacgtggatcattattggagatggcgcaagaacttccttctagcattgngcataggccaactgacaatagcctagacattatgagcctgacatatt

SEQ ID NO: 32464 - DNA, 358 bp, Zea mays
gttgttctaatgactctcttcagggcagcagatagatgcaccatagaaccatattaagccttcaatgtccataccatctttgtaatggaccacactcgttcctttgaaacaattcaaagaacttaaccaattcagatcagaatttaagataagagggacttaaaatctcattttcgatgatactcatcaagtatccatcttatgggaaaaacatgaccaataaaattgttcataacttcttcatttcatccccacaatgggatgaccaattcaatcttacccaccatggtaagtatcatcactttgacaagttataacatatgcaacactttgtatgggaagatgtatgtagaataca

SEQ ID NO: 32465 - DNA, 343 bp, Zea mays
catgcagcttactcctgactgagaatgtgtcttttttatcgccaagattttgaagcccggttcatacaatctggccaacgatcaatgcgaggtctactgcaacgcttggaacatccaacaactacgtcgcttctacccttaaaatgattcaagtcgttcatgtatctcgctcttctttacatgcacaaaaaagtctaaccgtcaaggaatgatcagccttgcctcggaaaggctgaccctcccttgggggctagaaggtgggaaccccctctgcgtcaaaatttcctcgcgaaagtcttctaccaaaacgacttccgtgccttctcgactgcgttgacaacat

SEQ ID NO: 32466 - DNA, 371 bp, Zea mays
  unsure (1)..(371): unsure at all n locations
caagcatatcacataattgttccgtcatttatccccngaagganatcatgaggaatagagaagctactgaaaggattggaaaatgggccgcagagcttaatgaattcactattgactacgtgcacagatcttcaattcaatcccaagcgctagcagatttcatcgctaattggacgctaagggctcacgaagagaggacaagcaaagatgccgaagcttggatagtgttttgcgacggttcttgtggagccttcggtgcaagagcagctgcggtcctagtatcaccttcaaaagtcaaaacatgttatgcagtcaaactagatttttgttgtacaaataatattgctgagtacgaaacacttctattgggg

SEQ ID NO: 32467 - DNA, 338 bp, Zea mays
ccctcacaacggacaagtcccagaaattatttaccctcatgttaacaagatgattttctttaatacttgatttgccgaaaactgcatggcttggtcgccaaggtcgatcttccgagtcttcaccgccactatccacatcatagctgtcactgtcaccagtatcttcaaataaaccttccaaaatttctttagtaatcctctctgtgttagtcttcgacatagattgaagaaaacccagatgcattttctccgaaagactcagcttctaaccaccaacaacttttgtatctttaaacatccttgcaaacgctgagaaagtgctctctacgacgaaacct

SEQ ID NO: 32468 - DNA, 296 bp, Zea mays
ttaccggagaggacgttggattttttgtacttatacatactgatcggggcggaccaatgagttcgacagctatgggaggattccaatacttcttaaccttcactgatgattttaggatatatgggtatgtctactaaatgaaacacgagtctgtaatcctcagaagagttcatagagtttggaaatgaagtagaaaatccgcgtggccagaaaatattgcactgcgatcagatcgtggtggtgaatattcagtcatgaatttatcaattatcttaagagttgtagaattgttccac

SEQ ID NO: 32469 - DNA, 413 bp, Zea mays
  unsure (1)..(413): unsure at all n locations
acatgtgcttagcggcgangcctcagcctttccatgctagncnnagctattaagcatgcatctagaccggcctcttcttttgcaaaatcaactaaataaagtttgccgtctaatacacccttaaaagctaatgaaccatcgcttcttctaaagacagacacatctacatttgtaaatagacagttatatcccatatgacataattgactaacagatagcaaattatatccaagactctactanaaatacattagagatagaatgctcattaaaaattgcaattttacctaacccttttaccttgccttgattcccatcaccgaatataattgaatcttgggaatccttattcttgacgtaggaagtgaacatcttcttctcccccgtcatatggtttggcattcgctgtcgat

SEQ ID NO: 32470 - DNA, 356 bp, Zea mays
taattgtttcatactcttttgccctttctcttgaattatgtttataaggctcaattagggtttttattggggttgcacattttgtctttttgaaaaacccatttgttttgaacatgatacttttaagtgtaatcttaatggatcctttattcttaagtcaatttgatgttcatgctcaattttggttcacataagatgatggttcttgggttagcacttgagagaaaccctatgtgacactggggtgtcacataagtgttcaacacaccacattggactaactactttgaagtgagtataagcacagattaaagtaaaggcaagttgaaagcacaaagtccaaatgagcaaaactg

SEQ ID NO: 32471 - DNA, 400 bp, Zea mays
  unsure (1)..(400): unsure at all n locations
agaangtaccaagagagagtgaatgaaattgacaataaaatggaatccgtgagtggtctcatgaagcattggcttacttttatgtcaaaaaagtattcagaagatttaaccccagagatgagagaagctttacaaaatgtattaagcgtgcattcaacaatggccccctccctctctagaataagagcatatatttaacagtatgttggttcaaatatttcttggtggtgatagttatgaccaatgcaatgaagatgaccaatctgataattatgctgccaaagatacgagtagcatctcagaagattcatatgatgacgtgacctctcgaacaatgaagtgcatgatacttcctttattcataattaatatcattagcactttatatatattcaactct

SEQ ID NO: 32472 - DNA, 369 bp, Zea mays
  unsure (1)..(369): unsure at all n locations
gaccgagccgagggattcccacgcctctgggatacggatacctcactcgtcccttccgcgaaaagcagctcttgctcacacaaacatccctgttaccgacgaagtccagatgctcgaaacaggaggaaaaaaggcgcagcttcgcaagtgcagcgagggtgttttcttctggcctcggcggccgcaggaagcacacgctacaagatgatcggatcctgcaggctcgggtcttcacgccgaagggagctgtagcaccctcggcatcgacgacgtcttcagcaaagcccgacccagcctcgggcggcgccacggtccaggggctcctccgggaattcggcccgagcaggcggctcaaccggnntacccctg

SEQ ID NO: 32473 - DNA, 370 bp, Zea mays
cgcagcagcttatattggagagaagattttttttttggacaatcaagaagagtgttgttatcaacctcggctctgaaataagagtaactaatatgtttcaaactctctatgcgctgatgggctcaagcaaaccccaagacatggatgaatgcctatagattttttatcactatggcttataatcggcaaagccgatctactctctttactaaaactatagaaatgattgtttgatgcaaattatgtgatgatatcatatttggtctctaacaactacttgtataagtaataggaaagattcaaatttagagttatgaggggaattaatacttcttcgattaagtgagcaatcttaagcccttttcacaac

SEQ ID NO: 32474 - DNA, 256 bp, Zea mays
gcatgcttctagcaaatttaaaattttcattttctaagacatgctcattaatcttagcattaaggggagccatgggatcatcttggttcttaattaaagctaagtggtcatggatagcatcaacattaatggctctacatctagtgccaatggaaacatgctccaccgtagatgtagagggtttgcaatattttatttcaacaatcttagcatgttaaatgtcattctcacttctaagattggaaattgttacatt

SEQ ID NO: 32475 - DNA, 373 bp, Zea mays
  unsure (1)..(373): unsure at all n locations
ttttcacatncctttgataccacttctgtcacacccgtttcccaagggcagagccgggtgcatagcatatgtgtgccaggatctattttcacacatatgttgacgtcacaagtgtaatatatcaaaaggacaatgcataaaagcgtaaataacgattatattaacatattacacttcgaacagacataatgtcttaacctttattcatcaaagtacagcgaacatggacatccatccacaagaagatgaccggcggtatcactagactagcatccctggagttcagcatcataatcttcatctgcaaacttctgatcaaaattaagcaagggtgagctcacttatggtcggggctcancaagtggnggaaaaa

SEQ ID NO: 32476 - DNA, 384 bp, Zea mays
  unsure (1)..(384): unsure at all n locations
tgaaacccgggacatacatgctggccaacgatcaatgcgaggtctacagcaacgcttggaacattgaacaactacgtcgctgttacccttaaaatgtttcaagtcgatcatgcatctcgcttttctttacatacacaaataaagtctaaccatcaatgaaggatcggncttgcctctggaaagcccgaccctccatccgaggctagaaggggggaacctcctctgcgttaaatattctttgaaaagtttttaccaagaaaagatttctacctaacaactctcgtctttcgactatatcatacggaccctgaaacgactggtaaacctgaatgcatgccaccgacccaggattctaccctcggatcggtacctcctcatgactcg

SEQ ID NO: 32477 - DNA, 356 bp, Zea mays
ctaaaggcgaactacaataaatcaagtatgtaccccatcaatgtctgtcccactaaaatggagattctagccggaaccctcaactgtcagataggttcaatgccctttacctaccttggtgttccgcttggtctgtcaaagcctaaaatttgccactttttaccgctcattcataggattgagaagagattgtcatgcacctctgctctcctttcccaggctggcaggctagagcttgttaactcggtgttctcaactctcccgacctttttgatgtgcaccctgaaaattaccgttaccacggccaagaagaatgattcttatcggaaacattgtctttggagaggaaatgacgt

SEQ ID NO: 32478 - DNA, 384 bp, Zea mays
gcaagcttcgggaagccgatactatgtgataatgtactcttctacttcgcaccgatttggtctcgtatgcagtctaacccttcatcatcaataccactaaagagaagcgaccccggccgatatccacaagatatagcatactctcttaattcctctttttcagctttagtcaactcctggccactaagtttcggaagtcaaaagtttcatcttccgaggtatcttcgggtattccttctttctcgggtttggcagtcgtggtctctctggtggctacagcagtttcttcaacggccatgtttatcagccatttatctatatcagcggctatgctctctaaattaatacctctggagttagcatctttggctttggcctcttctg

SEQ ID NO: 32479 - DNA, 392 bp, Zea mays
  unsure (1)..(392): unsure at all n locations
ccctcagtccggtcgaccacgaccagcacccaacataagactttcctagttatttagccaagggcgtcccataccaacctcatggtagcactttttttctcgggtggtcactccatgttccaattaaatcatatgatcttgcttgatcgtcggattagcaacaataatgtaaacttaccatttagaacattaatatcataaacaggagtgactgcataaatttaaagccgtagcaatagcatagctacttgattagatcataatcccaggttaaacaaggagtaaggttggaaagggtaggggtatcanaataggtaacccatcagattatgcatatatatatatccaagactaaactctattaaatgtattgtttgggatcaaacagagta

SEQ ID NO: 32480 - DNA, 93 bp, Zea mays
gaaatttttttttcaccacatgagcatttattttactacccccaaatcagcacaataaggtgatgtgacctacgtaagctattactcctgggt

SEQ ID NO: 32481 - DNA, 250 bp, Zea mays
  unsure (1)..(250): unsure at all n locations
atgctcctgtgttaagatatagcagatcaaaaagtactgctggggttccagatatctgctgaacaagaaaaaactctgctgatgtttntgttcaacaaccaagatgtcttcgcttggacaaccaatgatctctattgggggtatgcttcatagccaaagatcctaaagaaagagaacaccttcgaaggatcctcttatgagcaagcgctgaagctactacctatagagcttctgcataatgacaaatctc

SEQ ID NO: 32482 - DNA, 341 bp, Zea mays
  unsure (1)..(341): unsure at all n locations
actcaagtctagctacgggtgcataggtttcaccgaaatccaaaccttcgacttgggagtatcctttggccacaagtcgagctttgtttcttgtcaccacaccatgctcgtcttggttgttgcggaagacccatntagttcctacaacattttgggtaggacgtggaactaaatgccatacctcatttctagtgaagttgttgagctcctcttgcatcgccaccacccaatccgaatcttggagtgcttcctctaccctgtgtggctcaataaaggaaacaaaaaattaatgttcacaaaaatgtgcaacacgagatctagtagttactcccttatttatg

SEQ ID NO: 32483 - DNA, 435 bp, Zea mays
  unsure (1)..(435): unsure at all n locations
gcactaatattacaacacctcctgcaaatattattacatctttatattgaatagcactagctttgntcctaagaagtactggaacttcctgttgtttgtcctcattgtcgtgaccattgaaagctgtcatcgcttcttctcttgaattgtatcttttgtagcaagctcctttgaaaccatttacttgagcatggcaagcttcccaggaagagtagacaccagtttgacggccaacatgtactacgtaccaagccatagctgtaaattttgtaatcatcataggcaatggaaatcatctcagatcaaggtatcaaaatttgccaatcaacataggcaatggaaaccatctcagatcaagcatganaatcacatacattacaggcaacaatctgactgatcgtangcaaaggaaacaatctgactgatcacatatgc

SEQ ID NO: 32484 - DNA, 306 bp, Zea mays
  unsure (1)..(306): unsure at all n locations
ttttttttttttctccgnccaagggttttttatttttgataacttcacgcgtatgtcccaatggcttgcatagaagggcaagcgcccacattgcccaatgaaaatgtcattgaggcgcttataaaaggccctattgcttagaactacatgcttagtatctttgcttggaaaaccccacaaaatcttgagaaactgcctcaaaaatggatgatatcatccgggctgacacgactttctacaaaaaaggaggaagccttcctgaaaggaaatggtctcttgggccatttttaatatattttgttggat

SEQ ID NO: 32485 - DNA, 327 bp, Zea mays
  unsure (1)..(327): unsure at all n locations
ggaaaagaagaagcattactagaatgcaaatggcgaggcgcatctatgcaaagagtgggactcggattgctcctcctccgactccgacaatgaaagacttcccgccaccgccttcacaaatcaaccctctttctccacgagcgtcacacatgccttatggcaagggagaagaangtatgtactcncaactctacctatgcttctttaagtgaggaagaatctagtgatgaggatgaaatagattattcatgtttgttcaacggcttatatagatctaagatagacacaattaatgagttaattgatgcctttgatgaaaagaaatat

SEQ ID NO: 32486 - DNA, 171 bp, Zea mays
tggtgctttctaacaactaacaccgagccttcgtggaacctagctcatgacgtcgagctctcaaaaatacattattaccatttaaatttaaatcattctttgttcatgtctaacataggactacctatttaggcgagcctaaacagccgaaacaggggtggcccaaatacg

SEQ ID NO: 32487 - DNA, 390 bp, Zea mays
  unsure (1)..(390): unsure at all n locations
tctgtancgcatgccaagcaggagagcaagttggtgcccatcatccgcataagaacataatgacgaccgacaggccactggagctcctacacatggatctatttggcccgatcgcttacataagcatcggcgggagtaagtactgtctagttattgtggatgaatattctcgcttcacttgggtattctttttgcaggaaaaatctcataccaaagagaccttaaagggattcttgagacgggctcaaaatgagttcggcttaatgatcaagaanataagaagcgacaacggaacggagttcaagaactctcaaatcgaaggcttccttgaggaggagggcatcaagcatgagtnttcttcttcctacacgccacaacaaaatggtgtag

SEQ ID NO: 32488 - DNA, 442 bp, Zea mays
  unsure (1)..(442): unsure at all n locations
atataatgagtagggttccgatcaaccacatccattttttggatatttcgcgnggaaggggaaatttattctaagaagcgtgaaggaaagtttacacggtacatcgtatactcgtatctatgaatttatcatctaaaaactcacgtacagaaactctttagctttgaagactggaccaacaaatctataatgcgagattaacaaagttatcatagatgttttcctgtcatgagaaacgtatagatgtttcgatgtcatgagaaacgtatgcagggctggagctaacattntaggtgtgtntagaagtaaattatttcanaactatagttttgaaatactacagttttaagatgtcataatataaccataacactttntatatcacttttaacaatacatgtttgggacaaagtatcttaaaccatggtaataaagtatacat

SEQ ID NO: 32489 - DNA, 359 bp, Zea mays
  unsure (1)..(359): unsure at all n locations
cgcatgcaagcttgtcactatgagatgcgagagtttcatcncttaagcaanacnccctggccgatgagtttatattaccatgttcgagccacattccgaactgccatgacgaatgacttggccatgacggctgcattgcctccatatgaagatatagttgcttcataactcatcaaaaattgctttggatctaaatgaccatcatacatggggagctgaagtggcttgtatgatggaggccatgggatagcctgcagtactgctgccaagggagaagcatctataaaggtataggtatcatgattaaaatcatctaccatacatcctctataaacaagccgtcttgatgaatctccctg

SEQ ID NO: 32490 - DNA, 205 bp, Zea mays
agcgagatagaagtgtggtgatttaacgacctttctgagaagcatcggctttttcatcatatcgagaccatacgaatgattactaggaatttgggggttattgaaatacgggacatgacatatgagtggatgggagggaaacttcaaatcaccttgggacaaccatgttgtttggtaaatcagtattaagaaagcatttgcaatt

SEQ ID NO: 32491 - DNA, 377 bp, Zea mays
aacattcactgagctgttgtataatgatgttaagtaattgggctcccaagtgtaatgaggcctttgagcagtggaaaacattactaacaactgcaccggttttggctcaaccggatattgagaagttgtttgatctatattgtgatgcatcatgcaatggacttggatgtgttttgatgcaagagggctgagtgatagcttatgccttaagacagctgcgtcggcatgagaaacattacccgacacacgatttggaatgggccacagtagttcatgcccttataatctggcatcattatctgctatgaaatgtatgtcgtatgtatactgatcataagagtttaaagtacattttcacctatgtagaggtaaatatg

SEQ ID NO: 32492 - DNA, 324 bp, Zea mays
ttgcttttttacaacgaccaagctgctgcgggcattgagtacacaacctaacttcacttggagtatctttggcctcaataaacttttattttgccccacaccatgctaattgcttgagagaagacccatttggtctacaacatttgatatgactggaaatgattgccaactaattctaagaagagatagctcctttgaatgtctcccccctcctaacatgattgatactctcccttggtgcccattaagaacattgagaatgtcaatttaggcccataaatctgggtacccctatatatttcaagtggtgtacgggatattctt

SEQ ID NO: 32493 - DNA, 336 bp, Zea mays
  unsure (1)..(336): unsure at all n locations
tattcccaacaccaaattangaaaattcatgctacggaacctcattctgttcttatcatgcatttacgtataaaaatgaggcatctagctcttagcataccactcatgtttaaatgcctagaaagaaaatatctggtgcatcgaatgaacataatgtttttttaagacttttgatgctttatatgttttaactaacaaatcatgccaagtagtttgccaatatgttgggggcaaacacaagagctacaaaacttgtgttttggtcccaatgtgcttgtttctatgtgaaggacccaagacatatgggtacctaaaacaaagcctaaattgtttgta

SEQ ID NO: 32494 - DNA, 329 bp, Zea mays
  unsure (1)..(329): unsure at all n locations
cagcttccttcggcccttctggcttcnttctgactcccatgaataacaataggcccttggtccgaaagtatcttcatgcagagataagctgggtgaagaattgcttcaaaagcatgtaaggtaccacgaccaatgatggcgttgtatgggtattccatgtcaacaatatcaaacacaatttgctcagtccttgtgttattaacaaatccgaagggtaccggcatggtaatcttcccgagtgccacaatctgtcgccctccgaagccacaaatagggtgcgtagcatcatgaatcttgtcttcaagctcttgcatctgtctgaaggcttt

SEQ ID NO: 32495 - DNA, 378 bp, Zea mays
agcaagtgtggagttcagctctatcaaaatctaccaagtatagctgaccctctaacactcccttaaaagctattgaatcatcacttcttctaaagacagtgacacctatatcagaaaaaagacagttgtagcccatctgacataattgggaaacagaaagcaagttgtagtctaaggaatcaacaagaaaaacattggaaatagaatggtcaggagatatagcaattttacccaatcctttgaccaaaccttgatttccatccccgaatgtgatagctcgttggggaatcttggttttctcatatgaggagaacatccttttctcccctgtcatggtggttgtgcacccgctgtcgagtatccaacttgagcccccgg

SEQ ID NO: 32496 - DNA, 338 bp, Zea mays
tcaagaacttcaaccaaggcgcttttattgtttcaaaaaatactacggaagggaagggcaacccctgtgctgctgactagggtagcaaatcaacatgttcattttctcctcgaggaatatttttgacagaaaatccttcaaaggaagcttcgatccttccaaccgtgtctaaataatttttcaccttcgggtctcttgctttgaactcttgtcaatatgaccagaaataacctgcgaataggtttaagacaacccttctaattcattgcctttactttcaagacccaaagcaagcttttactcacaatgtatttggccactgaataagtttgagcata

SEQ ID NO: 32497 - DNA, 315 bp, Zea mays
agcagggtaacaagcgggaagagcacatcacagctagaatgtgatgaccacttcaagaccccttggagctgctgcatatggacctctttggacccggtcgctatctgagtataggaggaagtaagtttggtctattcagtggtgatgacttttccccttcacttgggtgtctttttgcggaaagtttaaacccaaggaccctaagcgcttctcagagagctcatatgagtttgactcatgtgataatataagacactacggccccaatcagaaccttaaggtaggagttcttgaaaggaagggtcaacactattt

SEQ ID NO: 32498 - DNA, 154 bp, Zea mays
aaaaatttccgaagaaaaataaaaaccagaaattcactattggaccttgaagtgacgatgacacttttgatgacatagatgggaaaaagaagtcaagaacccagctttggtgatgtgatatctttcagtaattgatcgcttaaaacgtttgttc

SEQ ID NO: 32499 - DNA, 284 bp, Zea mays
tttttgtttttaggactacggggggatctttttggaagttggatatggataaaaatggactgggtgctttgctattaataatgatatatataatacacctccataggcgacttctatggtgctctgttagtcaaacccacacggcctaatgtctatacaacactacagtggcgtaattacacttatacgaatggcgcctaagcattaacacgcctacaagtttagcacacctagtcctaaacctttataccccgagtgtctataccgcggacgtacttaggaag

SEQ ID NO: 32500 - DNA, 341 bp, Zea mays
  unsure (1)..(341): unsure at all n locations
gcaagtgagcatgcgtgttaaccggcctcttcttttgcacaaccaaccaaataaagtntgtcgtctaatacacccttaaaagctagtgaaccatcacatcttctaaagacagacacatctacatttgtgaatagacaatcatatcccattttgcataattgactaacagataacaaagtatatcctagcgactcaactaaaaacacattacaaatagagtgctcagatgaaatagcaattttacctaacccttttaccttgccttgattcccatcaccgaatattattgaatcttggagaaccttgttcttgacgtaagagagaacatactcttttcccct

SEQ ID NO: 32501 - DNA, 249 bp, Zea mays
ccggagaggacggttgatttattggaactcatccatactgatgtgtgcggaccaatgagtacgacagctaggggaggattccaatacttcataaccttcactgattaattcatcatatattggtatgtctacttaatgaaacaccagtttgaatccttataaaagttcaaagattctcttaatgaagtagaaaaccaccgtggcaagaaaagtaatacactgcgtacagatcgtggtggtgaatatttg

SEQ ID NO: 32502 - DNA, 402 bp, Zea mays
  unsure (1)..(402): unsure at all n locations
actgttcaatctttcgactttttcttgagcttcngccagngaaccttccaccgnttgaagcgcgaagtctttcttttccaaggcagcttcctgatctttaatcttctttaagccctcaattataacttcgtttttcttgtccttaaggtctttttgcatcctcaaggctttgcttagcagtgagctctgacaaaaaaaccttcatcagaaagcatcttcataacaaaacaataaaaagttaagggaagaattttaccttaaagttagaataaaacaggctaccggcgatgtgctgtcgtcggtatctgctaagatcagtttcgagcttcgggaaaccaacactcttcgataaagtgctgacaaccttcaccccaactcggtcccgaaggcatcctaaactct

SEQ ID NO: 32503 - DNA, 326 bp, Zea mays
ttttttttttaccgcaggaaaagcttgttttgtttaatagggtgcgtgccacatggatcaggacaatggtactttttgggtagattatgtgtatacctattgagatagataatgcatcaagcgcctagcgtaactgggcgacctcaatagtggaagctttggggatgatcaatgtgttatcaacatactgaaacacgggggcaagtcaccataattcaggggtgcatctagggtgggtacttatgatgataagtgaaggagtggtccaatataaagggttggaagagggatcttttgctgaattgcttgactgatacaggctagaa

SEQ ID NO: 32504 - DNA, 424 bp, Zea mays
  unsure (1)..(424): unsure at all n locations
gtagcataggctagtaaattgcgaatttttttatgcctancnacgagggcgtaggtggtacctaaatccaaaccttcgacttgtgagtatcccttggccacaagtcgggctttgttccttgtcaccacaccatgctcatcttgcttgttgcggaagacccacttggttcctacaacactttggttaggacgtggaactaaatgccatacctcgttcctcgtgaagttgttgagctcatcttgcatcgccaacacccaatctgaatcccttaatgcatcttctaccctgtgcggctcaatagaagtcacaaaggagtaatgttcacagaaatgagcaacacgagatcgagtagttacccccttatgaatgtcaccggngatggagttcacggngtgatctncgtgaattgcttggtggactcttg

SEQ ID NO: 32505 - DNA, 406 bp, Zea mays
  unsure (1)..(406): unsure at all n locations
cacatttgttttcaatactnncattacactccaagtgcggtcgttcattgttcagcttaacctcatgatttcttactactgtaggtctaacatttacactggtaatctgaagagctcaatgtgtggtcgaacaactgagctcttgttctttagttaggttcttaacctaaatttgaccttcttgcattggtagggttcgcttttccaaaatgaattccagctacctacctcaagccacaatttgtcgggatttacgactttcagaaattgaacaaaaactaacaggtttattggcaagtgtgacaatttgtttctaacaaatgctatcttttttagcaataggtatgggctaaatgccatcatatttagaagaattttattgcaatatggcataccacttaattca

SEQ ID NO: 32506 - DNA, 381 bp, Zea mays
atcttctctatgaggcacgaatggggggccccgtgccaggacattggtgctatcccatccagaaatgctaaagactattcgaaagaaatgtataaattaatgccaaattgaggcttccattggagaggcatacattctagaggaggtctcaaacttcacaacaacttatatggtgacgaactgccgagcgtgcataatccaccccctcgttacaatgatggcgacattgaatcgaaccttagcatatttcgaggccaactcggaagcgcaagtggctcgaccaccaagaccctgacacatgaagagtggcggcatatcatgctatatgtattgaccaaccttgaagaggtgacgccatacatggaacaattccttcatgaa

SEQ ID NO: 32507 - DNA, 380 bp, Zea mays
  unsure (1)..(380): unsure at all n locations
accccaccaactacccaagatgaacagaacctcgatttttttttttangngagatatagacactggagtcatggtttctaatccttgttgcatcttaaatctgacttattcatctacacaactgtattggtgccattgatggtacacatgttcccatcacaatttcagaagagaaagcccctccatatagaaatagaaaaggcacactttctcagaatgtgatggtagcatgtgactttaatctgaacttcacatttatatcctatggatgggaagggtctgcttcagacgatggagttcttcgattagctattaataagggtttccatgtgccagaaggaaaattctaccttgtggatggcggatatgcaaacacacca

SEQ ID NO: 32508 - DNA, 362 bp, Zea mays
ccactcacggattccatatcatcgtcaatttcatttactttctcttggaacattctttcttcctctgtgtgaataaccaacggtaaaccatgaaaagcttgttcttgactccagtacttatcatcatagtacccacgtgcttatgaatccttggcaacaatatcattgaacacttcattgtaatctttaaatgaaaggcgattaccatcgttgctccctcgccctttgttaaattcctcataagatgcagactattgtaacaagtatatatgaaggttcaggaactattagctgatctttacatcaagcattaattatttataccatacaatgtacttaccatcagcgtctctgctttttct

SEQ ID NO: 32509 - DNA, 354 bp, Zea mays
  unsure (1)..(354): unsure at all n locations
tagacacgattcttttatattaaacttagtggatcttttattcttaatttgatttggggcttcatgctcaatttggcttacatgaaatgatggttcttgagttagcactgagaaaagccctacgtgacactggggtgtcacagccttccccccttaaaggaatctcgtcccgagatttgggtcggagtcctctccgggtgaagcgaagggtgaggcttacttgaagtgggtgctttatttattaagacaagctgctcttcgaatgtcattctctttgcaactttagaaggaagtccgnttatctttagttctataattgactcattctactttaagatcatatttctgaaattt

SEQ ID NO: 32510 - DNA, 298 bp, Zea mays
acaatgactcagcctgctgctgtgcataggttcaccaaaatccaaccttcgacttggaatatccttggcacaagcgggctttgtccttgcaccacacctgctcatttgcttgtgcggaaacccactggttcctaaacattttggtaggacgtgaactgaatgccatacctattcttgtgaattatgagctcctttgcttgccaccacccaaccgattttgtatgcttctctccctgtgggctaataaggaacaaagagtatgctcacaaaaatggcaacacagactagtattaccccc

SEQ ID NO: 32511 - DNA, 421 bp, Zea mays
gagaacaggtgataggtctaaccaatgtacaattttaataatatagaccttgtgcagcttgtcaagcaggttaacaagtgggaggagcacatcacagcaagaatgtgatgaccacttcaagacctctggagctgctgcatatggacctcttcggacctgtcgcctatctgagcataggaggaagtaagtatggtctagttattgttgatgacttttcccgcttcacttgggtgttctttttgcaggataagtctgaaacacaaggaaccctcaagcgcttcctcaagagagctcaaaatgagtttgagctcaaggtgaagaagataaggagcgacaacgggtccgaattcaaaaatcttcaagtggaggagttccttgaggaggaggggatcaagcacgagttctccgctccctacacacc

SEQ ID NO: 32512 - DNA, 405 bp, Zea mays
tgttatggattgcttgtgagtcagtcctgtttccttcggcccttctggcagcttcctgacttccatgaatagcgatgggtccttgatccgaacgtatcttcatgcaaagataggcagggtgaagaattgcttcaaaagcattgagggtgccacgaccaataattgcattgtaagggtattccatgtcaacaatgtcaaacacaacttgctcagttctagtgttgttgatgaacccgaaggtcactgacatggtgatcttgcccaatgctacaatctgtcttcctccgaagccacagagaggatgtgtagcatcatgaatcttatcttctggctcttgcatttgtctgaaggccttagcaaatatgatatcaactgcactgcctgtgtcaaccaagacattgtgga

SEQ ID NO: 32513 - DNA, 238 bp, Zea mays
gtttttgcacagagagggtgttactccggtgaaagagatctcatgtatgcttaggctaggcaacacccaactgttaagctaaattctaataggtcagcgaagcatctctttaaaaattaaagatgtgatgcaatagtagaaaatggcactcattctggaattatgacaacaatcaagctgagggatagtttggattaaagactctagccctttacaattttaaaatttagtgggagtc

SEQ ID NO: 32514 - DNA, 377 bp, Zea mays
  unsure (1)..(377): unsure at all n locations
cagctcgtcgagcatgtaaacaggtgggaagctctcatcatgcaaaaattgtgatgaccacatcaagacctttggagttgcttcatacggacctcttcggacccgtcgcctatctaagcataagaggaagtaagtatggtcttgttatagttgatgatttttctcgcttcacttgggtattctttttgcaggataaatctgaaacccaagggaccctcaagcgcttcctaaggagagctcanaatgagtttgagctcaaggtgaagaagataaggagcgataacgggtccgagttcaagaaccttcagtggaggagtaccttgaggaggaaggaatcaagcacgagttcttcgctccttacacaccacaacaaaatg

SEQ ID NO: 32515 - DNA, 350 bp, Zea mays
  unsure (1)..(350): unsure at all n locations
tactacgagaccgacactttattaacttccacctccggctccgacgcgcccttcgtaacttctaagcgccatgagcgcaagaagtgtagttagattcccctacgctaccctcgcatttctaaacatacacctttactttacgttccattaggcgaaccaccaacttttgatggtgaagattatgctagggggagtgatttaatgcgatttcatctaacctcactccacanaagaatatgggatgtngttgagtttggtgtacaggtaccatccataggggatgaagactattatgtggatgaagtgggccaaatgagcacttcaacttccgagccacaacaatacttctc

SEQ ID NO: 32516 - DNA, 325 bp, Zea mays
ttactaatattcattactatgctctcatcaacaccgagcccacttgcttcaatgtgcaggtaaaatactctttgctcaggcattctttacttgtctattgtacacaatttcaattctgttttgggttatacaacgttgtctcttgtcagtccctgtcacatgagcacccaacctacactgaatctaatatcaatgatgaccaagattaatgttggactcttatgtagcatctatgaattagtcgaatgatactatggaagatattggtggcttatctttcagccatcaacttgtctttacctttggtcactactgaattaatatc

SEQ ID NO: 32517 - DNA, 268 bp, Zea mays
  unsure (1)..(268): unsure at all n locations
aaagggagaacacgccgananggggtagaggtatgttcattttttataaanananaccgngngcagcttgggagcatgtaaacaagtgggaggagcacatcacaacaagaatgtgatgaccacctcaagaactctggagctgctgcatatggacctcttctgacccgtcgcctatctaaacataagaggaaggaagtatgggctaattatcggtgatgatttttccgcttcacttgggtgttctttttgcaggataagtctgaaaccc

SEQ ID NO: 32518 - DNA, 108 bp, Zea mays
gacatatgaaaaagtcaaggctgacttataattacaaacattcaaatagacgatggagatgcagtgctagtctcgagacaatataacaaatacttggtcacaaaacat

SEQ ID NO: 32519 - DNA, 457 bp, Zea mays
  unsure (1)..(457): unsure at all n locations
taatgatgaattggctagtcttaatgctcaacttaagactagcaagaatgaatttgacacgctannaaattgcaaggggatgcctacactattggtagacaccccttaattaaggatggacttggctacaagagggaagccaagaacttgacaagccataaggctcccatctccgccaaggaaaaagggaacgcccctatggctagtagtgtgcaaaagaaccatgcctttatgtaccatgatagaagacaacctataaatgcttataggagttgtaatgcatataatgtctttgattctcatgccatggttgcttctagttcttcttatatgcatgatagaaatgttggtaggagaaatgttattcataatatgcctaggaaaaatgttgttaatgttcctatgaaagtaaatggaccttctacaatatatcatgctttaaatgcttcttttgcta

SEQ ID NO: 32520 - DNA, 374 bp, Zea mays
  unsure (1)..(374): unsure at all n locations
tcacagtgcacaagagcctaaaatttattttcgtgagtggttggccagaaagcgtgctaaatgagtntgcggtatggccgtatttatacgctcggtgcgttgaaaattcaaagaccccgcttgtcagtgaatgttgctattctagcaaagggaaggtgttttttcggaccttcggcgtaaagccttcgtccaggtcgcaatctgaattcgttattataaacaaattaatattgcgaggggctactgttggggaccttcggcatccgaaggtcctcaaaaacaggatttaacagtgtttctggagtacaatgtgtgagcaggtatcctcggacaagtcggcgttgctgtaaaccggaataatacgaaggttgata

SEQ ID NO: 32521 - DNA, 464 bp, Zea mays
  unsure (1)..(464): unsure at all n locations
tagttgccgtccctagaaatgtggcacagtcgcctatgttattcttcttttgatgtcgntcagcaagtactcagtagcaataaattaccttgttccttgtactcaagcgaaaccatagtttgtgattcctgtcaaatggccaagagccatcaattgccctatcaaagatcgttgagtaaatctatgtctccgttagaacttattcattcaaatgtatgagggcatgccattgattcttttgggaattataagtattatgtgagctttattgatgactatagcaaattcacctagatttatcttcttaaacacaagtccgaggtggtgtgataaattcatgagtttcaacaacttgctgaacgacaactataacaaaaaatcctagctatccaatctgattggtgaggagagtatgagcacctaaatttcttttttagcanaattggcatagctcatcatgtctc

SEQ ID NO: 32522 - DNA, 412 bp, Zea mays
ctgcagctcggattatcctattaataataagaaccatctcttatttatcccgcgaccaggagtcggtcttgtgtgccaccgaaccacctccgacaattatcttcaacaacgcgcgtacgaccaatggctagctgacgtcaccgaacggtctggtgcccgtcagctataaaaggtggccaattagatctcggactgatggcacacggacctagtccaatgctcccgtggataggaagctttctattttccatttggaggaggcaacgactcctaggcccattcgggctataaaaggacctcttagatgctttcaatcaatacccaatcaccttaagggcataccaacactctaaaactttgtgaccacgtcatctagtgttatagtgagaatgagcaccagttgtggctattc

SEQ ID NO: 32523 - DNA, 494 bp, Zea mays
  unsure (1)..(494): unsure at all n locations
ctaagcttcgtgtgctgaacgcactgctgacgagtagctggttgtttggcacttgcataggctctcaagaccagcaaacgtgaaatggcggtcgccacgccgggtgagcaaccgagcactgctgaccaattgtttgccactgctgatgatttactgttagtagactattagttcgcattgctacccaggcatcgtggaaaaagaattcaggaatcgctggcacatttgctagtcgacatgtgtgttatattgaaccagactagcacatgttcatgaatctggaatataggtggatatctcataacttatattgttacaggtttggcatatcaaattacagtagctcttcgatttaaagaatgacgcttatgtagcagaccttttagcctttatttaatttngctctcagtgatgctaatgaatccagcaatcgctaccatggttgctactgggatcttgtatattgaatcagaacagcaaaatatcatatattt

SEQ ID NO: 32524 - DNA, 440 bp, Zea mays
  unsure (1)..(440): unsure at all n locations
gtcacctgcggctgcaagctttgatgagagatgctgtcgggaaggctaagcattctgcggtggctgctgctgncaccgatctggctggggctgttatagctgatcatgtgccaatggatagtccagagttgatgcaatcgcctgatgataactgtgagaaattgaagcagctggctgctattccagaagcttcacaatctatcgcagctggtcgcaagcgaaggacgagcatcatggatgaaaactccttggcccgtgctgaaaggctgaaggctgaacgtaatggaggtaacagcccatctccctcctctatttcantgtaataaagtttgcaaattcctttgaacttggctatttcgaatcttgacgcgattggtatctctctatgtgtagaggaatcccatttagctaagtcaatccaggttcttaatagctatgat

SEQ ID NO: 32525 - DNA, 432 bp, Zea mays
  unsure (1)..(432): unsure at all n locations
cctatgaaactcagcttacggccttccaggaagctacctaggggctnggatcgagctgttgttgtacttgaatggttcggccacggtggttgtccttgggcggctctggcgggtcgcggagaggtcgccggagctatgggcgagctccacggagtttggcgcggggcaaaggatgcaacggagaagacagccgggctctgggacacgctttatagccgtggcgcgggcgtggtcacaagcggccgcgggcgcgcggnggttcgcgcacgggcgtgctctgagcgtgcccccgagtgtcagcccgcgtcgaacacgtgggagcttgcttccaccatggttcaacggcagatttgagcaccttagcgtgcatatcttggcaaaaccactgtgtacgggctcttncctgcaccatatcctacctttntgatgtga

SEQ ID NO: 32526 - DNA, 433 bp, Zea mays
aatcaacaatgaagtctgctaacgcctgtgactgaattgaagatctatgtacatagtcaatactgaattcgttaagctccgcagcccattctccaattcttcctgtagcttctctgttcctcattatgtcctttagaggctgtgatgaaggaacagttatgtgatacgcttgaaaataatgccgaagcttcctggaggccattaacacagcatacaacaccttctccaattctgtataatatttctttgataaacttaaaactttggagatgaagtacattggagccagctttttgaattggccatctagcttctcgtgacaactgccgactaactgttagtgcgaactgccaatataaagcaatggagccctggcgaaggggattagtgttgtagacaatcaagtattgttcaactctcgaaagcttttgtg

SEQ ID NO: 32527 - DNA, 462 bp, Zea mays
  unsure (1)..(462): unsure at all n locations
gcttagagttcatccatatataatcttaaagcatgcaacatttgtatgctcacagaataaacgcgagaaccttgaaaagaagaaccataccacacagtactatcgatgagaagccgtacacctgcagtgacaaaaggcattacatagaaaaacaaaaacaaaactcggttggtggtaggatcccatgttaaatataacatccaaacggatggctattaaagtttttatattgcttaaatagaacatttaagttacaaatgtctacttcaagaccaaaatccataacaaaattatgcggaagaggttaaataacatcattcaacacggaaacattatacattgcctttcacaccaccaacaacaaaggtttttagtaggctagagttgaaactcgacagaagccataaatcaaggttcaggcaggaacttgaatagttgttnttcattcactcctattcaagt

SEQ ID NO: 32528 - DNA, 469 bp, Zea mays
  unsure (1)..(469): unsure at all n locations
ctcaagctggatattattgttattgaggagactttctttgaatcaatgttctttgccctctntacagccactgttattggtatttcgtccactgatttgcattntgaaatgccaggttctttcttttctgtgttaacactagcatcatttgactctngttctggcaaagagctcaatgattcctgngcattttctgaaatggtgttgctgtcatcagcaagcctattttcttcaggtgcgcttgcagcattacaagcatttgttatcactgcagaaaaaaagaccacattcaggtattagtcatccaaggaaatgtgtacaacacagtgaaaggatgctgaccaaagttgaaagataatcatgtgctgaaaaaatcaagtgttgacagacacattaattaggcataatccaggtcacatgaagggactgtttagatgacctcactaaagaaaagaaaccaaagcttaat

SEQ ID NO: 32529 - DNA, 481 bp, Zea mays
  unsure (1)..(481): unsure at all n locations
atccttaagtcacctgcggcatcaagcttaggattaaaaactaatattcagaaaatcttttgtatccaattcgatgtggtcaggaagagctggtcaccctcaatgattggctcccctgcgatctctcgtctttcccctgcaaataccttggtctgcctttgtctctaaaaaggctgtccaaaaatcagatgcagcccattattgacaaagtggctgatcaactttctgggtggaaagcggatctcatgacaagggcaggcagaagagtgcaggttcagtatgtgatgactggcatgcttatatatctagtcatggcagttgacatacccacagcctcgctcaaagctattgacaagatcagaaaaggttttctctggcgtggaaggaaagaggtcagaggaggacattgtttagtagcttggggaagagtctgtagacctctggaaattggtggacttggngattctagtcttaaagaact

SEQ ID NO: 32530 - DNA, 461 bp, Zea mays
  unsure (1)..(461): unsure at all n locations
taatcccgagaagtgtgtctctggtgttccccgaggcatgctcttgtggttcatcgnctccgagcggggcatcgaagcctacccggagaagatcgcggccatcaccagcatggggcccatcaaggacttgaagggcgtacagagagtcacgggatgtcttgcggctctgagccgcttcatctcacgccccggcgaaagaggcctgcctctgtaccgcctcttaaggaaggctgagtgcttcacttggacccctgaggccgaggaagccctcgggaacctgaaggcgctcctcacgaacgcgcccatcttggtgccccccgctgtcgaagaagccctcttgatctacgtcgccgcgaccactcacgtggttagcgccgcgatcgtggttgagagatgagaagaagggcatgcattgcccgtccagaggccagtctacttcaatcagcgaggtactgtccgag

SEQ ID NO: 32531 - DNA, 428 bp, Zea mays
  unsure (1)..(428): unsure at all n locations
agctngacaatgaggaaatggcgctcgtcatcaagagcttccgccaaatcctcaagcaaaggagagggaaagactacaagtcccgctccaagatagtttgctacaagtgtggtaagcccggtcactttattgcaaaatgtccattatcaagtgacagtgacaggggcgacgacaagaaggggagaagaaaggagaagaggtactacaagaagaagggcggcgatgcccatgtttgtcgggagtgggattccgacgaaagctcaagcgactcctccgacgacgaggacgccgccaacatcgccgtcaccaaagggcttctcttccccaacgtcggccacaagtgcctcatggcaaaggacggcaaacggaagaaggttaaatctaactcctccactaaatatgaatctactaatgatgataatgctagt

SEQ ID NO: 32532 - DNA, 452 bp, Zea mays
  unsure (1)..(452): unsure at all n locations
ttaatatgtccttggtccttggcaccattagagccataagtcttgaccacgagattgtgagtggtgatttgtgatagaaatatgaagatcttgtagagacctgttgtatcctctctactcctgatgatttcttcgtatgagagcagtaatatctattgttgaagatggatcctaagaggataccagtattgtttcgttcttgccaagcagttatcatcatttgcttcatcaaaagctagttatatggtgatatttcccagataaaatgaattcttggccttgtctgttctattccaaagcttctctttttgctgaacaatgaagagatcgaaataatgctatatagaacaatttggtatataatatgaggagaaatgtttgccctgctggcaacaccacaaataattaactgttggtataagntctctctcaaaattattatacctagaaat

SEQ ID NO: 32533 - DNA, 441 bp, Zea mays
  unsure (1)..(441): unsure at all n locations
agctntatcaaatggacgtcaagagtgccttcctctttggacgaatcaaggaagaggtctatgttgagcaacctcccggctttgaagattgtgagtaccctaaccatgtttataaactctctaaggcgctttatgggctcaagcaagccccaagagcatggtatgaatgccttagagatttccttatcactaatggattcaaagtcggaaaggccgatcctacactctttaccaaaacacttgaaaatgatttgtttgtatgccaaatttatgttgatgatattatatttgggtctactaacgaatctacttgtgaggaatttagtaggatcatgacacaaaaattcgagatgtctatgatgggggagttgaagtacttcttaggatntcaagtgaagcaactccaagaaggcaccttcattagccaaacgaagtatactc

SEQ ID NO: 32534 - DNA, 472 bp, Zea mays
  unsure (1)..(472): unsure at all n locations
ctgatgtgtggttgcgttctgctttgtcatataacangcgtanaggaggaaggcgtgctcatcaggagcgagccgctccgcaggatgaggtgccccagcagcagcacctgccgcccccgcccccgatgtcgattgagcagatgtttctgatgcagactcaggcagttcaagccatcggtcagactctggccgccattcagcagcagcagcagcagcagcaagcaccaccccagcctcagatgcctcagatgcctagagataagcgtgctgaattcatgagaggtcatccaccaacgttcgctcattcttctgaccccatggatgctgaagattggctgcgcactgtggagcgggagttgcataccgctcagtgcgatgacagggagaaagttctgtatggtccccgtctggtgagaggagcagcccagtcatggtgggagtcttacctcgccacccatgccaaccccgacac

SEQ ID NO: 32535 - DNA, 450 bp, Zea mays
  unsure (1)..(450): unsure at all n locations
atcttcaggcgcgacaacctntgtctcaatgggtgctgaaggcccagctttggcttcggcctggactatggaagcttcagtaattttcttagaaggagcagggctcaaggcctttgtggtctccaaaatagcgtctagcacgctggtcattctccttctcttgggagttgcggcaggagccttttgcgcttttggcaattcttcctctgctggtgggcttagaacttctgngcattttactgtttttccacttttggctctttggccgtatcatccttggcttcggctggcccgactgtaggcaccttcggcactacaatcgattctacagcgctctgcacattgggagcagcttgttttgcttcggcagttgaagaagtcccttcgccaaattcaggcactacgaccggttcaatatagagcggccgatgggtcagaacctttattttc

SEQ ID NO: 32536 - DNA, 459 bp, Zea mays
  unsure (1)..(459): unsure at all n locations
tcctgcttgttcatccatatttttgattttctgagtagcactccaataagctcatgagctctaaagtagccactgcatccacaagagaatctatccttggtaatgggaattcatcctttgggcatgccttattgagatctatgaagtcaatgcacattctctgtttcccattagattatttcttcatcacagtgttggccagccactctgggtattgtacttctctaataactccggcactcagaagccttttgacttcgttccatgctccttnggctctatcatcgaacattttccgaagcttctgctttctcggcctgatggcacggtctacattgagtgaatgctcaatgacatctctgttgacaccacanacgtcattgcctgaccaggcaaaaacatccttgttattgaacaaaaatctcaacagagtccgctcctgttcatcagataattggg

SEQ ID NO: 32537 - DNA, 426 bp, Zea mays
  unsure (1)..(426): unsure at all n locations
actcgaccggatccttaagcaccgcagctgcaagctggtaggataactaatatcacacctgaatcgctngatgggaaaacacaataaagttgtactcattgcctttaaattgtggtgtgtgctttatctagacaaccccaaactcgtcgactcacatgttggctcgaggatcaaaccatatataatcaaagatcacacacattagacacttcgacctccaaatatatactcagttatatattcaagaatatcataataattaagaacttcattatcagctttatttacacttactgctactccattaatntttgtggctgtaagtagacatattgcttcaaatttttctgttgaaaaatggtaccattaatatcataacgatcaaattgatttttcatcaattaaccatatgatatttgagcaagt

SEQ ID NO: 32538 - DNA, 479 bp, Zea mays
tagaagggttttatatatatcttatggaaaggctttttccttccaattattgtagttaagttatgcccttcgagtactatcaggacttgtaataaatacatctcattctaccatgtaaaacttgagttctggaaggtaaagtgtactttgtaaaagtcttctgctctatctccaatgtgtgtgtatcaaatgtgattactgtaatatacttgttatgtgggagatccttgggatgatgagttccagttggcgaactcgatagccttgttaagttacctggtacacgtggacagccatctgaggctgttaatggcaaggggtggtgcatgtgggcctgataacttgggagggctgtcatagctttctcgacccgatatggtttatatgatttcatggttatgtcatttggactaactattgcaccgacctatattatgaatctgttgaataaggtgttcatggagtatcttgacagattc

SEQ ID NO: 32539 - DNA, 462 bp, Zea mays
gcttattgtctttctcgagggactccatcttccttctatgagattacgacatataatagacttgaaaacaggtattagtctcaaagacttacattatagagtaacctcccatgtaagtatgaatacaagttttgaatacttgtgggagacatgcactttgattttgatataaaaaggggctgattatctataatctgagttttggcacatatcaagtaaatgataccaattgaggtattataccactcgtagtatatcaattgtagtatatgtcatataaaaatacaaattgatgtatcatttcttaggaatgttaaataagctacgtgtcgtgcttaactaaacattataaatcatgtaggcttgctcaagaatatgaattgaaagcgagcattcctaccatatgattgaccaagtatgcatgcatatataatcaaaagtaaatatcacacgtaaaacaag

SEQ ID NO: 32540 - DNA, 467 bp, Zea mays
  unsure (1)..(467): unsure at all n locations
gtcattctcgctctcggtcaaatccttgatggccagcatttcctccagcctcatcttgagatcctccgattctagcgtgattntctctctctcgtcgttgaattccttggcagctgcctcctttgcctccgccagcgcgcctaattccttcgtcagcctctcaacctccgctgcagacttgctacacttttcctccgcaaccaaaacctccgactgaagcttatcattttcagccttcaagcttctccccacctcttccttgtggcttgagatcgcctttgcctcctccagttgcttctccagcttggccttctcgcccatcagctgggtaaatttgtgctccagttcccacaccctgtccccaagtgtggagacctggtgcgatagggtcctcaccctgtcatctgtgaagagatctgcaacacacgtacggtacaatttagagaagagagctggtactacacaca

SEQ ID NO: 32541 - DNA, 481 bp, Zea mays
  unsure (1)..(481): unsure at all n locations
gcgacactccagaatacttaagctntatatggacgacgggggtcgacctccgctaaatggtctgaacctggagatttgtacttctttacgcctgatatggtgatggacgccgaggaaaaggttcagaaaattattcataatatgaagaaagcacaagctcgtcagaagggttatgcagacaaacggcgaatgcccttatattttcatgaaggagactatgtctacctgaaagtttcgcccatgaacggagtatcccgtttcggggttaaagggaagcttgcacccaggtacattggtccattcctggtgcttgagcaatgtggaccagtggcataccgactccaactacccgaaacattgtctgttgtgcataatgtgttccatgtgtcacaattgaagaagtgtcttcagggtcctgatccaaccgttgaagtgacagatgttgttcttgagccagacttgacatattttgagcatccta

SEQ ID NO: 32542 - DNA, 420 bp, Zea mays
  unsure (1)..(420): unsure at all n locations
atccttaagcaccgcggctgcaacttgcttgctgcgcttcactgtggtagttatctctctttgcccagcagcctcaggccggaggcggtcctccgatcctcctccatgttggtcctgcttattaccagtaccagctgcacccaggttgatgagtacgtagctacctaatgttaggttgtcttcaacagctttcatatcttatctcccgctctacctcatgtttcagatttcactccgtaaatattactgtctacaacgggaaacagagtgttttccacggctcagggacgtccctacgcaagtgtggcacgtgcgatcgcacagggtcctataggaacacccccccacacacacacaccanatatattgtcggcgtttcgagacagggggtccctaagccgacgagtgagtgtgctgcgt

SEQ ID NO: 32543 - DNA, 482 bp, Zea mays
  unsure (1)..(482): unsure at all n locations
tagagaaatccgggataaatctgtgggtatagccagccagtcctttgtttcttctaacctgatgcacagtggttggcggtttccattctagaatatccttaaccttgctgggatcaatcgcaatcccatttacagataatacatgtcccagaaattggatttccttcggccagaatatccttagcatataattgatgttcccttaagcgcgttaatacgatccgtagatgttgagcatgctcctcttcattcttggaataaatcaagatatcatcaatgaagaccaccacaaacttgtccaactcgggcataaataccgagttcattagatatgtgaagtgggcaggagcatccgtcaatccgaaagacataaccaaatattcgaataatccgtaccgcgtagtaaatgcggtcttgggtatatcttcngctcggatacagatctgatgatagcccgacctganggtcaatttggagaatac

SEQ ID NO: 32544 - DNA, 430 bp, Zea mays
  unsure (1)..(430): unsure at all n locations
gcttatcatgagtggagatatggactctacattctatatactgttgagtggtatccacaagtgataaaggtatactctacaatcttgtggctgatataattaaccatcacactggtatttccacggaaaaaatatgacagatgttatctctcaaataattttcctagcttgtgttacagataatgcgttcgtcatacattcagtccttgtttcctgaagaacttctntataatctccgcgttctaagaaaaaattctttcctttgcaggatgagaaatcggttatttggttactactccattctcaaagaatcatagaatatatcacggtaattctctgaatattcagaatttagttcctgtggttcacgggtcgcactacttctctgaatatatcaaggtgattctacacttcattgctgcattgcata

SEQ ID NO: 32545 - DNA, 303 bp, Zea mays
  unsure (1)..(303): unsure at all n locations
ggaaaatcttcacagctgtcaagaagatgctcctcgatgagaaaaaaggcaaatggaccgacttggtaccggaggcagtctgggcgctaaacacaaccgagtgcanggcgaccgggttcactcctttccgccttctatacggatcggaggcaatgacccccgcaagaaataaagcatgggtctncgcgcacagctccgtcagccacccctgacgtggatgagccaacctccaaagatctcattgacggagaccgggtcttcgccctgcaggccttaaacaaataccaagcccagaccaaagca

SEQ ID NO: 32546 - DNA, 371 bp, Zea mays
gtgcagcttgtcaagcaggtaaacaagtgggaggagcacatcacagcacgaatgtgatgactacttcaagacccctggagctgctgcatatggacctcttcggacccggcgcctatctgagcataggagggagtaagcatggtctagttattggtgatgactttcccgcttcacttgggtgttcttcttgcaggataagtctgaaacccaagggaccctcaagcgcttcctcaggagagctcaaaatgacgttgagctcaaggtgaagaagataaggagcgacaacgggtccgagttcaagaaccttcaagtggaggacgtccttgaggatgaagggattaagcacgagttctccgcttcctacacaccac

SEQ ID NO: 32547 - DNA, 426 bp, Zea mays
  unsure (1)..(426): unsure at all n locations
tctgaaactaagctaaactagacttgtcagtntgagcccgagttaagctctcttactctctttgttggcggntatctcaactaggttagacaagccctagatgcaatacaagaaatttatatatgcaatgcaagcttgacaacaccatttgacatcttaaataaaatttctgagatcaagtatatttaattcattcctcaacatgcaaaagcgggtcttatcaagtggcttagtgaaaatatccgctaattgatcttccgacctcactccttctaaaatgatatctcctttcgcaacatgatctctaaggaagtgatgacggatatcaatgtgcttggtgcgagagtgttgtacaggattattggcaattntaacaacactctcattgcacacaacanaggaccttttctgaactacccatagtct

SEQ ID NO: 32548 - DNA, 188 bp, Zea mays
tttactgcctattctgtggtgaagacaagggccataccatcaggaagagccacgtctccttcctgaagcaaaaagagagagcagaagcaatagcgcaacaaagtccgccgaagacagacatgcttactgcctcggatcattccccttatattccataataatgaagcaaccaccctgcagcttctgtt

SEQ ID NO: 32549 - DNA, 407 bp, Zea mays
  unsure (1)..(407): unsure at all n locations
tgcttcggccgaggggtctttatatcttcagaagattatgctgttctctgtttgtgccaaggatttcacatgatcacagcctctactcgccaaaatagtggcaatccccctagcacccgagaaagcacatatgtatccgcggccattcaaaacttcctcaaaagcttcggcttcatggctggtccattcaattgggccctcggggtcgccctttacgaaattttcctcgcttcaatacgcgccaacgttggcgaagctagtttttattttttaacacactctatagacttttcataacacctttccttggatgcacgaagttcttcaacgttnttctctaaatgatttgcccattgttcactgatttcttgtttagcttctgcaattgcgcatctttctttagcttc

SEQ ID NO: 32550 - DNA, 207 bp, Zea mays
tcctcaggctcgggcgaaggtaccttgggctatgccgacgctttctcgggctcgggcgtgtcgtcaatcttgacggatggttgatgtaggtctctggccaagacgtctatgggaaccatcgtctgcccccaagctatcttcaccagctcatccgcagtctcgttgtaccgtccggcgatgtggttgagctccagcctgtagaacttg

SEQ ID NO: 32551 - DNA, 404 bp, Zea mays
  unsure (1)..(404): unsure at all n locations
ttgccanatggggcgcatnattacacctctgatatcttctcgtactgacaggtcattcttcacataaaaccattctgtcatccagtctccgggccatctcttccgaaaggttggcacgggacagcttgacccgaaccgagaaacgaaactgtagcagccaaaattattatgatactgttccttaccccaaggttttgtttcgtatgataattcgtgtatattgcagaagcattttgcatcaggcttcagaccttggcttcttacggcccacacgaagatattcagccttatgattgcctcacgggtaagttggtgaagatagacttcgaagattatcagcacctccacaacgaagctgcttaagggaaatcgcagtccagctttcaaaaagcttcggtacacta

SEQ ID NO: 32552 - DNA, 411 bp, Zea mays
  unsure (1)..(411): unsure at all n locations
agctntaccctatagtctggattataagttggttactgtaggtgtaccttatgcagntgaccatttccagcatttgcgtaatgaggactctagggagaagcctcgtagtgagaccctggccattcaccttggaagtgaatacgggtctagctaacccggtctagaagggaatcgcgactcatgggtaaaaatgcgccacctctgcagagtgtaaaactgatatatcagtcatgctcacggttatgagcagcctggactcctcacatgataattgaacttgaagatggaaataaattgagatccgatgatctgccaatggtttgcttaagtggtttcacttaagtggttttgatatactcttataccttngtttaatgggaatacttgggattcacacttattagtaagaca

SEQ ID NO: 32553 - DNA, 435 bp, Zea mays
  unsure (1)..(435): unsure at all n locations
nttgaacatgggcagaagaacacctgcacgtgttcaacacgctctgtgcgcgccagagcacgcccgcgcccgaccccgcgcgccccgcgccacgccaagccgagcccgcgtcttctgctcgcgcccgcgtctataaatcgccctcaggcgtcgaccgtactcctccgcgcacgctcgacctcaccggagccagaaaccaccggagtttgccccgcgcacggggtgcctgcggtcaaccgagcccctgccaccgtagaccggccaacagagcccttcccagccacgctcgacctttggaagagaccgtgcatgccttggtgaagctccccgagcaaggaatcagactttgcttcgccggagaagccagtccacggtcgccagacttcgcccgaccgccgtgaacgtagactgggtaaatctctggcgcattcttcg

SEQ ID NO: 32554 - DNA, 460 bp, Zea mays
  unsure (1)..(460): unsure at all n locations
agctnggaggcatcgattggaagcctacttgtgtatactccttcttctcttccatcgctttgaatgcgacgggttgcacctcgagtgtggaggtggcgccttgctccaagttgatgatgtgtttggagtctttgatcatgttcaatggattttntttatatgctggtacatgtacatacacgttgaanaataatcatagaataaataataaacagtttcggtgaatcaactaaataaaaagggactgaagataagacgtaaaataatggagttgtagttacgtgatgactttgggatctttctatccatcccatgcatgcatgaatatggttatttatctacaaaggttggccgcatgcactgtgatccaaaatattcgtgtgattatttgaccataacaacctgagcaacgccaatcatttaaattaaaaggcatccacgtacatgtatggagtcctta

SEQ ID NO: 32555 - DNA, 413 bp, Zea mays
actcagctgttcctgtttctgatcacgtgttaagccttttttgttgttccttttagttgcattcattttattcaaaatgtgattcgcttttaatatttctagggaacttattttctttcaatacagtggcagagcttaacaacagattatgcccaaatttttccaagtcaacatggccttcaatttatgaagtgggaaataaggatgggatcatttgattccatgtttggataattgaattgaagatagggatagataaataaagactacacccatctcatgccctcttcttttgtctcaacccatttttatttccctatccaatccccatccaaacgttcacatacaaattatccactaggctagagtacttaaaaagtagaaagtacaacttctgatgcaacaagaagttg

SEQ ID NO: 32556 - DNA, 418 bp, Zea mays
actaagcttataaatggacgtgaaaagtgccttcctcaatggtccaatctatgaaaaggtctatgttgagcaacctcccggctttgaagatagtaagtaccctaaccatgtctataaactctctaagacgctttatgggctcaagcaagccccaagagcatgatatgaatgccttagggatttccttatcactaatggattcaaagtcggaaaggccgatcctactctattcagtaaaactcttgaaaatgacttgtttgtatgccaaatttatgttgatgatattatatttgggtctactaacgagtctacatgtgaagaatttagtaggatcatgacacaaaagttcgagatgtctatgatgggggagttgaaatagttcttatgatttcaagtatagcaactcctagagggcacc

SEQ ID NO: 32557 - DNA, 469 bp, Zea mays
gggaaaaatctagaataaatcggcgctaataaccagccagtccatggaaactctggacttgatgtatagtggttggcggtttccactctagaatatccttgaccttgctgggatcaaccgcaatccccttggcagacaatacgtgtcccaaaaattggatttcctccagccaaaacgtgcacttgctgaatttagcatacagttgatgttcccttaagcgcgttaatacgatccgcagatgccgagcatgctcctcttcattcttggaataaatcaagatatcatcgatgaagaccactacaaatttgtccaactcgggcatgaataccgagtttatcagatatgtgaagtgggcatgagcatttggtaatccgaaagacataaccagatattcgaataatccataccgcattgtaaatgcgatcttgggtatatcttcgggtccgataccgatctgatgataacccga

SEQ ID NO: 32558 - DNA, 446 bp, Zea mays
  unsure (1)..(446): unsure at all n locations
ttatcaaatggatgtgaagagtgccttcctcaatggaccaatctatgttgatgtctatgttgagcaacctcccggctttgaagacagtaagtaccctaaccatgtttataggctctctaaggcgctttatgggctcaagcaagccccaagagcatggtatgaatgccttagagatttccttattgctaatggcttcaaagtcggcaaggccgatcctactttgttcactaaaactcttgacaatgttntgttcgtatgccaaatttatgttgatgatattatatttgggtctactaacgaatctacatgtgaagaatttagtaggatcatgacacagaaattcgagatgtctatgatgggggagttgaagtattttctatgattccaagtcaagcaactccaagagggcaccttcattatccaaacgaagtacactcaagacattc

SEQ ID NO: 32559 - DNA, 142 bp, Zea mays
aatcctgacctgtaaaccttacagacttgtgttctcgatgctgtctgtactccacgctgccatgcacggacttccttcagatgatcctgacacacccggttctataaggctcaccacttgctaactatgtacgtgccaggat

SEQ ID NO: 32560 - DNA, 446 bp, Zea mays
  unsure (1)..(446): unsure at all n locations
ntctggaagccattaatacggcatacatcactttctccaactctgtgttatctttctttgacaagctcaatacttcggagacaaaatatactgggactcgctttttattttgtccttcaagcttctcctggacaagtgccacactcactgcagagtgcgaagctgccacatacaacagcagaggatcccctggcacgggtggagttagcgtcgttaggtctatcaggtactgcttcagctcttcgaaggctttctgctgagctgttccccattgaaagacttcggctgatttcagcacttcaaaaaatggtaaatttctctctgctgatctagatatgaatcggttcaaagatgccagtcttcctgtcagccgctgagctcccttctntgtgcttggcgggtccatccgaaggatagcttcgattttattcggattagcttcgatt

SEQ ID NO: 32561 - DNA, 474 bp, Zea mays
  unsure (1)..(474): unsure at all n locations
agcttcngtgaaatattttccgaagctacattccgaagatcaatattgtatctccttgtgacttagcatggtttcccttnttcaaagcattcttccgaagatcaatatcgtgtccccttcttgtgccatatgcagcatgatgtatgatgcttatgctatgcaaaatgatgtgatgatgttatgctatgtaaaatggtatttattccgaagatacacgcacatccccgcaataaaacacataatctttttaaatcagtgttgacttttcgctgtaagcctcccttaggagcttcttcgccttttacttcagcggaatcagcgtttatttttcgctgtaagcctcccttaggagcttcttcgccttttactttcggcggtattcgcgttgacttttcgcgcttcgccttttacttaggtggtatcagcgtttatttttcgctgtaagctctgcattccctttggaacgacttttga

SEQ ID NO: 32562 - DNA, 490 bp, Zea mays
  unsure (1)..(490): unsure at all n locations
tctaaagggagaancacatttgggactaacaaatgttcattntgagaaagacaggatttgtagcgcatgtcagtcagggaagcaagttggtgttcatcatccacacaagaacatcatgatgactgacaggccactcgagcttctacacatggacctattcggcctgatagcttacataagcatcggcaggagtaagtattgtctagttattgtggatgattattctcgcttcacttgggtgttcttcttgcaggaaaaatctcatacccaagagaccttaaagggattcttgaaacgggctcaaaacgagttcggcttaaggatcaagaaaataagaagcgacaacaggacggagttcaagaactctcaaatcgaaggcttccttgaggaggagggcatcaagcatgagttctcttctccctacacgccacaacaaaatggtgtagtggagaggaagaatagaactctattggacatggcaataaccatg

SEQ ID NO: 32563 - DNA, 407 bp, Zea mays
  unsure (1)..(407): unsure at all n locations
agcttgtgaagattcttcatcctaacatgggctagtcggtgatgccagagccaacccatattagtcttagcaattaagcaagtatcgagttcagctctattaaaatcaactaagtatagctgaccctcgagtactcccttaaatgctattgaatcatcacttcttctaaagacaataacacctatatccataaaaagacaattgtagcccaatttgcataattgagaaactgaaagcaagttgtaatctaaagaatctacacgaaaaacattggaaatagaatggtcaggagatatagcaattttaccaagtcctttgaccaaaccttgatttccatccgcgaatgtgatagctctttggggatcatcattnttctcgtaggagaacatccttttctcccctgtcat

SEQ ID NO: 32564 - DNA, 419 bp, Zea mays
  unsure (1)..(419): unsure at all n locations
gttgaagaatgacattgagttcattttgtcttctaagcgcgatgaagcctttgagcaactgaatacactattgaccactgcttcggtattagctcaaccggacattactaaaccttctgacgtatattgagatgcatttggcatggggctcggctgtgtactgatgcaagagggccgagtgattgcgtatgctctaaggcaagtgcaccggcatgaggagcactatccaactcatgatctagagctagctgctgtggctcatgccctaaagagttggcgtcactatctgctgggaaatatctggcacatatatacagatcataaaaagttgaagtacatcttcacccagtcagagttaaatatgacgcagagacgatggcttgagctcattaacgactatgaatnggagatccattatc

SEQ ID NO: 32565 - DNA, 175 bp, Zea mays
cacgtgcgggcgtgctctggacgcgcccccgagtgtcagcccacgtcgaacacgtgggggtttacttctgccagggttcaacggccgatatggttgacttatcattcagatcatagcagaacccccatgttcggtatcttctctacaccaaatcctacctttttgatgtgagttc

SEQ ID NO: 32566 - DNA, 447 bp, Zea mays
  unsure (1)..(447): unsure at all n locations
aaacaccatggagatatggttagtagtattagagtctaagatccgggtctacactatatcatgaaagaaaatgcctaacagatatggttaaaaacagcaaataagtcaccaagctatggccattaagagtagtagaagcaaatacctgaaatgttaggtgatgtgttaagagttgctgatgccttgttgatgaccttcagctgtcaaagttaggatccgtcagcagctactcattaatcaaaaaagaaagatatcaaagtttcgtttattactttctttgatggccatgcaagcgacatcatgtgagcagtagccatagtttgcatatcatcgtatggacgagccaacactgcatctcttttcaggacacaagtcacaacaacttcacanaattgccttccaatgggcagatctgcaactatggtactcggattagttgaaactatt

SEQ ID NO: 32567 - DNA, 300 bp, Zea mays
ttctaaattaaatggccacagtgcgctctaccgctagggtttagcgctagggacgcgaaacttaatgctccgaaactgttcccatctcctaagcaatgcaacgatccggactggtaacttcggaagaaatctcactgttaagcagaacaagcactgccgaacagaagaagaaacattgataactgatccaagatattatctattgcatgccagaaaccagcactggacttggaaagcactgtttgaaactgatcttcagatggaaagtcgctattcatgaaatcaaaaactgttccttcg

SEQ ID NO: 32568 - DNA, 475 bp, Zea mays
  unsure (1)..(475): unsure at all n locations
tcactacacaatnntgggacatctacttaattcatgaatattatcgtcacacacatcgactcgatttgaattaaccacacatgtctatcacatgaatggagcatntcaacaatatcctaaaacaaactacatcatcacacatcttgcattacaaacctacttgtccaatcgaaaatatctattcgaagtaatgaacaccaccgtacactatgtgtgatgtgaaattcaataaacgcataatgtgtattggctcgacttatacacatagaggaagcgatgactacttctgcatgtcaccacctctctatttaagcaaagacaatttccacctacaacgatcgaacattcataccgagcacaccttattttaccttgtctcgcatacaaccatattgtggcgtgcactcgagacattaccgtttaactcaacacaatcaccactacaatgcactttgatatacacgttcgatatcac

SEQ ID NO: 32569 - DNA, 403 bp, Zea mays
  unsure (1)..(403): unsure at all n locations
tcttggaatggggtttgtaatctctccccttcccgtgcttgaggaattgacggaagctcttgatgatgagtgccatctcctcattgtcgagcttggaggcgtcgatgggaagcctacttgacgtagactcttccttcttctcctccatcgctttgaaggcgacaggttgcacctcgggtgtggaggtggtgcctcgctcgatgatttgtttggagcctntgatcatcaattcaaagctcacaaactttcctatcacttcctcgagagacattagcttatatctaggatcaccatgaattaattgaacttgagtaggattaagaaaaacgagtgatctaagaataaccttgaccatttcatggtcatcccattnggtgctcccgaggttacgcacttggttcac

SEQ ID NO: 32570 - DNA, 443 bp, Zea mays
  unsure (1)..(443): unsure at all n locations
catacgagtggtgatggatgggcacagtgcaccttgcatcgcgggtgtactgtttggcgatgcaatggacaggcacgccacctgcaagatggtctggacgtcgcctgccaactgagtggatagggcacattaaatgctgaaggggcacatcacctgtcagcgggatagtcaggcggcgcatcttcttcgcaataaatgtagagacagcgcagcccagaggtattacgtcaggctccgcccgctggcttacgtcacgcgcggtaggccacgcggcagcatcgggtctccgcccgggcggngagcagtagcgctatgcggacaggtccacaccaggctgggcttggacacatgtcggcaccagaccccagcctgagcaaggcctgtgtatttttccccagagtcccgggacccagctgtgggtggtccggaccccacacagaggg

SEQ ID NO: 32571 - DNA, 425 bp, Zea mays
  unsure (1)..(425): unsure at all n locations
agctntgggaactatgcccgtatccaatctgcctgatccggaactataagagcttgccagatgccctcgttcctgtcgaccacgaccaacacccaacataagacttccctagttatttagccaagactagagccatgatagttctcatggtagcactgttttcccgggtggtcactccatgttccaattaatatgcaataatcttgtttaaccatcgggttaacaacaataatgtaaacttaccatttggaacattagtatcataagcgggagtgactgcataaagttaagttgtagcaatagcatagctacgaaggtaaagtataattcccaggtttgatcaaggaataaggttggaaaggttatctaaataggtaacccgtcaaattatgcacatatatccaaaagagtaaactttattaaat

SEQ ID NO: 32572 - DNA, 485 bp, Zea mays
  unsure (1)..(485): unsure at all n locations
gggtgccaatggagaagcagaaatccttgaagtcttggctgtcatactgcnttgccgtgtcaactgtgagttcggacggtactccgaagcggcaaacaatgttttgccagaagaatttctgtgcagtctttgatgttattgtggaaacagccctcgcctcgatccatttggtaaaatactcgacagtgacgaaggtgaacttgagattcccctgagccatgggcaggggcctgacgatgtccaggccccagcgctggagaggccatgtgtgggcgatcagttttgtgagttgcgaagggctgcctgatcgaggagaaaacttctggcatgcttcgcaggatcttgtgacccgatttgcggcgcagatcattgcgggcctcaccagcggggtactggttggcgatgttgtgcacctgcttgctgatgcngccgtcccgactggagtctggctgcngagtcctcgtacacgtgcgactggactgtgg

SEQ ID NO: 32573 - DNA, 403 bp, Zea mays
  unsure (1)..(403): unsure at all n locations
agcttgtgcagctntacggcctctcaggggagctattcgaaggcttggatcgagcgaaggagggcgggaaaagggttggccacggtggttgccctcgggcggctctggcgggtcgcggggaggtcgccggagctatgggtgagctcgggggagttaggcgtggtacggaggaggcaacggggaagacagccgggctctgggacggtctttatagccgtggcgtgggcatggtcacgggcggccgcgggcgcgcggtggttcgcgcacgggcgtgctctgagcgcgcccccgagtgtcagcccgcgtcgaacacgtgggagctcgcttctgccatggttcaacgacggatttgagcaccttagcgtgcgtatcttggcanaaccactgtgtacgggctcttccc

SEQ ID NO: 32574 - DNA, 421 bp, Zea mays
actcagcttcctttaccccaaacgcgaacacccttcattggtgagactttcatgtagacataatcttcaacttgaaagtacaagggtttccgtcgattgtctacataattcttctgtcgagcttgggcttctttcaaattatgtacaatcctttgaactttttcttccatttcttttaccatgtctagcctgaaaaaccatctttctcctggttcagaccaatttaatggagtacggcaccgtcgtccatataaagcttcaaagggtgccatcttgatactttcttggtagttgttgttatatgagaattctgccagtggtaagcattcatcccatttttgtgggaatccagaacacatgctcgtaacatatcttcaagtatttgatttactctctcagtctgcccactagtttggggatg

SEQ ID NO: 32575 - DNA, 487 bp, Zea mays
  unsure (1)..(487): unsure at all n locations
agcttattgagtcatntaaatctgtttcatcagttgctctaacttctgatatttggaatggtaaagctaaagaggactacatttctgttgttgctcactttgtgaattcgaattgggagctataaaaaaggttgattggtcttaggctcatagatgtgaaacattctggaaataatatagcagaacgtgttaacatggttgctgatgagtatggtttatgtgataaaatatttgctattactcttggcaatgcttcctctaatcaaactgctatgtattatcttaaaccattgttttctggttatcttggagctctaactgatgttgatgatgatgaattgtcttccattcttttgcatcaacgttgtgcatgtcacattattaatctaatagtaaagtcacgtttgaaaagagtaaaacattatcttgaggactttataactgccataaactnntttgaattcataaatcaaataatttgtgcata

SEQ ID NO: 32576 - DNA, 289 bp, Zea mays
tcaatggaagattggctttcttgaagaaccacatttgttatcacatggtaatataggttcaatttcaacacatgtgcacatgtgaagttggtatgatattcaattaattaacacaaccttatgagccatttctaacatgatatgtgaatccataaatttattatgagagcacacaagcatatcatgtttttcttggcaagctagaattttaatatttagcctttctatcgtgttcttgaacatagcatttttattttctaattgagcaatatatgatgaatgattaaac

SEQ ID NO: 32577 - DNA, 412 bp, Zea mays
agcttatgaagattcttcatcccaacatgggctagtcggcggggccagagccaacccatgttagtcttagcaattaagcaagtgtcgagttcagctctatcaaaatctaccaagtatagctgaccctctaacactcccttaaatgctattgaatcatcacttcttctaaagacagtgacacctacatcagtaaaaagacagttggagcccatttgacataattgagatacagaaagcaaattgtaatctaaagagtctacaagaaaaacattggaaatagaatggtcaggagatatagcaattttacccaatcctttgactaaaccttgatttccatccccgaatgtgatagctcattgaggatcttggtttttctcgtaggagggagaacattttcttctcccagtcatat

SEQ ID NO: 32578 - DNA, 456 bp, Zea mays
  unsure (1)..(456): unsure at all n locations
tctggcctgagattagaacacanaatgttatcttattttatctcttgttgttttccacgtttacaagtatagagcactggagtcagtctagctacctacaggcagtggttcattgtgcggggtgttcttgggttgaatatgatccatctctggcagctggagatgaccctcattatttctagccataaaacaagtaaggtctgcctgcccttaataatctggaaatgaaaacaaaaatcgatatcactaattcagtatcacataacattaagacacatatgaacgcataccaatatatcacaaaacaattgccaaaatcatccaagttcattcaatatcgctgtttgatttctagttcatggatacataaacacaattctgaatgagcacattgatgcaagcaagatgaaacaacaagaattcagaatttcaaccaattaataaaaaaaatcacac

SEQ ID NO: 32579 - DNA, 384 bp, Zea mays
  unsure (1)..(384): unsure at all n locations
agcttctaagggaggtcatgtgttatgactaatctatgtctgtttcgataaagatagaccttgtgtagctggtcaggcagggaaacaggtgagaagcactcatcacatcaagaatgtgatgacaacatcaagaccactggagcttcttcacatggacctcttcggacccgtcgcctaccttatcatcgggggaagtaagtatgggcttgtaattgttgatgattnttcctgcttcaacttgggtattcttttgcaggataaatcagaaacccaagggaccctaaagcgctntctaaggagggctcanaacgaatttgagctcaaagtgaanaagataagaagcgacaacgggtccgagttcaagaatctgcangtggaggagta

SEQ ID NO: 32580 - DNA, 468 bp, Zea mays
  unsure (1)..(468): unsure at all n locations
tcacccgccctttgtccagaattgggttatgaatctatntcctatgcttcgagctaggcgtgggatatcaatcagatctgctggtgataagctgaagtttggtctattaacgattttcccatgtgtgcagccagttttcatgaaggcaacagctgtgccctgagaagctagcagggcacaaaatcgccgtgcccagctataacttcgtcaagagcatcaacttcgccctcaatgtgtttgaaggttcaaacttttcggaactggccccaactgagttgaagacctgcttcagccgctgcacacatcggttgccgaagtctatacatttatcttgaagttctttcaatgatttctgtaaatttgaacatttttcaacttcagcctcaaacttcgcattcgaattttgcttttcttgatcgaagctttctgtctttgcgaggaagttcaccattcaatccggcaatttag

SEQ ID NO: 32581 - DNA, 463 bp, Zea mays
  unsure (1)..(463): unsure at all n locations
gtcacctgcggcatgcaagcttcacacgcttgccctagtggtcggctaagcatgtctgaatagccctctagtaagtcgctccagcgtntttaaggccgaacgacataaaggtatagcagaaggctccgaacggngtgatgaatgctgtnttttcctcgtcttcttttgccaggctgatctgatgatacgcggagtagcaatccaagaaagacagtatagaacatctggcggtcgagtctaccacctggtcaattctaggaagtccgaagggatcctttggacagtgcttgttgagatccgtatagtcgacacacatgcgccaatccactttattctttttgagtacaagaacaggatttgctaaccactcagggtgtaacacttctctaatgaatccggccgcgaccaagcgagccaactctgcacggatggcctctctcttgtcgggtgtgaagcgtcataa

SEQ ID NO: 32582 - DNA, 444 bp, Zea mays
  unsure (1)..(444): unsure at all n locations
tactcagctgttggattgtaggtgatacctgtagagagtgttgtgccctatcataatcttgtggtggttgacttctgtttttggattagtacccatagggataaataagccaaaattgctaggacgaagtggtggaaactcaaaggggagacatctgaagtttttagggaaagagtttttgtggagggcgcttggtctaaagaagaagatgcaaacaacatgtgggtgaagatggcaacttgtattangaaggtggtgtcagatgtgtttggagtgaccaaagggagtagcgatgaacctaaggatacttgtggtggaccgaggatgttcaaaaggaaataaaggagaagaaaaaatgttacaggagcttgttccaggataggagcgcggccaacatagagaggtataaggtggcaaagaagactgcaaagcgagctgtgagtg

SEQ ID NO: 32583 - DNA, 441 bp, Zea mays
  unsure (1)..(441): unsure at all n locations
agcttcgcatctccgaactaactcggctgcatattcttctgccgtggccaatagaatcctgacatgaaaacttttccgactaacgttctggatgctgcgtgtactccacactgccctccattgacttcctccagaagttgcttcccggtggacgggagaacgcacttcatgaggacgcctgacgcgcccctcctgtataatacctccccaatgagtgtatagtgagctgattgtctggcaatgcgttctgccgagttcttgtcatctggctcttcttcattctttatatactngataatcggttgcctccagtcatcagagtctgactcgggttgatctatgataatgcactcttctatttgatccgtcgagatgctgggctggagaattcttgcacgagaccccggcgggactgagtcgaccgatccaacttgacagaca

SEQ ID NO: 32584 - DNA, 478 bp, Zea mays
  unsure (1)..(478): unsure at all n locations
tctnaaggggagaacacatttgggactaacaaatgttcattntgagaaagacatggattgtagcgcatgtcaggcaggaaagcaagttggtgttcatcatccacacaagaacatcatgacgactgacaggccactcgagctcctacacatggatcttttcggcccgattgcttacataagcatcggcgggagtaagtactgtctagttattgtgggtgattattctcgcttcacgtgggtgttctttttgcaggaaaaatctcttacccaagagaccttaaagggattcttgagacgggctcaaaataagttcgacttaaggatcaagaaaattagaagcgacaacgggacggagttcaaaaactcacaaatcgaaggcttccttgaggaggagggaatcaagcatgagttctcttctccctacatgccacaacaaaatggtgtagtggagaggaagaatcgaactctattggacatg

SEQ ID NO: 32585 - DNA, 346 bp, Zea mays
agcttgtcatggaatttgtttcttaatggagatcatgttatgtgcgggcgcacatataggcgccgccgtgacgcacgccgcgctgcagagcgcgctgaacgcgcacaggaggaggccacaaccagtggatagatttagaaataaagataaggctagagaataagattgagatgagagaattgtggagagttagttggcagcagaatagtccaagaaaataggagttagttgagagttataggagaagttgtgtagccatagggctatttataagccacatggcagcagggaataaggcacgcaagaatattatttcctaatctctctctctcctaaacaagccgac

SEQ ID NO: 32586 - DNA, 398 bp, Zea mays
  unsure (1)..(398): unsure at all n locations
tgntcctatccacacaggaccatgaggaatattngcaagcgtatgtccgtatgtttctgcgtctcagagtgtaggcgccaacggtgccaaatgagattgttattgaagctatgatcaagggacttcgaccaggaccaacaacacaatatttcgctaggaagcccccacaaactttggagaagcttctacagaagatggacgagtacatcagggccgataatgactttcggcagagaagagaagaagcctacatatactctgagatgaccaggggcttcggagggagactccaccctaggcatgtcaggacgatccaaaatcctagctcaagcgacgacaggggaaatcatactctatggcatcagcacagcgcccaatcatcagggacacaacaaagc

SEQ ID NO: 32587 - DNA, 460 bp, Zea mays
  unsure (1)..(460): unsure at all n locations
gctggtcatttattgctaactgtcccgacaatgatagtgatcaggatcaagggaacaagagggagaagaagaagaactataagaaggcaaagggcgaggcgcatctangcaaggagtgggattcggattgctcctcttccgactctgacaatgaaggactcgccgccaccgccttcaacaagtcatccctcttccccaacgagcgtcacacatgccttatggcacgggagaagaaggtatgtactcnaaactctacttatgcttcttcaagtgaggacgaatctagtgatgaggatgaaatagattattcatgtttatttaagggcctagatagaaccaaggtagataaaattaatgaattgattgatgccttgaatgataagaataggctcttagaanagcaagaaggatttgtgtatgaagaacatgacatatttgtagaagcacanaaatctcatgc

SEQ ID NO: 32588 - DNA, 494 bp, Zea mays
  unsure (1)..(494): unsure at all n locations
gacctatgatactaagcttacacctctggactaactcggctgcatcactctntgtcgttggccagtagaaactagacctgaagaccttcccaaccagagtcctggatgctgcgtgtatctcgcattgtccagcgtgtacctcatctagcagttgcttcccagtagccgaaagaatgcatttcatgaggactcctgtcgcgccccttctgtatagtgtttccccaatgagggtgtagtgagatgactgccttgcgatgcactctgctgcatttttgtcatccgactcctcgttctttatatatctaatgattggctccctccagtcatcagaatctgactctggttggctcagaatattgcattcttctgctcgatccgatgagatgctcgggcgcagtacttcttggacgaagactccaggcgggacctaagtctgactgatcctagctttgacaatgcatcagctgccgtgttgcgatctcttcccacatgat

SEQ ID NO: 32589 - DNA, 437 bp, Zea mays
  unsure (1)..(437): unsure at all n locations
cacatcacaaatatntatgttggccatacatacaagtgcagtaactagtacgtgaaaaccatgggtttagatcttgaaataaaactaacatcactcacgtgttaggtgtcatccaagagcaactaggccactgcacggatagatgctaataacagctgtgcctaagcgttcacatccacaggcccaacaaccacccacgagtcgtatcgggcatccacctctgtccagtcctccgccgccatatacctcagcctcgcatttcgtaaccctaactaccaccacctcctccggcggcctctcggcgacagcatagaccttaaggaatgatgggccacaggaagagaaagacgggcgaccgtcatggaagggtcaagccatcatttggagctggaaggaagcgaagatccggatcagatatagatggcggatctagagat

SEQ ID NO: 32590 - DNA, 332 bp, Zea mays
cttaaagagaaagaaaacacacaagctcagcattgataagcacaaccaaatcaaatgtgtgtgcatacgggaagaatagagatcttacaaagcaccgactactcatattccggggctaagcataactactattgcctggctcctgaattcagaactatgctaaatgcaactcatgagcactaacgttaaagcatcacatatgcactcaaaagggaagaaaacatcaagcgaaagtcatttgaaatgccctaagtggccacacaatcagagtttttcaaaacacgggtctacacgattacctctcatacatgctgggctctagccaaagtgaa

SEQ ID NO: 32591 - DNA, 424 bp, Zea mays
  unsure (1)..(424): unsure at all n locations
cacacatctaaacgtcagctcagcttattatccatatacagacgggcagactganagaactaatcagatcctagaagatatgttgagagcctgtgcgttgcaagacaagtcaggatgggacaaaaggttaccttacgcagaattcttctacaacaatagttaccaggccagcttgaagatgtcaccgcttcaggcactctatggacggagttgtaggactccgctgcattgggaccagcctgtggagagacaggtgtttggccccgacatattgcttgaagccgaggagaatatcaaaatggttcgggagaatctgaagatagcacaatcaaggcagcgaagctacgcagacagaaggagaagagaaatgagttntgaagtgggagactacgtctatctgaaggtgtcacctatcaggggagtc

SEQ ID NO: 32592 - DNA, 445 bp, Zea mays
  unsure (1)..(445): unsure at all n locations
tgagcaagtctcacggcctcaccaggaagctatctgatggcttttatctaacggaggaggactggagaggggctggccacggtggttgctctcgggcggcactagcgggtcgcggggaggtcgccggagctaatggctggctcgggtaagtcatgtgaggtacggaggaggcaacggggaaggcagccaagcactgtggcgggctttatagccgtgacgcgggcgtggtcacgggcggccgcggacgcgcggtggttcgcgcacgggcgtgctctgagcgcgcccccggatgtcagctcgcgtcgaacacgtggaagcttgcttttgccatggttcaacggcagattagagcgccatatcgtgcgtatcttggcatagtcactgtatacgggcgcttctctgctccanatcctaccttattgctgtgagttccaagtcgagatat

SEQ ID NO: 32593 - DNA, 442 bp, Zea mays
agcttacccatgacgtggcatgtgaccagttaaatggtcctcggtcagcaagcctacatcgagacgatccttaaacgactcagacgaagacactacaccgagactctcttctcgtgcaagtcacccactcggtctcaacttaatcatttcaaacccaaagtttggtacctggcagaggtacatcttttctgatgttgaacccatcatggccatgatggatccaccatcaagttttattttcgaaaacatccctcccactttgcaacatcatcttttgtgaaaacaaaacaatttgtttttctagagcaaagctaagcataaggaataccttttgtaaaacagggatttaaggagaagtaatcaactccaagggaggaaatgcaggaattggttatcacacaactcctatcacctaatgcatcaatcaagtgagaaagattta

SEQ ID NO: 32594 - DNA, 459 bp, Zea mays
  unsure (1)..(459): unsure at all n locations
tcagctnccatctatgtgngtattgcctttgaatctgtccaactttcttcagcgcttctagcaacttcttgacttccgtggacatcaatgggcccttgttccgaaggtatcttcatgcataagtatgctggataaagtattgcttcgaaggcattaagtgtccctcgaccaatgattgcattatatgggtattccatgtcaacaatgtcaaaaacgacttgctcagttcttgtgttgtggacatagtcgaaggtaacttgtattgtgattttgccaagtgccacaatctgccgtcctccgaagccacaaagagggtgtgtagaatcatggatcttgtcctctggttcttgcatctgcttgaaggcctttgcaaatataatgtccgctgcactgcatgtgtcaatcagaacattgtggaccaaaanacccttgatgacacaagatatgaccatagcatca

SEQ ID NO: 32595 - DNA, 442 bp, Zea mays
  unsure (1)..(442): unsure at all n locations
agcttgtaggggttgtgatgtcgccacttacttgatgctaacaagacatttccttcaccaaagccatctttaacacttcgcccataagaaagatcaattctcactttcaataggttgcctgcaagacaagtgataattgcaataagtaaattataatctacatttatataatctagactaccaaacaactacgtatagtagattataatctagattatataatctagattatgatctagaatatataatctataagctgaaacaaacgggtcctattgtcctaaggtaatgcaggcacgataaattcagcataacatatatgttgaaacttnattgcgagagctgaaatgttttaaatagagtatatggtatctaacatgatcataatgggaaataataggctaaaacagtgaatccattactacaaaacaaactctcttat

SEQ ID NO: 32596 - DNA, 403 bp, Zea mays
  unsure (1)..(403): unsure at all n locations
cgccttccaaagtcaaaacatgttatgcagcaaggcttgacttcagttgcacaaacaatattgctgaatacgaagcacttctgttggggcttcggacattgagggcaatgggaataagaagggccatcttgaaaactgaatttcaagttatttttggccatatagacaaaagtaacaaggcaagagacccgaagcttgaaaaatatatggatacagttctatggttggaggcttctttcaaaggtttttctgtcaagaatattccaagaggagaaaatgagcatgcagatctgctagccaagcctgcttgcaatttccccagtacatagtgaagaatgcacgactganattatatctttcctccaaggaattgttctcggatgacaaacttatataagaaatg

SEQ ID NO: 32597 - DNA, 472 bp, Zea mays
  unsure (1)..(472): unsure at all n locations
agcttcttcagcacctcaatgcgtgcctctgtatcttataacagataacataagaaacatatcacattcggagaagcgaatatgacgtgcctaaacgcatccctggtgatagaaactggaccacgtaaggacaaaaaggataatatttccataaacgaatttaaaacagcagcagcatcaaagcaactattagcaactcggacgcagaggcacactagagatgaaacccatcaagcggtagatgaacccaatagcagctaggccattatttaactcccaagcagaggcaggtcagagatgaatccaaacaagaggcaggctatagagagagtacaagttcagtaaaaatagaaatatatagtggtactgtaatacattagaagtaatggtactgctaatatngtatttaagaaactgaatacatggcattgtcttgctgtatcatcctgtgctttatacagtggaattcttg

SEQ ID NO: 32598 - DNA, 187 bp, Zea mays
  unsure (1)..(187): unsure at all n locations
ctggtgtaaaatcctggcgcttcggcttcttacctgcagtactatataaacagacgagtaggtgtgaagttaccacagcattcattgctatntgcactggtttgctgccaaaatttttaaccatagccgaagcttgactctcggaatcgaacgaagcttcagcttgaagcctgcttcgtcagaagaa

SEQ ID NO: 32599 - DNA, 288 bp, Zea mays
  unsure (1)..(288): unsure at all n locations
gagtcagctctatcaaaatctactaagtattgctgaccctctaacactcncttaaatgttatggaatcgtcacttcttctaaagagagtaacacctgtatccgtaaaaagacagttgtaacccactttacacaattgcgaaactgaaagcaagttgtaatctatagaatctacaagaaaaacattggaaatggaatgattagggtgatatagcaatttacccaatcctttgaccaaaccttgattccatccccgaatgtgaagctcgtggggatcttggttttctcga

SEQ ID NO: 32600 - DNA, 464 bp, Zea mays
tgcagcataagaaaagagtatagaattctccaacagcactgattttttatcatcttcactgatctccaacacagaccacacagcttctcagataaagaggaaaggagaataatgggtttcccaactatataactaactttattaacatagtatgtaaaccaaaatgcaggggatacccacactctggtgacaatcattacaaagatccaaaccaaacatagttcatcatgacagacataaatgcacaggatatagcaaactaccctgtctaactaaaactaactaagaccgagactaacgctaagactgaagcttccatgcatatatttatttcgtattaattacaagatccaactctaacgatctatggttctagggttatcttggtcttgcaggcgggattgccataagactggtgtccacgctgaggtgagcggtacgagtgctgagtcccaacgggagcg

SEQ ID NO: 32601 - DNA, 406 bp, Zea mays
  unsure (1)..(406): unsure at all n locations
atagaggcaagagctcatccttatgtcatgatataaggggagttgcacaagcatggagtttgtgctccgctactcaagtgtttatctagaaccgaaggtatagagttaatgaaagaaatacatgcaggcctgtgtggatctcacattggatctaggctgttacttggaaaaattntccgccaagggttttattggccgaaggcagcttcngatgcagcggaattagttcanaaatgcgaaggttgtcaaaaatgtgcaagagatcaaaaacaactttcgtccttaacacagctcatacaacccacttggccattgcaaaggtggngccttgacttgttaggtccgttaccaccggcccaagggaacctgagatatgttgtagtagctgtggaaatattttctaaat

SEQ ID NO: 32602 - DNA, 445 bp, Zea mays
  unsure (1)..(445): unsure at all n locations
tgaatagcttcgattgaggacgcagtaagcaagctttggctatggtcaaatntttggcagcaaaacagtgcaatagcaatgaatgctgtggtaacttcacacctacccgtctgtttatatagtgccgcaggtgggaaggtaaatcgtcaagtcttctgcaccggacaaacagccgcccgcacccactgaacggtaggccacagagcccgagaaggtgaatcgccaggacgcgcgtaactgctgcatggcggngccacctcgcgctcggattagtttaatcgtttggcaacgagctcagggaaggtgtttttcggatcttcagcatcccgaagcctaagagactttttcacggatcaagctcgttacgaaaaatgatatagcacagcgaaggggctatctgtgggggtatgcttcgtagccaaagatcctgaagaaagaaacacct

SEQ ID NO: 32603 - DNA, 399 bp, Zea mays
  unsure (1)..(399): unsure at all n locations
ctgaggctgcaagctcgtngaggatgcttcatcagctaattggatgacaattggccttaaaacctctgtgaagccgagctatatgtagttaacttattcttcacgatcaacttcttgaacttgggaatacggtgttaaatatgtgatttttcatatggccgggatgcaacttcttggccaaaatgaacacgttgcatcaccgtcaccgccactcactgtgtaggagctcatgggttatacaaatgagatcttgagacagctggctcagcgtcagccaccaccctcagcactatggtggtggagaccatctgctgctccccgcgacggctacctatcaggagttcctcacacctagccttcattgttacaagggcagacgacccgcttgatgcagatgtg

SEQ ID NO: 32604 - DNA, 464 bp, Zea mays
  unsure (1)..(464): unsure at all n locations
acatttaaataaaaattctgagatcatgtatatttaattcattcctcaacatgcgaaagcgggtcttattaagtggcttagtgaaaatatccgctaattgatcttccgacctcactccttctaaaaggatgtctcctttagcaacatgatctctaaggaagtgatgacggatatcaatgtgcttggtgcgagagtgttgtacatgattattagcaattttaacaacactctcattgtcacacaacaaaggtaccttttctagaactacgccatagtctagaagagtttgtttcatatataaaatttgtgtgcaacaagcacccgcggcaacgtattccgcttcggcggttgacaaggcaacactcatttgctttttggatgtccatgaaactagtgatctcccaagcaaatggcacccccagaagtactttttctatcaatnttgcaaccggcataatccgaat

SEQ ID NO: 32605 - DNA, 405 bp, Zea mays
  unsure (1)..(405): unsure at all n locations
aagatagaccttgtgcagcttgtcaagcanggaaacaggtgggaagctctcatcatgccaaaaatgtgatgacaacatcaagacccctggagttacttcatatggacctcttcggacccgtcgcctatctaagcataagaggaagtaagtatggtcctgttatagttgatgattttcccgcttcacttgggtattcttcttgcaggataaatctgaaacccaagggaccctcaagcgcttnctaaggagagctcataacgagtttcgagctcaagtgtgaagaaagataagaaagcgacacatgggtctcgagttcatagaacctttcaagtggaggagtatcttaaggaggaaggaatcaagcacgagttctccgcccctaccaccacacaaaatggtgtgtat

SEQ ID NO: 32606 - DNA, 441 bp, Zea mays
  unsure (1)..(441): unsure at all n locations
ttaaagctgggcttcggtttcctttaagcaaaattgtggttgatggtttttatatttatcaagngtaccttcatcaaattacgcccgaagcgatcataagaatgggaatcttcgtatgggccgtgaagagccagggtttggaaccgaatgcaaaaagtttctgcaatatacacgagctagtgtatgagacaaaaccgtgggggtaaagagcaatatcacaacaattttggctgttatagcttcggtgctcgctctggttcaagctgtcccgtgccgacttttcggaagagatggcccgaagactggatgaaggaatggntctatgtgaaaaacgacttgaaggcgcgagaagatattaaagatatcattatgcgccctatctggcagcgcttctgccttcgaaaaccgaaggtggaagttgacgaaacagtctaagaatgc

SEQ ID NO: 32607 - DNA, 325 bp, Zea mays
gccctcggacccggccggacttcacttgatgcccgagatcgacctcaccggacttcggtcttccgccgccgcgcgtggaccgagctatccagtgagtctccgcccaattccttgcgctcatatcttctctggcaccccatggacctctctgacccatccaattgaactatctcgccgtgaccaggccggactcctcgccaccgacgagcatccccgcctgcgcgcgtggaccgaccgactccggccatcttcgacggcgacccgcacaaccgtgtgatccccgagacctcccattcatcctcgaccacttcaccggagcaatctc

SEQ ID NO: 32608 - DNA, 413 bp, Zea mays
  unsure (1)..(413): unsure at all n locations
agcttcgcacaacctcgtgactcgattcgcggcacagatcatagcgggccagtatttatcctgacggatcaccttggcagcgagggccctgggccccgcgtgagaaccgcaagttccgctgtggactacgctcaggatttggacgccttcggtctcggtgatgcatttaagcatgggttggctgacccccttctttgtaagctggccctcaatgagtgcgaagtcccagctttggtgcttgaggcgcttggcctcgttgatgttgcttggatggtaatatccctgcaggaacagggtgattggtgctcgccaatcttcngtcatgatgaggttgactatgttgtggccttcggtgtccttggttatttgtaagccctctgggctgcggacagctggtgtgctgatgacatggt

SEQ ID NO: 32609 - DNA, 336 bp, Zea mays
cttcgcggacagcagtatcaatttctcttaccacactacgctctgacattttcatttcttcagatgaccttgcgatatttgcttcttctgcctccaaaaggattaccttgtgtggttctgaaggcccaattccaacttcagtctgttgctctcgagcctcaactgcggatactttagcaagcgccctagaagtctcacaatcttcttggggtgtgtttggaagtaattgttccaaacataaatacgttaccattctctttttttggggtcatagtggccctttttatttttgtacttcaactctgctaaggacttaaattctgatattttgcttct

SEQ ID NO: 32610 - DNA, 498 bp, Zea mays
ctcaagcttctaagggagaacacgcgataggttagactaacgtgcaattcttaatatatataccttgcgcagcttgtcaagcaggtaaacaagtgggaggagcacatcacagcaagaatgtgatgaccacttcaagacctctggagttgctgcatatggacctcttcggacccatcgcctatctgagcatatgaggaagtaagtatggtctagttattgttgatgacttttcccgcttcacttgggtgttctttttgccggataagtctgaaacccaagggaccctcaagcgcttcctaaggagagctcaaaatgagtttgagctcaaggtaaagaagataagaaacgacaatgggtctgagttcaagaaccttcaagtggaggagttccttgaggaggaggggatcaagcacgagttctccgctccctacaaacctcaacaaaatggtgtggtagagaggaagaacacgacgctcattgatatggcgaggactatgc

SEQ ID NO: 32611 - DNA, 489 bp, Zea mays
  unsure (1)..(489): unsure at all n locations
agcttaatgttcctctccagtattttcaggcctgtgcgctgagttgctgacacanaacataatntacagatcatttacatgaattaaattatctggtataaattctactggaacttcaatggtgattaacaacaccttaataaatttgtttttatgccataggatgatcatggaaattcatcgcttagccagagcagtggaagtgaaattggaagctttcttggttgggctatggcaatgatttatatgggtgggcggcttccccagatnttgttaaatgtgagacttcacaaaaacagacatttacttttcgtgatttctcttataggaaatagattttctgtattacaatactgggttactatatgtagaatatatcangtacaaaaaaaatctattgatgcataccttgtaaaccaacacaagaatggagatgtgaggatctttttataaatatccagtgcgaggtggaatggtgatttcgaatat

SEQ ID NO: 32612 - DNA, 394 bp, Zea mays
  unsure (1)..(394): unsure at all n locations
tcgctgacacagcacggtgtgcgttgagaagaaacatgcccttagcctaccgatgatcgtncgatattcgctgcctatgattcaccatagatatgtgtgatagatgttcacaaacagttccttatccatgtgagctgcacactcgaatgttcctctatgttgccctgatacggcgacactgatacgcgatacgccgataccccgatacagtatatctcacaaaacaccgatacgccgctacgtaaatattctaaataaaattaaatgctgaaatagctgaccacacaatttcacagatagtgcatagacaataaagtgtaggccaccaaggcatcaaacctagaaacttcagtgttcagccttcaatctctaacagtaacagactactatcaca

SEQ ID NO: 32613 - DNA, 430 bp, Zea mays
  unsure (1)..(430): unsure at all n locations
agctntccatgttgtgctngaacatttcaatccgagcccgcatgtgaccgtggtgaccgtcacaagttggtgttcttctgcagtccgaatccagcatgttcagatccttttccctttcgatcttctccctggttcctaagaaaaacaagagtgcacgggtctccatggtctaaatatgatggacatgaactcaagagtgtaatcacctgatggttgagttgatgagcacgagcgcgagtaatggggccagaaattggtacttatattggcatagatgtatcagtagtgtggatgtcttcctcattccccccttcttgcattngagtcgtccttgactcaagcacaacttcctctcccatgtagggctttaaatctgtaatgttaaatgtggggctaaccccaaagtctgtaggcagatctagcctatatg

SEQ ID NO: 32614 - DNA, 426 bp, Zea mays
tgcgggttacataaagaatatttcaagggtttaatatttcaactatgttctatgcacgtgataaggggtcgggttaatgctctgtgtggagtgtttaagcaaatataaaaattgagcgtgaatgaatagatcttatgttgatgtttgtggtttattagtgatttcttgcagtaatagtgatcattctctatgatgttagtcggctaagtatcttagaggaatatggatgccacccaattttcggaaagctagtaacatcactaaattggcttctattgaaacctagaatctacctatgggtaatacagttaaattatctaagtatttaggttgttctaaatacattttcctttaattatatgtcgattgatagcgcttattcgctcgattagataatgttataccctgatttgtaacatgtgattc

SEQ ID NO: 32615 - DNA, 417 bp, Zea mays
  unsure (1)..(417): unsure at all n locations
agcttaccggtccatgataggttctttgctttatttatgtgctagnagaccggatattatgcttagcgtatgcatgtgtgctagatttcaatccgatcctaaggagtgtcacttattggctgtaaagcgaattcttcgatatttagtcgctacgccttgcttcgggatctggtatccaaaggggtctaactctgacttgattgggtactcagattccgactatgctggatgtaaggtctataggaagagtacatcggggacgtgccaattcttaggaaggtccctggtgtcatggaattctaagaaacaaacctctgttgctctatccaccgctgaagccgagtatgttgccgcaggacagtgtcgcgcacaactactttggatgaggcacaccctccgggactttggctacnatct

SEQ ID NO: 32616 - DNA, 472 bp, Zea mays
tctatggtctcttattgtctcaattgacaaaagaggacttcttttggtgagaagcgacgactatgggaaatagggggagtctttgaaatctttgatcaatctctttcggaatgactctcgttatgcttcaacatgtgtgtttgacttagagatagagatttgagtttgatttgcaaaaacaaaccaagtggtggcaaagaatgatccatatatgccaaaattgaataaaactcagagttaagtttttatttgaagtagttttgcactggttccacttgctatatgttgtgttggcataaatcaccaaaaagggggagattgaaagggaaatgtgcctctgggtcatatctaagtattttggtgattgagtgcaaacacaagtgcttaaatgtgataatatgcccatggatgaacaaagtgcaaatcacaagttaaggtatgtttctagccttaatacaatggctttgtgact

SEQ ID NO: 32617 - DNA, 482 bp, Zea mays
agcttgtgcagattcttcatcccaacatgggcttgtcgatggtgccagagccaacccatgttagtcttagcaattaagcaagtgtcgagttcagctctatcaaaatctaccaagtatagctgaccctataacactcccttaaatgctattgaatcatcacttcttctaaagacagtgacacctacatcagtaaaaagacagttgtagcccatttgacataattgagaaacggaaagcaaattgtaatctaaagagtctacaagaaaaacattggaaatggaatggtcaggtgaaatagcaattttacccaatcctttgaccaaaccttgatttccatccccgaatgtgatagctcgttggggatactggtttctctcgtaggaggagaacatcttctctctccctgtcatgtgggttgtgcacccgctgtcgatgatccaacttgagcccccggattgcataacctacaaacaattttagtc

SEQ ID NO: 32618 - DNA, 443 bp, Zea mays
  unsure (1)..(443): unsure at all n locations
tctggccatctcccggcagatagagatctccttgctgtctgggttataatacaagaagtcttcttctccgctgccattgaatatcaacgccccttttggatattttaatttctgggcataatgatgagcttctcgcttttccccttcagatagcattttgcccgaagcatgtcgtacaatataatcaggcaatttggaagatgcttcaggagttgaagagagatgtttttcagacagaatttactttatagtttcctttgtagtttctccttcgatttccaaggatttctccttggcagactctgaaggtccgttttgatctcagcctggtgctttgcagcttctgctccagaggctgntgtttcaatctgtggcctttgagcttcngcaatatttctcggagtagaacttgaagactttattgtctccagtacatccagaac

SEQ ID NO: 32619 - DNA, 410 bp, Zea mays
  unsure (1)..(410): unsure at all n locations
agctgtgaagattcttcatcccaacatgggctagttggcgatgccaaagccaacccatattagtcttaacaattaagcaagtgtcaagttcagctctattgaaatcaattaattatagctgaccctctaacactcccttaaatgctactgaatcatcacttcttctaaagacagtaacacctacatcagtgaatagacagttgtaacccatattgcataattgagaaatagaaaacaaattgtaatctaatgaatctacaaggaaaacattggaaatagaatggtcaggtgatatagcaattttaccaagtcctttgaccaaaccttgatttccatccccgaatgcgatagcgatatggggatcatggtttttctcataggaagagaacattctnttctccccattcatg

SEQ ID NO: 32620 - DNA, 441 bp, Zea mays
  unsure (1)..(441): unsure at all n locations
ctcacggtcttaccaggaagctacctgtggcttgtatctaacggagggggactggagaggggttggccactgcggtggttcttggtcggcactggcgggctgcggggaggtcgccggaggcaatggctggctcgggcgagtctggcgcagtacggaggaggtaacggggaaggcaaccgagtgccggggtgggttttataggcgcggacgcggccggggcgccggctcataccgttggcgcgacgcgggcacgcggggcgcgcgcgcgggcgtgctctggcgagttcagagcgcgtcgaacacgtggcgcgttgcttctgcccgtgttcttcgctctgctgagcggccaggcgtacgaatcttgccctaccgcctgtgggagatatcttccctgcacctanggctacctagttcatgtaagttccaagggtagatgtggtc

SEQ ID NO: 32621 - DNA, 479 bp, Zea mays
  unsure (1)..(479): unsure at all n locations
agcttgacccagggacccgcatcaccggaatagcctattcgcgctcaccggagttcaagaacccgccggcgcacgtggaccgggtaagcccctgcaccgttttccaattccttgcgcgtatggcctctgtgtcaccccgtgaagctcctcgtgcaccctaattgatctatgccgccgtggtttggccggagcaggagccgccgacgacccccgccgcctgtgctcgtggccagggtagctccgaccacctccgacaccgacccgcacctcggcgtgaccgttgcgacctcccggacgtcactgaccaccccttagttttttgtgatttttagcacagaaatctattattaccataggatgccaacaaaaataacctttagggcagaacccacccctaactaagaggtgtagtgtgaagtggcccattttgcctaactntttgttattntgtttanagcctaactnttatactttaagcc

SEQ ID NO: 32622 - DNA, 462 bp, Zea mays
ttcaagttccaagtgtgagtgtgtagctagctttatgggcaacttgtaagttgtatataggcggacattgtttctaaatactggagtatgttttaaatgaaggatattacttctagataccctgttttttgaagaatcaggatgttggttctaaacaccctattttaaatgataaaactttggatttaaccgttgtgaaatacgaatagctagtagcatggcatattctttagtgtttgtcttgatgcaattactttatcactgctctcaagtatcacatcactacatcagaataaattgatcatgtgacaatatcctcaacaagtcaacaacacatgcaacatacgtcggtatccaaattatgtttttttactacaacatgtcttgttcttgtgctgttaagtcttttcaacttgttgttacctgaaggttcgcggcttctatttctttagatctttcttt

SEQ ID NO: 32623 - DNA, 398 bp, Zea mays
agcttatcctcgacatctgatgttcgtgggcttatggtcgacggtgaataaccatataccgacgggaattagtaaacctcgtcagtttaatgcttattcccgtcggttctaggccgacgggaattaattggatatctgtagtgctagcgcgcccgcgcccttgtctccgacgaacctccaccgcgggcacgagcggcgccactactggtggtcagggaaccctgcccgtgctcgccgttggatcttgggcattcatccgatatcggtggacctaggtttaattagactaaatctaatctcaatcatccatttcgaattcggtcgctcgggtgtgtgtgccctcacccgtgccactgccattcggcccggcctgtcagccccgctcaccccaggtcact

SEQ ID NO: 32624 - DNA, 390 bp, Zea mays
  unsure (1)..(390): unsure at all n locations
ntaccaaatggacgtgaaaagtgccttcctcaatggaccaatctatgaagaggtctattttgagcaacctcccggctttgaagatagtgagtaccctaaccatgtgtataaactctctaaggcgctttaagggctcaagcaggccccaagagcatggtatgaatgcctaagcgatttccttatcactaatggtttcaaagtcggtaaagtcgatcctacactctttaccaaaaccattgcaaatgatttgtttgtatgccaaatctatgttgatgatatcatatttgggtctactaacaaatctacttgtgaagagtttagtaggattatgattcaaaaattcgagatctctatgatgggggagttgaagtatttcttatgatttaagtg

SEQ ID NO: 32625 - DNA, 464 bp, Zea mays
atgtaagtatatgtaactgcttccgcatctctttatctccgatgttctataatgtctgcaagacgggtgaaacgttcctggtaaggtaaggaaagataccgagcttgtcaagtgacttatgaacatctacagggtgtctgatgtctgttggacaaggacaactgtaggtgggcctaattacttgggaggttctgtcacagagtccctcggacatgcctggcataccgagggatgtcgccgagcactcactggatatccgagccggtgcccgacccgtgaagcagcctctgcgccgtttcgacgaagataggcacagagccataggcgaggagatccacaagctgatggttcagggttcatcaaagaggattccattccgaatggtagccaaccctgtgcttgtgaaaaagaaaggtgtgaaatggaggatgtgtgtaaactacactggtctaaacaaagcatgt

SEQ ID NO: 32626 - DNA, 444 bp, Zea mays
  unsure (1)..(444): unsure at all n locations
tcacccgcaggtcctcagtcggtgctgccctcatcgagggtgatctcactgacactgacgcctcgtgttgacgttgggatgaccgacgcctgngcttggttgagccggagtgtgccataccgagcaggcagtcgacatcgtcacaccactgcttcatggccccccggcgaggccgtggagctaggcgggtggcgcagcaattccctggccgcagacagcgccccaggcgctgccctagacgccctggacgtttgcgcgggagtgtgttgccgcgcagagtgcacaacagcggctgtaccangcgcanggaggttggtggcccgcggtgtggaagaggcagtcctcgggcatgaaatcatggtgctcgacgatgtgaaccatggtgtcgagcgagaaaacaagcaaaaacctaaagcctagtcccctacttggcgcgccaaatgt

SEQ ID NO: 32627 - DNA, 490 bp, Zea mays
  unsure (1)..(490): unsure at all n locations
agctntatcanatggacgtgaagagtgccttcctcaatgttctcatcaaagaagaggtctatgttgagcaacctcccggctttgaagatagtgagtatcctaaccatgtctataggctctctaaggcgctttatgggctcaagcaagccccaagagcatggtatgaatgccttagagatttccttattgcaaatggattcaaagtcggcaaagccgatcctacactctgtactaaaactctagaaaacgacttgtttgtatgccaaatttatgttgatgatattatatttgggtctactaacgagtctacatgtgaagagtttagtaggattatgacacagaaattcgagatgtctatgatgggggagtngaagtatttcttaggattccaagtaaagcaactccaagagggcaccttcattagccaaacgaagtacactcaagacattctaaacaagtttgggatgaaggatgccaagcccatcaagac

SEQ ID NO: 32628 - DNA, 474 bp, Zea mays
tgtgcggtgaattcgtgtccaccgccgtggcaacctccccgtcttctatgggacgggtatagggagtcatggcgacgaggtggaaaagcttggacacgtggcgcacagccgggaagcggcggtcgacggtgagcttctcggcaacagccgcaaagcagaaagatagtcatggtgagtcaccggagttatccccagggggtgacttttacctggcggtcttatcgggtcatcggcgacgcgaatcctacagcggtggcgtgaatcacggcgaggggtcaccggcgtcgagctgtctgcgctggcggtctgatccggtgggcactgtaccatgggaaatggtatccagtcgactgtcagagcaaatttgagcttgattttcttccgattttctatggcaacgtgatccacacacagcagcaaatttgtagagcaatataccatttacaaagttgctatgggaatcatacccaaact

SEQ ID NO: 32629 - DNA, 513 bp, Zea mays
  unsure (1)..(513): unsure at all n locations
atccttaagtcacctgcggcatgcaagcccttatttggatactntatgtaggaagattngttaactatcaagctttgttggtcatgttactacatgtcaaattatgttggacaggcccctggcaccctgttctcatcattactgcaagattntatctgtcagacctgttgctgcaccttattcaacaacaataaatctcagagtagaaggttttaacctactcagtacttcctcaaggtacttcatcatcttgaattctgattaacttattcgtgaagtatatacatgtaaaccttgatattcccttcggcttatccatttacatgtaaataccatcttctcatgtttgcagggtaatttgttcatttgaagggcgatgtatattacaggaagacacggattctgtncaaagaatgctgagtataggatagggacattgaatccgntagtttgtgttattatgttcctggtcgaagaggagaggatttacaaatattatacttatgagctatg

SEQ ID NO: 32630 - DNA, 495 bp, Zea mays
  unsure (1)..(495): unsure at all n locations
actcagcttaagctcttgacataaaaccacttcatctagttctaacagagatgcaataatgcatgagtganaattttaagaggttaaactaggtatgaagcagggataaatgcaaaggacatgctttctcttccttttatacaagatatgcaaagattgtacataagaggaagatttaggtacatatgtaaatgataggaattagttttaccctttntgtacctttacttgtagacgctctctccattgtgcttatgtccttggtcttgtttgcttaagacctatgcttaatgacagtgtgtgaaaatattttgcacaagagagagttcttacaactagtgatcctttttctaagacatggttaacatatatcaagtggatcacaaattgcataaatgaatcatgaattctccttttaacttattgcatatcaagagggatatcgatttaaaagagtatgacgcactaagtgtcatttgatgctattctatgatc

SEQ ID NO: 32631 - DNA, 492 bp, Zea mays
  unsure (1)..(492): unsure at all n locations
agcttctaaagggagaacacattttaggactgacaaatgttcatttngagaaagacaggatttgtagtgcatgccaagcaggaaagcaagttggtgcccatcatccacacaagaacatcatgacgaccgacaggccgcttgagctactccacatggatctattcggcccgattgcttacataagcatcggcgggagtaagtattgtcttggaatagtggatgattattctcgcttcactngggtggttcttttgcaggaaaaatcacaaacccaagagaccttaaagggattcttgagacgggctcaaaatgagttcggcttaaggatcaagaaaattagaagcgacaacgggacggagttcatgaactctcaaatcgaaggcttccttgaggaggagggcatcaagcatgaagtctcttctccctacacgccacaacanaatggtgtagtggagaggaagaatcaactctattgacatggcaggaccatgc

SEQ ID NO: 32632 - DNA, 448 bp, Zea mays
  unsure (1)..(448): unsure at all n locations
agtacctcatggcatgcntttcactaattatcctattattgccatgttctagatatagagagatattccaagctcttaaaagaataaggtgtcatgtaaagaatccaaatccttaggacacttataaaaggaatctctttttatctaaaattgtgagagcacctaaaggggggtgaataggtgatcctgtaaaattcaacaactaatagccacaaaacttggttataaagatgttagtactcaaaagaaccaagtggctatagaggagctcttgtgaatcacaaagaaagacaacacaagagaaagagtgatttatcccgtggttcggccaagtataacacttgcctacttccacgttgtggtgtcccaatggacgagggttgcactcaacccctttcagtgatccaaagatcaacttgaataccatggcttttcttttgttatatct

SEQ ID NO: 32633 - DNA, 388 bp, Zea mays
  unsure (1)..(388): unsure at all n locations
agctcgccatacctgtanagcacagcacatgccttttattatttcagaccataccggtaacttggcctttcgcgtgctgcggactggatatgattggacctttccagaaagctcaaggaggatatacacatgtattggtggcgattgacaaattcactaaatggatagagttccagcccattgcttctttaacctctgctaaagccgtggaattcattcaaagcataatattcagattcgggataccaaacagtattataactgacttgggatccaacttcaccagttcataattctttgacttctgcgagcataagagcattcagatcaagtactcatctgtagcacatccaagagccaactggcaggtctagcgagccacgggata

SEQ ID NO: 32634 - DNA, 392 bp, Zea mays
  unsure (1)..(392): unsure at all n locations
gaagtcganaagagttcanatntgtagaaatcgctgaaagagcttctatataaatggttagacttcggcaaccgatgcgtacagcggatgaagcaggtcttcaactcggttggagccaattttgagaaatttgagccttcggttgaagacctgccagggaccttcgaacagattgagggcgaagttgatgctcttgacgaagttatagccgggcacggcgacttctgtgccctgctagcttctcagggcaccgctgttgccttcatgaaaactggttgcacgcatgggaaggtcgttaatagacctaactttagcttatcaccagcagatntaactgatatccctagtctggcccgaagcataggaaatagattcataacacaaatctggac

SEQ ID NO: 32635 - DNA, 507 bp, Zea mays
atcctctgagtcacctgcggcatcaagctttatagcgcagatacaaatggacgatcattgtagcagtgacattgttcgtctatttatagagtggagttgatatacatcttcgtatgaaattacaattttccctccccatttataagtctttcacaattaaaagaatgcaacttggtcattccacaccgatgacgtgttgtatatgacttttctctccccctggacacatccttcgactttttttactggaggacgattatgaaggtgtcgaatcttttttcctcggtttttgtggctcgtctgaatcttcgcctcatacccttggatcaaaacttctttgtaccgccttagcttaccctaagagaatgtctacagttagccaggaccttctgccagaaacttttcccacaacaacataaactttgttagcttggatcttcggtcagagacctgctctttaacatacacatctctctttgaccgaaaaatctctccgacaacataaac

SEQ ID NO: 32636 - DNA, 432 bp, Zea mays
  unsure (1)..(432): unsure at all n locations
ggccaattcttgtcaaaacaacaacatttaccaacactttatttgtctaccatacctataacatggccatntgcgtgctggggattggacatgattggacccttcaagaaagctcagggaggctatgctcacgtgctggtcgtcatcgataaattcaccaaatggatagaatacaaaccccttgcttctctaacctcagccaaggcagnggagttcattcaatacataatattcaggtttgggataccgaatagcattataactgacctaggatccaatttcactagttctgaattcttcgatttctgcgaacaacgaagtatccagatcaagtatgcatcagtagcacacccaagagctaatggtcaggtggaaagagctaatggaatgatactagaatcactcacgaagaaattcttctacaagaatgaa

SEQ ID NO: 32637 - DNA, 494 bp, Zea mays
  unsure (1)..(494): unsure at all n locations
agctnnggattatttgggccatggattgtgacatggatttaattccaatccatgctaatccagagctgaattggcgaacaaggccttaggtgaaattgccatttcctaacatttgtcagccctgtcaaagctaaagagagaattgtgcaagacaaataaaatattaggggcatacaattacatattaagtggctacaaatatgtactaaatctgaatgttaaacggtgtcatccanaaacaatagcaatgaccatgctaacaatctgtaccgtatttcagttcagatttattacttttagttccaacaatattatcaaaaacagaacaaaggaaaggaataacaacttgcaaatgcatcagagaaaagtaacaaaaataagggacaagatctaccttgttaagtgatgatttacggctgactcgcagcagcaacgctgtaacaaactctagcgtcatgtagttcacatttggaagcttcttcaatatgttccta

SEQ ID NO: 32638 - DNA, 464 bp, Zea mays
  unsure (1)..(464): unsure at all n locations
nttaaacacaacaacttcatcatccttcggctctggaaccactttctcgccagcaaaacgaacaagcttactctcggcttcaccaaagtaaccccaatttcttcattataaccatatcacctgccatcatagtggatctaccaaagtcaaggtgactaggtttttctaggctcaggatggtgtaatcctcttcatctttgttaccacttccctctctaattgtgatttgctcagcttcagcaatcaaagtaccttcagcaacagtcttttctggcacaacaagacccgactgcctcatcacctctgatattggtgccatctcagttacttcggcctcgtctccctcgcgagacactctagcagtcgatcgcactctggccatttcaatgttttcactttttgacaaagctaatctaaaatgatgaagcgttcgctcgaaagcgcaatacataaagcttcagtta

SEQ ID NO: 32639 - DNA, 447 bp, Zea mays
gtcacctgcggcatgcaagcttgtctctcggaatcgaacgaagctccagtttgtagcctgcttcgtcagaagaaaaaacttcagaagaaaaaaaagtattaaatttccacaaattcataattaaatggccagagtgcgttctaccgccagggttgagcgtgagggaagcgaaactgaagcttcggagactgttcccatctccgaagccatgcaacgatccgggctagtgacttcggaaaagatccctagtgaagatgcagaacaagcagaacaagcaatcgctgaagcagaagaagaagatattgaggaaactgatcccgaagatgattaccgcattgccatgccaagcaagcccagccacttggacttcgggaaatctactgtttcaaaggctgatctttccaagatggtaaagtcgggcttttttaatgaaaatcagaagaagct

SEQ ID NO: 32640 - DNA, 420 bp, Zea mays
  unsure (1)..(420): unsure at all n locations
ngagctgctggttgggcagcaccggacagtccggtgtgctccttacagtctgagcccatgcgccagatagtccggtgccctatgcaacctactgtccagcctcgggtgtctcggcaaataatgtcgggcagtccgtgaagcgtcccgatcccttgggactcaaatgtgatacaattactagtcccaggaggctagtaaacacattcagttcatcagatagtacagagtcttacataatagttattacaataccaaaagtaagctcttagcgagcttgggataatagcggagcgagagaaaaccagcccgagccacaagcagactgggtgcacacacaacccctttttagtcgaacatagcagaaaggaagtcttcggtagctaagaaacataaataaagctaggtgaatacttacgtatt

SEQ ID NO: 32641 - DNA, 434 bp, Zea mays
  unsure (1)..(434): unsure at all n locations
agcttctgttcggtgacgaagcaataacaccggattaagcaataacgggatcaataagaaccttagcttcgacagaagatgaaagtgactgctaaataacaaaagataccatagaagggaccagacttcaagccatagagcacatcaacaaataccaggccgaaacattaaaatggcatgacagaaaagttagattgaaaacatcaagccaggtcatttagtgcttcgaagggtggctaaccctgatatagtagggaagcttcagctcaaatgggaaggccctttcttggtggtatcttcatcatgacccagttcttatagactgaaggatatgaacgacaacgacatacccaggtcttggaatgtggatgagcttcgacgatattatgtgtaattgaatgtaatntcttaatttttccctatgctggcaccct

SEQ ID NO: 32642 - DNA, 484 bp, Zea mays
  unsure (1)..(484): unsure at all n locations
ttagtgttaagtgagagagaattgtatgttcttttgagctcttgctcttggattgcttctttntctgattcgttcttgcgatcatctcaattgtaaacaaggcaagagacaccaattgtgtggtggtccttgcgggaagtttggttcccaattgatttgagaagagaagctcactcggtccgagggaccgtttgagagagggaaagggttgaaagagacccggtctctgtgaccacctcaacggggagtaggtttgcgaaaaccgaacctcggtaaaacaaatctgcgtgtcacactctntattcgcttgcgatgtgtttttcaccctctctctcggactcgttcatatttctaacgctaactcggcttgtagttgtgattaagtttgtaaatttcagattcgccctattcacccccctctatgcgactttcaattggtatcagagcctggtgcttcattagagcccaaccgctcgaagtgatg

SEQ ID NO: 32643 - DNA, 446 bp, Zea mays
  unsure (1)..(446): unsure at all n locations
gcttcggatcattgctcttcagctgtcgcatccttgtcataacaaagagntgtaaggtaaactcaagtttcaaggagaaggccagcatcaggtatgagtttattaccggcttgaggtgacttcgagcttcgtcactagctaagcttcgcccacccttcgtccagatttgtgttatgaatctatttcctatgcttcgggccaggctggggatattagttaaatctggtggtgataagctgacagtaggtctattgacgatcttcccatgcgtgcaaccagttttcatgatagcaacagttgtgccctgagaagctaaaaagcacagaagtcaccatgcccagctataactttgtcaagagcatcaacttcgccctcaatatgttcgaaggtgcctggcangtctttcactgaagattcaaattctcagaactggctcccactgagtt

SEQ ID NO: 32644 - DNA, 316 bp, Zea mays
  unsure (1)..(316): unsure at all n locations
ctcagcttgctgttctgagaacaccggtgttatataggtagtacggtggatagtgatattccttctccagctctgtctgctcttgtcagccttcaagaattgtccataacggattttgatcacgcctttgaggatgtcgctcctgaggatatgctgtcggagccgactgctggcgacatgatggatgttngctctgaaattccagacgtgggattataggtatcccgagcagtgtctcatgcatcgtcgactttggaaggcagtcttcaatgtcaagaagttggtcacgattgcctgactcccatggaggtgactg

SEQ ID NO: 32645 - DNA, 412 bp, Zea mays
  unsure (1)..(412): unsure at all n locations
agcttgacggacattgtnacactatatatanacctaaatgctagggattagtacatctagggattagtgattctctgaacattatggattacataacttagttctactaatcttagtgagacacaaaagcagggatcaattcacacatggcatattattaatctcacanaattaaacatctaagtaccattagggtctcccttnttatttatcttattaaacaaataaattactacataaactaacctatagtctaggcataaaattgaggtgcatagattgtggatgaacataatttatttgaacagagaatattcctatgaacattntgcaatttgaatcactcaagttggagttcatatgaaaaagatatgaaataaacacgttgtgaagtttgaaatacagagtaagt

SEQ ID NO: 32646 - DNA, 474 bp, Zea mays
  unsure (1)..(474): unsure at all n locations
tctntgatgtcnggtgtaatgtcgtaactggctatctttgttgttcgaacacttggctagcgnggatgatatatattgcaatgtgaatccaataagcatgagagtgatcaatgtatgtaatcgttgtacactaacatttgtcgaatattttgtatatcgtttcaaggcaccgaaatattttctgaagaattgtataagtttgtagttttttatgatagtcttaacatttaaatgatgcaattgacatgacattattaaaatcatatatagaagtttttatagtattgtgtagtgctgaaaaagatagattaaaataacaatttatatatgtctggatcatatatggattacgaaatggtttctcacaacagtataacacacatttgtacataagttattgtgatattatatgtttctcgtgcaacgcacgggcattcacctagtatatgaaatatgggtggtgtttatattgtg

SEQ ID NO: 32647 - DNA, 447 bp, Zea mays
  unsure (1)..(447): unsure at all n locations
atcctctaagtcacctgcggcagcaagctgttaccttgtgggtggagtccctaccctgcaaatacttgngtctccctctttctctacacaaactaaccaaacagcagctcatgccctttattgagaaaattgcagatcttctcccaagctggaaggcagagttgttgaacaaagctggcagaagaattctagtgcagcatgtcctaactagtatgacaatctatactgcaatggctattgattttcctaagtgggctctggatgcaattgataaaattagaaggggattcttatggagaggcagaaaggatgctaaaggaggtcactgtatggtagcctgggaaaaggtttgtaggcctctacatatgggaggcctcgggatttctaacctgactaagctntgttgggctctcagaatgagggtggtgtggctgaaaaaactgattc

SEQ ID NO: 32648 - DNA, 451 bp, Zea mays
  unsure (1)..(451): unsure at all n locations
ntatcanatggacgtgaagagtgctttcctcaatggaccaatcttggaagaggtctatgttgagcaacctcccggctntgaagacagtgagtatcctaaccatgtctataggctctctaaggcgctttatgggctcaagcaagccccaagagcatggtatgaatgccttagagatttccgtattgcaaatggcttcaaagttggcaaggccgatcctactntattcactaaaactcttgacaatgatttgtttgtatgccaaatttatgttgatgatattatatttgggtctactaacgaatctacatgtgaagaatttagtaggatcatgacacagaaattcgagatgtctatgatgggggagttgaagtacttcttaggatttcaagtgaagcaactccaagagggcaccttcatcagccaaacgaagtatactcaagacattctaaac

SEQ ID NO: 32649 - DNA, 446 bp, Zea mays
  unsure (1)..(446): unsure at all n locations
gtcacctgcgggctgcaagctntanataatcacaattaaatgatcaccagcttactctcttggatnttggcacagaggtttagtattactgttagatcccaacaaaaatgacccttaggaagaaactcaactctaatggtgaggtgtagtgtaaagtggcccattttacaccacccttgttattttngtctaaagtatagcctttatagtttaagcatcaaattcctaaaactagttaggatagccaatggcaacccactgcaatctttacagacattttggaaattattaacccactgtcacagttcaaacctacactaaaaaccctaagtagaaattaaagagaggaaaataaatactggggattagtgtcatcctaaaacccttattacaantcccattgaaatgtgtgaggacaatgcaaatccactatgttatcctcaacc

SEQ ID NO: 32650 - DNA, 433 bp, Zea mays
  unsure (1)..(433): unsure at all n locations
tttgttcggtgacgaagcaataacaccggaagaagcaagaaaaggctcaatatggaccttagcttcgacagaagatgaagagaactgcnaaataacaaaagacaccatagaagggaccaggcttcaagcagtagaccacatcaataagtattaggctgaaacaattaaatggcgtgttcagaaggtaaaattgaagaacatcatgctagggcacctagtgcttcggaggatggccaacctggatacagtggggaagcttcagcttaagtgggaaggtcccttcttggtgatatcctcgtcaagacctggatcatacagattgaaagacttggacggcaacgacattccaaggtcttggaatgcgaatgagcttcngagatattatgtgtaaaccaatgtaatttcttacttcttccctatgacaccctttttc

SEQ ID NO: 32651 - DNA, 358 bp, Zea mays
  unsure (1)..(358): unsure at all n locations
tctgagtcacctgaggcatgcaagctngccaagccctcggacccggccggacttcaccggaggcccgagatcgacctcaccggacttcggtcttccgccgccgcgcgtggaccgagctatccagtgagtctccgcccaattccttgcgctcatatcttctctggcaccccatggacctctctgacccatccaattgaactatctcgccgtgaccaggccggactcctcgccaccgacgagcatccccgcctgcgcgcgtggaccgaccgactccggccatcttcgacggcgacccgcacaccgttgtgatccccgagacctcccattcatcctcgaccacttcaccggagcaatctcg

SEQ ID NO: 32652 - DNA, 438 bp, Zea mays
tggacctctgaaactcagcttcgacaacctcgtgactcgattcgcggcacagatcatagcgggccagtttaatccttgacggatcaccttggcagcgagggccctgggccccgcgtgagagccgcaagttccgctgtggactacgctcaggatttggacgccttcggtctcggtgatgcatttaagcatgggttggctgacccccttcttgtaaagctggccctcaatgagtgcgaagtcccagctttggtgcttgaggcgcttggcctcgttgatgttgcttggatggtaatatccctgcaggaacagggtgattggtgctcgccagtcttcggtcatgatgaggttgactatgttgtggccttcggtgtcgttggttatttgtaggccctctgggctgcggacagctggtgtgctgatgacatggtagaacacgtc

SEQ ID NO: 32653 - DNA, 115 bp, Zea mays
gtaccaattaaaaaaggattgactttagagcttacgcttcaatttctttcttattatcaacttatgtcctctaaatgttttttgtcagacttcacagagctttgtaacgtcagct

SEQ ID NO: 32654 - DNA, 443 bp, Zea mays
  unsure (1)..(443): unsure at all n locations
ntntctggaagatccatttgcaacctataggttgacaaccataatgacggtcaacgacctcccaagttccattagacataatagattccatctcactccttactgcttccttccataagtcagcatcaggagaggaatatgcctcactaatggtagttggtgtgtcttccacaaggtacactataaagtcattaccaaaggaatttgcaaccctctgtctcttgctctttcgagtgactatagtgtcatcctcctcagggatgtgcacgtgagaatcctcagcatgatctataggaatcgacagttcgtgctcatggggaattatagtctcatgacttgtatcactaggtgtattcttcatgggaaactcattctcaaaaaatgttgcgtctcttgattccatgatagtatcaacatacatatcaggcacatcagaatttata

SEQ ID NO: 32655 - DNA, 481 bp, Zea mays
  unsure (1)..(481): unsure at all n locations
agctntactcttaagctaatacaatgggcgagtccatacttgaacagccatctagccacaccgaaacgacagcttggctcctatcctacccgagtgcagatagcctaaccaattcaattcaaaattcaatccaaaaaattaaactgttagaacacttcaacacttttaaccattatctctctgacaatcatcatgtcgtaacatcataatgccaacacactagcatctgaaagtaaacgtgtgtccctgaatccactattacgattgtggcagtcgttctgatgaaatctgcgtgttttccgactagtttagaaaccctatttttttaagagattgtcattttcctaacgccccgtttggatcattaaaattaaatttcattctaataataataatttggacatatatcaattaagctaattcggttntatgtaaaaatatatttatatanctatattagtaagatgtcggagatatntat

SEQ ID NO: 32656 - DNA, 494 bp, Zea mays
  unsure (1)..(494): unsure at all n locations
gagagcactctacatgtctacctctggacgatgaagagactgcactctgcatatgcagctttctgtggttcctgatgacgatgatgagggcactctacaaccatctctcttagaacgtttgctacagatgttgcaccactggcggggtattgctaaatgtcctatatctagtgacagtgaccgaggcgacgacaagaaggggagaagaaaggagaggaagaggtactacaagaagaagggcggcgatgcccatgtttgtcgggaatgggattccaacgagagctcaagcgactcctccgacgacgaggacgccgccaacatcgccgtcaccaagggactcctcttccccaacgtcggccacaagtgcctcatggcaaaggacggcaaaaagaagttaaatctaaatcctccactaaatatgaatcctctagtgatgacaatgctagtgatgaggaagataatntgcgttccctttttgccaaccttaacatagc

SEQ ID NO: 32657 - DNA, 450 bp, Zea mays
  unsure (1)..(450): unsure at all n locations
agctntatcaaatggacgtgaagagtgccttcctctatggaccgatcaaggaagaggtctatgttgagcaacctcccggctttgaagatagtgagtatcctaaccatgtgtataaactctctaaggcgctttatgggctcaagcaagccccaagagcatggtatgaatgcctaagagattttcttatcactaatggcttcaaagttggaaaagtggatcctactctatttactaaaactcttgacaatgatttgttcgtatgccaaatttatgttgatgatattatatttgggtctactaacgaatctacatgtgaggaatttagtcggatcatgacacaaaaatttgagatgtctatgatgggggagttgaagtatttattaggatttcaagtgaagcaactccaagagggcaccttcctaagccaaatgaagtatactcaagatattc

SEQ ID NO: 32658 - DNA, 475 bp, Zea mays
  unsure (1)..(475): unsure at all n locations
aaggaaagagacgcanaggcaaagcatatatggtcggctgatcaaagccgaccctacttttgatcagttgctctccaagaatactagcaagaagaccgttctacgtgatcggtcaacgaagaaaccctggtcacctgctaaaatgaaacgggtaaacaaaacggcccgaaaggcgacacaacaagcatcacctattcatcctatgagaccagggtactttccatccgtttactcatcgtcggtacattatcctattcaaatatggaatggtacgacgatgaatccatggtacatgtatagtccctttgtctatccagactggggggcacctccattatatttattttgatccattgatcaaatggtcatggccgaggaagatacaanttggaacgacctttatacattggtactttattgaatggatctccatttgaaaagccggtgactcacatcaggtttagtttatatgctt

SEQ ID NO: 32659 - DNA, 417 bp, Zea mays
  unsure (1)..(417): unsure at all n locations
agctngtgttcaaagacgaaggaccttcatcttctactatcatgttgtgcaatatgatgcatgttttcattatatctccaatgtgttggggagaccaaccatatgcaggaacactaactatggcccatcgcttctgtagtactccaaatgtccgttcaatgtcttttctagaagactcttgaatagtggcgaaatgttgggtcctcacatcatacggatgaccgattgtcttgacaaacgcttgccagtccggataaataccatctgctaggtaatatcccatgttgtacgtgtgtccattgacggagaaactcactggtggactatcaccattaagatgcgaatcaaacagggttgaacgcggaagaacattgatgtcgttacagctaccgggcatgccgaatatgcatgtcaatc

SEQ ID NO: 32660 - DNA, 410 bp, Zea mays
  unsure (1)..(410): unsure at all n locations
actcagcttntagactccgtcagggcagcgcctacgacgttgtctgcagtcagtgagttgctacgccacccctagctccacggcctcgccggtggctatgaagcagtggcgtgacgacgtcgaccggctactcggcatggtgcattccacttcgaccaggtctaggcctcagtcatcccgacgccaacgcgaggcgacagcatctatgcgctcaccctccgtaaggggagcgcagaccgacgacctccgggcagagctcaaccgtaggcgtacgggagaggacacccggatctctttggaaagggcgcgtgagcgccgacaaaacatcgagggtcgcaacctccaccgagacttcactgcggaagcaccgcagacaccaatgggcgcncggtcccaaatgggtggtccct

SEQ ID NO: 32661 - DNA, 418 bp, Zea mays
  unsure (1)..(418): unsure at all n locations
tgacaagatcaatgaattaattgatgctttgaatgagaagaatagattgttagagaagcaagaggatcttctatatgaagagcatgataaatttggtagtgcgcaaaattctcttgatttataagttaaaagaaatgaaatgctttcatatgaattatctacatgccatgaatctatttctagcttaaagagtattaatgatgatctaaatactagagtagaaatagctaataaatcaagctcttgtgtagaacatgttgtgatttgcaatacgtgtaaggaatttaatgttgatgcttgtagtgaacactntaatttcatttccaattatacgatgaagtggctagtcttaatgcccaacttaagactagcacgaatgactttgtaaactaaaattggcaaggatgactcactattg

SEQ ID NO: 32662 - DNA, 471 bp, Zea mays
  unsure (1)..(471): unsure at all n locations
acaactatatcagtgggctttggtatgagaaagctgaagttattaagtatcaaaataggttgtccataatatgcatctagtgaagcgtgttccaagtagttctgatgatgaattctcatatgcatataccgctgaacttgtttggtcaacgaaggctggcatgttcttatttataatttattcaaaagaattggtaagaagaagttaatattacttttaatattgccaagtgtaacaaaatatgtggcgagctattaaaaagtggcaacattaaagtactcatactaaacctcctatggacgacctaatgagacatgcttattgcaagtggcataattccttttctcatgccactaatgattgcaatggttttcgtcggcagatacaatcggctataaacgaatactagttgagtttccaggtgatacagattgacanacatcctttnttctactaatataatagatctgg

SEQ ID NO: 32663 - DNA, 355 bp, Zea mays
  unsure (1)..(355): unsure at all n locations
ttcaacctttccatttcttgacataaagtggtgtcaggtgctcttactgtaagacaatgacaaaaagtcttgcaacttaaagcatttgccaccacattagctnttcctaggtgataatggatttccaagtcataatctttgattagctcaagccaccttctttgtctcatgtttagttctgactgggtaaagatatacttcaaacttttgtgatctgtatacaaatggcatatattccccagtagattatgacctccaatcttataggcatgaaccacttcagctagttccagatcatgagttggataatgttcttcatgtcggcgtatctaccttgaagcataggctatctgtt

SEQ ID NO: 32664 - DNA, 466 bp, Zea mays
  unsure (1)..(466): unsure at all n locations
ntngaagaaatacttagcgaccgnggggagttttgtgcctttgtcggcgctcgaggggttgtagcaattntggagaanattgcctgtgaacatgttaaagctgcagcccaggcagaagtcatcttttccatagacgatacaaaggaacctttagtcgaagctactctaatgggtgggaaattttattccggtgtttggatgaagggcggtcgcgagatagccgacgaagcaataaagaaaaatgaaaaagaatcccaagatgcccgagtagaggcaaaagaagctgaagaagttgtcatacgtgcattgattataggtacttctatttaatgctctnttgctttattatttgtttatggcttcgaaccctaattaccatatgctttgctacagccgacctttcgccacctccggagccattcaaccctgaggctgaccccatcataaaagaagccttggatgtgat

SEQ ID NO: 32665 - DNA, 401 bp, Zea mays
  unsure (1)..(401): unsure at all n locations
agcttcaagtgagttanagttccatgttgaatcattcccaggttcaacttctccatttcttggcataatataatgtcagaagtcttcatcgtaagacaatgacaganagccttgtgtaacaccctaaagttcaatcctgtgaaaatgagaaaaattctccaggttttttttaaaatcaaaatacctttccttaaagatattcataatttcgaagttactactctcaaaattaatatatattcttttactaaaataaaaagacacctagataaattaaataaccttggattgaaattatatagaagaattatgattaaaccatttttttatatataatctacactacaaattatatttccctaaaaattcatgagatgtaaactattctctatttcatcatg

SEQ ID NO: 32666 - DNA, 393 bp, Zea mays
  unsure (1)..(393): unsure at all n locations
tggagcgatggcgaaggatgagttatggagtggagtggaagcctttgtctttgccgaagactccaattcccttttaatacacctatgacttggtttgaagtatacttgaaaacacattagtcatagcatataaaagagatatgatcaaaggtatatttatgagctatgtatgcaagacatcaaaagaaattcctagaatccagaatatttagctcatgcttaagtttgttaaaagtttgttcatctaatggcttggtaaagatatcgactaattgatctttagtatttgtcggtgtttcgagaccggggggtccctaagccgacgagtgaaatgtcgtcgcgtgccccagcccaaatgggtcggcgcgaggccgancgcgaatgggggaagtg

SEQ ID NO: 32667 - DNA, 497 bp, Zea mays
  unsure (1)..(497): unsure at all n locations
gcttacctntttatccgcgctttcagagtcaagctgttttattattagatgaatccaaagaatgtgaatcgtctatagaagcaaaaacctgggctaggtcgatctgaccttgggaatgtttctcctcaagcccagagtaccaccgggttgagacggcttgatgctgaagatttctctcctcacgctcatagtactgtcgggcatatctgacanatagctacctgaagatagatacaccgatcacaacaaattaatccattagcccaggaagaagcaaagataccaaccagcatttgacactttcaaatcagctatctgtttttgaagcagcaatggattccactgcgtcaaggacagagctccttctgggatagtagcgccatgtgatntcaattgagcatacattccatcaaccaaagcttggtattaacaacatatgagtccgaagaaagtgatttaccatgaggaatgacagattgataaagctaatctacctg

SEQ ID NO: 32668 - DNA, 487 bp, Zea mays
gtatatccttaggttgatcatggtatgcgggacaatgaattatcttattttattcgatataatgggctagaggacacttgccttcaccaggttgctgatcacggaagtctcctgcaacacactcaaaaacctctgactgctcgttgtctattcaaagcaatcattcattcaacacatttgtgaaatgaccaaggaacaatacaccaatcatatgcgacagagtgaacacaggatcagtggagaagcacacacacacaagtgaactctaggttatagggtagatcaatatacctagaggtctgtggatttccaactactgtctatctcagtggattacattacttaactatatctatcttaatgaatcacctacttaattaaagttattccagagctgggatcatatattaaatgagaataatctcacaaaagtaaccatttaactattcagtaaaggttcactcttattctctctataataaatatt

SEQ ID NO: 32669 - DNA, 481 bp, Zea mays
  unsure (1)..(481): unsure at all n locations
agcttcgaagatagatagatgaagcctctaaagagttgtatctcaaagatctacagcaaaggcaaaaataaagcagatgctataacataagcacttcattcaagaggacgcanattccatttactagagcgcatctccactttcaatggacctccaagcaaccccttggcctgctatatataagacaccccaacttccttcgtatgatgggaaattagaccccgtcttatgagctatgaaaccaacattgcatctgtcagcaataacacggaggcactgactaaatcattcatgatggttagaagagacatagctcgaaactggtccgtataatttaaaatgaggagcaagccacaccacaacaaataatcatcgtaagttgtattgtacaggttattgattaagacccacatagattggcgtaaatatgtaaataaccctattagggtatgtgggcaatatccgcttgctcttaagggct

SEQ ID NO: 32670 - DNA, 437 bp, Zea mays
  unsure (1)..(437): unsure at all n locations
ngatcatcaacacatnggatgaagcactgtatgaacacattgtctagacactttccatcggcnaaagattcatatatatcagaagcagtcgaacaatattcaccataatctattatggtcctggggaatntttgataacaattagtgaggtcgcgtaaaactatcagcatataaacagaatttgtttttgtctgtacttcatacctgctagtgtcagattgcgtatcacacaaatattcgcgtagagctaacacagtttgcatctccgaatcaagtgaaatctggtcaacctgaggagtgtttgtagctggatcggtttcaacagaaacctaaaaagatatatganaatatataacaatctgtgaacagttttggcaactataataaaaatgaaaattactgagctgacatgttcagatggagtctgatcaaagcat

SEQ ID NO: 32671 - DNA, 458 bp, Zea mays
  unsure (1)..(458): unsure at all n locations
gctgacaacaccatttgacatttcacataaaatntctgagatcaagaatattagttcattcctcaacatgcaaaagcgggtcttatcaagtggcttagtgaaaatatccgctaattgatcttccgacctcactccttctaaaatgatatctcctttagcaacatgatctctaaggaagtgatgacggatatcaatgtgcttggtgcgagagtgttgtacaggattattagcaattttaacagcactctcattatcacacaacaaaggtaccttttctagaactacgccatagtctagaagagtttgtttcatatataaaatctgtgtcaacaagcacctgcggcaatgtattccgcttcggcagttgacaaggcaacactattctcgcttttggatgtccatgaaactagtgatctaccaagcagatggcatcccctataagtacttttcctatcaat

SEQ ID NO: 32672 - DNA, 465 bp, Zea mays
  unsure (1)..(465): unsure at all n locations
ggcattgcatgtntaaatntcttgtattgcatctagggcttgtctaacctatttgagataaccgccaacaaagcgagtgaaaaagcttaactcggatcaaacttgacaagtcttagttttaagcttttagcacttaaattcttactttttatgcaattgttggttcttgaaatatgcatgaggtactgtacttagggggagtattcaaaactcaaatcactcatgaaaacccctagtgcaaggtcaaaatgcaaatttcaccatttgcctattttgaaaattatgagaaaatatatgagggtgccaatacctgtcccaacaagtgttattttgtgtgattataagttgggatttggtttggttggaaattagatagaaaatttcaaaaattccaaatcttccctctgtctgggcacaccggacagtctggtgtgcaccggacactgcactgtgcaatgtccggtg

SEQ ID NO: 32673 - DNA, 492 bp, Zea mays
  unsure (1)..(492): unsure at all n locations
agcttcngagccatgtgtgcaacggctgaggacttgtttactctgtcggagctagctcttcnaaattacaccttcagctgaaaatctgccaagaacattaaaatatattgaaggcgaagttgatgcccttgacgaagttattggtgggcacgcggacttttgcgccctggtagcttctcggggcacagctactgcttttttgaaggctggctgcacgcatggaaacattgcgaacagaccaaacttcagcttgtcagcttcagatttgatagatatcccaagcttagccagaagcatcggaaatagattcatgacccagatctgggtaagtggcgggcggaaaatagcaggcgacgaagctcgaagccatcttaagccggtaagaaacttatngttgttacttttaaccttctctttgaaatntgtacctttcttactttgnntgttggtatatacaggatgatgaagctgaagaattgacatgctgatgtt

SEQ ID NO: 32674 - DNA, 373 bp, Zea mays
taagctctttctaatgccatatttcgagcatatgttttagctgactggtcatggaccgccctttgcctgttaaggcccctccttcttcaacttccacgggcgctcgtaccccttcggtcgtcgtacccgccggtgggtctggttcccagcagcgtacacccgccgaggacgttgccggcgatctgtcagcggctaccgcatctttagcatcagcgtcggtgccaaatcctccattggcagtggccgaagaggttcccactatacttgcctccaccgcgctgggtggcgctggtgctggggtggcgccgtcggacccccaggatccgcctgtcaccatcaaggcggcaccttctggtccccgagttccagctga

SEQ ID NO: 32675 - DNA, 346 bp, Zea mays
aactcaacttctcaccagacctgcggccaattggtgagcttcctccataatgagcaaacgacatgaacgctccttaatgacacactttgtttgaaacaacgtatgtcgctgattctgctctggcttctccatattggcactaagcactcgctgtacaatgagggctctcataatgctctgcatcatctgcaccaatctggtcttcaggtggtccttaatggctgcatcatcagccgcaagcaaagcaaagtgtacctcaatccaaatcctaccagaagaatacccaccttctctttaccaccaaacacgctgataggacatcaccctgacgtgtcatagccttgca

SEQ ID NO: 32676 - DNA, 416 bp, Zea mays
  unsure (1)..(416): unsure at all n locations
agctngtcatgcatctcctggagttgctcgatgtgagcatcacggctccccggtggggtacgtgtcccgtttgggttgtgtgatggaggctggtcgccctcctgtggcatgccgaggcgatctccttccttggggaaccctgagtcgacgtggaggcactcccaagttagattgtagccttcaccaccggagctgtaaccccccgagcttttggagagcatctcatcacatgcatagaggaactgtagcatggacttagggtctcttagcccggagaagtccagggcaaagcttgggccatcttactcctcagagtctaggcacccggaggggaatggcagcccgacgtacatctgagcgttgtaaccggtgtcaaaacgtggttggaaggggatcaggttgaaacatggacggtc

SEQ ID NO: 32677 - DNA, 481 bp, Zea mays
  unsure (1)..(481): unsure at all n locations
tataagggctagccagggatgattcaatcaaaattgtttgatctattcaacaattgctagatcgctctaccaccgagagggatgatgacacaaaaggaaccacaagttggccttaaaaattagacgagaaagaagaagatgacaaagatgagtactagtgtatcggttattttctgttttgaatttttttaggtgcacatggatgattttcaggaggttatgcagacaaaatggaacaaaactggtcaactcaaaccaacctctcaaacgtattcacatcaaattaactggctctgcagggtcatgtttcggctagagtccacctaggaaaatagagaataactagagctactcaagcgtctcagcagggaacagttacgcctaagaggtgtgaactaatcacaagagacgaaaactgctgtagcttctttagagtgaccatgggctgttntggctgaaattcgtatgtatagcttggata

SEQ ID NO: 32678 - DNA, 440 bp, Zea mays
  unsure (1)..(440): unsure at all n locations
agcttnctctgaacacaatgatggattcctatctattcaggggcggacccagcacctaggcacctcaggcggtggcctgtgctgcctcgcaggttctgatagatagaagcaagtataatgcgtagaaacaagcgagcaacgtagcatgtacacggcgaaagtataggcacaaaggatcacattgtaatctcgcctaggctgtctctaaatcctgggtccgccactgtatctaaccccgtataattcactgctggcagccttttaaaagtgcacccaaaaagaaaaataggtgtgggacaagaaaaggcacttcattagggcctaataggcactataacggaaaaaacgtacaagtacgtatcaagcctgttggacaagcaagtaagcaaccggctccacgcgtcccgttccgttcgatagccacacgcaagctttccagt

SEQ ID NO: 32679 - DNA, 460 bp, Zea mays
  unsure (1)..(460): unsure at all n locations
ggcacacatagctcattaaataccttggatcatatctcttttatatgctatgactaatgtgttttcaagtctatttcaaaccaagtcataggtatattgaaagggaattggagtcttcggcgaagacaaaggcttccactccgtaactcatgcttcgccatcactccgagcaactctctattccttggggagaaatgagcatcaaagaaaaggacttcatccttgggggagagagtaaaagctcanaagcaaaaggaccggacttcatctttggtataatcttaactcgttacttatgaccaaaggggaagaaattacttcgagggctctaatgattccgtttttggcgattcatgccaaagagggggagaaatgagcccaaagcaaaaggaccgcaccaccaccgccaaattcaaaaacttagtgctctccaaaagtctttatcattcggtatcctatt

SEQ ID NO: 32680 - DNA, 443 bp, Zea mays
  unsure (1)..(443): unsure at all n locations
gcttagcaaaagaaatttctagaatcaagaatattgatctcatgcctaagtctggtaaaagattgttcatcaagtggcttggtaaagatatcggctaattgatctttagtattaatgtaagaaatctcgatatcccccttnttttggcgatccctaagaaaatgataccgaatggctatgtgcttagtgcggctatgctcgacgggattgtcggccattttgattgcactctcattatcacatagcanagggactttgtgtaatttgtaaccgtagtcccgcagggtttgcctcatccaaagcaattgcgcgcaacaatgtcctgcagcaatgtactcggcttcggcggtggaaagagcgaccgaattttgcttctttgaagcccaagacaccaaggatctttccaagaactggcaagtccccgatgtgctcttcctattgat

SEQ ID NO: 32681 - DNA, 473 bp, Zea mays
  unsure (1)..(473): unsure at all n locations
ntgagttcatatgaacccattttagtatgtgctctcttatgcctgtgccattgcctcctccagaatacctctctgtcatcagctgctttatcagctgagttgcatgtctttgaagagccatagaactgaccctttattctttcgaggtattctgtgacagcgtcacactctggaattgagctcgcaatagtagggtcaactntattctttagcactgccatgcacttgccgcaatgaggttgacaacgacaaagaatggcggtgtcttcccgtcactggctgcgcaccctctctcagatcggtgttagggtttgtcggtggggagtacggctttagcgaactgcgtcctctaaaccgccggcccccacccttntatttatagcgcagtgggcaccctcgatcagggcgcgatcaaaggcccaagatgaactgtgggcccatcttggtggagatcaatccaacatgacacttgc

SEQ ID NO: 32682 - DNA, 426 bp, Zea mays
  unsure (1)..(426): unsure at all n locations
aatctggatgagtcggcgataatatccagctagtccaagacaactccagacttggtgaacagtggttgggggtttccactctacaatatctttgnntnngcttggatctaccgcaattcctttggccgataacacgtgccccaaaaattgaatttcctccagccaaaacgcgcactcgctgaacttggcataaagctgatgttctctcaggcgcgtcaatacaatccgtagatgctgagcatgctcctcttcatctttagaatatatcaagatatcgtcgatgaagaccaccacgaacttgtccaactcgggcatgaacaccgagttcatcatnnnngtgaagtgggcaggagcaattgtgagcccgaagacattaccaggtattcaaacaatccgtaccgcgtagtaaacgcgggcttcggtata

SEQ ID NO: 32683 - DNA, 476 bp, Zea mays
  unsure (1)..(476): unsure at all n locations
acctctgaactaactcggctgcatcgctnttcgctggtggcctatataatcctgacctgaagaccttcccgactagtgtcttggatgctgcgtgtattccacattgcccagcatggacctcatccagaagtcgcttcccagtagatgagagaatgcacttcatgaggacgcctgatgcaccccttctgtataatgtttccccaatgagtgtgtagtgggctgactgtgtggcgatgcgctcggctacatttttgtcatctggttcctcttcattctttatatatctgatgatcggccttctccagtcattagagtctgactctggttgattcacgatattacactcttctgcctgatccattgagatgcttggttgtggtatttcttgtacaaagaccccgggtgggacctgagttcgactggatcctagcttggacaatacatcngctgccgtgtttcgatctcttctacatgat

SEQ ID NO: 32684 - DNA, 367 bp, Zea mays
  unsure (1)..(367): unsure at all n locations
tgcacattttctacttacttgagtatgangcgcctggaagacttcctgaatagcagcttctatgtcacccatggaaacaacagcatcacctacaaaaatcagattcatgttcaatggattatatgcaagttacaaaggagggttgaaatcgagaaacgataacatgaatggtggatttgtactgcgggtctaagtttatgtgactatgtgaccataaagatagaataatctggtgcacataatgatggcaacagggccaatccccaatggggatctcatgggggatgaagatggtatgtttcttatcctagtcagggacttaacgggccaaaatctatcctcgtcatgtgaagtggaggagggaatg

SEQ ID NO: 32685 - DNA, 479 bp, Zea mays
  unsure (1)..(479): unsure at all n locations
tcttgcacgacatatntcttgcacgtccgatgggactgcaatatctaccactcatgagccgatctacattgactcatcatcgctaacatgcctaanatggcaagggaaacactccaatgaaccatttaggaagattagacatatgaagatactaggattcatggtcaactataaccctatcaagtgttaaataccttcagacttgaccaacagtctagccaatggtatggtccttgatcaacatagttgtgactaatacaaccagagcctcactctattgctcaaccaagtccacattcaaagtcctcagtctcgcccaatctctaattattttccatgcatctccaagtccatgtgatagcagtaacaatacaacaaggacctatctctagtaagtaacaatccatcaatcaacttctaccataagtcccatagcatgttatactatgtgatccttgtcatactagtaggactcatat

SEQ ID NO: 32686 - DNA, 466 bp, Zea mays
  unsure (1)..(466): unsure at all n locations
agctngacgatggaggttgtcgttattctcccgctgacgcctagccagctcatgcacatcggaagatatgttcctgcacatggaaaagaatgctgcaataccatgggccagtcgagtacccatcccgcgaccacgacctcgaccacgaccacgaccacgtggtgtgggaggtccgcgaccaggagaggggcgcgagggaccagcaacagcaggtccacgagagctggagggggctttcctcagacgccctgctggattgtttggatcaatccagaagggggtgtacgagagatgtcttgttcctttctcaaagcgaaactgagtcaccacttcaatcatcttcatgatgaagggggcgtgaagacatcccttgagagggaagcaggcaacatgaatgatttcttgccagatcatatcaaatacattgatgctnntcagaactattggcttataaatgagagcaaga

SEQ ID NO: 32687 - DNA, 463 bp, Zea mays
  unsure (1)..(463): unsure at all n locations
ntatcaaatggacgtgaaaagtgccttcctcaatggaccaatctttgaagatgtctacgttgagcaacctcccggctttgaagacaatgagtaccctaaccatgtctataggctctctaaggcgctntatgggctcaagcaagccccaagagcatggtatgaatgcctaagagatttccttatttctaatggcttcaaagtcggcaaggccgatcctacactctntactaaaactcttaaaaatgacttgtttgtatgccaaatttatgttgatgatattatatttgggtctactaacgagtctacatgtgaagagtttagtaggatcatgacacagaaattcgagatgtcgatgatgggggagttgaagtattttctaggattccaagtcaagcaactccaagagggcaccttcatttgccaaacgaagtacactcaagacanttctaaccaagttggaatg

SEQ ID NO: 32688 - DNA, 433 bp, Zea mays
  unsure (1)..(433): unsure at all n locations
ggtaccatcctgcanaaccagatcaataatggaagaagatagcttcatctgatcacatgtcctccttgctagtaactccccattttctttgatcaagtaaagtgtgcttaggtcatccaccacaccaaaaacgccttgagcctccagccaagccccatttgtgaaaaatgctattcggtcattatctgaccagaaatagttacaatacagtggataatcagaaaaaatgatgcccccggacctctactgcagaaaatgcacatgaaactatgttccatattataaaactattttcaagaaactaaaaagaaaatggaaatatgcagattgctactgtctagggattgtagcaaaatgacaatagtgcaatatttctgccaacataaacaaaaactggcacctaatctcccaaaaaaattaattggtcaacctg

SEQ ID NO: 32689 - DNA, 405 bp, Zea mays
cgacctgaggcatgcgagctttggctgataccgatatcatgccccaatttttatttttcttaagttaatcgcacaaatggctacccaaatgtccctggccacggacgcatcggtagtaatcaatataaccgtgcgttcccagtgatctatggcggcttatttcaaactaaagggccgaggagtttgaggagagcttatggatgctataacaagactagagacaacatgatcggacctgatttgcactgaccacggcgaagtgttcttgcggcttgtttgaaccgatttgggggaagttaggaatttgagctctcatgtgaacgattgaggacgatatctggtggctgggtgcgcgatgacctatcgcagcaggcccgaccatcaatttatagagctagtgggcgg

SEQ ID NO: 32690 - DNA, 285 bp, Zea mays
gattggacctctcaagacagctcaacgaggatacacccatgtattggtggcaattgacaaattcactaaatggatagagttccagcccattgcctctttaacctctgctaaagccgtggaattcatacaaagcataatattcaaaatcgggataccaaacagtatcatcactgacttgtgatccaacttcaccagttcagaattctgtgacttctgcgagcaaaagagcattcttatatgtacgcatctgtagcccatccgatggccaacgcgcaggttgagcga

SEQ ID NO: 32691 - DNA, 222 bp, Zea mays
ccccctttaaatactgacacattgaatttttttttttttgaagcgtatgggagagtgggtttagaaaaatgagcctctaacgctaccgaaaagcgacagggatggcttccttcaagtttcttgcgacataagacaccgtcgggacctttgaaaaccttgctcttatatccctgttactttgacaatgacaacgagaataaaatgtacaggcatactttctat

SEQ ID NO: 32692 - DNA, 397 bp, Zea mays
agcttgagaaggggacaaccgtagcatgcacattattttcttataagaataccaagctttgcaagaaagtcatgagctaacatcatgatatcaaatctaaagctcatgacaagtgcctctaccacgtttccacatgctccacacaatgtaacaaacaagccactcttccaaataaaagaatatgcactacaaagtgttatcattgtcatgagaagggacatgagattaagtcatgtccctacataaaagagagtggcttaactttagaaagaaagaggctcactaaccatgtagcaaacaataagcaaggcaagaatgagtcttgcaaaattaaaaatcaaatgtgctacacttgccgaagaaagggacacctatgcaaggatttgcccatgagtaa

SEQ ID NO: 32693 - DNA, 320 bp, Zea mays
  unsure (1)..(320): unsure at all n locations
caacctcccggctgtgaagatagtgagtaccccaaccatgtgtataaacactctaaagcgctttatgggctcaaacaagccccaagagcatggtgtatatgcctaagagattatcttatcacttatggcttcaaagaccgaaatgctgatcctacactctttactaagaccattgaanatgaatttggttgtatgccaaatttatgttgatgatatcatatttgggtctactaacaaatctactcgtgaagagtttagtatgattatgattccaaactctacatgtctatgatggtggagttgaagtattatctatgatt

SEQ ID NO: 32694 - DNA, 421 bp, Zea mays
  unsure (1)..(421): unsure at all n locations
gctgcagctttaaaggagaacacttttttctttcttattttattntgaaaaagtcaggggttgtagcgcatgtcatgcacggaagcaagttggtgttcatcatccacacaagaacatcatgacgactgacaggccactcgagctcctacacatggatctattcggcccgattgcttacataagcatcggcgggagtaagtactgtctagttattgtggatgactattcttgcttcactctggtgttctttttgcaggaaaaatctcatacccaagacaccttaaagggattcttgagacgggctcaaaatgagttcggcttaaggatcaagaagataataagcgataacgggactgagttcaagaactctcacatcgaaggcttccttgaggaggagggcatcaagcatgagttctcttct

SEQ ID NO: 32695 - DNA, 450 bp, Zea mays
  unsure (1)..(450): unsure at all n locations
ctactagcatattcggtctgccttgcagaactatatttaccatatatctctaacttcgatggtcaataccaggaaggaaagaatgtcatgcaacaacaaacagaaatgaatcctccatatcctccaccggttggaatcgaccaagtggttgctgcccaaatgatggtaatacaacaaatgtcatacatagttaccgaaatgcaaaattatataagacaagaacaccatgaaatacgtcaggaccgactggagatacgtcaagaaataaggcatacacnngtggaaagacaacgacaacaacaaccttcaccaccaccaccagcttcaccaagctacataaatatatatatatatactactatnntgtagatctaagtgttacctttagtagtagttagtatttactatattgagaataatatanggctaatgatcgatgtgtggtaataa

SEQ ID NO: 32696 - DNA, 427 bp, Zea mays
agcttggtcattttattgctaactgttcctgattatgatagtgaccaggagcaagggaaaaatgggaatagagagaacaagaaggcttacaagaaggccaaaggcgaagcacaccttggaaaggagtgggattcggattgctcttcgtccgactccgacgacgaaggactcgccgccactgccttcaacaaatcggctctcttccccaacgagcatcacacttgcctcatggcaagggaaaagaaggtaatcactcgtaatgctaatacttatgattcttctagtgatgatgaatctagtgaggatgagattgattactctagtttattcaagggattggatagaactaagatagctaagattaatgagttgattgatgccttaaatgaaaaggatagaatcttacagaaacaagactctttatatg

SEQ ID NO: 32697 - DNA, 423 bp, Zea mays
  unsure (1)..(423): unsure at all n locations
gcttgcatttcatgtttaaatttcttgtattgtttttatggcttgnctaacctagntaagataaccgccaacaaagcgagtgaaaaagcttaactcaggctcaaacttgacaagtcttagtcttaagcttttagtacttaaattcctattcactatgaaaattgttggttcttgagatatgcatgaactactgcacttagggggagtattcaaaactcaaatctttcatgaaaatacctagtgcaaagccaaaatgcaaatctcaccatttgcctatnttctctaaaaattttctagcctatggtaaatttttgaaaattatgagaaaatatatgagggtgccaatacctgtcccaataggtgttcttttgtgtgattataagttgagatttggcttggttgaaaactagatagaaaatttca

SEQ ID NO: 32698 - DNA, 427 bp, Zea mays
agctttctgcataataatattacccttatcttttctgatgtttaaaaaatgaggacccgtgaccctcggcagccgaagctgggcaagacggggaaggaagacccgttgacgtcatgtgcttatgaggagaggagctgggggacccggtggcggacacgcctgccaagaaaaaggcgggcgcccactattcacacaccacacacgtacgccatcactctggatccagcgaaggccgtgtagtcaaaaggcgggccgcgggcgggatagggactctcggtgccacctctcgacagagctttgaccatccgatccagagcctgcgactgcgagcgagagaataatcgtcgttagctaggtcaaacctgtactgctcatttatctgctggcggcactcagaatacacacgcctgaatgaatcgaattctga

SEQ ID NO: 32699 - DNA, 314 bp, Zea mays
  unsure (1)..(314): unsure at all n locations
agcagtaagcatgcatttagaccgatctcctcatttgcaaaatcaacttagtanaggttgccgtctaatacacccttataagctagtgaaccaccacttcttctaaagacagacacatctacatctgtgaatagaataatatatcccatatcgcataattgactaacagatatcagantatatccaagagactcaactaataacacattagatatagagtgctcatgtgatatatcaatattgcctaagcctcttaccttgccttgatttccatcaaccgatatgattgaatcttgtggatccttgttcttgac

SEQ ID NO: 32700 - DNA, 392 bp, Zea mays
  unsure (1)..(392): unsure at all n locations
catgcaagcttactcctccctggaaagggtcgttcatcttcttctagaatnngaagcccgggacatacaagctagccaacaatcaaggcaaggtctacagcaacgcttggaacatccaacagctacgtcgcttctacccttaagatgtttcaagtcgttcatatacctcgttctctttacatacataaataaagtctaaccgtcaaggaagggtcagccttgcctcggcaaagcccgaccctccctcgggggctagaaggggggaaccccctctgcgtcaaaaatttcctcggaaaaagtctttcttccagaacgtctttcgcgctntttcgactgcttcgatagcgggatcctgaaaacgacgagagtacgtgtaagcggcaaggccgatc

SEQ ID NO: 32701 - DNA, 255 bp, Zea mays
ctaatagttgctttgctgggaggccctgaataatataatgctttatgtatttcttatggaaatgcctcaccttctccaactgtgaattaagccatgcacttcgagtctatcatgactctgcaaaatcataactctttctatgatgtaaaacttgatatttggattgcgaaatatgtttgtaagtctttgctattcttccagtgtgtgttcaatgtgatactcgaatgacatgtttgtggagatcttggatattag

SEQ ID NO: 32702 - DNA, 411 bp, Zea mays
  unsure (1)..(411): unsure at all n locations
agcttctaaagggagaacacgtgatatgtcttttttatnnncncttcgcnnnagatagaccttgtgcagcttgtcaagcagggaaacaggtgggaggctctcatcacaccaaaaatgtgatgaccacatcaagacccttggagatgcttcatatggacctcttcggacccgtcgcctatctgagtataggaggaagtaagtatggtcttgttatagttgatgatttttcccgcttcacttgggtattctttttgcaggataaatctgaaacccaagggaccctcaagcgcttcctcaggagagcacaaaatgagtttgagctcaaggtgaagaagataatgagcgactacgggttcgaattcaaaaaccttcaagcggaggagtatcttgaggaggaaggaatcaagcacg

SEQ ID NO: 32703 - DNA, 412 bp, Zea mays
  unsure (1)..(412): unsure at all n locations
agcttcgacttcngtcggttttgtttcgattttcatttgttctttctaagccttggcaactttccctggagtagagcttgaagcctttatcgtctccagcacatctagtacactggccatcctttttctcttgggggtcgccacaagacctttttgtgccttcggcattgtcacttctgccgaagggcttaaaacttctaatatttttgtcccctcgattcttgattcttcagctctatcagttttcggcaaggtggactgttcctcagctttctgtgaaggaattggttcctttggaatagcagctgaagaagtttccccaccaaactcaggcactatggccggttcaatgtagcgcggtctgtgggtaaggaccttcaacttttttctcttcggcgcaggctcgcttgga

SEQ ID NO: 32704 - DNA, 421 bp, Zea mays
  unsure (1)..(421): unsure at all n locations
gtgagtgcatagaagtaatattatactaaccagggaggcacaaactcctcccgagaagctaaaagcanaagatcttaagtggaggaccgagtcctcccgcacttcagtcttgaatttcttcttttggaaccaccttggcacagaagcagcaaaagtctgctacttcctcacctaanaacaacgaagggataaaccctgagtatggaatactcagcaagtcttacccgactaaagaatagactctcaagggtatgctggttatatgggagtcaacgtaaggcttttcaatattcaaagactctgtctttgcagaaatgcttactaaagtggatccttaaaaatccagtgttatttgtcaagttaagtaaaattacctgcactatagttctttctaccctaattcaatcacttgtcctgtact

SEQ ID NO: 32705 - DNA, 426 bp, Zea mays
  unsure (1)..(426): unsure at all n locations
agcttgcatgacataaacgtgaattccatattatctttctcatcagaaaaangaactgaatgcaccattttattgcacacatcatgcagagataagcggaacaagcctccgcagtcatatcctttaccaacaaaggtaccatgtttcgacacaacacatttattagactcaagaacaactttgtatccatctcgacatagcatagaagcgctaacaagattcttcttgatagagggcacatgctgcacgctcttcaatggcaccgtctttcccgaagtaaacttcacaatgaccgtaccaacaccaagaacatgagcacgcgacccattttccattaacaaggcgccagacctcccgacctggtaggaagtgaacatagaggcatcagcacacacatgaatgttngcaccactgtccatccaccac

SEQ ID NO: 32706 - DNA, 423 bp, Zea mays
  unsure (1)..(423): unsure at all n locations
agcttgtancccctactacaagcaccccggtgctttatttataagcctcatccctcctcttgtgttccatcttgcatcaacccatctaggcagggacacgcggcacaaaattcactaatcggtccggttgatggtcccccaggtccgaaacgctgattgttggcgcgccaggtaagggccgccgcttgttgacaatacttttccattgagttccagatggacaatcttcaacagcctcttcagcccgagacggtgctccactttgggagtctcgagttcatgtcccccgacggcagctatgacatggtactcctccccccacagcacgacaacaacaactgtcgtcggctcgcccggcagaggcggactccacaaccaccatctcccgtggtggaagaggaacaaccgagtcaaccccgccac

SEQ ID NO: 32707 - DNA, 521 bp, Zea mays
  unsure (1)..(521): unsure at all n locations
ctaagctctataatagagtntcgcttaacattcattctatacaaacgggtctgtgagataagntgatacggaagagaaggtgtntctttactataaaagggtgaagcagcccaattcttttactccaaaggtaaaatcaattaataaaagtatcctgccaaacatgacttaatttagggagtaataataatcagacttagtaagtaataaaaatgagtagaactatnttacagctagtatgggccaatcaaaactaataaaataaagtngtagatgatccaaaaaaataagtcaacgctcacatattagctaataaaaagccaacaatccaactaacgataattgtctagctacctncgaccagctaattgcaactaatagagacatttacattatataaaaattatctacatgcctatagactatggttngaaacattcacaagacatgatgatcctgagaccgtgaaatagcanggagatcattttgatactaagcgaaacgtaaatacaagcatcgat

SEQ ID NO: 32708 - DNA, 374 bp, Zea mays
aaaaaggctgccagggttttttttttttttatacgcgaaaaagaagggaagctgattaaccctaacgagcccgcggcactacatatttggaatattactttatatttcccctattctctaccaacctaacttctttaagtgaacataacacaaatgttactttgtagattattttaaatgttacttttaatctggagcgaactgatatttgccgaagctgaaggccaacgaacatcaccagaagtgctattgtgtgctgtcactgcaatggactcgtcctctctttaactgattcaccggactattctcttctcaccggtctccttaacctgtttgctggaatgtttccctccaccgtaacttctggtttaaac

SEQ ID NO: 32709 - DNA, 407 bp, Zea mays
  unsure (1)..(407): unsure at all n locations
aacagtatatgtagatgaagcctgataaactatatgtaagcaaccaactataagcatcgcgctaaaatcttgatttgtgctttgtggagcaaagtgaatcataatcaagcaaagagaagatgtcatgtntcaatgtttgttcctttacttgtcactantgtttgcacttgtacactctgcatgaatcaaattctatgaagagcaaatgagagctggggagtgcaactaaaatgtaaaaatgcacacacaagcgatctatgaaggtaacaacttgtattggtctgcaatctattttgtacatttatttgcattaactgaaacagcttacatatataggttagtacctctattattttagtttgttatattgacgaagttcaacgagaaatgtatattggttatctaca

SEQ ID NO: 32710 - DNA, 418 bp, Zea mays
  unsure (1)..(418): unsure at all n locations
agctcctnaagggagaatagcgntattactttcttatgttattacgagagatagaccctgtgtagcatgccaagcaaggaagccagtgggaacaaaacatacacgcaagaatgtgatgacaacgtcaagaccattgaaactcctccatatggatctctttgggcccgctgcttatcttagcatcgggggaagtaagtatgggcttataattgttgaagatntttcccgcttcacttgggtattattcttgtaggataaatcataaacccaagggactctaaagttctttctaaaaagagctcaaaatgagtttgagctcaaggtgaagaacataagaagctacaatggatcacaatttaagaatcttcaagtggaagagtatcttgaagaggaaggcatcaatcatgagttctgcact

SEQ ID NO: 32711 - DNA, 420 bp, Zea mays
tgcaatcttctaaagggagaacacgctttgttactttcttttgttcattttgagaaagacagggtgtgttgcgcatgttaagcatggaacccagttggtgttcgccatccacacgataacatcatgacgatttacaggccggttgaactactccacatggacctattcggcccaatagcttacataaacatcggcgggagtaagaactgtctagttattatggatgactattctcgcttcacttgggtgttctttatgcaggaaaaatctcaaacccaagagaccttaagaggattcttgagacaggctcaaaatgagttcggtctaaggataaaaaagataagaagcgacaacgggacagagttcaagaactcacaaatagaatgctttcttgatgaagagggcatcaagcatgagttc

SEQ ID NO: 32712 - DNA, 302 bp, Zea mays
ccctatatccccattaggttagtcctcacccgcgtctactgcaacacttaaacaacaacttgttgaattttgctagagatgcactcatgagtgcaacatatgcaatgcatgctatgatgcccgctcaagttacaatataacaccacggtgtacatcttcccccataaaaatctgtccagataaaacctaggaagaatggaaggaaccacacatttatttctattttggacagaaggaggatgggggtactcttatacaacacatacagcttacattcatacgctaaagctggaaatttatta

SEQ ID NO: 32713 - DNA, 418 bp, Zea mays
agcttgtgaagattcttcatcccaactgtatgtttttctacgatgccagagccaacccatattagtcttagcaattaagcaagtatcaagttcagctttgttaaaatcaactaagtatagctgaccctctaatactcacttaaatgctactgaatcatcattttttctaaagacagtaacacctatatccgtaaaaagacagttgtaacccattttgcataattgtgaaattgaaagcaagttataatctaaagaatctacaagaaaaacattggaaatagaatggtcaggtgatataacaattttaccaagtcctttgaccaaaccttgatttccatcaccgaatgtgatcgctctttggggatcttcatttttctcgtaggaggagaacattcttttctcccctatcatgtggatc

SEQ ID NO: 32714 - DNA, 408 bp, Zea mays
agcttatcaaagaataatcatacagaattgtttattgtgttatatgccgtcttgatggcctccaggaagcttcatcattattttcaagcatatcatataattggtccttcatcgcaatctttgaaagacataatgaggaatggagaagctactgggaggatcggaaaatgggctattgagctcaatgaattctctattgactatgtacacagatcctcaattcagtctcaggccttagcggacttcatcgctgattggacgccaggggctcatgaagaagaagtaacataagacaccaaagcctggacagtcttctgtgacggttcttgtggaaccttcgacgcacgagcggccgctgtcttaatagcgccctctatagtcagaacatgctatgcagcaaggctgtat

SEQ ID NO: 32715 - DNA, 422 bp, Zea mays
  unsure (1)..(422): unsure at all n locations
atacgctctttcttttttatttgatgagtatcgcggcgcgaatatccaaaatgtttgtcgtcttcttagcggtgcaatgctgtgcgctctacgatatgtagttagctaacactactgagtgcggatgcttgtgaagtctcgctacttagtggttaattcgctagcgtgtacttaaagtatcttgtgatattccattataggcatatatatgcatcttgcatctcatatatgaccgagagatgatgatcgagcaactgatgtggtaccatccactagatgcagttggtggacgacctgtagactggacttatccagtggatgctcgccatgcgagtacctccccagcanacactatcctaatgttaaattaatgcaagccccggtttattcatacccgtatatatgctctctacttcacttaa

SEQ ID NO: 32716 - DNA, 411 bp, Zea mays
  unsure (1)..(411): unsure at all n locations
cttgctgggcaccaaacaacttttgttcttcttgtgaattagngatctccttggtctctatccaaagatcaagcgtcgactaaaagcagatcaagtattatgatatacaactcccttgcatgttcaaggggataaaattaaattgtgcaaagtgcaaaaagttgtgactattcaaatgattctctgattgatgatttggcattattaacatctatacgccatatcgttntcagcataaatgagatttgacttacggtctcaattctattttatattgccatcaagtattatggttgctttcccaaccatattttcaaacagacaggagttgtgtatcattgtatcaagaatctacgctactcatacagccnccttaaatggcatgagcaactttctaaacctcaatagtta

SEQ ID NO: 32717 - DNA, 417 bp, Zea mays
agcttccctttaaccccgaaacgcgatacacttttcattggtgacactttcaggtaaacataggctccttccaagaaatataagggcatctgggttagaaacacagggtacgaaagaaaggaagaattatagacaagatgagtaattacgaagaatgatactacaggggatctattatctaagtagattagtgtgctatacactaaagctaatacattaccttatggtggtacatgctaagatgcccaactataatgtttcaatcaatcaaagaagcaaatcaagcatttatcatcagaacaatcaaccaacatttttaaatagagaaaataatctctaattccttttcttttaggtctcctatctcttaaaaaggttataaatgtacgattccaaggtgtgaaatccttcttgtct

SEQ ID NO: 32718 - DNA, 397 bp, Zea mays
  unsure (1)..(397): unsure at all n locations
tttatactaactcatgggagccccttaaaggattaggagaatgatttatttatccaagactgngccactacgaaggagagtaacatttatgtctttattcacaaactcgtgtagaaaattcgttgttgtaatggtattgaatggattacaaaagcattggtatctgtcttggaataatgtagcagcaaaatgtgtattggctataaaagatgaaagataaattaagatacttctgaaatgtacacccagttcattatatgtcctgagaagagacatagtttgtagaattgtctaaaatattgtggactacatactggagtttataacacagagaaggctagcgcaaataactagttgagacacataactgtttatactatgtaccacctttttataa

SEQ ID NO: 32719 - DNA, 427 bp, Zea mays
  unsure (1)..(427): unsure at all n locations
gcttgtaaagatctgaacatatcctttatcttcgttcttatatgacagnncgtggccggagggatgtattccaagtctgggctacacttctgactgccatgacaaatgtgtttgccatgactggtgtgttgccatcataggaggatatggtggcctcataactcattagaaactacttcgggtaaaatagaccatcatatacaggcaatgtatgaggcttgtaaagtgttggctagggtgtggcttgcagttctagtgtcaacagggaagcttcgtcatacaagaaatcctcaagattgtatgcttccaaacggagaattgtcatgattgtgaacctcgtgctgaaggtctctatagttgtacaggtgctcaagatgctctgtatgttgcgcaatgttgcgtatttcttcaattacatcatcaattt

SEQ ID NO: 32720 - DNA, 379 bp, Zea mays
  unsure (1)..(379): unsure at all n locations
gcagctggtcaagcagggaaacaggtgggaagctctcatcatgccaaanatgtgatgacaacatcaagacccctggagttatttcatatggacctcttcagacccgtcggctatctaagcataggaggaagtaagtatggtcttgttatagntgatgattttttccgcttcacttgggtattctttttgcaggataaatctganacccaagggaccctcaagcgcttcctaaggagagctcataatgagtttgagctcaaggtgaagaagataangagcgacaatgggtccgaattcaagaaccttcaagtggaggagtatcttgaggaggaaggaatcaagcacgagttctccgctccctacacaccacaacaaaatg

SEQ ID NO: 32721 - DNA, 214 bp, Zea mays
cggacaagccggcgagaatatcctttaccaacaaatgtccatgttccacaaacacatatttacctctaaacactatgatccattaacaaaaataaaacgctaacaaattttttgaagaggcacatgctcagctctaaatgcaccgttttcccaaaaacttaaaaaaccgtccaacacaaaacatgaccccgaccattccataaaacgcccagac

SEQ ID NO: 32722 - DNA, 375 bp, Zea mays
agcttagaatattccatgctcgccaccagctcttattagatttttatcgccccgacgaatggaggacaagaaaggaagtcatcttagtcgctccctccctatatcaagaccatcaggggtagttcacgaacacagcataatgtggcgcttagacaatctgcctctccgatactaggatccccgaacatgtcaaaaatatattccaagtcaccctgagaggatgccctcaggcataggcgacgtcggctttaccacaagactatccttcgccagctctactggcataagacctgaaggtcccgccccaacatgaatacgaaaagcgcgtgctatggctacctatcataacatctcaaggccgtcctcgggagcttc

SEQ ID NO: 32723 - DNA, 290 bp, Zea mays
cgaaacacacggtcgggagcgcatggcaagttcggaagacagtcggtacccatcaaccacacaaaaacattatgaccaccgacaggccgcttgagccaccccacaaggacttataccgcgcgactgcttacataaaacatccgcgggagaaagtattggcctgcaaccgcagacgaataatcccgcttcacttgggaatcctcttcgcaggaaaaatcataaacccaagagaccataaagggatacttgagacgggctcaaaacgagcacggattgagaaaccaaaacat

SEQ ID NO: 32724 - DNA, 284 bp, Zea mays
  unsure (1)..(284): unsure at all n locations
tttagcacagcagaggtatatgactactagaatcactcggtgttcatttatgaaacgntgagaagtaatactatccacaatatgaataagggttccacttcgctggtcagaaaatctacactcaaacataatatgattcaggtctatttggggagttactgaaaccagaacagaacaatttctggttgtgcactcaaacgtatacagaatctatgttctgttcaattctggttgtgcactcaaacaaaatagaacaaattctatatttgcagctcagttcaata

SEQ ID NO: 32725 - DNA, 301 bp, Zea mays
gaaatccagaccttcgacttgggagaatacttcggccacaagtcgagcatttgttcatgtcaacacaccaagctcgtcttgcttgatgcggaacacccacttgggtcctacaacactctgattatgacgtggaactaaatgcatacctcttcctagcgaagtgttgagctcctctgcatcgacccacccaaaccaatctgaacgcttctctacctatgggctcaaagagaaacaaagagtatgtcacaacagagcaccgagatctagtgtccccctaggagtcgccgagagggcaacgggg

SEQ ID NO: 32726 - DNA, 429 bp, Zea mays
agcatgccaacttaatgcccctaaaaatggctatctatgtttatagcaaagcccccatggctcaagataacaagggctatatactatatcctgccggatatcccaaacacaaaaataggagaattcattctatgaggtctcactctggctctcatcatgcttttatgtataagagcgaggcaactagttctaggcaatccactcatgtgaaattgcctacaaagaaaactcctactgcatcagatgagcctattgtctcatttaacgcttctgatgcatcatatgctttaactaacaaatcaagcaaagaagttgccaaatatgttgggggcaaacaccaaggctccaagacttgtgtttgggtacccaacgagcttgactctaatgtcaaaggacccaagaccggttgggtacctaagaacaaggcct

SEQ ID NO: 32727 - DNA, 431 bp, Zea mays
cacctcgccgcatgcaagcttatgtagagagagaacacgcctcatgtattttcttgcaatccaagcatacttgtttatcctctctttcttgtgaggacaaagccaatgaaaaccatctgtattgtccactttctttgcgttgtgaccctttcatttagtctcttggatgcataagatatttatacacctagtcactgtctcaactaactcccttaacttacctgtaaatggccctacattccaactaactaagcagattctagttggttcgactagatttcttactctttgcactcgctgtgatgtgaaaacccttgcacatgttccactacaccctgacgtctatgtagcacacaatagaggaaacaacgatttgatcatggctcacttgacactgtgcctatatcatgacatgacgcctcggatctcga

SEQ ID NO: 32728 - DNA, 359 bp, Zea mays
  unsure (1)..(359): unsure at all n locations
ttgacaaaacttaagcgcgggntgggatacctcgtttttcaaaaatacttattttcgcacgtaagagctagttngagaaccctattttcccaagacaaattagtttattcttccttgggagaatgaaaatctttcgggaaaatagagttcccaaactagtcctaaattatttcattatctcttgagaaaataataatccgcttggagaaatgaaggttccaaactagccctatacatctttttcctaagataatatcctcgtgcgatatatacaatttgaactgaaaactgaattagtatgagcgtgatgtgaaacaataaaaagagctgtggcatatgatagacatccgatcaggaat

SEQ ID NO: 32729 - DNA, 433 bp, Zea mays
  unsure (1)..(433): unsure at all n locations
cgacccgcaagcatgcaagcttcgaatntaactctaatattttttcctctttttcagccatcaagccttcggtggattgtagctcgaagtctttcttttcaatgatggcagattgctcttttattttgctttccaagttttcaattatagcttcgtgctttatgtcctccaagtcttgttgcatcttcagagctttgctcagtagcatgctctgaacagaaacaacttatgttaagtaatattttcattgttaatggcaataaaaaccaaagaaaaaggttgtttaccttgaagttagaataaaacaagctgccgacgatatgttgtcgtcggtagcggctgatgtctgtctctagcttcggaaaaccgatactcttcgatagagtaccgattaccttaacttcagtctggtctcgaatacagcctagttttt

SEQ ID NO: 32730 - DNA, 409 bp, Zea mays
agcttcagcatatttattcgcttcttctcttcttattccctggcgaccagtcagctataaaagttgcctatgcttgagactggatccaggatctgtgcacataatcaatgtaaaatcccttaagctcccgcacccattttccaatacggccatgtgctcctttatttctcatgatatctttcaacggctgcgaagaaggaacaattatattatatgcctgaaaataatgccgaagcttcctggatgccattagaacggcatacaacaccttcttcagtactgtataatatttctttgagacactaaggacctcatatacaaaatatactgggacctgcttcttgatttgtccatcaaacttctcctgcacaagtgccgaacttactgctgagtgcgaagctgccacata

SEQ ID NO: 32731 - DNA, 178 bp, Zea mays
agaggaagaaggaaaagggaggaatgaaaaaaagaaagaagagaaaggaaaacaaaaagaaagggaaagacaaaaggaaaagaggcaaagggtggaagagcgaaaagcaaggaaagatggaaaacaggaggtaaaggaaaaataagagatggaagaaaggaaaaagatgaaagaaaag

SEQ ID NO: 32732 - DNA, 426 bp, Zea mays
  unsure (1)..(426): unsure at all n locations
agcttgacatgcttgattcaagtgcactctttttatttgctttattatcaatagaggttttcaaggtaggtacttctatatctttattgtgaatcaactcttgaagctctaagtttctttccttttcaaggataagcaagtcttcttgagcatcaagagttgcctttcttttatctagtttttccattaattttgtgataacattgtatccatttaagccaaattctttaatcattttattnttcatgacaatttgatcattatcatcatcatttgaaaaatcattactaaacaaagttaccttatctccctttgccatgagacaagttggaatgtaggagtcgtcttcaaggttggtgaagagttgcgcgcttgaggtagattggatggccacanttgccaccacttcctcttcctcggagctag

SEQ ID NO: 32733 - DNA, 355 bp, Zea mays
  unsure (1)..(355): unsure at all n locations
gctatgaagaatcttcatcccaacatgtgctagtcggcgatgccatatctcttccatgttattcttagcaattaagcaagggtcgagtgcagctctatcaaaaattactaaatatagctgaccctctaacactcccttaaatgctattgaatcatcacttcttctaaagacagtgacaactacatcagtgaaaagacaattgtagcccattctgcataattgagatacggaaagcanattgtaatctaatgaatctacaagaaaaacattggaaatggaatggtcacgagatatagcaattttacccaatcctttgaccaaaccttgatttccatccccgaatgtgatagctcgt

SEQ ID NO: 32734 - DNA, 366 bp, Zea mays
  unsure (1)..(366): unsure at all n locations
tttttttttnctagacctctcctgaaccctgtgtttcaataccatggttgagagggggagaaaataatcaattgttgcaaccatgagttaatctttagccatactttaagaacttcataccacaattgtgggatagcatgctgcaaaatatccctggatgaaccctcaactccattccttaagtggagagagagctagagctctctaattgtttctaagtgagacactacacctacactaaagatcaaccgtgatcaccttgaagatggcaccaaaaccacctatgttctataccaaagatgaggcataccacctatggcacccactgtataaagttgagcacgataccttgacgtttgacatgcc

SEQ ID NO: 32735 - DNA, 429 bp, Zea mays
  unsure (1)..(429): unsure at all n locations
tctttgtgcacactacaaaagaaaataaagttcttttgtttttcttgacagcaactatgcgaagatgagcgactgtattatattcacacgtatatgatctcgtggaatgatcagactaccagtctgaccaattcaatgcgacggacgaagaagacgaggctgggttcgggttttttctcgaaaccctatgagcgccggggtgagcagcatggcgcccctgcggttggcctctgctagttggnccaccaacggcacgcccaccgtgtccctgttcttgaaaggcttaccgtgccacctgcaccgtctgtcgattatatatctccattattcatcgaatacgccttggctgataagcatattcatatgtaaatacgagccggccgtggacgaaaccacgacgtaccattccttgttgcttaccaccttgcc

SEQ ID NO: 32736 - DNA, 353 bp, Zea mays
  unsure (1)..(353): unsure at all n locations
atttacttaagcagcactagacggctcttctttgcaaatcaatcaataaagtagccgcgaaacacccttaaagctagagaaccatactggtcgaagacagacaaacacatttggaatagaaaatatccgcatatgaataantgacaacagatgcaaattaagcgcagactcttactgaaatacatatagataaatgctcataaaatcgcattaacctaaccctttaacctgcctgaggccatcacgaaataatgaatctgggaaccttatctgacgatgaagggaaatttttttcccggatagggtggcatcgtatcataatcagctgacccggagcataactgcaggaatta

SEQ ID NO: 32737 - DNA, 387 bp, Zea mays
ttttgggaccattagataccaggcattttaagacaattgtggcatgcagcgaaacagtgagtatatcacacagacatcttgtcggttcacccggaggcctgactgcagaaatgcgtgctgtccacccaatggcacgcagacgacacaaggggaaaacatagggaaatccgacttctgtgtctgcccaagcggagccttgattagggtacaacgtccgaggaagagaaagaagaactgtcccacccgtctccaccggaaccttttgttgaaccctgacttctttattatgaagagaggccagcgtcatggggtgacaagtgtacggctacaagggacagaccctagactgtctctgctgaaaaggtctcctgtatgtaatctgcgcga

SEQ ID NO: 32738 - DNA, 290 bp, Zea mays
ctggaggcggttgtattgtaacatacctagagtggctggccaacactataatagtgaaaaagctaatggaaatggagaatgtgcattgacttcacagatctcaacaatgcatgcccaaaggatgaattcacattgccaaggataaattctcttgtggatgcagcggctacttcagagctcatgaacttattggactgctactcaagttatcaacaaatctgcatgaagaatgaggatgaacctaatacaagcttcataacccctagtgggacctattagtaccttccaat

SEQ ID NO: 32739 - DNA, 425 bp, Zea mays
catgcaagctttcagccgggccatacgacgagttccttttctgatccggatccgaaccccgactaccatcatcaagtactctggggagacaaggccggaactgtggctcggggactatctgctgacctgcctgttgggcggaatggacgatgacaacctcatcatccgcaacctttccctaattcctttccacgccgcccgagcctggctggagcatttgcctcctgcgcagatctccagatgggacgacctggtcaaagctttcgccggcaactttcagggcacatacgtgcgcactgggaactcctatgatcttcgaagctgccgccagtagccgggagaatccctccgggactacatgctgccgatattcgaagcagcgcaccgagctgcccaacatcaccgactcggatgtcatctgcgcg

SEQ ID NO: 32740 - DNA, 422 bp, Zea mays
  unsure (1)..(422): unsure at all n locations
gcaagcttntaaagggagagcacattgcaggattatctatatgttcattncgagaaagacaggatttgtagcgcatgccaagcagggaagcaacgtggtgctcatcatccacacaagaacatcatgacgactgacaggccactggagctcctacacatggacctattcggcccgatagcttacataaatatcggcgggagtaagtactgtctagttattgcggatgattattctcgcttcacttgggtattctttttacaagaaaaatctcatacccaagagaccttaaaaggattcttgagacgagctcaaaatgagttcagcttgaggatcaagaaaatatgaagcgacaacgggacagagttcaagaactcacaaatcgaaggtttccttgaggaggagggcatcaagcatgagttctc

SEQ ID NO: 32741 - DNA, 401 bp, Zea mays
  unsure (1)..(401): unsure at all n locations
aaacaggagatatattaagaactgctctntcaagaagctccaccgaaggtgcttttattgtttcgaagaacacatccgaatgtaaaggcagcccctgtgctgctgacttatctaacaaatcagcatgctcattttgtcctccagggatatntttgacagagaacccttcgaaggaagcttcaactcttcgaaccatatccagaatattttcaagcttcggatccttagccttgcaactcttgtcaatatgacccgaaacaacctgggagatcagtttaagtatggcccttctgattcccattgcctttaacttccgaagacctagaatcaatgcttcgtactcagcaatgttatttgtgcaattaaaatcaagctntgccgcataacaacgtttgactttg

SEQ ID NO: 32742 - DNA, 412 bp, Zea mays
agcttaaacacttcctgcattaccttcctttttcttgattaccttccttgaaaccctgttgttacaaaaaggtatttctatgcttagtattgctttaaaaaaacaaaaggatttgttttgcaaaagatgtttagcaaagtgggatggttgttttcaaaaataaaacttgatggtgaatccatcaccgccgtgatggattcaacatcagaaaagatgtacctctgccaggtaccaagtttttgggttgaaatgattaagctgagaccaggcgggtgacttgcacgagaagagagtctcggtgtagtgtctctgtctgagtcgattaaggaccttgtcgatgtaagcttgatgaccgaggaccctttaactggtcacatgcctcgtcatgggtaagccttgccttgtgcagact

SEQ ID NO: 32743 - DNA, 326 bp, Zea mays
ttcttcttgataaatcaggacgcttcgcgcctggcatggaagccttctccactggcttatagccttcccggagtgtgacctgaggctctaggacatcaatgggtagggcctcaatcaattggtgggagacagaccctgacatgccgtttctactatgctatgcggggcaccgcggcctgccctctacacctgattctctcttctcggagggaagtaagtccatataatcactttggagtgatgcgtggctgcattgactgatattatcgaatgccatccctacgctgcacatgtgttgacctctcatataatatgcggtctggcta

SEQ ID NO: 32744 - DNA, 301 bp, Zea mays
ttttttttttttgacaagacaggggtgagggctgtacgcaggaaccacgctgcgtcatatccataaacatctgaggatgaagacactcgactcctccatggaccattcggccgaagctacatagcatggcagaagaagtaacgcttgatctcggaaaataatccgcttacttggagttctgttgcaggaaaatttatacccagaaaacttaagggattcttgatacgggctaaaagagttggctaagatcaaagatagaacgatacgaacgagtaagactcaatcaagtttcttgagagag

SEQ ID NO: 32745 - DNA, 391 bp, Zea mays
gctctatgacgactgcagcccccagctctcatactttatcttgacgacgacagccgggacgggagcgcttcaacagatatacctccaccaagctccgccgtaccttcgacagacatgacatcacgccagtagggtgcccataactctacggctgacacattggcacgtacctaaggcgctagctctacctacgctagaaacgtatcactctgctacaccccccattgtacacctggatcctcaccttacgactataaaagggaggaccaaggccttcttagagaatgttggccgcgcgggaccaatgacgggacaagcgctctcttggggacagtcagcttcctcacccgcgtggacgcttgtgaccaccctactgcaaagcgcacctgac

SEQ ID NO: 32746 - DNA, 417 bp, Zea mays
  unsure (1)..(417): unsure at all n locations
agcttgcttcngnccgaaggtacttcatattgtttatatatattgcaacttcggcttgggccaaagttttcacatgttcacaacctgacttctccaaaatagctgcaatacccctcgcaccagagaaggcacagacgtccccacggtaactcaaaatctcctcaaaggcttcagcctcgctgctgatccattcaattgggccttcgggatcaccccgtatgaagttattttcgcttgaatatgcgccaacattggcgaagctagtttttatctttctcacacattctatagatttttcaaaacatttttttgatgcgcgaagttctaccacttgtttttcccagtaatttttccagtaatcactgcatctctgtcagctgtggcaacaacgcattttaattttgctttagccagctg

SEQ ID NO: 32747 - DNA, 297 bp, Zea mays
gggctttttttttttcacaacgccgggggggtgctgtatatccctcccccaccttctctcagaaaaaaactagaacccagacattgagtaactcaccaaagtgggggcaccctatggggcccgaaacagggaacgaacacacttaagaatcaaatactagctatactgggtccagccatatcctgaaaacctcgacctgggggattgggagatgagcccaggccctaagctaaacatcatgggcccaaaggcctgatagcaccaaatagcgcataggggctcctcgggggaaaaaaa

SEQ ID NO: 32748 - DNA, 420 bp, Zea mays
  unsure (1)..(420): unsure at all n locations
ataaataccacacctctgtatatctttttttggcacacatcgtggtctaaaatcagagtttactgacactacagattctcaaaccacaaacatccaatacagcctcttgtttggatgtacttctccaaaaagtgtggttctatataccaaaaaagaggccacaacttgtgagttactaagaacgtcaaatgactgctcagttttaataaaaccatggcttttataaactaccaagatttgtcatatccaaacagagttcgtcgcttttaaaaaacaacatattttacaaaaccctagctttatccaatgctactttgcatccaaagaggaccagatgcacatggaaacacatgagtatggcacaaactttatggggagtagaccctagaggtacatgtngcaaacatattgtatctttgt

SEQ ID NO: 32749 - DNA, 465 bp, Zea mays
  unsure (1)..(465): unsure at all n locations
attatagaactaatatcctgacatatatatatatgttgttctataactttatgcttatgagtagggctaatgtattcacaacacaacatgcattgtttcacgaatggatataaattagacaacatagttcatcagccactacactacacatgattattacctcaagtacctagataaagtttctaactacatttattgtgcgctagaaccaaccaacagctccccagacatttgtgttgcagagcatttgagcttcaatcacacatngtactttatacgttgtacgctaggtctacataatgaaattataattaacttcgtcataaggattctggcatagtggcctttcttagaatacatanaaattggcgtatcacgaacaccacattaaatgaaatagttgaacaaacaaagtcgaaattatgaagtctaataggtctggtaggttcctttttttgatggcac

SEQ ID NO: 32750 - DNA, 418 bp, Zea mays
cgcatgcaagcttggagacgaaatggctaagtgcttttattttctaaccaactattgtatccctttgagattttgaacggggcccatccactagatggcctcgattatttcttggttagcttcaatcccacagtcggagaccatgaagctcagaagcttacccttcataaccccgaacacacctttctcgggattgagcttgatttgaaacctttagaggctggcaaacgtctcctctaggttggcgatgaggtcgttgaacttcttagtttttacgactatgtcgtccacatatacctcaatggtgtgatcgccttggtcagtgaagcactagagcatacatcgctagtattatgctatggaatttttcaaaccaaaatgcttggatacgtagcataatgaaccgaatggggtgatg

SEQ ID NO: 32751 - DNA, 284 bp, Zea mays
tttttccgacacccagaacagcgtctttctagataacctagtcccgaccccgggcttattccaaacttaatcctgtccaatggggacgtcagtttaggtcaaaccagctagggctaccactcggacacccaggaagggacccgtcttaaaccaccccagctgcggaccccctgcttataagggcctaaacgatgccggtctaattggatgttgaaccacaggggaaacgttggggggtagaaaaaaatacaaactgcacaataaccatgagaacacatctgagg

SEQ ID NO: 32752 - DNA, 325 bp, Zea mays
  unsure (1)..(325): unsure at all n locations
tctcatatacttcatagagctcttcactcggccatcattcgatcctgctgtttctagctcacaagaagatctgcttgccgactgacaaccagcattancacatggtaatatatgttcaatatgaacacatgtgcatgagtgaggttgctggaattgtaagatttctatcacaacctcatgagcaatgataccatgatatgatcattcataagaatttcatgagagcataggagcatctcttattctgctcgacaagctagatcttcacttttacttttctacttgcgccttacgcacggaattctatttactaattgagcgactc

SEQ ID NO: 32753 - DNA, 243 bp, Zea mays
tataagcccccccgtggaccgcccaagttttttttttttgcaccggtgcaggggacatataaagtccccccgccagtgctcacgcttgaggatgccgtttggctaaaaagagcgccttcagcaactgcagcacctgtccaagaaagacctacccatcgatgccaaaagacagattgttcgaacacgtatgggaacgcgtacaagaacttgaagtacgagatctcgcacatctccttaaaacta

SEQ ID NO: 32754 - DNA, 370 bp, Zea mays
agcttaaaaaaatctggtatgaatctgcttatttatccagctagcccaagaaaacctcggacttggtgaacagtggttgggggtttccactcctaaatattcttgactttgctaggatctaccgcaattcccttggcaaataacacgtgccccaaaaattgaattttctcctgccaaaacgcgcacttgctgaacttggcatacaactgatgttcccttaagcgctgtcatacaatccgcaaatgttgagcatgctcctcttcatttttagaatatatcaagatatcgtcgatgaagaccgccacgaacctgtccaactcgggcatgaacaccgagttcatcaaataagtgaaatgggcaggagcatttg

SEQ ID NO: 32755 - DNA, 339 bp, Zea mays
  unsure (1)..(339): unsure at all n locations
acatgtgctaatcggcgatgccttcttcagcccatgcaagtcttagctattaagcgtgcatntataccgggctcttctcttgcaaaatcaactaagtaaagtatgtcgtctaatacacccctagaagctagtgaaccatcacatcttctatagacagacacatctacatttctaataaacaattatatcccatattacataattgactaacagatagtaaattatatccaagactcttaactaaagatacattatagatagagtgctcattaaatattgcaatcttgcctaaacctttcacattgccttgggtcccatcaccgaatatgatagaatctt

SEQ ID NO: 32756 - DNA, 379 bp, Zea mays
tatcctctcaggttgtgtcattcgatgcaacaactacttgctcactaccataccaaactaaagtaggtggtcctgtgcagtattaatggatgtttcacatcgaaaagacactaaagaaactacgtgcaatgggtggtaataagagatgaattgaaaggtgcattgctgaagaattcaaatacaaagagatagcatcgttcacgggattgtactttgcagaggaacacaatgtcaatgccccggtgttgcggtaccatgtcgatgagccccctatcagtgatcttgaaatttttcaatggaggggcaaaacttgaggaacccgtacatcatactggttcaccaatgacgaatggaaacttggaagagatgaatcagtttc

SEQ ID NO: 32757 - DNA, 228 bp, Zea mays
  unsure (1)..(228): unsure at all n locations
gaccactcgccccccccacccacaggaacacgacaaccaccccgacganattgatctgcaagcaacctgatagaccgcccggcaaacaacagaaggagagtttacccggagcaaaggggagcaagaaacccccccacccaaaaaagagaactaccacacacacagataggaggcaccgaaacggcaaaagcaccaaaaaccaaacaaggcaaggaaacgagcaacagg

SEQ ID NO: 32758 - DNA, 411 bp, Zea mays
  unsure (1)..(411): unsure at all n locations
agctntatcaaatggacgtgaagagtgcctttctattgtttctatcaaggaagaggtctatggtgagcaacctcccggctttgaagatagtgagtaccctaaccatgtgtataaactctctaaggcgctttatgggctcaagctagccccaagagcatggtatgtgtcggcgtttcaagaccggggggtccctaaaccgacgaatgagtgtgctgcgtgccccagcccatatgggtcgagcgcgtgggcgagcgcgaaggggggagaggctaagtggctggagacgggcgtgaaaaaggtggaagtctctcagccttcgtgttctacccgcgcccaggttcggtgcgcttgcagtatggtggtgacaagacgtcacgcgggtgagggaagcgagcggtccctatatagcgc

SEQ ID NO: 32759 - DNA, 231 bp, Zea mays
caaccccgcagcctcacaaggctactgaggcgaggaattggcacctctagaacttgtccattctgatccgtgcgagatgaatggaatttgacaaaacggtgggaaagatactttcttcactttatagatgactccactagaattttctatgtgtatctcttaaaaacaaaagaagaagcgtttaattaatttaagacctataaagctgaagttgagaaccaactcgagagg

SEQ ID NO: 32760 - DNA, 410 bp, Zea mays
gcttgagtcaatcattttgcaaagaataattgtttctttatagataatctgggtatgaagcacatacgatagatgataagggctggagtaaccaaatgtttcaaggaagacgatcaatgtgtgatatggtttaaaaaccgtatagtattgccaaagaacgaagaactccgcttgattaagcacatcttaatcgttattctattcatcctgtaagcactaagatgtaccaagacttaaagcaacattactggtggacaaagatgaagatcgaaattgcacgctatgtggctaagtgtgacacttgcagacgtgtcaaggccatacacatgataactgttggtccattacagtcgctaccaataccaacattgaaattggaagacatcattattgactttattgtgggattg

SEQ ID NO: 32761 - DNA, 228 bp, Zea mays
  unsure (1)..(228): unsure at all n locations
cattcacacaagaacatcatgacgacccgacagggccactataggctcctacacatgtgatctatttcggccccgattgcttacgtaagcatcggcgggagtaagtattgtcttgtaatagtggacgattattctcgcttcacttgggtattctttntgcaggagatatctcaaacccaagagaccttatagggattcttgagacgggttcataatgacgtcggctta

SEQ ID NO: 32762 - DNA, 369 bp, Zea mays
  unsure (1)..(369): unsure at all n locations
tatgatanaacgggaactatgtgagcatggagtctgttctccactcctcaagtgtttatccaaaaccgaaggtatagaattaatgaaggagatacatgtaggtctgtgaggatctcacattggttccaggcccttgtaggaaaaagcgttaacacaatgattttattggccgaaggcagcttcagatgcagcaaagttagctcagaagtgcgagaattgtcaaaaatgtgcaagagatcacaaactaccttcgtctctcacacagctgatacagcctacgtggcccgttgtaagatggtgcctatatttgttaggtccactttcaccagcgcaaggtaatttgaaatatattgtggtggctgtggagta

SEQ ID NO: 32763 - DNA, 317 bp, Zea mays
  unsure (1)..(317): unsure at all n locations
cctanagggagaacacgtgataagtctaactaacgtgcattctttatatattactctgtgcagcttgtcaagcaggtaaacaggtgggaagctcgcattatcccaccaaatgtgatgaccacatcaagacctttggagatgcttcatatggacctcttcggacccgtcgcctatctaagcataggaggaagtaagtatggtcttgctatagttgatgattattcccgcttcacttgngtattctttttgcacgataaatctgaaacccaatggaccctctagcgctttctcatgagagctcataatgagtttgagct

SEQ ID NO: 32764 - DNA, 419 bp, Zea mays
tgccagcttatcttaactatgacgaaagtgattatttatatttttgtgtgctaaaggactcaaaggagtttccttgatttcctttgatcttaacgaagaatgtgttagttttgttgataatacttatcatatgcttcttgtattatatggtgatagtgcataattagtgcttccgatgatatgaatcaattgcgatctattgtgtctgccatgtaatagatattcatatggttctggtgcttaaattggcatcttaattgtgaatagtggcaggttgatattcctgcggtatatccatttaattggcgtttaaatatgattctgtgcatgtgtgtgttatgtgcatcataattcaattcttgacaatgcatcccacaagtgctaaagtatatttatgcttcgtattagcctaagtatgt

SEQ ID NO: 32765 - DNA, 320 bp, Zea mays
gcgctgacatgtggggagcgtatcttgtgtgtgatatatcgaaccaatcattaaaaagttagattacattgcattctttttgtaggcacgttttctgttggccgacagggatgactcgaaccatccctagaatgtgtttcaagtaaatgccattcgatggtgaatgaggccctgtacaaggcaaagattcaggccacgtgcatgtattatcaacaaatcttagggcaaaagatgaacaagaagacacgggcctcgagtatatacctttacgaagaagagaatcgtaaggttatattacaatcctttcctttgtgttagtt

SEQ ID NO: 32766 - DNA, 428 bp, Zea mays
agcttgggaaaggtcttcatacctacatgtgtttatttgcgaagccacaaccaagcccatgcgcagtcttattctatataagcaatgcacactagacctggcctacttcttttgcaaaatcaactaaataaagtgtgccgtctaatactaccttaaaagctagtgaaccatcacttcttctaaagacagacacattcacaatctgcgaatagacagtgataccccatctgacataatcgactaacagatagcaaattatatccaagactctctactaaaaatacattagagacagaatgctcattagaaattgcaattttacctaacccttttaccttgccttgattcccatcaccgaatataattgaatcctgggaatctttattcttgacgtaagaagtgaacttcttcttttccccgtcatatgg

SEQ ID NO: 32767 - DNA, 316 bp, Zea mays
ctgcactgatttaacttactaagttttttttttgactcagcctaagcaggcatgcgctttgatctttatcacgcccttaagctttgttgtttttcttcagagcatatttttgccgatatctgatggcaaagcaaacatgaaatatgaggcttaagttcttttcgaagtattgtaacataagttccggcaataaacattattgactatatccttattatttacaatttaacatctcacactctcagtctgtgactctcctgcgcgctcccacaaactgccatgccttgaaaaaagctcttttacctatacgcgaaag

SEQ ID NO: 32768 - DNA, 148 bp, Zea mays
gggtgctactatcaaaaaccttgaggaaagcagttgtgtggatacaggtgacaacacaaatacttctgagatctagcaaagactaagacagagcgccatacatatcaacagaagacgcttttagataagacagtttagggcactacaa

SEQ ID NO: 32769 - DNA, 348 bp, Zea mays
ccatgtatagcatgctttattattcttctcagaaagaggcagctgaatacagaaacttggtcatcaaacagactgctgaccctctgaccagtcagcactaaaagagggccgctgccttcctggtaaatacgattaagtccgccttagaagccatggaaactaaacttcatgagacttccacaaagtacctaagcgccttcatagccggtaagaatcaaaagaaacgactggttcttttggacagttctatagcgctagactgactcggatatagctctactagttgaatccctttgatatgacaagcacctcctctttggtgaacccaagtaatatcaacatacaaga

SEQ ID NO: 32770 - DNA, 374 bp, Zea mays
cctatttatactcaactcccgacctcctctccgaccttgaagtgacattccgatgtcttatagctataggcgtcaagctcaatcctgagaagtgtgtcttcttggtgcccccacgcatgctcttggggttcatcgtctccgaacggtgcatcgaaaccaacccggagaatatcgcactcatcaccaacatggggcccatcaaggacttataatgcgtacagagggtcatgggatgtcttgcggctctgagccgcttcatctcacgcctcggcgaaagaagactgtctctgtaccgcctcttaaagaatgccgagtgcttcactttgacccctgatgtcgaagaagctctcggaaacctgaaggtgctcctcaca

SEQ ID NO: 32771 - DNA, 457 bp, Zea mays
  unsure (1)..(457): unsure at all n locations
acatggaccggacctagagtcacgcagctgcagcttggaagttcttatccccaatgtgctttactgtatgccacagccaacccatgctagtcttagcaattaagcatgcatctagaccggcctcctcttttgcaaaatcaactaaataaagcttgccgtctagtacacccttaaaagctaatgaaccatcacttcttctaaagacagacacatctacatttgtgaataaacagttatatcccatattacaaagttgactcacagacaacaagttatatccaagcgactcaactaagaacacattagaaatagagtgctcagatgaaatagcaatttttcctaaccctttcaccttgccttgggtcccatcatcgaatatgattgaatcttgcggatccttgttcttgacgtatgaagagaacnatcctcttttccccgccatgtggtttgtgcattc

SEQ ID NO: 32772 - DNA, 267 bp, Zea mays
tagaatcatacctttgtattgatgtgcaccttatccaccattcggcatagattatcacttaagcacttgcgtaggacactaactcaccaaaatagttagaaatggcccaagggcacagtttctttcagtaagctaattctaacagacacgtgtgatgggcttttccggtgcgacagcctgaggtgaaacggatcaaatatgcacggatacaaattcaatgtcaccgtttaccatatattagtccgaatgcggatacgaattcgaata

SEQ ID NO: 32773 - DNA, 407 bp, Zea mays
ctcgacaatgaagaaatggcgctcgccatcttttgtctttctccaaacctcaaacaaaggagggggaaagactactagtcccgctccaagaaggtttgctacaaatgtggtaagcccggtcattttattgctaaatgtcccatatctagtgacagtgaccgaggcgacgactagaaggggagaagaaaggagaagaaaaggttctacaagaagaagggcggcgatgcccatgtttgtcgggaatgggattccgatgaaagctcaagcaacttctccgacgacgaggacgccgccaacatcgtcgtcaccaaaggacttctcttccccaacgtcggccacaattgcctcatggtataggactgcaaaaagaaaaacgctaaatcttactcctccactaaatatgaatc

SEQ ID NO: 32774 - DNA, 427 bp, Zea mays
gcttgtctcggattatatgacctcgacaatgttcttattgttcttgacgttatcgaactatgcatgtccaagtgaatttgatcgaatatccgccaaatggtcttcaaaactcatgatccacgtgtagatatttctgttcaccacacattcacgaatgaaattgaatctattggctatatgcctcaatcatgaagaacaaggttcttcctaaggccctgtttggttaaagagactaatctttagcacctggtttttagcctcggttagtctatattttaccaaacagaaggactaaacgagggactaactggctttatgctttagtccctcacatgggtgctaaaagagactaaaggacaacatttactccaattaccctctctagaaaactggtgcaaacaacaaaatgggcattatggtcttatgt

SEQ ID NO: 32775 - DNA, 263 bp, Zea mays
aaagaaggacggaccattatcttccccgacccagcagcacatcaacaaaaaccgcgccgcacgaaagggctacggcgaagacacctgtaacggcatcacccaaaaaaaacaccaaacagcgacgacaaaccaccaaccaccgttcctagacaaaaggcgaccacgcggccaagacgccaaccccgcacgagaaggccaacctgacccctacacgacacaaactttcggtagaaacgcccaacagggaaaaaaagccagacccc

SEQ ID NO: 32776 - DNA, 194 bp, Zea mays
gatggtaagaatttactacgtgttcttttcgtgcccctccacgtactgtgtcgtttcacgccaaaaaagcggcataatacggactactagtacagtctattacgccggcagctgaagcttactgggggaacataattatgtagacaattgtgcctttctggcggagcaagattagactgttgactatccctcct

SEQ ID NO: 32777 - DNA, 378 bp, Zea mays
  unsure (1)..(378): unsure at all n locations
gagatataatgcatgggacatgcacggttaatctctcttatttacgtcggatagtgggcgcagagaggtngcaaatgcaaccaaacctcctataactaaccgaacaacatgttcagagaggttccaaagcaagtgggtggtgcataactcaccgtacatgtgtggtgaaagaatacaagtaaaaaataataccctctgagacttggatcatggccttgtcgctcacatttctttatattgnagctatgactacaggtgcaaaacaacacaactagtatgttccgtagctatagttacatatattcacaactgctgcgacagggcttattgaatgcacatttaaacactacgtctgaataatactctatcggatatact

SEQ ID NO: 32778 - DNA, 356 bp, Zea mays
  unsure (1)..(356): unsure at all n locations
tttttttaccccacanacaacctcgctggaaagagtttgtaggtacataatattgttgacttatgaaccaggttacgttgtatcttttacaacttggctgatctttgcctcccttttctgtagggctaaatctgagcacgctttaaggtcataagaatctgagaataaagctgccaatagcccttaacaacctttcgtcaaaagttatcaaactgatgaatgacgcctcagaaaaagaaaaaaatctactttccccggtacacaaagataaagcttccgaagccaatcttgctgtgcatctcaaacttcattaagctgtatttgaaacttaaagaaaaagcttgtcaagaaaaatt

SEQ ID NO: 32779 - DNA, 365 bp, Zea mays
cttctggctcaatatcacaagctgattgaagcaacaggtggcgatcaaactactaatgctaagtcatctagaccacctctgaaatcatcatgctcaccttcgaatacaaatttagagatcaagattggcgacgagaagagtttaatgcatcagcaacacatcctccttttgggccgacaatgccaatgcagtatggttcaactccttcgtattttcatccttatccatcttgtggacggtatgattcaaacgcttatgcttattcatattttagaccacataacatagagtatttagctcatatcaattccgattttgagaaacaattatataacatagaccgtcttatctctaagaatctatct

SEQ ID NO: 32780 - DNA, 275 bp, Zea mays
caccctcacgtgcgtcattatttgcttgaacccatcctatccacttttaaaaattcctctttccactaacttgagagagggaattaactattggccttggaaaatctcttctttccattgcagcttgtctaacccatccttattggctatgccaatatgctgctattatccttgcttcgtggcctaagaatttcttgtaggaaaacacattattacatacgatgcaccaatgttgtgtgatgctggagttgcttatctagacgatcgttttggag

SEQ ID NO: 32781 - DNA, 218 bp, Zea mays
ataacaacacatttaaaggtctaacacctctgctaatgtcgaacaagagattcagtatgacgaacatacttgaatagtgtataatgattattgaacaaaggttcaacacaagggtaaataaccaatgatacaatgccaatggatataatatggcctctgtattggctcgaatatatatggacacgacctatcaaatcactacatagatatgatcagaa

SEQ ID NO: 32782 - DNA, 350 bp, Zea mays
aaccaacaagaacaagtgggcgttttcttatattgatgatcctttcgaccaattggtcggggccaaggtattatccaagataaacctttgctctggcttccattagatcaagatacgatcgaatgatattccgaaaacgggattctctaccagatatgggctatatgaattttggtgaagtaatcgggctgacaaatgcaccaacatatttcatgtatctgatagaattctgttttatgccagaattggacaagttcatagtggtttccatcgaagatatcttggtggactctaatgaacgaataacaacatgctcggcattcgcatggagtgcttcaacgtcagcgaga

SEQ ID NO: 32783 - DNA, 301 bp, Zea mays
atcatctttggagatgggaaccaacgctaggttaaaggattgtgaaagatagccattacctccgagcattctatctctcatgtgttcttagttgaatcgctcgggtacaactcattgtctgcgagtcaattatgtgacatggattataactgtttatatacaaatatagatgtttctgtccctataaagagtgatggttcattagtggttatacggcgtattacacagctacactttacttagttgattcttttaaagaggaggtcgatctaaatgcatgcttaatagctaacactaacat

SEQ ID NO: 32784 - DNA, 423 bp, Zea mays
  unsure (1)..(423): unsure at all n locations
tcagctagctttcgtaccttgtgtgcatcanaagaagcaaaggagtgggaaggatctaatgctgacatacaagaaagcagctccatattagcctcactaaaccgactatcaagctctaggctatattgatcaatgaccccaatatatacttctcttctgaagtggtcatcattggtttggttatgaacaaatcgtgatgatcttccataaggcttatatattccatccatagcaggaacttcgaattatgtttgtgcaaaatgaagtattctttgagaaattgacccaaccataagcttaatgtgcatcttcttttgcacataacagtgaattgcataataaatctgctccttcttgcaacacctgtagacattgatatcaaaatacaacataatgtgctaaaacaagtcatgatcaatgctc

SEQ ID NO: 32785 - DNA, 412 bp, Zea mays
tataccacatgtgctattttgttattccacagccagcccatgctaggcggagcatttaatcatgcatctagaccgccctcctcttttgcaaaatcaactaaatagagtttgccgtctaatacacccttaatatctaatgaaccatcactttttctaaagacaaacacatttacatttaggaatagacagttatatcccatattacataatagactcacagacatcaagttatatccaagcgactcaactaataacacattatatatagagtgctcggatgaaatatcaattttttctaatcctttcaccttgccttggttcccatcaccgaatatgattgaatcttggggatccttggtcttgacgtaagaagagaacatcctcttttccctcgtcatgtggattgtgcatt

SEQ ID NO: 32786 - DNA, 427 bp, Zea mays
gcttatgaagattcttcatcccaacatgggcttttctgttgtgccatagccaacccatggtagttttagcaattaagcaagtgtcgagttcagctctatcaaaatctaccaagtatagctgaccctttaatactcccttaaatgctattgaatcatcacttcttctaaagacagtgacacctacatcagtgaatagacagttgtagcccattttgcataattgagatacagaaagcaaattgtaatctaaaaaatctacaagaaaaacattggaaatagaatggtcaggagatatagcaattttacccaatcctttgaccaaaccttgatttccatccccgaatgtgatagctcggtggggatccttcgttttctcataagaagagaacatcttcttcatccctgtcatgtggtttgtgcacccact

SEQ ID NO: 32787 - DNA, 407 bp, Zea mays
actgaagatttctctaatggtttcaggctctctgactcaccaaccttaccaaaattagcgacactctcatccttagcagcaaagcctaaccctagtctgctagttcccctcttgaactggctaaccatcatgcccaattagggatcactgcatgatacccagctcaagatagattgaactcatgtgttttcttccttgatccttgtcttgtcgtgcctgctggactcgagagcagactgcaaaccctcacaaagtgcacaatgcgtaagtgtagatgcactcactgagctagccttctcaagcgaccctatcctactatttctcttcgctagcttaaactgcaagttaggacatgtagtacacgcacctaataagctagccctatatcccaactcgtcgtgctcatc

SEQ ID NO: 32788 - DNA, 54 bp, Zea mays
gggggtttttttctaccaccatccaggggggggaaaacgtagatcgccccaccc

SEQ ID NO: 32789 - DNA, 314 bp, Zea mays
cccttcagcgcacagagtcctgcactaacagcattagattgcataataatacacggggagcctcccctccccttcaatatatagcgcattgggcattgcctctcgccctcttaaactcccgtgaaaggccaaaccggagatggcgcatatgtccaaggcttttcccacgtccaagggcaaaggcctagtttcgccatcctccccctccccctcctaagcgacgctctatgcacaaacacgccgggagcctcttcgcgccggtgtccgtaacagttccccactctagcggggtcgcaggcgggcggtacctcgac

SEQ ID NO: 32790 - DNA, 340 bp, Zea mays
tcatgtggggacttgaagggtattcttaatttcaaaattctgaaattcacaccttgagccacaaatcatggatgttcaccttgatccctaactcgaatcctaatggccctatttacaaaaaagcgcctaactaacccctctatcgtgtgccaaaaaatggcattgggacgctaaccctaaacacgacaaaaccttgggtttgcctcgggtttgagtaaggagacagaccggattttcgggctccatatctctgctaccagtaggccaaattctatgactcccacacaaaattggtaacttgtacggaggagaagagttttgttcactgaccaaagcgaga

SEQ ID NO: 32791 - DNA, 409 bp, Zea mays
tgcaacttaaaaacttagagagttatatatatattaataacgccgattaaggaaaccaagctacttgagcatcatatgaaacacgaatcactctctctcaagacactaatcaccaatgatcacttgtctcaattgtgggacttacagagattggacgctttgattgtgtcttggaatggattgctagctcttgtattgaatgtgtatgagtggagtgcttgggagatatgaatgggcgtggttggggttttagccaccaaccacttcctagccgttgcttcatttctgccgaccgcggatggtccgcgcccctggcccgaacggtcctgccctgcacattaacggttgaaatcgcaacggtcagcagtaacggctatatcaacggctatagagcatttaatgcatcgtc

SEQ ID NO: 32792 - DNA, 389 bp, Zea mays
gcttaactggtgaagaagctctaattctccttattccggcaataaactcatacctagggcgtaccttctccttgaaacttgagtttaccttataacgctgtgttatgttcatgatgatgaagcccaagagcaatgatccgaagcttggcggatgatgatgaagtgatgaaattgaaaacactgttatgaaaaaactctagagaaattcttgaataaccttgtaaaaatattgctaattatgaaatagacactactctgtaatttgtccataccttgaatatattttacttttccgccatgttgaactctttgatgggacgaacttgtttttttgaccgaagctaaaacacctcccttctttcgacacaacaacataatctgctcttttt

SEQ ID NO: 32793 - DNA, 307 bp, Zea mays
aacttaagtgcctaagtcccaccttaaaggctagaccacacttaaatatgaagaatacgtctgtccctcggatctagtccgacgtggccactaacaagatcaagtaccacgtactcactcgaaggtgaggcacagagcaaatacaataatagcataaaccatacattaaggagtatttaatttattacaacatcatctgagtttatcataagtagtgatcattgttcggaatacagcagaatataactacatggtaataatccgaaggatggggaagcctgtgccatcgctcctcattgctcttctc

SEQ ID NO: 32794 - DNA, 280 bp, Zea mays
tgtggcgccctcgggcgtcttgtctcagccgaagtaccaagtctcccacttggaagactcggggtcgaacccttcgggcgtggtagcgtctcagagactgctgataccacgccgagtgtagtaaggctatgtctcgagcctcttccagctggtccaatgaatcctctcggctagtctggttgctttggtcgtcgtaagcctttgtcctcggggaaccgtattccaagtctgtgggtaagatggcctcggccccgtagactagaaaaaacggcgagaagcc

SEQ ID NO: 32795 - DNA, 282 bp, Zea mays
tcagcgtatgagcagctgctgttctagtagcgccctctaaagtcaggacatgttatgcagtaaagttggactttagttgcacaaataatatcgacgagtacgaagctcttcttttagggcttcggaagctaaaggcaatgggaataagaagggcaatcctcaaaactgattcccaagttatttctggccacgtggacaaaagcagcaaggcaagggacccaaagcttgaaaaaatatttggatgcagtccgaagattggaagcttcttttgaaggattttct

SEQ ID NO: 32796 - DNA, 278 bp, Zea mays
tattcaacatcttggtgttcttccttatcatcaaggcaatgttagcatcaaggtcatcatcactagaggattcttcctcaacttgtatttttgcttttccttttctttcatgatttgctttgagagccaaatcctttcttttggaagatgattcttctttgtcgatgatgtgcatgtacatctcatgagcattgatctttcccaaaatctgtgtaggtgtggtaactgaaagatccatttgatgtagcacagtgacaatgtgtccatatttgtctatt

SEQ ID NO: 32797 - DNA, 278 bp, Zea mays
  unsure (1)..(278): unsure at all n locations
tttcatagtcggggtattcaaaattttatgcgtccattacccggntcaatcttcgtttcggcaaggtaccgaaggctgcagtcatcaattgatcttctttattggtatagttcccaagtattttgttgcacaaggtctcaatcatatctagccattctttgcagggctttttgaattgtttctcgaacttaaaacggtaagggagctgaacaagctcgtgcttttttcccacttcttttctcttcgacattccctagtcgctagaagtcggatatgtt

SEQ ID NO: 32798 - DNA, 279 bp, Zea mays
tcggctttgaaaatagtttttagcttcttcgaagatgtccgaagataagaagactgctgctgagacgaagctgagcctcgacgaagagaaaaatttggggtttctcatagcgatgtcaaagaccaacacagaaaaaatcactaaggagattctggaaggcttgtctgaggatactggtgacagtgacaactatgatgtggacagtggtggtgaagactccgaagatcgtccctggcgaccaagccattcagtttatggtaaatcaactatcaaagaaaa

SEQ ID NO: 32799 - DNA, 277 bp, Zea mays
ttatatggacgtttatgttttactccgctaaaatggtctgaacctggtgaaaggtacttcttcaagcctgatatggtgaaagagactgaagaaagagttcaaagaataattcataatatgaagaaagcccaagctcgtcagaagagttatgcagacaaacagcgaatgcccttgtattttcttgaaggggactatgtctacctgaaggtttcgccaatgaagggagtatcgcgtttcggggtgaaaggaaagtttgcaccatgatatattggtcctt

SEQ ID NO: 32800 - DNA, 278 bp, Zea mays
tgcacttaccattccatttctacccgcatccatattgcattcaaggttgaataacactggtaaggcaaaggtaacaaaacttgtgcgaattaatcttgccatcggatcctataaagatgttgttgaatgtgatgttgtgccaatgcaagcatgtagtattctgctaggaagaccatggaaatttgataaagattatatgcatcatggtagatcaaatcagtattccttccaataccatgataaaaggattgtgttgcatccaatatctcctgaagcaa

SEQ ID NO: 32801 - DNA, 273 bp, Zea mays
ttctcaatctatcttgttgtttatcaaatatactttaacttatataattggctcaactcaaaattttaaacttttcattcccttttgcttattttcttgaattatgttcatggggttcacttagggttcttaattagggttgcacattcttatcctttaagagactcaattgtcttgatcatgacacttttaagcatatacttggtgaattctttcttacttaagttattttgatgctcatgcttactttggttcacataaaataatggttct

SEQ ID NO: 32802 - DNA, 270 bp, Zea mays
ttttgcacctatcttcttttcttcttctttctgccggtaacacttagacaagtatattagtacacaaaaccaatgtactaaggcctaaaaacatacctttactctagatttgcactttgtccatccatgagcataaattcacatttaagcatttgtgttggcactcaatcaccaaaatacttagaaatggcccaagggcacatttccctttcaatcttcccctttttggtgatttatgcccacacaacattaagcaactagaacaagtgc

SEQ ID NO: 32803 - DNA, 274 bp, Zea mays
  unsure (1)..(274): unsure at all n locations
ttaccaatttatctgcttttacacgtatcacactttctaggattacatgaggggcaatgtaagatttcttggtggtggcctatctggttatgatcttttgtcaaatcgccattcacgaactttcccatangtcaactcatcctatgggaaatttacaagagtgaaatttactgttttggggaggctaatgaagttaaagaatggtgtgctaacatttttactggtctaatggcagtctttctatgaaatatcttggaattccaattgataacaa

SEQ ID NO: 32804 - DNA, 274 bp, Zea mays
tggctatttaattcagatgtcatcatgtcagatgggatgggaactgtatgagtgggttagataaaaataaaatctggaaactgcagggtaagaccatggagcaggaggataaaattatcatataaacacatctgagggggtagatcttctctttataacttgacatgcatgggtgcagaccaacatgccgggcttatgagggcgtacctctctgggctggcatacacgtatgcattacctagttacaaaagggagaaaaactcgacccctcaga

SEQ ID NO: 32805 - DNA, 271 bp, Zea mays
tctaaagggagaacttgttataggtttgactaacgtgcaattcgaaaaagatagaccttgtgcagcttgtcaagcaggtaaacaagtgggaggagcgcatcacaccaagaatgtgatgaccacttcaagacccctggagctgctgcatatggacctcttcggacctgtcgcctatctgagcataggagggagtaagtatggtctagttattgttgatgacttttcccgcttcacttgggtgttctttttgcagaataagtctgaaacccaa

SEQ ID NO: 32806 - DNA, 282 bp, Zea mays
tgtgaagattcttcatcccaacatgggctagtcggcgatgccagagccaacccatattagtcttagcaattaagcaagtgtcgagttcatctttgttatcattaaaatcaactaagcatagttgaccctctagcactcccttaaaagctattgaatcatcacttcttctaaagacagtaacacatatatcagtaaaaagacagttgtagcccattttacataattgagaaactaaaagcaagttgtaatctaaggaatctacaagaaaaacaatggaaatag

SEQ ID NO: 32807 - DNA, 282 bp, Zea mays
  unsure (1)..(282): unsure at all n locations
tggatattattcatcagttctctgtttattgntgcgacaaagaaaaattcttcttcacgaagcatgaaaagaagggaaggtgttttttcgtcaaagactcaaaagcggtacgtgtaaagtttcatgcatcgtaaagaattgagcaataaaaacaggtatattacattcaaggttacaagatgttacaatatattacattttagaagttgttacaataaatacttaatcttctctcaaaacgacttctgcagcctcgttcaggagccgattgacgacttcgtc

SEQ ID NO: 32808 - DNA, 219 bp, Zea mays
tgactcgagagcgcccccatgcatccattcccacgtcatccggagacacggacaagaagttctcgccaaaacaaagaaggctgcccacaagtcaaacggccacacggaaaaaacctctgcaaacctcccaaaaagcgacctttacaaaatcccgtgaaaatacccgagacccatgttaaaaccccgctaaggcgggtaggtactaaaataaaaaccccc

SEQ ID NO: 32809 - DNA, 275 bp, Zea mays
atgattgggttttttattggattgctcgctcttgtattgaatgtgaaagattggagtgcttgggtgtactgaatggaggtggttggggttgtatttatagcctccaaccacttcctagccgttgctccttttctgtcgaccgcggacggtccgcgcccctggtccggacggtccgcccctgcacatcaatggctaaaatcgcaacggtcagcagtaatggctatatcaacagctactatgcattaaatgcgtcgttagatgacagataaagtagt

SEQ ID NO: 32810 - DNA, 276 bp, Zea mays
tggatcaggatgctggtttttctgctcctgctgctgaggaagtgcccgtgcccgtttttgctgaagctgaccccaatgggtgtgacccgactgatgctgaacccaatgggtgtgacctagatgacactgaacccaatgggtgtgtcgtccgcattgttgatgaagatgaggaagaggaggatgaaatccctctaattcggaagaacagccgacactacatagtcagcggggaaagcagtggtgttccttctccagccttgtctgctctcattggtt

SEQ ID NO: 32811 - DNA, 274 bp, Zea mays
ttggcacggataggcttttacacgacgaaggaaagacgtccatagcaaagaaaggagaaaatacaatgttgacctaatgtcatttgtaaatgatgtatgtaaaatcttgaggggcatgattgtaattttgtacaaaggtggttcgttgtcacacccggtttttgggcaaaaccaaatgcatagcataggtgtgccaagatccattttccacacatatattgacgtcacaagtgtaatatatcaaaagacaatgcaataaaggcgtaaaagggag

SEQ ID NO: 32812 - DNA, 272 bp, Zea mays
tgtcttcatggtggcatgtttactaccactccccatggtggtacaattgaggaggcctagccttttttcgagccttagcctagaagggcctaacacctgctagccctagctagatttcttaggaagtttgccacgcttcaccctcggctgcccacacacacacttatctattagggagaacaactctctaacgtcatggatgttgtgggtggctagtttctccaacatcttttcatcccacacaccttattgaaaggcgacaacaacaaatt

SEQ ID NO: 32813 - DNA, 276 bp, Zea mays
tgggaagccaatcacaagtttattaaagaatgatattaaagtcaatgggtcttcaaagcgtaatgaatcttttgagcaattgaaggtattattaaccactgctccggtattggctcaaccggatatcaataagccctttgatgtgtattgtgacgcatcacgcagtggactccgctgtgtgttaatgcaagaaagccgagtaattgcgtatgcttcaaggcagttgcgccgacatgaggaacattatcctactcatgatctggagctagctgcggt

SEQ ID NO: 32814 - DNA, 331 bp, Zea mays
cataagaacctgtccactagcttgtgcgtttggaacttcatgcgactacttatgaccactctctcagactgctgtgaggcctgaagatataatcattgtgatatatacacgagaactggaatgcatagtaatattttggattgccaaatcatataatggatgggcctagggagataatatagcatatgcgtaattaatcggctgcaactcttgactagtttaatgactaactatttgtggactaaatctaaaacctgatatatgtacttttccggaacaagactgcacttcattctgactccctgatgacgcccaattttacaggatgtag

SEQ ID NO: 32815 - DNA, 275 bp, Zea mays
ctgagctgcacctgggtgctatgattatttctacttcattgttttctcctgccgctcagcggaacctgcggccactgattaagatctgtaatcgaccctctgtgtcggccgtggcgcgaacaaatattattgttgacagctcatcatcgatttctgcagtcatccgctatatcacatattcggctagcaccagcgtttatggcacataactgctcacaaattacctccgtctgcactatcgagtcctatgctactattaacattctgcccactgg

SEQ ID NO: 32816 - DNA, 280 bp, Zea mays
tctaaagggagagcacattttgggactaaccaatgctcattttgagaaagacagaatttgtagcgcatgtcaagcaggaaagcaagttggtgttcatcatccacacaagaacatcatgacgaccgataggccgcttgaactactccacatggatctattcggcccgatcgcttacataagcatcggcgagagtaagtattgtcttgtaattgtggatgattattctcgcttcacttgggtgttctttttgcaggaaaaatcacaaacccaagagacctta

SEQ ID NO: 32817 - DNA, 68 bp, Zea mays
aaacaacacgcgcgaagcaccgcagagcaacgagcaaaacgcaaagccgcaaaaaaccccacaccgcc

SEQ ID NO: 32818 - DNA, 277 bp, Zea mays
tctaaagggagaacacattttgggactaaccaatgttcattttgagaaagacagagtttgtagtgcatgtcaagcagggaagcaagttggtacccatcatccacacaagaacatcatgatgactgacaggccgcttgagctactccacatggatttattcggcctgattgcttacataagcatcggcgggagtaagtattatcttgtagttgtggatgaatattcacgcttcacttgggtattctttttacaggaaaaatctcaaacccaagagact

SEQ ID NO: 32819 - DNA, 277 bp, Zea mays
taaccatacacagatgacttctcacggatcctcggacgaagggaatgcacaatcccacatggacggacttgcacgagagggtttcccccgtatcttgtgggaggtactttagggagctggttacacgacgcctccccagtacgcggtgcagctgtttgagaagcaccgagtgcctcgctgtagggtgaggatgaccctggagcctcatcccttacagctaggctggcgttcactggactctgagtcttttggatatagggctgaggacactatggag

SEQ ID NO: 32820 - DNA, 264 bp, Zea mays
tagggtcgcttggcgcggcttctgttctttctggatgaccgacacgccgggcacgggtctccggcaaggtcgagcagcgagagcatagcgcgaaaaagggcgagcttgcgcgaaatggggcggggagcaattgcggttgcaaccggtgcttaaaagggaaatgggggcgtgggcaggcaacatggccggggatctcggatgcgtccctggcttctggtcccgggggggccccggggaaggcggaggtgacagggttgcccccct

SEQ ID NO: 32821 - DNA, 275 bp, Zea mays
tcgtcagtcgatgccctattggacttagcttcgtgggcatgggttcagtcattacctttagaatttcctccacgtcgctagtagaaggtggtgtgggggtcccttcttcttcggatagttttcgctttggagttgatatttttctcttgacaattttcttcttttttggtggttgttcttcatccttgtttaaagcttcggccgctctttttcttctctcgccctcagcacccttgttcagctgcgcataatcaggatattcgaaacccagtgca

SEQ ID NO: 32822 - DNA, 274 bp, Zea mays
tggatttaacagccggatattatcaaattcttcttcagtcagcagatacacataaaacggcatttcaaacctattctggccactacgagttcaaggtgatggcgtttggattaactggagcaccgactacatttcaacgagctatgaatgttaccctggcccccttgcttcgtcgttgtgtgctagtctttttcgatgacattctcatttatagtgaggattttgagcagcacctaaaccatgtgaggcttgtgttggagttgcttctcataga

SEQ ID NO: 32823 - DNA, 272 bp, Zea mays
tcataagagctttcttgatactttcttgcaaaactggtattgaatgaaaactccgctaggggcaaacattcatcccattttggtgagaagttcaggacacatgcccgcagcatatcttcaagtatttggttcaccctctcagtctgcccactggtttgaggatgataagccgaactgtggagtaatttagtacccaaggagttgtgaagtgcttcccaaaacttggctacaaattgaggtccacgatccgacacaatggtcttcggaacacc

SEQ ID NO: 32824 - DNA, 271 bp, Zea mays
tttcataggaacagatctttactgacatgtaggtacaacaagtgcagctttcaagacggtttatgcaggtttggggtgtcgtaatagaaaccaggagaggaagtcttggactttgcggtagattttgacctattaatagtgttgagaatctcatttagtgacctgtatacacagcagaggcagcaggcagcaaatatgttccttggtgaacatgaacagaagatgccccttgcaaatcagtcacccaagcatggtcagggagtgcttttga

SEQ ID NO: 32825 - DNA, 274 bp, Zea mays
ctcttctttttcaaccactttcaacacacccatagatttgtagccatacaatcggtcaacaagctaccaagttccattggaaagaatagaatccatctagctacggacaacttatttctaaccatccacatcggaaggtgagaatacctcaaccattgttttgggagattcatctataagataaaaaatgaaatcatcaccaaaaaactttgcaggcctttatttcttgcctcttctaagagcttcactatgaatctcataatctagttcaagt

SEQ ID NO: 32826 - DNA, 279 bp, Zea mays
tactcaagcttaatggtgcttaagattgttttaaattggtatcttagtttaaattggtatcttagtttaaattggtatgttaatggtgaatagtggtaggttgatattcctgtgttatatccactcaatcgaatggtgtttaactctgattctgtgcatttgtgtgctatagcatcatggtttgattcttgacacaatacatcccaaaaagtgctaaggtatagaaatgtttcgaattgcctaagtatgtgcaaattggcgtatgaggccaaaattatg

SEQ ID NO: 32827 - DNA, 281 bp, Zea mays
tgcttctgccatggttctacggccgattagagcgccatagcgtgcgtatcttggcaaagtcactgtgtacggtcgcttctctgctccaaatcctatcttttcgctgtgagttccaagtcgagatatggtcggggtagggagatagagaggggagaagtttgctgtgtcagccaagcccgaaccgagacaaaaggggtgtcaagtcgtgtctagcgccctagggtaggtgtcatctctttccagggtgttctagggttaatttggcgccattttgtcaattg

SEQ ID NO: 32828 - DNA, 293 bp, Zea mays
tataaaactcaagcctgagaaaacggcattcttcatgtgctagacggcgaggccacagccagcccatgctagtcttagcaattaagcatgcatctagaccggcctcctcttttgcaaaaacaactaaataaaggttgccatctagtacacccttaaaagctaatgaaccatcacttcttctaaagacagacacatctacatttgcgaataaacagttatatcccatattacaaagaggactcacagacaacaagttatattccaagcgactcaactaagaacacattagaaat

SEQ ID NO: 32829 - DNA, 275 bp, Zea mays
tcttcctgaccatactcttgtgtgcttatgatccgattccgaagatacatgcacacatatttcacttggaaaacattggcaaatcatgtttttgaggaccttcggaagccaaaggcccccaactgtagcccctcgcgatattaatttattagaataatgaatttatattgcgacatggacgaaggccttaagccaaaagtccgaaaaaacaacttacctttgctaaaatatcaacagtctatgacaagcgggaccctccagttctcagcacgcta

SEQ ID NO: 32830 - DNA, 278 bp, Zea mays
tgtcggtcgtttcaaatctaagcgccctcgtgcagacgatgcagactataatccaaccacagactcagaggcccaatcttcagctgggggtagcgtctctatggacacagaagatgttccgcatgctcatcctgactatccgattgacatcacaggatggacttatccaaagaggagattctctgtggcagaattttgctccaggaggactgtcaatcagtatgctctgccctcagacaccaatattcagttttttcacactcagcttcaatttgatg

SEQ ID NO: 32831 - DNA, 170 bp, Zea mays
tgtgaaggttcttcatcctcacatgtgctaagcggcgatgccatagccagcccatgctagtcttacctattaaccatggctttgaaccgcccttttttttggcaaaatcacttaattaaggttggcgtgttattcaacctttaaaggctgtggaacctctcaccttttta

SEQ ID NO: 32832 - DNA, 274 bp, Zea mays
tgagtcgcaatttgtgtttattttgaatccttcttagaatgtagtaccaacctgcactaaaatagatgcctatgatcgatatgaactccatttttgttgacccatatatggatggaaatataacttgattacctaactaatgatgttggactaaggtctaaatttcattggagtcaatgggaatcaccgaaacaaatcagcatccaaaatttgttacgatgtggaattaccatattttgagttgttaggaccttgtaacgtgttgtgactcttt

SEQ ID NO: 32833 - DNA, 275 bp, Zea mays
tcgggaagcccatacttctggtcatctcccggcacatagataattctttattgtctgggagtcagtacaagaaatcatcttcgtttgtaccattaaacactaaggcccccttcgggtactttagttcctgggcatagtgtttggcttcaaaaatttcctcttcggacaattttttccctgcagtatgccgaataatgtagtcaacctcttcgatcggagcttcaggagcaggagtttcggttttttctggtacattttgccccgctgttttgttc

SEQ ID NO: 32834 - DNA, 270 bp, Zea mays
tgctgatggattgctaggatcgtttatgtcgcttcagttcatcatgcaatcgacttagctttagatggttctatggattgtatctcttcgggatgaaaatgccagatggttctaaaaacagatttctagatgcgattcgtttttgggaaccatttttagtttgtgggtttttttaatttaaggaatcaaaacattccggcttccaacatcccacacgcgaatgagggcctatttaaattcggtgttctagacttcagagctaagttacct

SEQ ID NO: 32835 - DNA, 273 bp, Zea mays
tgacaacatcatttgacatcttaaataaaatttctgagatcaagtatatttaattcattcctcaacatgcaaaagcgggttttatcaagtggcttagtgaaaatatctgttaattgatcttccgaccttactccttctaaaatggtatctcctttcgcaacatgatctctaaggaagtgatgacggatatcaatgtgcttggtgcgagagtgttgtacaggattattagcaattttaacaacactctcgttgtcacacaacaaaggcaccttt

SEQ ID NO: 32836 - DNA, 271 bp, Zea mays
tttaaggagattttaatttatcgcggggatgtctgcacgttccttggtgcgagaggagtttcagccatcttggagaaggtgggttgcaatcatgttaaaaccttggcccaggccgaagctgccctccccgtggatgacacaaaggatccctcggccgaagcaagtttaatgggcggaaaattttatactgatatctgggaaaatggcgaccgagaaatggctcacgaaataatgaagaaaagtgaaaaagatattcatgacgctcgagaag

SEQ ID NO: 32837 - DNA, 269 bp, Zea mays
ttacataagtcttgattttgataaaaatagaagccatatatatattagaaaaaaattatattacctatttcacctccttagacgttattgtttcctacatggggctcatggccattatgacgccaatgaccctcgagggctctctggacgtcatgaggtcttcgaacctctagggtacttgaggaccgttcgcgaccattaggggcctcaggcgatattccaaggtgtcaagacatatataaggccaatgtggtgtactgtggtgtggt

SEQ ID NO: 32838 - DNA, 278 bp, Zea mays
tcagcttcgtggctgatccatccaattgtgccttcgaggtcaccccttatgaagttctcctcacttgagaatgcgccaacactggcgaagctggtttttattgtcttaacacattccatagattcttcatagcatcttttcttagatgcacgaagctcttcaacatttttctccaaatgatttgcccattgttcactgatttctcgttttgtttcttcaagggtgcgctcctctttagctctggctagttgttttcgaagatcttcaatttcacgctt

SEQ ID NO: 32839 - DNA, 276 bp, Zea mays
tgctacatgcacatcccttcatctttttctccatagcaacaacattactggaacactactccacttaaaaagattgagggtagaagtcttgaatcttggggatttgaactccttgaagtacctcataacatgggtgttatggggccttcttctgctattgttatttgagcaggctgaggagagatgaccgacatatggttgattttgggacaaccttcttctcatcttcttttcactattttcttttcacttttcactacccctttctttctcttt

SEQ ID NO: 32840 - DNA, 276 bp, Zea mays
ttaatcgacattcttaattacccccgttttgaaaatcaatgacgaagcatatagctttattgatattacctcattaaaaactttggatgagaaaacctcaacaaggcaaaactcatacaaagaaaagagtgtaatatgatggttcaaaacaggtcaaatatgacggagaattactccccctgatccttgcaagctcttaagtcttctcataccaatcccctcaacacatttttgaaatgtggagtatggtagagattttgtgaataaatcagcaag

SEQ ID NO: 32841 - DNA, 276 bp, Zea mays
tggccaaaatagtttaataaaaactttatacaagcttctcaagtgagggttcaatagggatttttgaaattcagaattctgaatttcagcccttgatccaaagaccgagcgtgttcaccttgatccctagctcaattcctaatgacctcattgacaaaattgtgcctaactaatccctctacctcatatcagaagatggcatcgggacgcgtgccttggacacgtcaaacccgtgatcttctctctgtgcgcggcagtgagacaaacccgatttct

SEQ ID NO: 32842 - DNA, 288 bp, Zea mays
  unsure (1)..(288): unsure at all n locations
ctcaagcncgactcagggaaccacacattaatttttagnnccnnnannccccgcggcatggacaagacatcctccctggatccaagggcatagactaacatatgtcccgttatcaagatgaatacaatcaattcctgacctcgcgcgagtgctagaaaaatcactcgacttctaccgaatcctgattagcaagcagctactcgacctagcatactagtattcatctcaaaaaggaatcctaagttcatgcaactagaggtttcaagcatctcctacacttatgtgcag

SEQ ID NO: 32843 - DNA, 248 bp, Zea mays
gcaacttgaaaattgcaagaacatcaatgcccccactttagtatttgaatctaagtctagctctaatgatgattcttgcaagcattgtgccaaatatcatgcttcttgttgtctaactaaccatgcaaggaagcatagcccacaggtgaaggtcaaagaaattttgaaaagatgctcgagcaatgatgggttaaagaaagttgaacccaagtacaagtcccttaagcccaacaatggtagaagggggg

SEQ ID NO: 32844 - DNA, 273 bp, Zea mays
tggatgaggtgtcatcatcatcatcatccgagttatcatctgagtcccattcaactaagtaggctttgccatctttcttcttgttaaagtatttctttttcttcttgtcactttcatctttgcccttcttcttcttgcttgggcaattcatggcaatgtgaccgggttccccacactcaaaacactttctatcattgaaagcatttcttctagatgtttgacctcttctaggttgacctctcttcatcttcatgaatttattgaatttcctta

SEQ ID NO: 32845 - DNA, 272 bp, Zea mays
ttggaaagtgagcttgctttatatgattggacaaagggtgagtcgcttcaatcactctttgatcggttgatggtgttggtcaacaaaataagagttcttgggagtgaagattggagtgactccaaggtcacaagattgttcatgagagcttataaagaaaaggataagagtcttgcaaggatgataagggatcgagatgactatgaggatatgacgcctcatcaattatttgcaaaaattcaacaacacgagtccgaagaagcccccatcaa

SEQ ID NO: 32846 - DNA, 273 bp, Zea mays
tctaaagggagaacacgttatttgattaactaatgtgcaattcaaaaaagatagaccttgtgcagcttgtcaggcaggtaaacaagtgggaggagcacatcacagcaagaatgtaatgaccacatcaagacccttggagctgctacatatggacctcttcggacccgtcacctatctaagcataggaggaagtaagtatggtctagttattgttgatgacttttcctgcttcacttgggtgttctttttgcaggataagtctgaaacccaagg

SEQ ID NO: 32847 - DNA, 268 bp, Zea mays
  unsure (1)..(268): unsure at all n locations
ttaatgcaatttnctcttccttgtcataaaccaccgaaaaggattcatagaatattacgggtttaaattatgattaatcaagatttgaacacactatcataaaaaggggccttatatggcacaaaggtaatggagaagtgtcatatatgatgtacctctgtgttttaccttttcaaaggggtgttccactttgtgttgtatttacagttcattttgcaatctcttgttggcataattgtgacataggtccatcaaatttgcagtggaa

SEQ ID NO: 32848 - DNA, 272 bp, Zea mays
tatgaagattcttcatctttacatgtgctagtcgacggtgccagagccaacccatgttagtcttagcaattaagcaagtgtcgagttcagctttatcaaaatctaccaagtatagctgaccctctaacactcccttaaatgcttgtcggggaccataattaggggtaccctcaagacgcctaattctcagctggtaacccccatcagcataaagctgcaaaggcctgatgggtacgattaagtcagggatcagtccacacgagtgactcgat

SEQ ID NO: 32849 - DNA, 270 bp, Zea mays
ttacaaaacacttattagtgttgggggccttcttctccgccgaaggtcctctaagcaaaaaaacaccttcggcaggacgatatgcaagcggatacgacatgaagatatatgccgaagttacaattgaaagagcttcggcatgatggcatgtttaagacgaaggatgacactgacttaaagaggaaaagaccacgtagtcactgacaatttgcactatgattatgattagttatcaaggatacaaatgtaattttgtccgggctgcgtctc

SEQ ID NO: 32850 - DNA, 278 bp, Zea mays
tgccaagccctcggacccggccggatttcaccggaggcccgagatcgacctcaccggacttcggtcttcggccgccgcgcgtggaccgagctatccagtgagtctccgcccaattcctttcgctcatatcttctctggcatcccgtggacctccctgacctatttgattgaactatctcaccgtgacaaggccggtctcctcgccgccgacgagcatccccgcctgcgcgcgtggaccgaccgactccggccatctccgacggcgttccgcacaccgt

SEQ ID NO: 32851 - DNA, 288 bp, Zea mays
  unsure (1)..(288): unsure at all n locations
aaaacacaagcctgacaaagaagaaaaggctctccttataanaaaaaacgccacatccgcaagcaaaggagagggaaacactacaaatcccgctccaagaaagatagcgacaagagcggaaagccccgtcaccacattgcaaaatgtccattgtcaagtgacagtgacagggagaacgacaagaagggcaagaggagggaaaacaaaaggaaccaccgaaagaagggcggcgaggcccatgttagccgggaatgggataccaacgaaagctcaagcgactcctccgac

SEQ ID NO: 32852 - DNA, 277 bp, Zea mays
aaaaggaaactattacaacctcaagtttttattaactgaacagaggcccaggtaagaaaacttcctctccctcggttggtttagaatgctatccttaaagggatgcaccatagtatacgttaaattccttgccatataaaaagttcaatagtgcatataactttgacatcaactatatgtgtgcactaatcaaaaggaatttagtctatccttttgggtttcaataatgatgattcatttgccatccacatataaggatcatcatttgggaaaccct

SEQ ID NO: 32853 - DNA, 243 bp, Zea mays
taaaaaaggctggtgcaggggcaccgaagaggcaacaccgcatctcaagcaagcgagcaaccaagcacgacaatgctccggaccaaaatacgtacccaaaaccagaaccgcgcgcgccccaacaccagcaacgaccggacgcaggaaagcaagcaactgcagaacgcgcgcccgaacaacgagcggccgaacgaacaaactgcaagcagaaagccgcccacgggctgggcaagcaaacaacca

SEQ ID NO: 32854 - DNA, 274 bp, Zea mays
tccaataaggacttaccatgcccaacgtgaaatagatttaactctttggggtcatacttagttactgatcttgagttatttctgagactaccaacaacaatctaactatttcatgatttcatctgaatcagagaatgtgctgcatgaagcatatgtgagccaagtaatgctcccaaacatcttatgtaggagaagagagaaatcattaaacatagggaaacatgatttgcaaagtacaattaacaaaagcatgaagcactacacttggattcct

SEQ ID NO: 32855 - DNA, 249 bp, Zea mays
tgtgctctgcctatctgtttttttatgagaccaactcgcggagcgccttgcttatccttaccagctttgtctggtgcagccgctctattctgaaccatgcatactgttccttttacccctgtctcatgataatgccccgggattgaatgactgattgggagcatggctataaaggcccatcaacacgcgaagacatacaggtgtaaaatagctctcgtaaactctcattcttaagcttatgatggcgaa

SEQ ID NO: 32856 - DNA, 273 bp, Zea mays
tcgtgaaatattttccgtttctataaaaaagttttgtgttgcgtttccgatgaggctacacttcatctcaatttgacttgtgccttaacacgatttttctcttttccaaaatatttcccgaagaccaacaccgtatctccttcttgttccacatgcaatatgctgtatgatgcttatgttatgcagaatgatgtgacgatgttatgttatgcaaaatgatatttgtgtcgtagatacatatccctgtaatagagcatacacactttttatccc

SEQ ID NO: 32857 - DNA, 269 bp, Zea mays
cgggagagatgattctctttttctagacttggaatctgtccagattttgtacagatttcgaaactgaccttgtttgtctaagttaaacttcgaatcagttcttataaattttaaagaagtggtagtactttccttaagctttccaacaaattttggatcaccctttttggtgacctataagttaagctatagctgttttaagtggaatctttgaatctatccaaatttggacagcaaagcctttcttatgtctttagatcttgatatgc

SEQ ID NO: 32858 - DNA, 275 bp, Zea mays
  unsure (1)..(275): unsure at all n locations
tgacaaacaccatttgacattttacataaaanttctgagatcaagaatatttagttcattcctcaacatgcaaaatcgggtcttatcaagtggcttagtgaaaatatccgctaattgatcttccgacctcactccttctaaaatgatatctcctttagcaacattatctctaaggaagtgatgacggatatcaatgtgcttggtgcgagagtgttgtacaggattattagcaattttaacagcactctcattatcacacaacaaaggtacctttt

SEQ ID NO: 32859 - DNA, 268 bp, Zea mays
tcacggcctcatattgattctatctgaaggcttggatcgaacggaggaggacgggaaaggggctgcccacggtggttgctctcgggcggctctggcgggtcgcggggaggtcgccgaagctaagggcgggctcgggggagttaggcgtggtacggagcaagcaacggggaaggcagccgagcactaggatgggctttatagccgtggcgcgggcgtggtcacgggcggccgcgggcgcgcgggggttcgcgcacgggcgtgctctgag

SEQ ID NO: 32860 - DNA, 271 bp, Zea mays
tatgaagattcttcatttttacatgcgcttgacggtagtgcaagagccagcccatattagtcttagctattaaacatgcatctagatcggcattttctttagagaaatcaactaaatagagcctgtcgtcttatacacctttaaaagctaatgaaccatcacatcttctaaggacatatacttcaatattttaaataaacaattatagcccatatgacataattgacatacagaaagtaaattgtaaccaagcgattctactaagaacaca

SEQ ID NO: 32861 - DNA, 290 bp, Zea mays
aatactcaagcttcagctccatctatgttatggattgcttttgagtcagtccagtttccttcggcccttttggcagcttcttgacttccatgaatagcgatgggtccttgatccgaaggtatcttcatgcagagataagcaggatgaagaattgcttcgaaagcattgagggtgtcacgaccaataattgcattgtaagggtattccatgtcaacaatgtcaaacacaacttgctcagttctggtgttgttgatgaacccgaaggtcactgacatggtgatcttgcctag

SEQ ID NO: 32862 - DNA, 275 bp, Zea mays
tcatctatctgcctctgaatgtcatttatacgagccatcttctccttctttcgttgcacctgttgttggagaatctccaggatttggatttcctggtccaagtcgtcctccggaggcgttggactggtggccttcctcttctggcttctggcctccctaagagaaaggacgtcctgattggggtccagcggctgcagagaggcaacccctgtcgctgaagctttcttcggcggcatgacgaaggtgatgtttgccgaagatgttcaaaagctcaa

SEQ ID NO: 32863 - DNA, 279 bp, Zea mays
tggtcattttattgctaactgtccttacaatgatagtgaccaggaacacgggagctagagggaaaagaagaagcattacaagaaggccaagggcgaggcacatatcggaaaggagtgggattcggattgctcctcctccgactctgacaatgaaggactcgccgccactgccttcaacaagtcatccctcttccccaacgagcgtcacacatgccttatggcaagggagaagaaggtatgtaatcaaaacaatgtcacttatgattcttccagtgatgt

SEQ ID NO: 32864 - DNA, 308 bp, Zea mays
  unsure (1)..(308): unsure at all n locations
tttagtaaaaccgccactattnaagactcaagctggactatgatgagatggcgctcgtcatcaagagcttccgccaaatcctcaaataaaggagggggaaagactacaagtcccgctccaagaagggttgctacagatgtggtaagcccggtcattttattgctaaatgtcctatatctagtgacagtgaccgacgcgacaacaataaggggagaagaaaggagaagaagaggtactacaagaagaagggcggcgatgcccatgtttgtcgggaatgggattccgacgagagctcaagcgactcctcc

SEQ ID NO: 32865 - DNA, 274 bp, Zea mays
tgcgaagactcttgattttgatatgggctattcggcgaggccaaaaccaaccccttttagtcgcagcaagcaagcgagcgctgagctcagccgggccctcattaaaattgactaaatatagctatccctccaacactcccttaaaggctatcgaaccatcacttcttctaaagacagagaaagggaaatgtgcccttgggccatttctaactattgcggtgattaagagccaacgcaagtgctgaagtgttgatctatgcactgaggaggacaa

SEQ ID NO: 32866 - DNA, 272 bp, Zea mays
tctgcaatgttcatgaattattatatgaaacaaagccttggggcaaagaacagtaccataacaactttggctgctacagcttcgtttctcggtccggggcaagctgtcccgtaccaacctttcggaagagatggcccggggattggatgacagaatggttttatgtgaagaatgacttatcagcacgagaagacatcaaaggtataattatgcgtcctatttggcaaagcttcggccttcggaggccgaaggttgaaatgaacgaagccgcc

SEQ ID NO: 32867 - DNA, 272 bp, Zea mays
tgtccttttcaaatacattatctttcaatcctctaaacatgtctttctttagatttttcttgagtatgctcattccaacatgtgcaagccttctatgccatagccatccaagagatgctttgctaaagagacaagtccttaggttggcatcttcagaagagaaatccactaaatataggttgctatatctaaatcctttgaataacactgaatcatcatccattttagacacaacaacttctgtatgagtgaataagcactgaaggccaaga

SEQ ID NO: 32868 - DNA, 270 bp, Zea mays
tgacaatgaggaaatgattctcgtcatcaagagcttccgccaaatcctcaagcaaaggagggggaaagactacaaaccccgctccaagaaagtgtgctacaaatgtggtaagcccgatcattttattgcaaaatgtcccatatccaatgacagggccaacacaaaaaggggaaagaaagggaaaaaaaaaattctccagaagaaagggcggcaatccccttgtttgccgcaagtgggactccgacaaaagctctaccaattcttcttccg

SEQ ID NO: 32869 - DNA, 271 bp, Zea mays
tattcgttttgctggggattaaaccactccgacagcgaaagatgatgaagtggtagttttcaaaagctttttcagagcaggattacagtttccgctgaatgagataattggagaaattttggataattatgaaatctttattcatcagctgacccctaacgccatcgttaggctcagcattttcatctgggcccttcgaagccaagggatggacccaaatgccgaaggtttttgctgagtgcatgagctacattaccaaacgaaggccaga

SEQ ID NO: 32870 - DNA, 265 bp, Zea mays
tcagctccatctatgttatggattgcttttgagtccgtccagtttccttccgcccttttggcagcttcttgacttcccatgaatagcgatgggtccttgatccgaacgtatcttcatgcacagataatcaggatgaagaattgcttcgaaagcattgagggggtcacgaccaataattgcattgtaagggtattccatgtcaacaatgtcaaacacaacttgcccagttctggggttagtgatgaacccgaaggtcacttacatg

SEQ ID NO: 32871 - DNA, 284 bp, Zea mays
agctcgagcaagatctcacggctctcaccatttaatctatctgagggcttggatcaaacggaggaggacgggaaaggggctggccaccgtggttgctctcgggcggcactggcgggtcgcggggaggtcatcggagctaatggctggttcaggtaagttaggcaaggtaccgaggaggcaacggggaaagcagccgagcaccggggcgggctttatagccatggcgcgggcgtggtcacagacggccgcgggcgcacgggggttcgcgcacgggcgtgctctga

SEQ ID NO: 32872 - DNA, 276 bp, Zea mays
tgatatgaaaaaaatgtttcattgtgtttccttctctgagctgctaaggtggtgtcctcgacaggcatgaacatctctgaagcgacctaatttagttatagcacaagcttgatctgaaaaaaatgttgcattaggtttccttctctcagctgctaaggtggtgtcctctgcaggcatgaacatctctgaagcggccagcactggtgtcatcaagtctatcctctgcacggtaatcactaaccaatttatttgaattgcctgctcccgattgccggt

SEQ ID NO: 32873 - DNA, 277 bp, Zea mays
tcaaaaccaaaagcctatcaaatcgctgtgcacaagagctaaaaattgagtaagcgagagcagttggccagaaagcgtgtcaaatgagtttgcggtatgcccgtatttatacgccaagcgcgctgaaaattcaaagaccccgcttgtcagtgattgttgctattctagcaaagggaaggtgttttttcggaccttcggcgtaaagccttcgttcacgtcgcaatctaaattcgttattttgaacaaattaatattgcgaggggctactgttggggac

SEQ ID NO: 32874 - DNA, 268 bp, Zea mays
tagcaaaagaagtttttttaatcaagaatattgagctcatgcctaagtctggtaaaagattgttcatcaagtggcttggtaaagatatcggctaattgatctttagtattaatgtaagaaatctcgatatcccccttttgttggtgatccctaagaaaatgataccgaatggctatgtgcttagtgcggctatgctcgacgggattgtcggccatcttaattgcactctcattatcacatagcaaagggactttggttaatttgtaac

SEQ ID NO: 32875 - DNA, 274 bp, Zea mays
tcaactgtggatacaacgccatcatcggtaggccagggttggcaaaattcatggccattctgcactattcgtacatgatattgaagatgtcgggaccacaaggaatcatcaccgtgcatgctaactttcaaggcgtcgtggaatgtttccgagtggccatttaggcggccctcaccaccaaaccaccgacgacttcctccgcgcaggcgaactcaaagcctgaggaggacctcgcgatacctgcgaatgaagctcaagctgtgacctctatgcg

SEQ ID NO: 32876 - DNA, 274 bp, Zea mays
ttaagggattggaatcttgatcataagcatttcagcttgacatctggcagtgaaattagaaacgacgagggaacctcaaagctgatggacttgctcatccaaaggaaatgccttcctataagaggtgagctatacaatatcgattgtgtgaatgatgtacttaacaacattgtctcgaaagggcaacaagtgctttgtcatgttggtaacatactagagacatttattcgggcacatatgtcctcatctctgactcgacagcaacttctagaag

SEQ ID NO: 32877 - DNA, 273 bp, Zea mays
tcgaaatactacaacttcattttcctcaggagttgggcaagtcttctctccttcgtcggcccttaccatagacaaatcccggaaatatcttcccctcatgttggcaagatgactttctttaatacttgatttgccgaaaaccgcatggcttggtcgccagggtcgatcttcggagtcttcgccaccactatccgcatcatagctgtcgctatcaccagtatccttagataaaccttccaaaatttctttagtgatcttctctgtgttggtctt

SEQ ID NO: 32878 - DNA, 270 bp, Zea mays
ttctatcctggagggaggctgtgttggcgggacttcctcttttcggttagtctggcatccttggctcttagtccgtttctggatcttcttagtgggggcgagcttctttaacttcttagcgtagtccatcttcagagttcagtaggcctcacgagtgttggcctcttcgccttctgctatttcgagactttcttggagagacgccttttcttcttttaatcccttgatttgttgctctaggctttctgaaagggaaatgtgcccttgggc

SEQ ID NO: 32879 - DNA, 294 bp, Zea mays
gaagtaggcgacgcttttcactacatatggctgtctattgcctgtctgttttatgtgcacgattgacggcgctttatcagccagctcatgaaccagtttcattgctgacatacctacagaggagacgatcgaaagcggggcgctggctgatgacccaggcggacgttctagatatattttgcttacacatgcctgtttaacgttatgcaggcctcacactcctatggcaccgctcctgttatccatcttatggactataatacctttgtggacagactatccggtgactactat

SEQ ID NO: 32880 - DNA, 270 bp, Zea mays
tgcgaacaatacaaattcttaagggagaaagcagcttcagcagatcagccgaagcccatgctcttatgcgaggatgtagcagaacagaaggtgctgttgggctctcagttatccgaagcacaagagaaaaccttgctaaggttcttgttcaacaacaaagatgtttttgcatggtcagccaatgatctctgcggagttaatagggacgttattgagcattcgctcaatgtcgatccatccttcagacccagaaagcaaaggcttcggaaa

SEQ ID NO: 32881 - DNA, 257 bp, Zea mays
tctaaagggagaactcgttatagggttgactaacgcacaattcgaaaaagatagaccttgtgcagcttgtcaagcaggtaaacaagtgggaggagcacatcacagcaagaatgtgatgactacttcaagacccctggagctgctgcatatggacctcttcggacccgtcgcctatctgagcataggagggagtaagtctggccttaccatccgcatattcccctgacttcacgcttcacgcctagatagtaggaaat

SEQ ID NO: 32882 - DNA, 126 bp, Zea mays
gctatcacttggggtctatggacaagtgactcactcttaggaccatgacactgataccacggtctttttcttatctttccgttgcaggatctcacaactgagctctcgcttaccttaaattacaaa

SEQ ID NO: 32883 - DNA, 83 bp, Zea mays
ccctgtcaatagacttgccccattttatactggaaacccgctcccctggatgtcaggcacctgtggcaaaagtgatcctcaat

SEQ ID NO: 32884 - DNA, 145 bp, Zea mays
gctcacattttttcaaagtcaaaaacacgtccttgtcgtccttgtgtagcatttcaagaggaagttgttcaagattgccatcttctgatactacctttttacctattctgagctctaacttccttatacgaaggtatttgactct

SEQ ID NO: 32885 - DNA, 216 bp, Zea mays
tccagaggtttaatttttccatgccggggaagaaaaatagagggtatcaacactttattcctcgtcaccctcttttacctaccaaatataatcctcccctctttaatatatcttccctagaacgcactgcggaatcccggagatggattccccctccaattgatgggatgaccgtatctggagttaggtaggcatacctatcaccacttctcttta

SEQ ID NO: 32886 - DNA, 160 bp, Zea mays
tgagacgttatcacacatacatacattacatgatgtattatttacatcaaatattataacttcttcgaatatattgcaattatgaaacacatttggcatgtgatgctgaaggagaaaaaaaaccgaaataggaaattattgtcacgactttggacaatta

SEQ ID NO: 32887 - DNA, 202 bp, Zea mays
  unsure (1)..(202): unsure at all n locations
caaaaaaaattttgactgcccaaatatatcatgctccacaccaccatgactgagcatgtcaagtgctntcaatgaatcgctttatgaacaaacttacctggaagaaccccaccgagtatgattaactttagcgtaatcctcgattgagcgaagcgtttttctatcacctgtgtagttttgctcacacggactggacttcatc

SEQ ID NO: 32888 - DNA, 348 bp, Zea mays
ctgactttagaactatctaatctaccaagactgcaatacctcaaataaagactctgtccagaaccgcgaaagcttgctgttttatatacctcttccactccaaccaaacaaacaacttgattatgacgtcttgtactgacagtgccactatctgcccacttattccatagatctatcttcaactataagcaatgacttactgacactagagggatggacgaaaaacacatactgttaagttagaacaatctatacgaacctctgtgctcagttgatgactccggtagactagaactctatgcagcggttctggcgctcctgcctgagtgtactaacaaaatacgtttt

SEQ ID NO: 32889 - DNA, 153 bp, Zea mays
gtagttggaatgattgtggggctgttgttgttatggacgtgacatcttgtgacacaataaattgttatcatgtgacatatatacagctggtgatgctacttatggttctatcatataacacttactgggcactttgtgttgtaatgttatcta

SEQ ID NO: 32890 - DNA, 253 bp, Zea mays
gaaattaaattatatgtggcattaaataattctaatacatcaaattgactgcaaattaataactacacctatggatttgaattgaaattgataactgccaacattgtactactatcatcttgccttcaatctactacttgtttcaaagatgactctgaataacatttctgcgataaactattcttatttaataaacgtctcacaaaagacgaaaattcgtgctttaatggacctatactctcttgtatttaca

SEQ ID NO: 32891 - DNA, 127 bp, Zea mays
taatcatccgacaataataagaaatatttgatagtaaactttgtacgataacaatatccatctttactttaaagtggtctcctgacaattatcatagctgatcattctgattgttctaccgtcttat

SEQ ID NO: 32892 - DNA, 102 bp, Zea mays
gaggagaaaaaaaaaaaaaaaatgacgatcgtcctcaaaccaagagggaaacgccagcgacaaacgactgccttgagcctacagggggcaggagcaaaaccc

SEQ ID NO: 32893 - DNA, 221 bp, Zea mays
agtccatgacggagtcggtatggtatttctctactcactctggcttatgcatgatgtagctaagccactattgaccactcacttgtactcgtactccgtcttacagcgattgcgcttgcccaccgcaatgacaacgcacaaatgcgtccccaaagtgggctattcaccgccacgcctctgcgtgcccgcatacatgattataatatttggatattgaacaa

SEQ ID NO: 32894 - DNA, 332 bp, Zea mays
ttcgaccatactgcgacagtttatttttttttagaacacggtcatgctacacttcacaagactcaaacatttgtgttttaaccccacgtatgttgtctctcaattctcaagatacaactttgaagtcagcattcctggtattaccaatgcctaaagcacaggactattgcaatgcgatcacctctcaactatgagtacttatcgctctatttagcgaatgttttattacttagtatagttaacaacaaagttggcatgcataatcctattgctacttgcaaggacattgactaggcccttcattagtataggaagctattcatcatcattta

SEQ ID NO: 32895 - DNA, 71 bp, Zea mays
tgccatgcacctggaatgggcgattactgcgactagaaatgctggcggagggatcggcaaaagtgcccgga

SEQ ID NO: 32896 - DNA, 195 bp, Zea mays
ttataaacaatcacaaaaaactaatgacatctcttatcctcctcacatgaagtatcactatttagcttttgcacctatattcatcaaaactttcttctaatacacatgacctgtgctctcttgagaacacttagtgtttttgtgtcactacaccattaatgtggcacttccacattctgtctcccttttttacac

SEQ ID NO: 32897 - DNA, 205 bp, Zea mays
atcatcatgaacaccgtcgaactggcagtgtccataacacactgtatatgtcatgaagtagctacacattctcaataatgacataacggaacctattccatactgggagaagtgcttcgactctgaagcaatctgatgagataccgactaactatttgaaacatacgctctctactgatcaataactaatcaggcagggactgtc

SEQ ID NO: 32898 - DNA, 82 bp, Zea mays
ttagtctacctgtttaggaacatttttcaaccacagtgatcaaatgtgtagattctggcatacttgctgcggagctctttga

SEQ ID NO: 32899 - DNA, 326 bp, Zea mays
actcctattgctcattaattgcatattatctacatcttaggattggaccattaggtgtgacaagtgtattcttcttattcatactaccttatacatgtaattggattaaagatatttcatttcacctatacattactttgacttcaatgattgatgattcttaagagcactactatcttgaggacaatcttattgctactttataatatattgctctaccactagtagaaggaatgcaggtggaaaatccgatgccacttatttcttatgaaaccctggacagcaacaccacatttctctctttggacctgtcactttaatttctt

SEQ ID NO: 32900 - DNA, 261 bp, Zea mays
cgacttgcgatggcgcgataccccgactagacgggtgcggagggatcggcaaaagtccccggtgtttagccggcgcacgcagctggcccgtactacgaccggacccccgtgcacttctcactgtaaattgctgctgcactggcggcgtatcactgtctgatgcaactttcctacacttggggaagatcagtgaatgcgaatggtctgcacgacattgtgagtctcatccttgaaaggttacagaggctgtatgagaacatg

SEQ ID NO: 32901 - DNA, 358 bp, Zea mays
  unsure (1)..(358): unsure at all n locations
gcactgagctgagctgggcctatacctgcanaaggagaacctaattctttaccctactctaaacctggtgagggggagagatagcaatggtaacatactaccttgctaagtagtgccataatccaatatgaaggacatgctaagaccctagaaccaatcttcttgtgaaagactaactttatttttagaaattcactattaaatcacggtactgaatgacaacactaatttccaatgggtccctagaccctgaaagtgagaccttcatatgctgatcttgtcccggagggcaccatggccttttactagtttctgacttcaaaactagcagaagtgctattcaatactgacaagttat

SEQ ID NO: 32902 - DNA, 197 bp, Zea mays
tagctagcaataagcaagatcgagtcactctttaaataactagatactgcctctatctcctaatgtctgatatactttctaagaagaacccttaccgaaaagacatgtacctttgctatgaaactgagcagtgtattagatctcagaaacatggatgatgcagggttacatttaccagcttgccacctgttcatcca

SEQ ID NO: 32903 - DNA, 218 bp, Zea mays
gcaccaccacatcaacgatatacatgacccccatcgcatgtgtcacacgcagcatgcgctgacatattcatcggagggtactctaactggggaaaatctggacacgcggctatgtacaactgcataactgactactctgcttttctggctcttcgcccctatcacgcaagcatgtgcggctgtcactacttcacgagtaaattcggtgtcatgcttag

SEQ ID NO: 32904 - DNA, 220 bp, Zea mays
aaaaaaaagaatgactgactgaacacaaacagaaagaggggagaacaacaatcgattttgcacaaaccggccaagaaaacgacattaaacaaaaagacccaagcgcgacatgccagcagtccaaccggggccacccagggaaagaaacgccagaggacggtgcaaccgccatcccacggcacgaaaaaaaccgaagcgcaaacaggggccaggccaaaca

SEQ ID NO: 32905 - DNA, 157 bp, Zea mays
ctgaatggataaacaatacgacatgtgtgcccggacggtatatggttcactcggaaccatactttgaaaaaccatactttgctcgctgattcgtcagctactctatataacactcaaagaatgcctgtgaaccgaaaatggtatcttcatctctttc

SEQ ID NO: 32906 - DNA, 286 bp, Zea mays
ttcccaagccaaaaggatgtgcaattatgctcgaaaataacataacaatgtttacataaagtcaaatacaatttacattaaattcacaggattaatctttagcacatttgagtcgtaaatggtaaacctgcataggtgacattttattatctccttggggggccggtgcacactcgaggaaaatcgttttttacaacgaacggtgataatactgaaacaataactttgctggtaatttcgagtctattacttgacttatctatattgcagtgccgttcaattgaat

SEQ ID NO: 32907 - DNA, 216 bp, Zea mays
ctttattccctttggcttatgcaccataagcacttaatgcctactccaaggacaaattgaatggacaataaacatgtttaagatggtttgatttccatgtattgaacaattttctataaacctgttgaacaacttaaattacacaaatccttacatctcccaaagatgatagttacacctctacaattgatcaagctactgtgctattcctgtaac

SEQ ID NO: 32908 - DNA, 255 bp, Zea mays
  unsure (1)..(255): unsure at all n locations
attgtgccgacgtgttggctacttggaacatctttacgaacgtacctctcggtgctaaacactagcttatatatccgcgaagaccctgtgtcccggttgctatgtgcgctaagggggatnggcaactgatacaatataccactcagccggtacgtatataaaacagtccagaaggaaacatcacaagaatggcccgttgtacagtattgaacttcctgggccagagtttactctttacaccgtatgtttttatct

SEQ ID NO: 32909 - DNA, 333 bp, Zea mays
ctttgctggcacctatgcgccgaaaaatttttgttttttaaagcaaaaagcaaaattttattaaagccgcctcaaattcaactcgaagccttttctaagaaatttactagctacataaggtttgtcggtaggactccccgactgtctttggcgactgtactgctcatactccaaatgtgtgctaggtccttaatgaaatgttgtctacaactaagcgggcgacaatactccgctcttcatcgcaagacgcccaaaattatctcaatctgaccttaaagtctgaacaacttaaattcacttactgatgacgtattgtaaaccctactctcataa

SEQ ID NO: 32910 - DNA, 57 bp, Zea mays
gagaccagaaacacaaacagacaggacccaccaagcaaccggcggcacacaaggaaa

SEQ ID NO: 32911 - DNA, 302 bp, Zea mays
ctgatagattgaaatcgacggaccttatcccatcacattagagacggactccatttatactcgcatgtagccatgccctgttcagacataaggtgaaaagtggccatgcaattgatccaatacattcatctgtatctccactcttgacttaatgatggtgagcactcagggaaacaaacacatataatacttatctcacaacctatcagaagtaatcaccggcatgcacacgtaagtattactgttacaactagactagaggtgtgtatggtgacgttaccttctattcttacatttataca

SEQ ID NO: 32912 - DNA, 91 bp, Zea mays
tatgcctaaaattttatttttttccactctcagtacgacatctccatattcttacacaactcagttgaacaccttataataaaaattttct

SEQ ID NO: 32913 - DNA, 389 bp, Zea mays
cctgctttacgctctgctcttttatcttcctctgcggacctcagtgcccactgtctgcctattacctacaaaatattgtctcttcgcttacgaaagggtgtggagatatatgtcaagtctcatcagcttcaagaataactatcaatggctcaacaatcagtatggacaactcctgaatacctaaatctcaacaaatggaataacagtctgataacaaggggacttggcttatgatgtaagtctgctcaatacttacggttaatctcatcttcacacaatcgtttacaatagcccactgtgcgtaaccattttctcaaacgatctccccataccaacaccctcgacacgctgatacggcgaccacatcaggtctcgcgtgacgtacgttg

SEQ ID NO: 32914 - DNA, 192 bp, Zea mays
attgcatttgggggaggagttatcacaattctctgtttgtcttatgtcaaggagaataaagccagcactatcaccacctgatttaaattacttgctatcttgacaaccttgtgagacctatgaaattcttttggaaccctaggaagggttgtttacaacagcttaaatgtgttactaatgtagaatggctgt

SEQ ID NO: 32915 - DNA, 232 bp, Zea mays
gatcacctcgatatctgtctctctgctcattctatgagccgaggccctgtccacatatcttcaaatctgtaatctgtttgagcctcgtaccgagcccacattatctgtctctcattatcacatgtttataagttacttcgaaagatggtttattatgattcttggtgacactcatccctggcgatgccgatttcactaggctaccccctaagttaccctaaggatacgcatc

SEQ ID NO: 32916 - DNA, 333 bp, Zea mays
tttcgctcacttttgtcagtaatgacacgcttctaccatgaggctttgttaaaaactaaagaaggcccttgcagttctataatgtctttttcctggaatttataaactcaaaacttatctcgacgtcaaacttacttatttgctgtgttatcctgctaatctgcatattagatgctctatcatgctacttaaccaaatactgactgatgatttcatatcactttgtactgttattagtgcagacactgtctgcagccaatctaatcgcactcgtttgtgtttctaccggcaaatattgagcgatgtggttccatatgatctatccacttcact

SEQ ID NO: 32917 - DNA, 341 bp, Zea mays
  unsure (1)..(341): unsure at all n locations
actgaatgcttcatctgacaggttttgtttttcatccaactgcgcggccaggtcacgattatgaaagctcgtcaacatatgatacggtgctaacactgctataacatctatcactgtcaagcngtaccagaactagtttaatcaggcccctgaagactctgaaccaacttaaaattcagtttactctgaagaaagcctggaaagatacctcccgctgccaaagaaaataactctctctgctactatcgaaattttggaggaaccggtccatatactattactctttagcctagtctgaataatttggcctgactggcacacctggaacagaatacaaatac

SEQ ID NO: 32918 - DNA, 251 bp, Zea mays
gacgttacctgttgaaaatgtcagtttatgttttttacaactactgaagaacctttgagaaaaagcgcgtcttatgtaattatgataatggcaagacaacaccagaaaatactaagaatactgaggtatctgaatacgtacacatacttgagggagtgggtaaatctaaacgtctgggcacctctgctcgaatcacttacaatcatttaactgaagaagcttcgactgtatggaggtacggaacactcctc

SEQ ID NO: 32919 - DNA, 337 bp, Zea mays
  unsure (1)..(337): unsure at all n locations
tttgtagggcaacaactgaactttaatttttgttcacactggcgccgggactatcgaaattgctcgatgcactggactgtcgatatgtcccacagatgattaccgaaatcagttatagtgagcccctcaaaaagcagtctatctaccttacagtctataatagaanagctcatctcatgtcaaggacatcatgcttactagacctgtgctgaattgcccgctgtaacgcacactgcacacgtaacgtgtgcttctcacacgaccggttacacgcagagcccttatcattcgtctctacagttgacattaaattctagtaacattccgctgactgtca

SEQ ID NO: 32920 - DNA, 184 bp, Zea mays
gaatctgggattccagaaaagtgcggtgcatcatcttctataactttgcaacaaacttaacctatatattttataccaaatatcgttgaatatcaacggtgctctgatagcagatttgtgaattcatctctcaaagttgaagtgaattgactgataacttccctaccctcaaccgatctcagac

SEQ ID NO: 32921 - DNA, 332 bp, Zea mays
  unsure (1)..(332): unsure at all n locations
ctgatgtggtgtttcaattgccacatggcctatcttaagtgttccgtaatgaaaatgcttctgagaccccatgcccctttgttatgttcccatgatggtatgactgatgttacatgcctcgctgatnttgtattggtctctcatcttattattgagacgctttcatcataaattacttggtggtacatatacattcttgctgtcatgaatgtggtgtgtttttgcaaactcagtgactgattgatgatctattgacatctactgcggttgtctttcactgtgatcaactcattatttttttgaacggcatttcatatggtacatcatcttgt

SEQ ID NO: 32922 - DNA, 201 bp, Zea mays
cgctatacaccttaagctaggaactacttcttaagaaaccattatattgaacaacagttatcctattgcaatgatacaatagaatattctaggcctctaaaccataaataaggtataaatgcattactaccttactgctgtccatacgaatatgactggatcttctgcgagaggacactctctccccatgtgtctcgttat

SEQ ID NO: 32923 - DNA, 233 bp, Zea mays
  unsure (1)..(233): unsure at all n locations
ttgaaagcgcatccagcaatttttgttgtnctacagggtaactccacttaggactatgtacagtttaaaatactgcctgacgaaaggagtttcccaatttcctaacctacgtcttgactaccgcttatgaagaatggttgttactcctatggtttagtatacagactagtctgataaattcagaaaagcccgcataacttggactggagacatctctcctagggaagaagctt

SEQ ID NO: 32924 - DNA, 266 bp, Zea mays
aaacaaagagcgcctattttggttgtggcaaacaaggtcctactgttggggtaccttgctcggacaccaaacttggataaactaaattgaagatctttattgtctgaatattactaagggtaaaatacatgatagtgagctaaccaagagctttttattctaccccaaaatctatgaattgcgatttgttatgtaaaaaaaatttttctatttaaatggggttggcgaacactagacactttgggtgggatttaataattttgaca

SEQ ID NO: 32925 - DNA, 149 bp, Zea mays
ataattgaatggagcccgcttttttttttatcaggaacctgaggattgacaatgtgtcctcttgcaaaagcacatcaattgtgttaattcagggcaggtgactggtaacaaatggatacagcattacttatagaatgaaaaaaaacctg

SEQ ID NO: 32926 - DNA, 74 bp, Zea mays
aaaattacttaatcatgttctcacaacctaatggttggccccccctctctcactcatggaagaactgtatatat

SEQ ID NO: 32927 - DNA, 370 bp, Zea mays
  unsure (1)..(370): unsure at all n locations
tatctttcacaatgacttgtacaagaggaatgtcaaataataacgtccgtgggtataaacccctcccctcgctttagaaatttgtgtcggatactttccttcttgtctacaagctgtctggcagtcacgacaaggtatctgacnctcttgtgtgtgtctctaggtgttgtggtgcgctaagcatngtngtgtatgacaagtcacacattaaactcactggtgactgatagtgatgtatataccgggctcgcgtctgcattgtggaccttacttgacgctgagatgtcttgtgtctgatagtgtcttgctatgcaacgtgctttatatctcactattaacaacgaactgagtgtgtgggttgtacgctgat

SEQ ID NO: 32928 - DNA, 167 bp, Zea mays
tgttgtctacaataacaaggggagtacttataattacagatctgacttacatccttaagtatgatatacttttctaagacaggaccctacatcagtaatgacagtgagccattgactattgtaacggaagcatatgtatctaagaattcaaaaaacatggaatggat

SEQ ID NO: 32929 - DNA, 282 bp, Zea mays
atcaggcagagctaactagttcccacttctgtactcttttcaagctcctcatctaacaattctctctccacatgaatctgcctgattgtgcgcaatgctccagagtaaaccatcatttgtatgataaaatgggattggtctcctgataacgctacattttcataattcataagataaactcgtctgttgttggtccgaataactgcccttcttggacgttaacaagatgaagtcttgtgacaaagttatttaggagcgcttcttaatgcttcaaacagtgcc

SEQ ID NO: 32930 - DNA, 454 bp, Zea mays
  unsure (1)..(454): unsure at all n locations
agcttcttnctcccctccggccgccaacgcattattgtcaaattgagagccaccgctctcggagtctataaattgagcccccctcggcttcgctatgtattttactagctatcgcacctgctcccacacccgattgtccaccagctcgcctgaattttgcacttcccccaaatcggttctccgccgccgtagaagtgaactcaccgtcgccagcccaactccggtcagtgcccgcccttttcttcctcgtttgagcattctcatgcctctgtgatgctccccgacccctttaattgaactagactggcgcccatcgccgggaacacgatcatgttgccgttgtgcttacggccaccgtggccggagctccctagtccaccgatagtgtaatttagttggggaaaacgttcataggaactcgaatttgggctcagccgaagaatagcaccagtct

SEQ ID NO: 32931 - DNA, 441 bp, Zea mays
  unsure (1)..(441): unsure at all n locations
tatggcaacaccggtgagatggtttgggcatgtccaccgtatacctcagaggcaccggtgcatagagcggtataagacgggacaataatgtgaagaaaggtagaggtcgacaaaacttgacatgggaggagacaatcaaaagggacttgaaggaatgtaatatctcaatggagttgtgtttggatagaagtgcttggaaagaagctatccacgtggctgaaccgtgattaggcccttttcctttagtgctctccaaactnnttccctccctttttctctctttctccttttggggacatcttgttgggtttcaactctagcctactacaacttgcttgggactaaaaggctatgttgatgtatgtatgtgtatgtatgtactgtttcatgctagcttgtgactagctactggcagacctactggccagtgggaaattgaaa

SEQ ID NO: 32932 - DNA, 343 bp, Zea mays
gttgagcaaccgctcggttttgaagacagtgagtaccctaaccatgtctataagctctctaacgcgctttatgggctcaagcaagccccaagagctaggtatgaatgccttatagatttccttattgctaacggctaaaaagtcggcaaggccgatcctactttatttactaaaactcttgaacatgatctgtttagatgtcaaatttatgttgatgatatcatatttgggcctactaacgaatctacatgtgaagaatttaggacgatcatgacacaaaaattccatatgtcgatgatggtggagtcgaactatttcctaagattccaagtaaagcgactcc

SEQ ID NO: 32933 - DNA, 390 bp, Zea mays
cctacatcgagactgtccttgggcgactcatactgagacactacaccgacactcctttctcgtgcaagccaaccgtccggtctgagctttatcatctaacccaaagtttggcacctggcagaggtacatcttttccgatgtcgaacccatcacgaccatgatggatccaccatcaagttgtattttgaaaacatcccatcccgctcgaagcatcatcttttgtcaaaacaaaatcattttgtttttctagagcaaggctaagcataagaaaacctttttgtaaaacaggcgatcaaggaaaggtaatcaaattctcaacgaacgaaatgcagcaatttgtttagcacacaactcctatcacctaatgcatcaagcaagtgaggaagattt

SEQ ID NO: 32934 - DNA, 377 bp, Zea mays
acagaacttgacaattctgtggccgagaacgaatcgaacactaaacacgcggacacaaacctggccgaatctcaacttccgatcacagatcacgctgcatgcatttgggattaggataaagagcttgataaatcacattcagaattaacggaagctaaaaattcgtatgagcatgaggccagaagcttgaagaataagatcgaagccaaagcagagagagttctaaattatctgaagctttaatgtcgcttcgagagacatgctcaagctttgtggcattccaaccgctcgcgcgaaattctcaactcagttgggcaggattaggggaaaagaattactccaccgaagacattccataggccctcgattccatggag

SEQ ID NO: 32935 - DNA, 361 bp, Zea mays
gagtatgccgacgatgggcacgaggtcgagagtccactgtccactgcaccggggcgccgtggccccggaatccaagccgcagatgggaatggggaatcccgcaagaaattctcgccaattcacaacggccagccaccctgcctgtctgtaccggccgaatgacgctgcgcccacgtgacccacacgacaggtagctgcagtccatgtccatcccatcttgtcccacgtccaaggtccaacccgccaggcgccagtttcatgttcaagcctagagatggcaacgggtacaaacccgctgggttttgcgtcccatacccgcacccgagaaaaatatctatgcccattaaacaacctgtaccca

SEQ ID NO: 32936 - DNA, 400 bp, Zea mays
  unsure (1)..(400): unsure at all n locations
tccaatctctccaagttccacaattgagacaagtgattcttatttattagngacttgagagagagagcgcgatctatgtgttatttgtcgctcttgttgcttggcttttgcaatcatgctttcttcttccccattcctgttcttcaaacacttgtaatcaaagcaagagacaccaagttgtggtggtccttgtgaggggtctaagtgacccatttgattaaggagaaagctcactctgtctacgtgaccgtttgagagagggaaagggttgaaagagacccggactttgtgaccacctcaacggggactacgtttgcaagaaccgaacctcggtaaaacaaatcaccatgtcactcgattcatttcttggttgatatagtttcgccctctcttttggact

SEQ ID NO: 32937 - DNA, 264 bp, Zea mays
gtaagtggttggaagtgtaaaaacttggatgacttgaatgtggggtgtgtggaggttattataacccccaccaccaaactagctgtttggtgggggctgtctgtcgcatggtgcaccatacagctcggtgcacaccggacagtgtccggtgcgccagccacgacaccaggccattgggtttcgaccgttgaactctgactgctgggcccgcctggatgtcccgtggcacacactgacatgcactgtaaagtgttctgtgcgcca

SEQ ID NO: 32938 - DNA, 433 bp, Zea mays
ttccctgtctgcgggtgcacgcggacagttctttgtctcactggacactgcacagtgcgggcggttatcatatatttatttggtcacttttcgtttcacgtgggcaccacattgtctggtgcgccatctgaccgttggttgcgggtgacgtggcacatagttgttgtctgtcttcacacctaaatgtcacatgctcagcgcatactgtccggtgagtttaagccgagcaagcctggccgagcccgagagtggccagtacagtcggacggtcaccggacggtccgatgggtggcaccggaccgttcggtgctgcctagtccagcccaactcgttctctttttcttccaactttcttttgcttctttttggatcgacttcatacggtccctagcacttagacaagcatgactaacatttataacaattgactaag

SEQ ID NO: 32939 - DNA, 272 bp, Zea mays
  unsure (1)..(272): unsure at all n locations
cttcgccgacggccaacacaatcctgacctgaagacctctccgactagtgttctggatgctgcatgtacttcacactgccctgcatggactanctccagatagtgcttcccggcggacgggagaacgcacttcatgaggacgcctgacgcgcccctactgtataatacctccccaatgagtgtatagagagccgattgtctggcaatgcgctctgccgagttctcgccatccgcggcgtcctcattctttatataccgaataaccggccgcc

SEQ ID NO: 32940 - DNA, 433 bp, Zea mays
  unsure (1)..(433): unsure at all n locations
aaactgaagatgtgctcttttttgtgctttggcgaacaaatctgccaatggagagtctgatggcacatattgaagctcaatantcttttgctgacaatgggatcgagtaaaggatgcatcaacacctatgtgtgtagtaagttcatgcttcactggatcatgagcaatctgtatagcgctcaagttatcacataacaaatgtgcataagtgtcacaagagacaccaagatcagccaagagccagcgcaaccaaataatttcagcagtggtatgtagcaagtgcccgaagttcggcttcagcactagaacgagatatggccgcttgcttcttggattctcatgcaatgggagatgacccaacgagaatacagtatcctgtagtagaacaacggtcaacatgatcacttgccctagtggcatctgaatacgcatg

SEQ ID NO: 32941 - DNA, 342 bp, Zea mays
agcttgaccacatggccgagacaagtggcttatttctcttggccctcaacgaacaggaccctggctctcatcctccgacgtttgataacagagagtgccctaaccctgtttattatccctataacgcgctatatcggctctaacgatcctgaacagcgacgaatgagtgcctgaaaggacttctcatgacttatggagacataaccgggatggccgagcacactctctctaccaagacacttgcttaagacccgtttggctgccgcatatgtgactgtgatattacattggcgactgcgcacgaaactacatgtgaaggattctctacgatcgagacaccaa

SEQ ID NO: 32942 - DNA, 370 bp, Zea mays
acctataaaactcagcttgtcttgcctcttgtctacccgggtacggcagtttttgttctcgccatgcgagatggtcacagacgtcataagatgctcctcgcgacaaataggagagtcgcctgattcgatacatcaagcgttttgagctctctacacaacagagcgcagggcgaccgcgttcacccctttccatcttctatattgatcggaagcctttaccctccaagaaatgaagactgggtccctgcgaacatctagttagattgaccctacgtgggctaacccactgtccaggatcttatcgacggttactgagttttggctctacaggctctgaagtcttaccgcccctacacgagagcctggttct

SEQ ID NO: 32943 - DNA, 397 bp, Zea mays
gttatggatgttcaaagtctgaagactgaatctgttcagttctggacaacacagccttcatagtgtattttacccttgatacatgataaaccagccagcgatgtttacaaataatttgtagaacatttaattagcttttcagaaagactaagatcactttgtttggatgtctgaatcttcagttatgaatatttaaagtcacaagtctaaatctgtccaaatctggacagcgttgttgtgttaacaccttttgaccttgctaagtgtggaatcctgttgtgataaatataccacaattgtagagcactttctcagctctccagaaagatctagtttgctagttttggattaatatctgaagaggtatgattaaaacaagcaactgctgtattgctgt

SEQ ID NO: 32944 - DNA, 453 bp, Zea mays
  unsure (1)..(453): unsure at all n locations
tctcggnntataactaagcagaatatagattagccgtctcttctcactgctgcacttcaacatatagtgtgatgtgggcctcttattatacttgctctaaatattaattatgggggcaaacaggtaactgcgatcgcgggaaacagttgtggcaacgagaggcgtaggttaaccgcaccacgagaaagctgcattgtgttgtgtacctcccgcccacaaggcactgaccatgatatatattacatatatttattttctttaatatactggcaatggggtacgaacagctaagtctgacagttggcgccaacagacatacatacacagctaacatatgcacagtgctgtggcatatgtaaagtgcctgtagtagtactagctagaagcatcgggacgtgcgcgtgcatggatatgtattttgtctccttgtgttcgtgccatgttgctacagcg

SEQ ID NO: 32945 - DNA, 432 bp, Zea mays
catttacaagagagactatcgtttgtctggaccagaactggtggaacttaggaggcatattgatgagatgttccacaagggttacatcaggccaagcacctctccttgggccgctccagcgttgtttgtagagaagaaagatggaacccaaaggatgtgcatagactatagagccctgaatgaagtcactgtcaagaacaagtaccccctgcccaggatagaagatttgtttgaccaactcagaggtgccaccgtattctcgaagatagatttgagatcaggttaccatcaactcagaatccggccctcggacataccgaagacaacattcatcaccaagtatgggttatatgagttcacagttatgtcctttggtttgacaaatgcgccagccttttttatgtaccagatgaacaatgtgttcatggatta

SEQ ID NO: 32946 - DNA, 460 bp, Zea mays
  unsure (1)..(460): unsure at all n locations
agcttattacagccaaagaaaaagatgctattgtttctacctaagcggaaactggaacaggtccttcggcacccggtgggggaaatgcccagaagaagcgccatatgatgactgtgatgagggtcgttcttgatacccccaccagcaattcaaaagaggagtgccccctctgctgctaacgaagctgttgaagcgcctcaacaagctaaaagtagtggcggtcctctcgggacaactttatcggagattgacagaattattgttggtgtggagcctatgaggaataccgaaggggcgattgtacctgaatcttcgacatcaaaagggaagaagcctgaagaagcctctttggaaaacaaaagcttcaacttatggcacctaggaggccagcagctttccaaagaggacatatcanagttaaaagaanttgctgtatcttgcggttaccagcctggatctg

SEQ ID NO: 32947 - DNA, 455 bp, Zea mays
  unsure (1)..(455): unsure at all n locations
tatgaagattctttattccaacatgtgctagacggcggtgtcttagccaacgcatattagtcttagcgattaaacatgcatctagaatgacattctctttactgaaatgaactaaataaagattgccatctaatacacctttaaaagctaatgaaccatcacttcttctaaagacagatacatcaatatttgtaaacaaacaattatatcccatatgacataattgacttacagaaagtaaattgtaaccaagcgattctactaagaacacattagaaattgaatgctcggtagtgaacactaccggaaacgcgttctttgccgagtgtctaagacactcggcaaagcctttgccgagtgtaacactcggcaaagaacactcggtnaattttttatcggcaaagggttctttgtcgagtactttnttcggacactcggcaaagactntaccgagt

SEQ ID NO: 32948 - DNA, 432 bp, Zea mays
ctaagcttggtcagaaggtatacaccgggcaatcggttgggtttttgttcaagaccaatctcttgattcttcccatccgccccacagaatagaaagtctgcgcagctgccttccgattgtgttcctcgtcgcagcagccgtctggcaagcaagggctttaaatccagcaaagatgcgcctatcagacatatccagcacgatctcattagaaggttgggtattgctagtggaaatgaggctgttaccactgaagctcttgataagtatggacgtttcttctcaatccactatcggagtcccacatcaaggctctggtagctatatttggttggactgttcctgaaaacgtggagaacttggagaccattcagctcctcgcaggagatgccccgacggattctgtttagggggcgcatacatctcatctttttc

SEQ ID NO: 32949 - DNA, 366 bp, Zea mays
tactattcgactaaagtaagattatttttatattatgcccacgtatgaacactctctctccttcaggtgtattagtattctatccttagtgggatgtaccatagtataagttaaattcattgcatcataaaatgtccacctgtgcatataactttgacatcaactatatgtgtgcacctaattaaaggaatttagcctattcctttgggtttcaataatgatgattcatttgccatccacatataaggatcatcatctgtgaaaccctctcttgtgtttttaaagctctcttttcaagtgtacaacgaggccttcaagagctttaagatggattcaaaaccagcgagataaagaagtcaagacact

SEQ ID NO: 32950 - DNA, 369 bp, Zea mays
atcaaagataaattatggagagttggaaaaagtgctgtctgctgtcttaatggcctccaataagcttcttgcactactatcaggcatacaatatagtcgatacttcttcacaaccgttgaaggatattatgagaaatacgagaagctactggaagggtcggaaacagggctgcggagctcaatgaatactgtatggattactgccatagatcttcgatccaatctcaagcaataccagacttcattgctgactggacgccataggctcaggaataagaaacgaataaagatgctgaatattggacagtagttcgtgatggatctcggtgaaccttatgagcaagagcagctgctgtgtcgtttgcacct

SEQ ID NO: 32951 - DNA, 416 bp, Zea mays
  unsure (1)..(416): unsure at all n locations
gcttctnctggacaagcgctgcacttaccgtttagttctaatctgccacatataataataaaggagcccctggcattggtggagtcaatgttgttagatctatcaaatactgtttcaattcttcgaaagccttctgctggatttggccccattgaaagacttctgctgacttcagcactttgaagaatggtaaacttctctctggtgatctggatatgaatctatcgagagatgccaatctttctggcaatctttgagcccccttctttggagttggtggctccatccgaagtatagctttaattttacttggattagcttcaattccctttggtgaaaccaagccatcaagatatttcccctctttactccgagacgcatttttctggattaactttaagcaacttggctgaact

SEQ ID NO: 32952 - DNA, 452 bp, Zea mays
  unsure (1)..(452): unsure at all n locations
gcttcctggaggccattaaaacagcatacaacaccttcgccaattatgtatatttnttctttgataaactgagaactttggaaacaaagcatactggagcctgctttttcaattgcccttccatcttctcctgaacaagcgccgcacttactgcagagtgcgaagctgccacatacagcagcagaggagcccctggcgctggtggggctagagttgttaaatctatcaaatactggttcagttcttcgaaggctatttgctgagctgatccccattgaaaaacttcggctgacttcagcacttcaaagaatggtaaagttctctctactgatctggatataaatcgatttaaagatgacagtcttcctgttagtcgttgagctcctttctttgtgcttggcggctccatccgaagaatagctacgattttatttggattagcttcgatccct

SEQ ID NO: 32953 - DNA, 432 bp, Zea mays
agcttatctcaaccttagaggaaagcttattctattgtttgatgtgttacttcgagctctgccaagtgtgacatttatgtttcttgcaatgtagctcatatggactagtgtttccgctgcgatgaattatttggcttctataatgtaatagatagtcatgtggttaatggtgctttaagattgtcttaaattagtgtcttagcttaaattggtattagtttgaattggtatcttaatgatgaatagtggtaggttgatattcctgtgatatatccactattttgaatggtgtctaactctgattatgtgcatttgtgtgctatagcatcatgggttgattcttgccacaatgcatactaaaaagcgctaacgtgtataaatgtatctatttgcctaagtatgtgcaaattggcgtctgaggccacaattatg

SEQ ID NO: 32954 - DNA, 367 bp, Zea mays
  unsure (1)..(367): unsure at all n locations
tacgttaccctgaatcgtatggtcaaattaatggaagtttttccatgcaagtactctaacttccctggcaagtatctctggctaccgnttcacttcaggactattaaaagaatagagcttcaacctctaattgacaaaatcaacaaaaggcttgttgtgtggaaaggtatgcttatttcaaaggcatgaatggaaaccttggttaaatctgtgttgacagcgcaaccgatgtatcttctaactgtcttcctagctcacaaatggttacttaaaaggattgacaagataacaaggaacttcctttggaaaggagaaattttggatacatgtcgcgggggtcatcgcctgataaattgggctacaattt

SEQ ID NO: 32955 - DNA, 449 bp, Zea mays
  unsure (1)..(449): unsure at all n locations
tgcagctgcagcttctaagggagaacacgtgatatgtctttctttgttcatttcgaaaaagatagaccttgtgcagcttgtcaagcagggaaacaagtgggaggctctcatcacaccaaanatgtgatgacaacatcaagacccctggagctgctacatatggacctcttcggacccgtcgcctatctgagcataagaggaagtaagtatggtctagttatcgttgatgacttttcccgcttcacttgggtgttctttttgcaggataagtctgaaacccaagggaccctcaagcgcttcatcaggagagctcaaaatgagtttgagctcaaggtgaagaagataaggagcgacaacgggtccgagttcaagaaccttcaaatggaggagttccttgaggaggaagggatcaagcacgagttcttcgctccctacacaccacagcaaaa

SEQ ID NO: 32956 - DNA, 448 bp, Zea mays
tgtggtgccctcgggcgtcttgccacagccgaagcaccatgtcttccacttggaggtctcagagctgaacccctcgggcgtggtagcatcgcagagactgctgatatcgcgtcgagtgtagcaaagccacgccctgagcttctttcagctggtccagcgagtcttctcggctggtctggttgctttggtcgtcgtacgcccttgtcctcggggaatcgtattctaagtctgtgggaaagacagcctcggccccatagactagaaagaacagtgagaaacccgtggctcggcttggcgtcgtcctcaaactctagaccaccgagggtagttccttcatccaccgcctgccgaacttgttgaggtcgttgtagatcctcagcttaagtccctgcagaatcatgtcgttggcacgctccacctgcccatttgtcatggggtgagccacggc

SEQ ID NO: 32957 - DNA, 386 bp, Zea mays
ctagagaggcagcaactatctgaccccttgacaccttacatattacagggagtacttgtctaaaatctcccccaaacacaatagtctttccaccgaaaggcaaaccatggcgtcccatgatatcacgcatgatgttgtccagcacttcaattgattgtctcttagccattgatgcctcgtcccaaataatgagcgacgctttctgtagcaactttgatgtcccactcttgttcgtgaaggtacatatagcaccatcatcaatagtgattggtatcttgaagcgtgaatgggcagttctcccaccaggcattatggaatcggcaccctagatgagctattgaactgcaatcttgtcttactacgtaacaccgaagcaatgccttata

SEQ ID NO: 32958 - DNA, 261 bp, Zea mays
ccccccgggcctgtgctctcacaccccttaaaacacgcgaacaacgctaaaaaagactttttctaagcgagcagagaggttaaaggaactgaattctcaagcggtctggctaaaaggacagatcgtactgtaccatcggatccaacgatttcgaatcaactgtaagcaagacatgataagatcaaataaggaaaaaaaagacatgatcaccaccagaaccttattgtcactacagtatgaaatatacaagtaactcaaaaa

SEQ ID NO: 32959 - DNA, 307 bp, Zea mays
tttttttttggtggccgcaacaggctggcgactgtgggcaaaacaaatccagcatcgtcaaatcctattaactttccgggttcttcctgaaggtgtggcgcaacaaaagtggatggcggtgcttggacatgatatcacggagaggctctatagacgggtgacggcacatgcgagagcttatgagcacgatggactttaccggaaaccgaagtgagcgctcgcagtggtctagagaacatctgcgtgcggatcacggtataacacgattgacggatcgtttttgccaaacactatcacacatgtgcgg

SEQ ID NO: 32960 - DNA, 420 bp, Zea mays
agcttcaccttcactagccattagagttgattttattttctacctgcaaataaaaattgtgacattgaataaaaattgcagcattagagtagatcacaccttcatagtttctaccatgcgtggaggtcgagctgtggaggccgtgcgtggaggttgtgcggccgaactatggatgtggatgttgtgtgtggaggccaactatttgaagatgggattacataccgacgtggattacttaccggtcgatctatggatgtggatgcattgcgtggtgctagtgcatgcgtccgtgtagtgggtgccgcagcctgacagtgcgtacggcagtggtgcgtccgtccggcaatgcgttcgtcccagtgggtgcattcgaaggagctatgcggagagggttacgtcatgtgggtgtgagcgcacgtg

SEQ ID NO: 32961 - DNA, 432 bp, Zea mays
  unsure (1)..(432): unsure at all n locations
tgagaatgattcgccgaagcaacagagactgcaaggtgtttttctcatactctgggatgtacggcgagtgatacgaagctgtatgcatgacctgcttcggctgagcttgttgtgctgcggcttcggctatttccttttgcttctggatggtaacatgacacatcctggtagtatggcccttgttctcaccacagaataagcaaaagattcttctctgttgatcgccaaatcttcctccgaagcccctggcacctctgcctcttggagctggtggtcggaagggagcttgctgttgccccgaagcctgtgaggaatattgtggcctttgctgttggctccccttatcatcactttgtgtagagntatgaattgatctaacatgcctcgggtaaaacctcccaccgaagcccctggtcatttcagaaaacctga

SEQ ID NO: 32962 - DNA, 168 bp, Zea mays
cctacttgggtagttccaaaacgcctcactagatatctggcacaccgcttgtctgcacccatgctactgctgtggaaacgattggtctcacatttgtagaggaacaatcctacctatccttaatgagagtctcgatgcaacccattgattctagctttccacctgtgt

SEQ ID NO: 32963 - DNA, 383 bp, Zea mays
aactcagcgtcctagcgtcctcagaactggtagaagattctcctttttgctttcatatcgataccactgccttccgaggccgaaggtccctgtgactgtattatacttggaaaacatgctatatgtgtttctgaggaccttcagaggaccaatgcccccaacactagcccctcgcggtattaatttgatataacgatacactcacactgtgacatgaaccaacgccttaagctcgaaggacaaacaaacaccgttccttccctataataccgaaagtaactgacaaacggggcccgcctagttgccaagcatttggcgtattaataggaacccacagcggccgtcttgatgcgccattttgtgtttgattattattcaaattt

SEQ ID NO: 32964 - DNA, 411 bp, Zea mays
  unsure (1)..(411): unsure at all n locations
tcacgggctactggcggagctagccgaagcactggctgttctttatggtggctggagtgggctggccacggtggccgaagctctggcggcaatggcgggcggaattaagctcgccggagctaaggaaaggtggctggccggagagggtgagtgcggggcgaacagaggtgcgcccggggaggctttatatgcgcgggaaggcacggccganggcgtgggcgcgcggcggacttgaccggacgccggtgtgagcgcgcgcggaggttgggtgagctctggcgtgccgaccaaggtcgaacacgtgtgcccgtgcgttctgcccaagttctggcgcgtgtggtcgctcatacgagcctgctctcgccttggtcagtgcacaaaacctcttctcctccctacaagctaccattc

SEQ ID NO: 32965 - DNA, 465 bp, Zea mays
  unsure (1)..(465): unsure at all n locations
catgcaagcttcccgggcatcgatgcacctatgctattatgtcttatctgtcatatgcattatctaaaaaaaaatatgttgtctctgtgcccttcctaattatatatgagatgtatgtcctttcctactgatacatactatatatatttgcagcccanaggattgggagattctgtttgttcattcaccaatgatgaggatacactactacatacttaatgtagtgtcaccaagaaagtaataagttaatcagaggaatagaaaattctacgcttactctcatgtcgataacttctaattctagtttagctcttctttgccggttctttccgctggcttttttntagttgctgttacaagtaaccagcagtgcaaacaattcagccacatgactatgttcatcaattccttggattagcagctagcaccatgcatgtgttgacgtttataataaaacaccgcatg

SEQ ID NO: 32966 - DNA, 452 bp, Zea mays
  unsure (1)..(452): unsure at all n locations
ntgattagtttaatcccaaaagatttattgaacagatcgattctctccaagatgcaaagaaagaactcaccgaaccacaaactacttccaagtggcaatttccgtaaccgctattcacctccacctaccttacacttgtacgccacaaagaaaccctcatctacctacgtggcagacaaacattaatcgacaagaaaggagtcgggcccagctgcacatttcgcgccgcgcccactagttaggcagcaccgcgactgtacaaagcacatactcctaccagcaccaggatcaccatgaatgaatcagagagaatgtcatcttctcctagcaacacgccacacaaaattagcaggagatcaagatataacttactcttttccatatactactatgagcagttataagaattatgagccgctaccaactaggaaggattntaccagatcaatgac

SEQ ID NO: 32967 - DNA, 459 bp, Zea mays
  unsure (1)..(459): unsure at all n locations
agcttataaanntcagagtgtgcctattcctttcttttttgtgactntcaattggnatcggggccagtgcttcattaagagcctaaccaactcgaagtgatgtcctgatatcacgccaagagggagatcatgaccggcgaaaagcccgcgggctcgaggaggactttctcaagggagtccggcaacaagtataaggaggaatcctcttcctccaccaagtcacattggagaggtgacaagaagaagaagaagatgaagaaagtggtctactacgagacaaactcttcgtcaccctccacgtctggcactgagttgccgactacttctaagtgccatgagcgcaagaagtatagtaagatgcccctacgctatccccgtatttcaaagcgcgctccattactttctgtacccctaggtaaacgaccatatcttgatggtgaagattattgtatgtggagt

SEQ ID NO: 32968 - DNA, 447 bp, Zea mays
  unsure (1)..(447): unsure at all n locations
agcnngacagtcaatgtacggtaccagaatcgtagcacatattctgttttatatcctacctctgaaatgcttttgagttctatgccattttgctttttaataaagaacaagtaatgtaaatttagttctaaattcttgtaatgattttgcttctatcagaatgaaatatatcttcctcacagcattacgaagcctaaaatcttcttcacataattacgaagctcaaaagtcgttcctaaaggaatgcagagctaaatttgccgaagctactcaaaattcgttcttaagggagcacagtgtaagttttgagctcaaaagacgttcctaagggaatgcagagctaaaattgacgaagctacaaaaagtcgttcctaagggagcgtagtgtaatgtttctgctcaaaagtcgtcccacagggaatgcatagccaaataccgccgaaatat

SEQ ID NO: 32969 - DNA, 399 bp, Zea mays
  unsure (1)..(399): unsure at all n locations
attgacagnggatgcacacaacatatgacaggcaacccaccgatgttcacctcactagatgaaaatgatgatggtcaagataaaatgacatttggagaccattcacaaggaaaagtgcatggacttggcaaggtggcaatctcaaataatctatcaatatcaaatgttctcttagttgcaccgttgagcttcaatttattatcagtgggacaactctatgatcctggacttcaatgcttattcactccaacagaggttattgtaacaaagatggatgatgaaccaatggtattcaagggatctagatacaacaacctctacttagtggatgtcacttcagaagatgcagacataagaacttgcctcttcaccacagcttctcttggatggctttggcat

SEQ ID NO: 32970 - DNA, 188 bp, Zea mays
  unsure (1)..(188): unsure at all n locations
ctcgacaacagatattagaggatccaagnctatatttttatgccctgggcccatgtcggcccatcctttggctgcccccttaactataaaggggaggcatgcgacattacacacacacacgcaatctaagactcgctaactcacacaagccttcaagccatacaatttacagtggagtagggtattac

SEQ ID NO: 32971 - DNA, 139 bp, Zea mays
tgaaaactaaaaggatctcctagacactgtgtctttacatttcacagttcttcgaagaacaatctagaccatcgtccagcaaccagtacatcaccaccaccctgaaagggacgcttgtgtatgtgaaacacattggata

SEQ ID NO: 32972 - DNA, 339 bp, Zea mays
  unsure (1)..(339): unsure at all n locations
caccagagagacacgcnaaaacaacgcacaaggacagccnggccaaccagggcaagaacacaagaaagcaccggggggaacacccaaggcccaaaagacacaaaaaggggccaagggcacaccnacaaacaaaaacggacaaaccgggagaaaggccaacacaacagacagcaaccagaacaagagcaaaaccacagggaaaaaaacgcaaagggagaccgaagcaaggcgggcacaaaaggaacaacccggccaccacaagggcggacnaagaaaacgaacacaaaacncgatctctaagtccaacacacatggagaagcctagagagagacattcca

SEQ ID NO: 32973 - DNA, 454 bp, Zea mays
  unsure (1)..(454): unsure at all n locations
gcatgcaancnngngagcaatacaagatcatatttgtatattcttcttccgctgatcagccgaagcccatgctcttatgttaggacatancagaacacaaggtgctattgggatctcaactgtccgaagaacaagagaaaaccttgataaggtttttgttcaacaacaaagacgtttttgcttcggcagctaatgatctttgcggagtaaacacggatgttattgagcactcgctcaatgttgatccattcttcagaccaagaaaacaaaggcttcggaagatgtctgatgacaaagccgaaggtgctcgcaacgaagtgaaaagactcctcagtgctggagttatcatagaggtaaaatattcataatggttggctaacactgctatggtaaagaacgccaatggtaaatggagaatgtgcatctattttactgatctcaataacgcctgtcc

SEQ ID NO: 32974 - DNA, 456 bp, Zea mays
  unsure (1)..(456): unsure at all n locations
tatagaaaactaagcttattgtatttgtagatgtataatgctcagatgggatcttttatgggaccccagttcacccgttcgtcacaatctggacagaccccaaacaccaacgaaacacaggtatagntttgtagtatatttactttaatttacaattataatcatgcatcgttttatttggttatggggttctgagaccggacaaggaaacccacagatgaacatgcagtggtcgatgcaccctagaggacagattcttcctcctccacaactaggtatgggatattggccgccaccaccatggggatatcctacacatccaatggggccttggggacgccccccccatggccaacacagccacttccatcaccagcggtacgttcctgattcatgctgcttgctacttgttcacgctgcaacaaattggccttctttttttgggactactccact

SEQ ID NO: 32975 - DNA, 454 bp, Zea mays
  unsure (1)..(454): unsure at all n locations
acagaagaaggagatgatatgtttctctttgtgcttgagagagtcaactcaatttttattaactcaagctatcaatcttcaatgatctatatatccaagattgacccaaagttatttttgaattgttatgtctaaaactcatatcatctcaaggaagatattgatgttgtaggaaataaagaattgtcctgtgcggaaaaatcaaagcctacaacatggaggaaagccaaaggatggtaacatttatgcttttaagtgcaaatatcttaaattaccatgtcttgtgtgtcttgtgtagtcacatagaaaaaggaagcacttcaaatgtttgtaaattatgtcaccattctctacagaaattcctcttatatggtagatngcatattcatcatttctatactatggcaatctacatgctttaaattattgtaaaacctcatggcatgtctacact

SEQ ID NO: 32976 - DNA, 456 bp, Zea mays
actcaagcttgaattgtctgtggatgtaggtgaactacaagacctgttgtatttcattgggttattgacagtggatgcacacaacatatgacaggcaacccacggatgttcacctcactggatgaaaatgtttgttggagcgaaggcaaaaacgccacccttcgctcgaggccttcgctgcagccgctggtccgccggaggcaaagcgggcaaggacacccttcgcacgactcggagctttgacgaaggcctgcggcgactacctcacacggcgcggtctcgttcagccccaaggcccacgtgtgatccggcccattgtaacgggccccgcgtggccgcctctgtattacgggcctgacttgtaaggcaaacttgtaattacagcttgtaaccctgctatatgggaatattccggggataaactaggcgtctgagggcacatgcgtccttaacaca

SEQ ID NO: 32977 - DNA, 384 bp, Zea mays
caaccactagatgctctatgaggcactaagcttacacagatcaaagcccttgacccctcttactaccacgactatctaacctactactccggccaagtatctgctctaaactactgaataccggtgaaaacacaacgtatgttataccttcgccttcacttgatccacaagcaatgctgatgaatctgcaagatttcctggtatatgtggtccagccctgcattcttatttctccaagaaccgttcatccacgagcagttgtcattaattaccagagcatcactaaagggcctacatgattcacacccggcatgctaaacttgtgctaccgtgctcggtagcccctccttgctgattgtcgctctgagagcaatgggctgccgc

SEQ ID NO: 32978 - DNA, 449 bp, Zea mays
agcttgagaaatatttggatacagttcgaattcttgaagcttccttcgaagggttttctgtcaagaatattccacgaggagaaaatgagcacgctgatctgctagccaagtcagcggcacaggggctgcccttgccttcggaagtattctttgaaacaataaaagcaccttcggtggaacttcttgaaagagcagtgctcaatatatctcctgtttatagtgaagattggagaaccgagatcatgtcttttctccagggcaatttcctttcagatgacgaatcttataataagagaatagaggcaagagcccgaccatatgtaataatagagggggaattatacaaacatggagtctgttctccattactcacatgtttatcaagagctgaaggtatagaattgatgaaggaaatacatgcaggcctgtgcggatctcacattggatct

SEQ ID NO: 32979 - DNA, 467 bp, Zea mays
  unsure (1)..(467): unsure at all n locations
tagaaaaactaagcttgagttatattattacagaccagcctaaaagtgagtgcttatttgttatattatacaaaccagggaggcaaaaactcctcccgataagctaaaggcaaaagatcctaaacggaggaccgagtcctcccgcacttcagtcttgattttcttcttttggaaccaccttggcacagaagtagcaaaagtctgctacttcctcacctaaaaacaacaaagggataaaccctgagtatggaatactcagcaagtcttacccgactaaagaaaagactctcaagggtatgctggttatgtgggagtcaaggtaaggcttttcaatattcaaagactctgttttgcagaaatgcttactaaagtggatccttaaaaatccacgttttaatttgtcaagttaagtaaagttacctgtactagagttctntctaccctagttcaatcactggtcctgcact

SEQ ID NO: 32980 - DNA, 289 bp, Zea mays
  unsure (1)..(289): unsure at all n locations
caaggcaancgaaaaaatagaccttggcagcttgcaagcacgtaacaagcgggaggagcacatcacaccaaaaacgtgataaccacaacaagacctttggagatgcttcacatggacctcctccgacccatcgcctatctaagtataggaggaagcaagcacggcctcgcgataggcgatgagtcttcccgcctcactagggtatactttctgcacgataaaactgaaacccaagggaccctcaagtgcctcctaaggagagctcaaaacgagtttgagcccaaagtga

SEQ ID NO: 32981 - DNA, 436 bp, Zea mays
aactatgtcccagaaactgaagtttcttctcttatcgatctgcatgttgttttttataaaagatatctaaatatctaataccattccattcttggcgttggatagattggacaagaaatacccaccatatgagctaatatggcaggactcagatcagctctcgggaaaggtacttctaggcaggagtagtctccttgaatacatcatatcctcagaatgatgctatgttctttactgacattttctgttgggaaactatgcagtcattctatctacctggatctctggatgctgacaacaaggtgatggagcaatggaatgtgtcacctcctccgctttctctgtggagtcgtagtgactgggctgagaggcactccgagattgcaaatcaatggggcacatctcgaatgagattggtgacttgcaaagggatctc

SEQ ID NO: 32982 - DNA, 441 bp, Zea mays
  unsure (1)..(441): unsure at all n locations
ntatgtcatagcatgatgcatatgcaagtaggatactaatgttttcaagtcctgcaaccggtgcaaaggtctctccaaatctaagccttcaacttgagagaagccctttgcaacaagtcttgccttgtttcgcataatcacaccttgatcatcttgtttgtttctaaacacccattttgttccaatgatccttgcatcttgtggaggcttctccagggtccaaacttggttgcaggtgaagttgtttaattcttcatgcatggctttcacccagtcccgatcctgtagcgcctcatctatacatgtaggttcaacacaagaaacaaaagagtgatgttcaataaatgaagcaagtttatgagaacgagtgataaccccttgtgaaggactcccaatgatttgatcttgtgggtgagcttgaagtagtgatgagtttctctt

SEQ ID NO: 32983 - DNA, 425 bp, Zea mays
  unsure (1)..(425): unsure at all n locations
agctttaggttttctcaacttgggttatgttttttcttctttaatccctattngggggtaagntccctatccagggttctatttgcaaagtgctataacaatacaacttgtttgaaatttttgcctagtgaatgcactctatgtgtgtgaaacatatgcaatgccaatgcttatgatgccatgctcaagttttagttacagtaacactaggggtgttacagtatgggaaggggctgtaaggtgcctgctaccttcaaatggctagccttgactctctggcaagtgtcgcattcaaatacatacttagcaatttccctcttcattctggtccaccagtacaaagatctgaggtcatgatacatcttgttactgccggcgtgcatggagaaatttgaaaggtgagcttcatccaatattttctttct

SEQ ID NO: 32984 - DNA, 452 bp, Zea mays
  unsure (1)..(452): unsure at all n locations
ntagacaaaatcttatgccaatgtttaggattatcagatattctcttntttatcaaattaatcaatgtcctattgctagactcggcctgaccattggcctgagcataatatggagatgaattaagcagcttaattttgtataattcagcaaattcacgtacctcctttgacataaaagaagtaccttgatctgtagttaaggtctggggaatgccgaatctatgaataatatgctcagttataaactcgattacctccttgtgtgtcatgttctttagagcaacggcttcagtccatttggtgaagtagtcagtggcaactaacacaaaccgatgcccctttgatgatgaaggatgaatttctccaataaagtctaatccccatcctctgaacggccaaggcttaataatacgatgtaattcggctgcagggaccaactgtaggtcgccgaa

SEQ ID NO: 32985 - DNA, 455 bp, Zea mays
  unsure (1)..(455): unsure at all n locations
agcntttacccaggacacttataattaggattttttatctatgctaaatcncacgcatctattggatgtaagattctatgctacacatcttgaagaatatttggatactgctgcataattgcttggacattgtatggcttgatcttcagatagtagactgaagatttacatcttccgttcagatagctttactttcctatagagaaacgtgactgtcaagaaatcatctgtcaaacatctagcacctggatcattagcgactaatgctgtctcttctgtttcatccatgtagaccatcccgtaacccacagggacatcaaatcctcttctaatgaacacctgtcgagctataaggttgctggcttctgatttgccaaactagctcagctgacgctagtcatatctctcaatcaagtcaagggaacagcaggctatctcgatccagaatatctatc

SEQ ID NO: 32986 - DNA, 460 bp, Zea mays
  unsure (1)..(460): unsure at all n locations
actcaagctntcctggcacagaagacctacttccggaagttcgggctcgtgctcttcttcggngctacgggttccggatcaacggtccccgcttcttctaggaaaacaggcaataaaacaatacatcaacagggatttacaaattatagtgtgtcattttctaacatcattattgcatgtggccttagaaattacttttgataatttttggtgcataaaatattgaggggactaattaaagggggggggaaatgctaaaaaggaaaaaagataaagggtttcagctctggtgggccgggggggaggattttggcccagccaggcgcgagcgcgcgtgggcgctaatgcgccggcccagttgcggcccatggcaagggacggcgcggtcgcctgaatgtgacggcgtcgccgtgggccccacatgccatagagaacgggaggnggaagagaatggcgtcag

SEQ ID NO: 32987 - DNA, 297 bp, Zea mays
ctctatctaaatctaccaagtatagcctgaccctctaacactcccttaaatgctattgaatcatcacttcctctaaaaacagtgactcctacatccgtgaaaagacaagctgtacccatttcgcataatgagaacaaaaaagcaactggaacttatggatcccaaaaaatacattggaatataatggcacgagaatatctattctacaagacctgtgccacccttgatttcatccccgaatcgataactcgtggggaatctggttttctcaaggaggagaacaccttttctccccgc

SEQ ID NO: 32988 - DNA, 449 bp, Zea mays
  unsure (1)..(449): unsure at all n locations
aagctggacncgaggagatggcgctcatcatcaagagctgtcgtctttttctctagcaaaggaaagagaaagactacaagccctcgtccaaaagggtgtgctacaaatgtggtaagcccggtcattctattgcaaaatgtcctatgtcaagtgatagtgacagaggcgacgacaagaggggaaagaggaaggaaaagaagatgtactagaagaagaacggcggcgatgcccacgtatgtcgggaatgggactccgatgagagctccaccgactcctcctccgacgaggatgccgccaacatcgccgtcaacaagggtctcctcttcctcaacatcggccacaagttcctcatggcaaaggacgacaaaaggaagaaggtaaaatctagagccttcactaactatacaacatctagcgatgaggatagctctagtgaagatgaggataat

SEQ ID NO: 32989 - DNA, 453 bp, Zea mays
  unsure (1)..(453): unsure at all n locations
gctttaggggattctgtgatcagatcggttcttttttcttttcgcatcagncagacatccagaatcaaatggactcgttgaaagagcccatggcattataatgacacgaataatgaagttaatcttcaatcaacctatgggaaaatggccagatcagttaaccaaagtggtgtggagccacaatacaacaacatcaaggtctacaggctctactccattcaagttattattcggtgacgaagcaataactccggaggaagctaaaaccggatcaataagggtaatagcttcggcagaatcaggttccgaagctgcttattctgtggaaaaagatgctttacaagggatcaggcttgcagccgtggagaacatcaataaatatcaagccgaaacaattaaatggcgagatagaaaggttcggttaaagaatattgagccaggacactcggtgct

SEQ ID NO: 32990 - DNA, 438 bp, Zea mays
ggtaagtagcatacgctaataatatgcgaattgtctcatgcctagctacgggtgcataggtttcaccgaaatccaaaccttcgacttgtgaataccctttggctacgagtcgagctttgttccttgtcaccacaccatgctcatcttgcttgttgcggaagacccatttggttcctacaacattttggttaggacgtggaactaaatgccagacctcattcctcgtgaaattgttgagctcctcttgcatcgccaccacccaatccgaatcttggagagcttcctctaccctgtgtggctcaatagaggaaacaaacgagtaatgttcacaaaaatgtgcaacccgagatcgagtagttacccccttatgaatgtcgccgaggatggtgtcgacggggtgatctcgttggattgcttggtggactcttgtgtgtggcg

SEQ ID NO: 32991 - DNA, 463 bp, Zea mays
  unsure (1)..(463): unsure at all n locations
catgcaagcttctaaagggagaacacattntangatnatcattatgttcatttgagaaagacaggattngtagcgcatgccaagcagggaagcaagttggaacccatcatccacacaagaacatcatgacgactgacaggccactggagctcctacacatggacctatttggcccgattgcttacataagcatcggcgggagtaagtactgtctagttattgcggatgattattctcgcttcacttgggtgttctttttgcaggaaaaatctcacacccaagagaccttaaaaggattcttgagacgggctcaaaatgagttcagcttgaggatcaagaaaattagaagcgacaacgggacggagttcaagaactcacacaatgaaggtttccttgaagaggagggcatcaagcatgagttctcctctctctacacgccacaacaaaatggtgtagtggagag

SEQ ID NO: 32992 - DNA, 463 bp, Zea mays
tactaagctggacagtgttctgcgatgggtcctagggaaccttcggttttgttctgctgtcgtcttaattgcaccttccaaagtcagaacatgctatgcaataaagcttgacttcagatgcacaaataatattgctaaatacgaagctttgcttttggggctttggaagttaaaagcaatggggataagaaaggtggtccttaaaaccgattcccaagttatttctggtcacgttgacaagagttgcagggcaagagacccaaagcttgagaaatacctcgacacagttcgaaggcttgaagcttctttcgaagggttttctgtcaagaatattccaagaggagaaaatgagcatgctgatctgctagccaagtcagcggcacaggggctgcctctaccttcggaagtattctttgagacaataagagcaccttctgtggaacttctcgaaagagcagtgctc

SEQ ID NO: 32993 - DNA, 341 bp, Zea mays
gccacgcgtggctggccctaccgaccatacagcgccgacccagaatcccatgacgatgagagccatctcctcatcactgagcccgaccgccacaactggcgccaccatgcaaggaagcgacaccctgctcctcgcagccccaagagcaacgggccgagggccacggagcggacccgacaaggcagccgcgacgaagctcgcctccttgaacatcagccgcccgctcacgaacggcacaagtacttcctcgggcgacaccaacgagcacccgggaacctcacgaacaacgctcacgagatgaggaccaagaacggcaaaggacccgagccaaaggcggacga

SEQ ID NO: 32994 - DNA, 454 bp, Zea mays
  unsure (1)..(454): unsure at all n locations
agcttncactccagatctgaaatgctgtctttgtgggtctttacatgcattnaaaaacccaacgtccaatagcaaagacagaaatcaaaacatgcgaattgcatatgtctcacacagatcatgtgtatctggacatgcctttatagtacacagggaaaaaattaaacataacattacaattaaaattcctcaaacaagacaatatccatgcataatccataaattatatcacggtacttcattgttgattgggttatatctgtacaattctctaagtaatacctatcatggtacaccttttgccactatcaacaaaccagagccataagaggggagaaagtaaagcaaacatgtctgggccaaaaatnttatataatgacccacccccattcaaacatgctttgaagctagcatgatcccaagaaaccatgtagcttatgaaagaggccagcag

SEQ ID NO: 32995 - DNA, 432 bp, Zea mays
tgtaaagggagagcacattctaggattaacaaatgtttattttgttataaacacgatctgtaacgcatgccaagcagggaagcaagttggtgcacatcacccacacaagaacatcatgacgactgacaggccactggagctcctacacatggatctattcggcccgatagcttacctaagcatcgacaggagtaagtactgtctagttatcgcggatgattattctcgcttcacttgggtgttctttttgcaggaaaaatctcatatccaacaaaccttaaagggattcttaagatgggctcaaaatgagttcggcttgaggatcaagataagtataagcgacaacgggacggagttcaagaactctcaaattgaaggtttccttgaggaggagggcatcaagcatgagttctcttctctgtacaccccaca

SEQ ID NO: 32996 - DNA, 286 bp, Zea mays
aacatacactagttcactcatcttaccatttacaaagacactctctacacttgtgaatgtcatgagcaatcataccatccataagagaaaggtcgcatctatcacacatagaggtaggacgccgcggttcacttgtatgactatctagttggttacatgtgaccccaacatcctcggtgaccaccacaacttcatgcacagtagattgaatcgtgagcttccacaagcctttcacaatactcttttagatcgcagcgagaggtcttgagctcctcagaagacactt

SEQ ID NO: 32997 - DNA, 447 bp, Zea mays
  unsure (1)..(447): unsure at all n locations
ggacattgtctccctgttggaagccaatgccatccttattgttatggcgtctcccactatagagcatacttctagcaaatntaaatttttcattttctaagtcatgctcattaatattagcactaagttgagctatgtgatcattttgttgtttaattaaagctacgtgatcatggatagcatcaacattaatgtctctacatctagtacaaatggaaagatggctaacagtagatgtagagggtttgcatgcatttaattcatcaaccttagcatgtaacatggcattctcattcctaagattggaaatagaatcattgcaaacatttaaatccttagccttagcaattaaattatcattctcaatcttaaggctagaaagtgattcattcaacttgtcaattttagaaatcaaactagcattatcatttgtaagtttgacaagcg

SEQ ID NO: 32998 - DNA, 448 bp, Zea mays
  unsure (1)..(448): unsure at all n locations
agctttggccccacctgcaagctctcatcctctcttgatgcgggtctggnggccactatcggtaccctgaatcaggggtaccctcttctacagtatgaaggcgctatacatgtacgacgtctccaggtcacatggagaacggcacctgaccccaccacatgggcaggatttaaggcaccgcgtggcaaggaaagataatacatcccaggatgcatcattgggtccggacccccacagtaggacaccagaccctgtgcgtacaagtccggagctttcaagaaggcatgtcgggtccctcgggtaggccccagttccctctgagtaaggtccgggccttagcaaggtcccgggacggggaggaccctggcttgagtaaagggtcggtgctgacacgcgtctaggccatgccctgcgctcctagctcaagcagagacccactgctgtcgcg

SEQ ID NO: 32999 - DNA, 287 bp, Zea mays
gcagctctctggaccatctaacacatagatccgctcagagaatcatactttgactgccgagtgctgaaaatatcactttacgaacctgatacagcactcttgactagctctacattcctcaaaggatcctagtatgcactgaggttcagcactctacacttagggccataaatctacagcttggtgtataagtgcttataaacggtatgcattaacgggctgcttaatgtgggctgcggaacctctagagctcgagctgtctggctctttgacgacctgttggatga

SEQ ID NO: 33000 - DNA, 437 bp, Zea mays
  unsure (1)..(437): unsure at all n locations
gcttcctgatgcggtcaaggcacatgtcatctttcttcttgtcaactgcaagacaagcaaatcaagtttaagtatggttttcattacagattgaatatctgggatcaatgccaacttaagatccgatcagattacttactggtgtagtgaccacgagcgaagttgttggctgcatcctccttgccactgatgagctgctcaagatggaagagctggcggtaggtgccagtcctcacctcatcgatgacagtgggctcaaggtcaacaaaaacagcacggnggacgtgcttcccagcgccagtctcactgaagaaggtgttgaaagcatcatcaccttccccaatggtcttgtcaccgggcatctggccatcagcctgaatagaatacagtcatagccgcattatntatgccacttacaaaagtcgaacatataattc

SEQ ID NO: 33001 - DNA, 450 bp, Zea mays
  unsure (1)..(450): unsure at all n locations
tctanagggagaacacgtgataggtttgactaacgtgctattcttaaaggatagaccttgtgcagcttgtcaagcaggtaaacaagtgggaggagcacatcatagcaagaacgtgatgaccacctcaagacccctggagctgctgcatatggacctcttcggacccgtcgcctatctgagcataggagggagtaagtatggtctagttattgttgatgacttttcccgcttcacttgggtgttctttttgcaggataagtctgaaacccaagggaccctcaagcgcttcctcaggagagctcaaaatgagtttgagctcaaggtgaagaagataatgagcgacaacgggtccgagttcaagaaccttcaagtggaagagttccttgaggaggaagggatcaagcacgagttctccgctccctacacaccacagcaaaatggtgtggtaga

SEQ ID NO: 33002 - DNA, 387 bp, Zea mays
  unsure (1)..(387): unsure at all n locations
agcttgtgaagattcttcatcccaacatggtttagtcggcgatgccagagccaacccatattagtcttaacaattaagcaagtatcgagtttgtaacacccctggtgttactataactaaaacttgagcatggcatcataagcattggcattgcatatgtttgacacacctagagtgcattcactangcaaaaatttcaaacaagttgtattgttttaatgtttttgcaaatagaaccctggttaaaggacttaaccctaaatagtggttaaaggggtaaaacttaacccaagttaaggaaacctaaagactntatggtaaaagtcataaaatgaacccaagaataaacttgaatcacttttatacccctggaataccagaaaccct

SEQ ID NO: 33003 - DNA, 437 bp, Zea mays
  unsure (1)..(437): unsure at all n locations
tgaatgccgggtaatctgctgtcttcttttcctgttgtttgtctttatatctcaatagccttctgtgtttgtaaggaagttatcctggtaggttcaatggattctaagaattatgtggtatgtaattcctttccttagccccacaaatgccactatggagcctgcccaccttgcaagctgatctgcggggaagaatttccatgtgggcacacgtgtaaagaaaggtttgtatttgaactacaagaaatgtgtaattgaatcatgtttgcacttggctgtctatcaaggaatatcacttctgttatcttaacaatattcatatattatctaggtgtcatggccctatttctcctccaaactccgagttcacactgaaaccgacaaanaagaaaatgggaaagcacatagaatgtacacctgggacaccgtgcccacca

SEQ ID NO: 33004 - DNA, 389 bp, Zea mays
agcttctaaagggagaacacgtgataggtcttactaatgttactttcgaaaaagatagaccttgtgcagcttgtcaagcaggtaaacaggtgggaagctctcatcatgccaaaaatgtgatgaccacatcaagacctttggagctgcttcatatggacctcttcggacccgtcgcctatctaagcataggaggaagtaagtatggtcttgttatagttgatgattcttcccgcttcacttgggtattctttttgcaggataaatctgaaacccaagggaccctcaagcgctttctaaggagagctcacaatgagtttgagctcaaggtgaaaaagataaggaacgacaacgggtccgagttcaagaaccttcaagtgaggagttcttga

SEQ ID NO: 33005 - DNA, 449 bp, Zea mays
tctaaagggagaacacgtgataggtttgactaacgtgcatttcttataagatagaccttgtgcagcttgtcaagcaggtaaacaagtgggaggagcgcatcacagcaagaacgtgatgaccacttcaagacccctggagctgctgcatatggacctcttcggacctgtcgcctatctgagcataggagggagtaagtatggtttagttattgttgatgatttttcccgcttcacttgggtgttctttttgcaggataagtctgaaacccaagggaccctcaagcgcttcctcaggagagctcaaaatgagtttgagctcaaggtaaagaagataaggagcgacaacgggtccgaattcaagaaccttcaagtggaggaattccttgaggaggaagggatcaagcacgagttctccgctccctacacaccatagcaaaatggtgtggtag

SEQ ID NO: 33006 - DNA, 444 bp, Zea mays
gctttgtcacagtaagggcacccaagccacatcactctcttatttatgacgatcacacagaagcaatctgtcatgttaccatgcccacagaacaattttaaccacatccaaagggacacatctcacgtgtaggcaatttttggtcagctcttgtaccaataaaaatctcgtacagtctgcaggaaaaatacataaattctacgtgtatccaccacaagttcacaacacacaaaaccagtcgtgaaacgaagaaacagaaagagaaataaataaaacaaataaatcacatgcaggcacagttgcccaccaaaactgcatggatttctcttatcttttaataaaaaatgcgctcaaacaaccaaccaaaaacccaccaaaaccagggcgatttactgcgattaacaggtagacaacgcaacgaactagcaatccccgcaatcggca

SEQ ID NO: 33007 - DNA, 394 bp, Zea mays
ctagaatcaagaatattgagctcatgcttatttctggtaaaagattgtccatcaagtggcttggtaaagatgtcggctaattgatctttagtattaatgtaagaaatctcgatatcccccttctgttggcgattcctaacaaaatgataccgaatggctatgtgcttagagcggctatgctcaactgcattgtcggccattttaattgcactctcattatcacataccaaagggactttggataatttgtaaccgtaaccccgcagggtatgcctcatccaaagcaattgcgcgcaacaatgtcctgcggcaatgtactcggcttcggcggtgtaaagagccaccgaactttgcttctctgaagcccaagacaccaaggatcttgccacgaact

SEQ ID NO: 33008 - DNA, 441 bp, Zea mays
  unsure (1)..(441): unsure at all n locations
cctgcggcatgcagcttanaaaatctggatgaatctgcgattttatctatctagtccaagaaaactccggacttggnggacagtggttgggggatttcactccagaatatgtctgaccttgctaggatctaccgcaattcctttagccgataacacgtgccccaaaaattgaattttctccagccagaacgcgcacttgctgaacttggcatacagctgatgttctctcaggcgcgtcaatacaatccgtagatgctgagcatggtcctcttcattcttagaatatatcaagatatcgtcgatgaagaccaccacgaacttgtccaactcgggcatgaacgccgagatcatcacataagtgaagtgggtaggagcatttgtgagcccgaaagacattaccagtgattcaaacaatccgtaccgcgtagtaaacgcggcctt

SEQ ID NO: 33009 - DNA, 438 bp, Zea mays
gtacaattgagaggtacaaggcaaggcttgtgtctctaggatatacccaaaaggagggtgaagatttctttgacacctactcaccagtggctcgattgactacaattcgcacattaatagccgtggcagcctcttatggtcttatcattcataagatggatgttaagacaactctcctaaatggagagttggatgaggagatctttatggatcagccagaagggttcattgcggatggtcaagagaacaaggtgttgaaagggaaatgtgcccttgggccatttctaagtgtttggttgatttagtgtccaacacaagtgcataagtgtcaaatggtggacaaagtacaaatcaagtatacaggtatgtttctcatacttagtacattgttttagtgactaatgtattgtgtctaagtgctggaaacagaagacatcg

SEQ ID NO: 33010 - DNA, 333 bp, Zea mays
  unsure (1)..(333): unsure at all n locations
acccatctcatgacgggtccatcaaagctagccacaaatgacctaagcacccaaatagccttggtcctagaaagtggtgaactcatcacctttctagcacaagagtcaaatttgggtctcctacacatatctgaatgtatcgacaaattaagcttaagagtttaccctatggacaaaccttgaatagatgacctttctcacggcaattgtagcaaatgcggtgctcatacctgcaatgcattagcctttagttacatcctttctgatggacacatatctngatcgtgcaagaccatgggtcttatgggggggcatgaataaaatccatgaacc

SEQ ID NO: 33011 - DNA, 453 bp, Zea mays
  unsure (1)..(453): unsure at all n locations
cccgctgctagctcgctcgctcgctgtgtgtgagcatttgtttgtgtgcgacgnggacatgacgacgacgaggactctactagctatctggagtggacacatgcatcttgtccggtccatcgtcatcggcttatcgttctcaccacacatcacatggacgacgcttcgcctaaatcgagccagaaaggcccacggcatgcctgcatgcatgcattagttacattgctcgctcgcgcagcatggcgccaagctcaaaaagccaacaatggaggaggtcatggaggagctgccgatcgatcccacccccacctcaccaccgaaaagctcaacccgattgttggcagcggtctggcgaagtcgattggccgatgatttgctgtgggaatgcaggtccgcggtatattaattatctgcgtgctgcattattatctgttgattcgttgtttaacagca

SEQ ID NO: 33012 - DNA, 373 bp, Zea mays
ctatcaacatgatacacgaaaaatgtcaagattctcttaatcatgccattggcacataataatctactctatgtcatcgaaaagtcacaacagacgaagaaaacggatatgcttcacgtgcaaggcattaggtcacctcatcgcatcatgtccctacaaagaccaggactaacggataatgagatgttttggatgccagcacaaggaccacatgatcactctatgtgccgtcatgaagaatcaaagatgtgcattctccaagatgactctcacccacgaaaatgacaaacacccagccgtcatgtcatgttgaacgacctttctgctacaagcgtggagagcacggtcatctatccaaagtatgtaataaaag

SEQ ID NO: 33013 - DNA, 380 bp, Zea mays
agacaagctcttctaggcaagctgtctgtggagtaatgctggctcgtttgaaaagctggtgcggtgaatttacgagatcggttgcgcagctgtacagataagctgttcgcgagaatctatgtgtttggataatcagagtctacaattgctgatcgtgttcgaaaatctatccaatgaaacccgtagtgaacataaggtcgttatacaataattcgttgagttgaccaaacttattccttaactgcctaaatgactgtggacccccacatgcccacaagataatgtcaagtgcttgcgtagtactaacacccctgcttgagaagtaaccataattggacaccagtgtgtcatgcaatcgttcttaaaacatgttcgtcgca

SEQ ID NO: 33014 - DNA, 247 bp, Zea mays
cctaactacgttcacaaactctctaaggcgccatatgggctcaagcaagccccaagagcatggtatgaatgcctaaaagattttcttaacactaatggcttccaagtcggaaaggccgatcctacattccttaccaaaacactcgaaaatgatctgtctgcacgccaaattcatgttgatgatatcatatttgggtctactaacgaatccacatgtgaagacgttagtacgatcatgacacataaat

SEQ ID NO: 33015 - DNA, 448 bp, Zea mays
tctaaagggagaacacgtgataggtctagccaatgttactttctaaacagatacaccttgtgcagctggtcaagcatgtaaacaagtgggaggagcgcatcacaacaagaatgtgatgaccacgttaagacctctggagctgctacatatggacctcttcggacccgtcgcctatctaagcataagaggaagtaagtatggactagttattgttgatgacttttctcgcttcacttgggtattctttttgcaggataaatctgaaacccaagggaccctcaagcgcttcctaaggagagctcataacgagtttgagctcatggtgaaaaagataaggagcgacaatgggtccgagttcaagaaccttcaagtggaggagtacctcgaggaggaacggatcaagcacgagttctccgctccctacacaccacagccaaatggtgtggta

SEQ ID NO: 33016 - DNA, 419 bp, Zea mays
  unsure (1)..(419): unsure at all n locations
agctntaccacatggacgtgagaagtgcctttctcatctgaccaatcaacgaagaggtctatattgagcaacctcccggctttgaagatagtgagtaccctaaccatgtatataaactctctaaggcactttatgggctcaagcaagccccaagagcatggtatgaatgcctaagagatttcctaaccactaatggcttcaaagacggaaagacgaatcctactttatttactaaaactcttaacaatgatttgtttgtatgccaaatttatgttgatgatattatatttgggtctactaacgaatctacatgtgaggaatttagtatgatcatgacacagaaattcgagatgacacagaaattcaagatgtcaatgatggcggagtcgaagtacttcttgggatttcagtgaagcaac

SEQ ID NO: 33017 - DNA, 458 bp, Zea mays
ctcaagcttatattgctattagatgccaacaaatataacctctatgtctttatccacccctaattaggagatgtagcgtaaagcggcccattttacaccactcttgttatttttgtctaaagcatatcctttatattttaagcctcaaattcttaaaacaggctagaataacaaatggcaatccactgtaatttttatggaacttttggaaaataataaaccactgtcgtaatttaaacttacactataaaccataagtagagaataaagaaaggggaaaaatgaataataggaaattagtgtcatcctaaaaactctttatatattgtccactgaaatatgtaaaggcaataccaattccctatgtttatctctcataaaaacttaaacctaaaagtgataagcataacccactaaaagccccgcatggccaaggaaccctaagttactacttaact

SEQ ID NO: 33018 - DNA, 460 bp, Zea mays
  unsure (1)..(460): unsure at all n locations
cagagtcacctgcggcatgcaagcctatttgntaatctaatgctcatcgtgttctttttatcacatctattagncgcgggatcattgaacaacctctattaacatttatacttcttagcgcctcatataatatcaatcaatatctcttgatatgcactcagctaaaaggagaattcatgttgcctttatacaacttgtgatccatntaatttaatctaacattatcttggaaaaggatcactatttgtagaactctctcttgtgcaaaatatttccatatattgtcttgagtataggtcctaagcaactaagactaatgacaagcacaatgaagagagcgtctctatgtgaaggtacaaaagggtaaaactacttcctttcattcaaacttgtacctaaatcttcctttctatactctctctacactaactcgataaaacgaagagaaagcatgtccatg

SEQ ID NO: 33019 - DNA, 369 bp, Zea mays
  unsure (1)..(369): unsure at all n locations
aataaaggaggcatattttatacatancatgcatgctttatataacatgacatatgagaacaaaatgatcaactttctgtgaaaaatagcaaagaataatactatggccttgtttggcacaaatataacttgtgcacaagttggtttatggaataagctatgagaaacaatcgctatggaaaaactttaatgcctgacaagttatgcatttgtgaagagaaacggcttaatctgagtgttagcgtaatcgtgtattcctctactgtaatgggccttggccaacatacttaactatattaatatacttccaacccacattaggtgtagtggtttcactgtcctaatatgacacgcgtgggtccacctcca

SEQ ID NO: 33020 - DNA, 406 bp, Zea mays
  unsure (1)..(406): unsure at all n locations
actgccagttcgacctctatttatcttccttcgtgtccgcatgcgccgctgtgttcagtaagctcctgcgcatacggcgcttggacgtggaccagagcggatgcaccgcgctgtccatcttcaaacaggggggcctcatggtcgttcccaacactggcgactgtcgggctgttttatgcaccacattcaaccacggtgctgtcacgcctggcagctcatgatccatctgaagctcaacctgccacgtaagtcgctatttgtcggggaccataattaggggtaccctcaagacgcctaattctcagctggtaaccaccatcagcataaagctgcaaaggcctgatgggtacgaataatgttnggatcagaccacactaacgactcgatcacgcttgatccgagccta

SEQ ID NO: 33021 - DNA, 433 bp, Zea mays
  unsure (1)..(433): unsure at all n locations
gtagagaaataatcgtatatcttaacagagtaacaattattattcttacaagctacataagcgcttgtggaccatgggttcagtgctgtantaacgtcaaccttggtgcatgaggctcaagtatggcttgatgtacgcgtcttatgcacccaaaatacaacagagtgatatggattttctgtgtgacatccatgtgtgtctcttagatccattgtagcaataggtcaaccaactagttatgcacttgaataggggtcattcatacttcagatgtcataattgatgaccatttactaacaaaattactagttcataacctgaacaagcattntaaagtacaaaatgctcctctaggctgcagacctctactagctagcctcttgtaaaatagaaatgaaagacaaggaaccctcttcaacacagaaaacaaaga

SEQ ID NO: 33022 - DNA, 386 bp, Zea mays
  unsure (1)..(386): unsure at all n locations
acacatcctggaatcatgcggaggatatccatgtatatgtgggaatctcataaattacaaaatcaagtcaggggtacatgcatctatcatactctctgaatttgtctgaatcacaagaatacactattacaggatagagggagtaaatatgaatattcagaagacaaaaacatggttctggtttcaccatacatcacatgataggtcgcgccctgacttgaaatgcaaatcgaaatattcaaaactttcaaattaaccaanaataagtatagttatatcatataatgcatggctgactgtaatttgaattggactgcaaattgaattatacattctagaagaacaaaaaacaccatatgacattgtcaataacataatataagagc

SEQ ID NO: 33023 - DNA, 445 bp, Zea mays
aactcaagcttggtgtcttagcaacaagaaaaggtatgatgaagggtgtttctctatagtggagaagctccctagagattaaactttcaagatggaaagtacaccacaacatggtaaaggtacacaatgaagtattgaccttttgcgtatttgtaccttaatttttctccaatgcttgtgttgcatatgtttaatgtgtaagggggagtaatgttaatgtgttgcaatttccctgcttaataccccgttgtcccttgacatcatcctatgttcatgcttgaatatgggtttggtgtttgatgtctaacggggagaacctgtgcattaaagcttaactcgacctgagaggaaagctcatattaagggtgaagattaatataatcttttgtgtgctaaaggactcagaggggtttccttgagttcctctgatcttaaagaaaaatgt

SEQ ID NO: 33024 - DNA, 202 bp, Zea mays
cagattgtgcgcatgccaacaggaacaggggactcatatccaccaaacatttgacactgcaagcaagggaccctaacaggattattcgccgaccttcataacctcgcggggacagactgctagcattgggatgatattctccttcctagggatctttacagaaaaatccaacccaaacttaaggatcttgaacactcaaagg

SEQ ID NO: 33025 - DNA, 372 bp, Zea mays
  unsure (1)..(372): unsure at all n locations
actgaaaggagaggcatcaaaantctcaaaaaaagggccatcaaagaagacacttggaaggaagaagatgacataaacaacatgtggaagaagatggcaccctatatttgcgaggtgtgtggagcaactaaagggagtggatgcgaagctaaaggtacttggtagtggaagtacatggatgatttgatacttgtcaatacagtgtattagcgcaacagtgtttttcagcctctcgcaatagggtacagtgcggtggtatttataggtaaccaggggacgatttcactctctcatatacagatatgcccctggttacctacgttatccctganatattcccctctcaagggttattactagtcattacaacat

SEQ ID NO: 33026 - DNA, 458 bp, Zea mays
  unsure (1)..(458): unsure at all n locations
gcttgtggacccgtagcctatcaattggaattgtttcctcacatgtcagcagttcacaaagtatttcatgtatctcaactgcggaaatgtgtccgcctacccactgaagtgctacctgagccagacattgagatagagccagacttgtcctaccaagagtaccccgtcaaggtattagatcagaaggagaggttaactcgggcaaagtcaatccgaatgtataagggtcagtggagtcaccattcctcagaaaaagctacatgggagactgaggattttctacgctcctgcttcctcgactttttgtccaaaggagtcggtatgtaaccccaaaaccncacccccacctgccctttgagtacaattataagaaaaacttagatagcacggatagtctaagttgtggatttaacttaacaagggcttccttctgaagttgcaaagagaatgacattcga

SEQ ID NO: 33027 - DNA, 461 bp, Zea mays
  unsure (1)..(461): unsure at all n locations
taagcttccattggaacaacatcacaatcagcataatcatgatatgttcttatagagaaataaacacataccgagcgtgttaccttgagtttaccgccctggttaagccattgaatatggtaggggtgtgggtgtggacatgttgggagagacaacttctccaccagctctgtgcttgccaagttgttgcagctgtcactgttgggggccttcttcctccaaaggtcctcaaaaacatgactgaccatatgttttcagtacgacatggattattacagggggcttcggctttgtgatgaagtttctctcttataacaaggtgaagatgtggcccgaaggtgataagaatggacgacgaagctgtagccgaagagcttcggttttgatgtgatgacgaagaccaagtatgatggtgactganaaggatcaaagactattcagtcctcaatgttctgtgttat

SEQ ID NO: 33028 - DNA, 348 bp, Zea mays
ctgcagctttaagaagaaacggatagctttttatttcttgcaaaaaataacttggcagctgtaagcagtaacaggggaactctatcaaccaaaatggagacacatcagaccttggagtgttatatggactttcggacccgcgctattagctatgagaagaagttggcttgtatagtgatatttttcccttacttgggattttttgcagataattgaaccaaggaccctaagccttctaagaagctaaatagttgagctcaaggaaaagataagacgacacggtcgatcaaaactcagtaagagacctgagagaagacagccgagttcactctaccaccaagaaacggg

SEQ ID NO: 33029 - DNA, 457 bp, Zea mays
atattactaagctcggcttgactacaattggagcaaacagacaatattttgtttgttgtggaacttacacctacccgtcgtttatatagtgctgcaggtgggaaggtgaatcggcaaggtctccagcaccgaacaaacagtcacccgcactcactgaacggtgggccacagggtccgagaaggtgaatcgctggcgcgcacgtaattggtgcaagatggggcgcgcgcgcaacgattattttaatcgtttctcgccaacgagttcagggaaggtgttttttggatcttcggcatcccgaagcctagaagatttttcacggatcaagctcgttacgaaaaacgatctatcaccgcgaaggggctactgttgggggtatgcttcatagccgaagatcctataaaagaacaccttcgaaaggtcttctcagaagcaagcgccgaagctattatttataaa

SEQ ID NO: 33030 - DNA, 363 bp, Zea mays
agcagcaagcccgacaccgaacaaggcacaaggcatttatattggcaaatcacggcactccacaaactccacatgaatcgaaatgaccaggcacaaggaacatcaacggcgagctgattccaagcgccgcggaacgctttccgactactatccacgcggccctactactaaacaccaacgacttcctcacgcaagcaacacaagcctgaggagacctctcagacctggaacgaagctaagctggacctctatgcgccgacagggagacgaaaagatcaacctgggttgctgatgaatgcagactgcatcatcaccccagcctggagacaaaaggaaagcggccatccggttctgcaagaaacc

SEQ ID NO: 33031 - DNA, 317 bp, Zea mays
tatgtggagcaaccttcccgctttgaagacagtgagtatcctaatcatgtgtataagctctctaaggcgctttatgggctcaagccagccccaagagcatggtatgaatgccttaaagatttcctcattgcaaatggcttcaaagtctgccaaaccgatcctactttattcactaaaactcttgaaaatgacttgtttgcatgccaaatttatgttgatgatattatatttgggtctactaacaagtctacatgtgaagagttagtacgatcatgaaaacaaattctagatgctatgatggggagctgaatactctt

SEQ ID NO: 33032 - DNA, 367 bp, Zea mays
  unsure (1)..(367): unsure at all n locations
gccaatctatttggggttggttctgagcaaagaaatattggttaccctcaaagacatgaattgcnnctctcgaatttaagattatattcagcgtacagaatttgtataagaatttgaatcagcaattgatttataatgagattttccctaaaataccacaacatcaacagggaaaacatacactaaattaatcttgattttgtcttcgctgggaagatcttaggtattgaaaaatgttgcatattaattctatgctggtgttatttcaattctgcctgagttttttttcatgaaattgttcacacttgtagacaattaaattgcagttcaaaatgaaaccttgagacatcatgtacatgcaccaagt

SEQ ID NO: 33033 - DNA, 391 bp, Zea mays
  unsure (1)..(391): unsure at all n locations
ctgcagcttacggccncttccaggctttaagtgatttgtctaatatcggctgcggcggctctctccctaatacggcctctctgctaacggctacaagtggtgaacgaggggagagcaccagggtgtctctgtgacgcgaccgggtcctctctccccttccccccatatagccctgtgtccctaatggaatacgcggccgggacccggtaaatttggccggtggatgcggaggtgggtacgcggtttcaaaggggatgatgatggatatgacatgcggnggccaccgtcagtgacactgaggagcgtgtgcgcgattacaagaaacagagatgtgggctgcggagcgcgcacaccgcggctgacgactgggtcccactatacagtgatacac

SEQ ID NO: 33034 - DNA, 446 bp, Zea mays
aactgcagcaagtgtcgagctcaatatgtttattttcctaaagatgaagaaatcaacatgagcttgaaaaaaggtaaagattcagttaatcatgttgtttgcactgaccttctctccatgtcattcaagtacaaaaagggaaaaaggaaaaaggaggtgtttcaagtgcaagaagttatgccacctcatcgcgtcttgtccgtacaaagacaagaatgaagggacaaggagttgctttggatgcaaaaataaggaccacacgattacttcatgtccggttatgaagaatcaaggatgtgcatcctccaaggtgaccctcaccaaggaaaatgacacacagcaagcgtcatgtcaggttgagcgacgcttctgctacaagtgtggtgagcagggtcatctatccaaggtatgttataaaggtaagattcctaagcacgtgaatttgt

SEQ ID NO: 33035 - DNA, 466 bp, Zea mays
  unsure (1)..(466): unsure at all n locations
ttaagtcacctgcggcatgcaagcttccaccagcgttcttttgccttttatgttttctaaggnagcagnaagtaccattgggggttatgaagctagtctttagctcatcttacttctagagaaacaattcagtaaactaaagagctccgaagtgacacgtgcatccactagagaatcaattcttggtagtgggaattcatcctttgagcatgctttgttgaggtctatgaagttgatacacatcctccacttgccattggatttcttgaccatgactgtgttggccaaccactctagatatgaaacttctcttatgactccggcactaagcaatcttttaacttcggcctttgcaccttcggccttatcttcagacatcttgcgaagcttctacttttgtggcctggttcttaagtgaacatttagagcaagctctattatgcttctattgactccacacaagtca

SEQ ID NO: 33036 - DNA, 428 bp, Zea mays
actcagcttcttagggagaacacgtgataggtctgactaatgtgtatttctaaaaagatagaccttgtgcagcttgtccatcatgctaacaggtgggaagctctcatcacaccaaaaatgtgatgaccacatcaagacctttggagatgcttcacatggacctcttctgacccgtcgcctatctaaggatatgaggaagtacgcatggtcttgttatattgatgattcttcccgcttcacctgggtattctttttgcacgataagtctgaaacccaatggacactcatgagctttctacggagagctcaaaatgagtttgagctcaaggtgaataagataaggagcgacaaccggtctcagttcaatatccttcacgtgcatgagttccctgaggacgatgggatcaagcaccagttctcccttccct

SEQ ID NO: 33037 - DNA, 370 bp, Zea mays
  unsure (1)..(370): unsure at all n locations
agctttataaatggacgtgaaaagtgtctttctcaattgactaatcaaagaagaggtctatgttgagcaacctcctggcttcgaagatagtgagtaccctaaccatgtatataaactctataaggcgctttatgggctcaagcaagccccaagagcatggtatgaatgcctaagagatttttttatcgctaatggcttcaaagtcggaaaagcccatcctacttttgttactaaaactcttgacaatgatttgtttgtatgcccaatttatgttgatgaaattatatttgggtctactaacgaatctacttgtgaggaatntagtaggatcatgacacacaaattctagatgtctatgatgggggagttg

SEQ ID NO: 33038 - DNA, 442 bp, Zea mays
gggtgccgatggaaaaacagaaatccttgagatcttgattttctaactgcttgccgctgtcaactgttagctcggacggtactccgaagcggcaaacaatgttctgccaaaagaatttttgggcagtctttgatgtgattgtggacacagccctcgcttcgatccacttggtgaagtattcgacggctacgaaggcgaacttgaggttcccctgagcggtgggcaagggcccgacaatgtccaggccccagcgctgaagaggccatgtatgggcgatcagctctgtgtattgcgaggggttgcctgaccgaggagagaacttctggcaagcttcgcaggaccttgtgactcgatttgcggcgcagatcattgcaggccagtaaaaccctcgtcggatcaccttatcagccagggcccttggccacgcgtgcgagccgcaagt

SEQ ID NO: 33039 - DNA, 382 bp, Zea mays
gagaaagacaggatatgtagcgcatgtcaagcacggaagcaagttggtgttcatcatccacacaaaaacattatgacgactaacaggccacttgagctactccacatggacctattcgggccgatagcttacataagcatcggcgggagtaagtgagagcacctacagggggggggggcgaataggtgatcctgtaaaacttaaaactcattgccacaaaaacttggttaagtgctagtgcaataggatcaagtagctgaagagaagttcttgtgaaacacagaaaccacagagagaaacaacatagttgacacaagtgggtattctgtggttcgaccatatacaaaacttgcctactccatgtcgtggcgctccaatagac

SEQ ID NO: 33040 - DNA, 440 bp, Zea mays
ttcttcaacgccgaacagacggcgcggtctttgttgttcaaacatcaaattcaacagctcgggcatgcctctctccttcgagtcgcacatgtgccgtttaacggcaatggcagaaactaccgtgcggcctttgagatgctggaggacattttgaactctgcacaccctctccatcgtgctgtgcaagaggactcctacaagctcgtgtgcatcgatgactcggctgccagggagattgcagagatggtgcacagtgaggctttctggatagaggtggatgctgtgcattcgctcgtgaagctgatatttgatatggtgagggagatggaagctgatcgacctcttgtagggcaatgcctgccgctatgggaagaattgcgcagcaaggttagagattggtgtgagaaatttaacactgatgaacgcgctgccctgaatgt

SEQ ID NO: 33041 - DNA, 379 bp, Zea mays
  unsure (1)..(379): unsure at all n locations
agctngnaacagcagagcgggnggcggttgttgccgtgatttctcaccacacttcatgctccgccactgcgctgcgctcgaacattgctatctctctacaaaccctttaacaacggtaagtacccgcggtgtgtaccactgactcttcatgtggcaaatctccttgtagaagggtgggggagcaaggggggacaaccgacccgtaaaactcctgtgacttctgccgtggggaaactctgtgccccccgtccctgacctgtggttgaagaacggcgcatggccgctgatctgtaatggacgcctgcgattagatcgcgaccgactcattctgaaccgctcatccggggatgcgtggcggagaatcgacccggcctacccc

SEQ ID NO: 33042 - DNA, 414 bp, Zea mays
  unsure (1)..(414): unsure at all n locations
agctatggctcgggattctgtctttttccaaagatattccgaanncttttagccacacagattattccagaaaagtaagcccctggccttttgntatgtgatgcttatgaccattattatccttctgtactgaaattgtcatcgtcatttggcagatacaacctcaaattaacttgcatgctcattcaccctgttgaagaaatattgtagcaattaattcaaggaagtaataggctaatggtagttgttcatctagaactcattcgattccaagttctagctatggccgtgaccggtaacttntttctctgtgctttgttgatgtttgaatggagcatgaagcactaggacatatactatatggaaaatttatttatctactactaagatgcccgtactaataatatgataaac

SEQ ID NO: 33043 - DNA, 227 bp, Zea mays
ccctaagcctactatgtaatctcaccattgcctcacccccccgtaactatgctagcaacaatgctgctagctcgctgcaaactctagccgctctgggcaaaagacctgaatgaaaatcaggtggggatcctgccccccccggtgacaggctaaaaaaaacaactcgaagccgggaatatatggcctgcccaactcttatccacggcgagcaacacgatgccgcttga

SEQ ID NO: 33044 - DNA, 384 bp, Zea mays
ctcgacccggatctctaagcacctgcagctgcaagctgccatacttgtatattttcaacttttgtcagcacagcaactgctgaccataccagtaacctagcctttcgcatgctggggactggatatgattggacctttcaagaaagctcaagggggatatactcatgtatcggtggcgactgacaaattcactatatggattagagtcaagcccaatgcttctttaacctctgctaacgccgcggaattcatacaagacataatattcaggttcgggatacccaacagcatcatcactgacttaggatccaacttcaccagttcagaaatcttcgactcctacgagcaaaagagcattcagatcatgtacgcatctgtagcaca

SEQ ID NO: 33045 - DNA, 399 bp, Zea mays
cccctcaagggaaaacagaggctctcaactggctgcataatatttcatgccccctgacaaaccatggctcctagttggagaattcaatttaatccgtcggccggagaatagaaatagaattggggggatattaaccctatgctgaagttcaatgaagcgataaccaatttagatgtgaatgaaatccctcttcacgggctcacatacacctggtcgaacagacaacaggaaccactacttcaaaagcttgattggtttttcatctcgcaagaatggtcgactgtcttcccagactcctatgctaagacaatgccatgggacatttgcgaccatgttcctcgcttggtttcatttaagtccaaaattgctaaacctacactatttccgattgagaatttc

SEQ ID NO: 33046 - DNA, 162 bp, Zea mays
agcttgacaatgaggagatggctctcgttattatgagctctcgccaaatcctcaaacaaaggagggggaaagactacaagtccccgctccagaacgttcgctacaaatgtggtaaacccggtcattttattgctaaatgtcctatgtctagtgacagtgacc

SEQ ID NO: 33047 - DNA, 453 bp, Zea mays
cctatgaaactcaagcttgctggcctttagatttaaggcttcggcgttgagtattctttctcagcgtttgcaaggatgtctgaagataacaaagttgttggtgattcgaagctgagtctttctgaggaaatgcatctgggttttcttcaatctatgttgaagactaatacagagaagattactagagaaattttggaaggtttatctgaagatactggtgacagcgacagctatgatgtggatagtggtggtgaagactccgaagatcgaccttggcgaccaagccatgcggtttttggcaaatcaagtattaaagaaaatcatcttgtcaacatgaggggaagatatttccgggacttgtccgttgtgagggccgacgaaggagagaagacttgtccaactcctgaggaaaatgaagtcgtggtattccgaagcttcttgaaagctggacta

SEQ ID NO: 33048 - DNA, 459 bp, Zea mays
  unsure (1)..(459): unsure at all n locations
agcttcngcaactntacttgcttcttcctcctgagtccctggcgtccagtcggcgatgaagtctgctagcgcttaggactgaatcgaagatctatgtacataatcaatgttaaactcgttgagttccgcagcccacttttcaatccttccagtagcttctctgtttctcataatatccttcaagggatgtgatgaaggaactattatatgatatgcttgaaaataatgtcgaagcttcctggaggccattaaaacagcatacaacaccttctccaattatgtatagtttttctttgataaactgaggactttggagacaaaatatactggagcctgctttttcaattgcccttcaagcttctcctggacaagcgcagcacttactgtagagtgcgaagctgccacatatagcagcagaggagcccctggcgctggtggagttacagctggtaaatctat

SEQ ID NO: 33049 - DNA, 451 bp, Zea mays
  unsure (1)..(451): unsure at all n locations
agcttatgcccctctaaagatgtccaatttgtaagggcattgctcccatgcctcaggataacgagggttattttttgtatcctgctggttatcctgaggataagattangagaattcatgcaaagaagactcattctcatcatacttttatttacaagaatgaggcttctagctctaggcgttctacacatgttaaaatacctaagaagaaaactcctattgcatcaaatgatcataacatttcatttaagactttcgatgcttcctatgtgctcactaataaatcaggcaaagtagttgccaaatatgtgggggcaaacacaaggggtcaaagacttgtgtttgggtacccaaggtgcttgtttctaatgtcaaaggacccaagaccgtttgggtacctaagaacaagacctanatttgtttataggtttatgcatccggggctcaagtc

SEQ ID NO: 33050 - DNA, 359 bp, Zea mays
  unsure (1)..(359): unsure at all n locations
cactgcaacatgacaccagagggtccaactcaaaaagcaacgcatgaattcaaaataattgcagagcatatcagtacaagggacctggcccaggagcttatggctttcaaggctcttcctagtgtaaaagagtgggaaatgccaaagctgaacggggagaacaaagaaggtgaactcgtgcgctcaccttactacttcaagtctaagaaatactttagaacaccttgccaagaggggctggatacaaatgaagtgacgcgcaatgaaataccttgcacccatnctaaaaaagaagatcagttgatgaccgcagcctacggcacccgtacgatgcgaagacaaaactgagtgctggacgc

SEQ ID NO: 33051 - DNA, 349 bp, Zea mays
gcttatcggatgcaatagccagaatccatggaaggagtgcacccggcataccatgtctctatgttgaggaagtctttgcgggatccgaaccatcaaattgagttggaaccgattgacgtgcagcaagatctgactctaaagtgtcgctcggcgcgtatcttgaagtccttggaatgcgtcatgagaaggagatcaatcaaatatgttaaggacttgtggactaaatattctgagcacgaggctacttgggatcttgaggagctgatgcggcagaagtacctcgaacttatcgttaagggcgaggacttgcgatcgctgatctttattctgacattccaagcgaagcact

SEQ ID NO: 33052 - DNA, 401 bp, Zea mays
catgcaggcttagcagttaggcatgcatctagaccgacctccttctttgcaaaatcaactagagataggctgtcgtctagtacacccttaaaagctaatgaaccatcacttcttataaagacagacaacatctacatgtgtgaataaacagccatatcccatataacaaagttgactcacagacagcaagttatatccaagcgactcaactaagaacacattacaaatagagtgctcggatgaaattcctaacccttttaccttgccttggttcccatcaccgaatatgattgaatcttgcggatccttgtgcctgatgtaggaagagaacatcctctctacccctgtcatgtagattgtgcattcgctgacgataatccagcttgagcccccggatgcat

SEQ ID NO: 33053 - DNA, 318 bp, Zea mays
  unsure (1)..(318): unsure at all n locations
cgcgctcagacaaaaacgcgataatcagagaagccacgagggaaaccgggtgcagccgggcaacgacgacaaagagccgcatgctcaccatttatcatcctcggcggcatcgccgcgttaatcaccgaaatatgtagtacctagaaaagcaaatgataaagctaaacataataaaacaatcaaggctaatccagaaaatggctacaattgctcagcattgtttcgtgctaaaggaaaacgctcatagccgcttgtggagattggcaacatcattactgaaaaggcataaatgagaacatanaagtaattagcacatta

SEQ ID NO: 33054 - DNA, 436 bp, Zea mays
gtcagaaagcaataacccatttattttattcatgcaatccctgcttcgcgcgcaccaaatgcctgacggcacgaagaaccgttgaataatagcatgagaatctttcgctgccgactgaaatctttaacacgagatcacaacgttcctgcactgtgaacataacagaataaactggcattggccatgtcgcagaataaactggcaacgtatgccctggcaggctggcagcgattttttttactaccaggctagaagcctctggccactgagccaaaaagtaaatagatttgcaattggcaaaatatcaactgaccaatgggaccgatagatttgtttattaaaacgagaccacaatttcggcattggcaacatttaacaacaaaacaaggccaaaataaccccacttcacaaaagttgcacgtcacgacttctgctc

SEQ ID NO: 33055 - DNA, 361 bp, Zea mays
atggacatgaagagtgccttcctcaatggtatcttctatgaagtggtctatgttgagcaacctcccacctctgaagatagtgagtaccctaaccatgtttacaaactctctaaggctctttatggacttaagcaagccccaagagcatggcatgaatgcctaagagatatccttatcactaatggagtcaaagtccaaaaagccgatcctactctctttactaaaattattgtaaatgatctgcatgtatgccaaatttatgttgatgatatcatatttgggtctactaacaaaactacttgtgaagagtttatcacgataatgaatcacatatttgagatgtccacgatgggggagtcga

SEQ ID NO: 33056 - DNA, 379 bp, Zea mays
gttcggaatgcagcttgatctaaacgctgccaactccctccattggacgcgacggcatcatccaagtatactgtgtcaccatcaggtacctttctgtgccggcgctgaatgccaaggcggttcgcgaggggaaagaaagggtcaatgctcaccgctgcgcctgcacctgcgctcgggtcgagctgcccgcaccgcagtcgcagcgcttgaagctacagtacatgcctatatgcactgactgtatcaccaacaagacgggagacaggaggctagctccctctgtactgtacacagatgatgcagacttgcagcacacagcctgcatgcctacgtacgacctacctgtgtggcggtggctggatatgccaggcatgcatat

SEQ ID NO: 33057 - DNA, 436 bp, Zea mays
tatcgcgtgggacggtaagggcgctcttggaggcagtactttctttggtggacccacatgtcggaggcacataaggccagtccgtcggtggtgacccacatgtcagaggcacgtacggccggtgggggcccatatgtatgtgacgtataaggccggcggaggcaggtagatggcagaaccagggccgcggttgggaggcagaacgggcgattggcataacacgtcagaggtagactactattgcagccttaataagtagtagagatttttgaagttccaatgttttttctattataaaaacattttatgtagtcaatatcaacaacattatttttttgtttttttgtgttttagaccatttgtttcattttgattgttgtgggtatgatggtttttactcataataatacgttgaatgtttgattgtctcgatgaa

SEQ ID NO: 33058 - DNA, 319 bp, Zea mays
aatgccgtggaacttcacacccactcgttgttcatatagtgctacaggtaagaaggcgaagcgccacaattattacaccaggtggacacccgctcgcactcgctgcgtggtggaccgcaaaaaccgaacagtaactctgccaagcggggccactacacgttgggagaatgaatcgcttctcgacaaccagctcacggaaggtgttttttcagaccttcggcgctccgaagctcataagacttttttcacggatcaagctcgttacgaaaaacgatctagcaccgcgaaaggcgctactgttgggttatgcctccgcgcc

SEQ ID NO: 33059 - DNA, 444 bp, Zea mays
  unsure (1)..(444): unsure at all n locations
tatctnaaaacattggngaattgtgagagtgttaatttctttctaaaactncacaagtatggatcttggctattttaaataccccataattccctattggaactaaaaataatgaaactatttttattaaacactatagcaaattaagagcctagcaaaactggtcacgtatttctagcatttttctataattttctaggaattctctaattccacaagaaaaagagaaaatatgaatagtgttgggcctgaatttggtctaagtcagcccatacacggtggaaacgcacgccgagcgctgcggtgtccactttgcacagagaaccctggcggtttgaaatatctataaagagctatttccattgttcctctgtctcgctgacctttacaaatacacccgtgcacttgtattccttcacataccaaaggtcacgacatcgcacg

SEQ ID NO: 33060 - DNA, 368 bp, Zea mays
gctaaatgcgatatgatgacattactctccgttacttatgtgcctttttcatttgctatttatagaaccctagtgtgggcatgaaccaccccagggggctaactctttccagacactctattacgcttacagtgggatactagatgatactgctagccgttctataaatctgagggccagaacagataatagatgccctggacatacatacaaaagttggggcgaatgggtcactttgcactagcactattaactacggcggggctctgtcctcagggttattatcgctggtttctataagacataacatgttgctgtgccaataatcacagaaggatatatgggaggtatctatgtgtgatcttctc

SEQ ID NO: 33061 - DNA, 419 bp, Zea mays
cagtgcaatttttatgaatgctgcggtaacttcacacctacccggctgtttatatactgccgcaagtgggaacgtaaatcgataagtcttctgcaccggacaaacagacgtccgcacccactgaacggtaggccacaaagcccgagaaggtgaatcgccaagacgcgcgtaactgctgcatggcggggccacctcgcgctcggattagtataatcgtttggcaacgagctcagggaaggagtttttcggatcttcagcatcccgaagcctaagaaactttttcacggatcaagctcgttacgaaaaatgatatagcacagcgaaggggctactgttgggggtatgcttcggagccaaagatgctgcaaaaagaaacaccttcagcagattctctaaaaagcagtgctgacgctatcacc

SEQ ID NO: 33062 - DNA, 326 bp, Zea mays
  unsure (1)..(326): unsure at all n locations
ggaaccaatgggcacctcgacctcgacacgggagggtagtccgtggatcaaaagggataacggccgatgataagttccttactctatttatgtgcatctcgaccggacattatgctnttcgtctgcatgtgtgcaagattccaatccgagcctaaggaataccaccttacggccggtaaacgaatcttgagatatttggcttatactcctaagtttgggctttggtaccctcggggatccacatttgattcaatgcgtattccgatgccggatgggcggtgtgcacaatcaatatgaagagcacatcggcgacttgccagtcttgg

SEQ ID NO: 33063 - DNA, 393 bp, Zea mays
tctcagtgaagaatattccaagaggagaaaatgagcaggcagatttactagctaaataagtggcacaggggatcccactcccttcagatgtattatttgaaactctaaaagcaccttcagtcgagctcatggagcgagcggtgcttacaatctcacatgtacataacgaagattggagaactaagattgtatctttcttgcaaggcaattatcctttagatgatgaagcctacataaaaagaatccaagccaggacaagaccttatattatcatagaaggagaattgttcaaacaaggagtttgttctccactgctgaagtgtttgtctagagccgaaggttaagagctaatgaaagagatacacacacggatatgtggagctcatattggat

SEQ ID NO: 33064 - DNA, 286 bp, Zea mays
gcttgtgaacagtacatatttataagggttattgtctgttcagcagatcagccgaagcccatgctcttatgtgaggacatagtaaagcacaaagtgctgttgggctctcaattatccgaagaacaggagagaaccttgataagggttttgttcaaacaacaaagatgtgtttgcatggtcagctaatgatctttgcggagtttacagggatgttattgaacactcgctcaatgttgacccatccttcaaacccaaaaagcagacgcttctgaaaatgtttgatgac

SEQ ID NO: 33065 - DNA, 441 bp, Zea mays
  unsure (1)..(441): unsure at all n locations
tatctnggngtgctgncgcattatggtttatggaagtatcttgttcactgccgccctgagatggccggcgggcaacatcagttggtcggaggtgccagtttggagatgcgtcgtgggcgaaagaccgagtatctcgagatacccctcaaagacagcattaaaggttggcgtctggagtggtttatagttgataattatggaaattctctcccctcccggtcaggaagacagccagacgttcgtactccgagttggactgagtatcccacggatcaagaagtggtcgatgcaggcgcgttgcttactgaagtcggattactgaaagagagaggtctgactgccgaagctgtggtcacagattttgttttaagaacattcagccgctgaaagacaaggcctatncggcatatctgtaccgaggactggccgactcaacccgag

SEQ ID NO: 33066 - DNA, 121 bp, Zea mays
tattcatcaactggatgttaagaatgtgtttcctcatggcacactctcagagacagtctattggtctcatcccctcggttttggtgaaccctcacgaccaaacatgtttgctggctcaaca

SEQ ID NO: 33067 - DNA, 447 bp, Zea mays
tcagctgagctgtgaagctacacttgcttgcagtccagttatattcgaagctacactctagtctctagctacgggttatagatgaccaataaacacgaggcccgctgtttaggcccggtccgaacccagcacgacacggttctatacgggcctgggccgacccggcacgaataagcgggccgggctcggacaagaaactatgcacggtgggatagtccggcacggcccgtttacctctaagcacgttaagcccatttttttgcactaaaatgtgttttcggtccatttagcccgcttttcggcacgttttttcgtacggcccgtttaggcgcgctacgggtcagacttggactgagatttaagcccgcgggcttagaaggcccgcgctggtttcctaaccatgcctaacgggccggacccaaaacgggtcgggcttcactgggcccg

SEQ ID NO: 33068 - DNA, 242 bp, Zea mays
acatatcgtaacgactctcatgcgttatgacctattttatcacttgatcttgtagtctctaatcaaaacaagtgcaacgccacaaccttttatcagatgagatcgtcttcttttaccctggtgggacgtatataatggaaccctaaacactgaacattattggacagccatctctgatgaagttaaatggaccgtacactcatcataacaacagatgaagaatggattcgcactcatcgtca

SEQ ID NO: 33069 - DNA, 447 bp, Zea mays
  unsure (1)..(447): unsure at all n locations
atgccctcaagtcgaagctcacacaagcaccactgctgttcttcctgattatgacaagacattcgagctcgagtgtgatgcgagcggcattgggattggaggagtgctcattcaaggaggtaaacctgttgctttctttagtgaaaaattgcatggtccaactctgaattattctacatatgacaaagaattatatgctttagtacgagttttgcaaacttggcaacattatttatggtctaaagaatntgtcatacattcggatcatgaatctttgaagtatcttaagggacaatctaatctaaacaaatgacatgctaaatggattgaattcatagagtcatttccttacattattaagcataaaacaggaaaggataatgtgattgatgatgctttatctagacgttatactatgttgtcccaacttaatcatagaatctttgg

SEQ ID NO: 33070 - DNA, 447 bp, Zea mays
  unsure (1)..(447): unsure at all n locations
agcttatcctaangggtgatgcgttagactgagctttttctagtgtgatgcccatacgcntcttgcaatattgctcatatggactattgtttccgctgcgatgaattatttggcttctatagtgcaatagatagacatggggttaatggtgctttaagattgtcttaaattagtggcttaatttaaaatggcaatactttgaattggtctcttaatgatgaatagcggtaggttgatattcccgtgatatatccactattttgaatggtgtctaactctaatcatgtgcatttgcgtattatagcatcatgtgttgactcttaacacaatgcatcctaaaaagtgctaagatgtagaattgtttcgaattgctaagtatgtgcaaatcggcgttgaggccaaaatacgttcttgaagtcgcacatattagggggaccttctataaac

SEQ ID NO: 33071 - DNA, 396 bp, Zea mays
ctggactgctacagcgacatcgtgcgcagcgagcaccacctcccacgccaagcccctgcgcaatgtcgatgaactctgccttgacgatgccacacggatcttgacctcaccggcgtgccccaaaacacgttaaaagggtggccagccatggcaaccaccatcgggctctgggcgtcgccaccctgtgtgctcacgccaccacagttcgtcttgaggaagaagaagctcgtgaaccgcatgctcggtgatgaacggctgaggtgggtgatgggctcgtggccatacatcagctagtggacggcttcgattaaatcgcttggaccccttcgacccacaaatcatggccatagattgtgagatacacggcggatccggtttcattaactcggagccaac

SEQ ID NO: 33072 - DNA, 345 bp, Zea mays
tctcacttacgcacagaccgagccagagctctaagcatcaacaggtgacatctaccctgaatgcgaaaaggatattggggatattgaacggtcaaccaaacctgaaggtgaagcccaatatgaccatgacttctgagttgttcgcgtacaagatcaaatatgggagaacatggagggcaaagcagcgaacatggaagatgatatacggggattgtgaggagggctatgagaaactaccaaccttggtcattgcaatgaaagcaaaaaaccccaacatgcgttacatgtacatccccaaacctaatgaatggaggaaccacacgaagatactttatcgcgctttct

SEQ ID NO: 33073 - DNA, 327 bp, Zea mays
gcctagctaccggcgcatacgagcgaccagaaaccaaaccctcgactagagaatagccctctggccacgagtcgagctaagctactgtaaccacaccatgctcatcctgcgtgcagcggaagacacatatggtgccgacaccatactggatacgacgcggaactagatgccatacctcagtccgtgcgaaactgaggagctactcgtgcatcgccaccacccaatgcgaatcttaaagagctaactctaccctctgcggctcaatagaggaaacacaagagtgatggcacagaaatgacaacacgagaactagaggcacccccttat

SEQ ID NO: 33074 - DNA, 417 bp, Zea mays
agcttgtgaagggtcttcatccacacatgtgctaatttgttatgccacagccagcccatgctagtcttagctattaagcatgcatctagaccggcctcttcttttgcaaaatcaactaaataaagtttgccgtctaatacacccttaaaagctagtgaaccatcacttcttctaaagacagacacatctacatttgtaaatagacaggtatatcccatatgacataattgactaacagatagtaaattatatccaagactctctactaaaaatacattagagatagaatgctcattagaaattgcaattttacctaatccttttaccttgccttgattcccatcaccgaatataattgaatcttgggaatccttattcttgacgtaggaagtgaacatcttcttctcccccgtcata

SEQ ID NO: 33075 - DNA, 403 bp, Zea mays
  unsure (1)..(403): unsure at all n locations
gagcttggatgtgtctattggttgtctacttggtgaagactgcttcttcttctcctctgtcgccttaaatgccaccggttgtgctntggacgtggagggatcatcaagctcgttgatcttattggagcctttgatcatgcattcaaagctcacaaaattcccgataacttcctcggcggtcattcgagtatatctacgattaccacgaattaatagaacttgagtagggttaagagaaatgagtgatctaagaataaccttaaccacctcgtggtcatcccactttatgatcccgaggttgcgcactcggttcaccaaagatttgagccggttgtacatgtctngtggctcctcctcttggcgaagacggaagcgaccgagctccccctcgatcgtatcccgc

SEQ ID NO: 33076 - DNA, 424 bp, Zea mays
gttagcatagtgacacgcctcaagagagagggcggctctcttctttttttatgaaaagaccaatcggcccatgataatctatgttatgattgaaccgactatgaataacacagcacgtaatccacatatgctgcgccctgtgcctattaatagatgaacaatacccctgtactgttcatgctgacgtagactcgctcgcgcattacgcttgtactatttgcttctgtcaagccgaaggtacaaatataagtctatattattactgattattcatgacataatcaaggtgaattgataatattatataattattcacgatgaatactatgtgttacatgcatgttctttcattaatatatactgcaatcatgaacgaatgtccttcatgaccttcgtctaaagatcattataccctaaaggagat

SEQ ID NO: 33077 - DNA, 318 bp, Zea mays
aaatcagcgtgacagctagatagatgctgaggatgagagcaacctattttctttgggaaccctcgctcggacggtatggccctgtttggcacacttggtgcttgttaaaaaatcaccttatttgataagctggtgaaaagcaacctctgcctatagtctgctcttactgtcatttcgtaaagcgcatgaactgataataccgctgcacgaacctccctgtttggcacaacctctgcctaaatttgtgaacaaactgaataatatctgtgcctaacacgtactatcactttgacacataacgctcttgataacgataaa

SEQ ID NO: 33078 - DNA, 454 bp, Zea mays
  unsure (1)..(454): unsure at all n locations
agcttcatcttttgattgtaagagatacacattacacattctattagagncatcgataaaagtaataaaatatcgcttgcctcctttagtcaatattccgttcatctcacataaatcggaatgtattaagtctagtggtgccaaattcctcgcctccgcagccttgtgaggcttgcgaggttgcttagattgcacgcacacctggcacttagaacctttgactaaatcaaatttcgggattaaattgatatgacaaagtcgtgaatgccaaatatacgactcattcgaaacaacattgttcacagacttattacacgcatcatgcaaagataagcggaacaagcctncgctgtcatagccttttccaacaaacgttccatacttagacagtatacatgtattagactcaaagacaatnttgtagccatctcgacacaattgagagccactaact

SEQ ID NO: 33079 - DNA, 451 bp, Zea mays
  unsure (1)..(451): unsure at all n locations
gggatcagggccgaaggtctcagcatagatccacatctgttcttcttgctntgctggagttctcaccgacaatagacattggagagcttctaaagcaggggccagagatctagcagacaaccgaacttggagaagtcggttcagagttcacgtagatgacagcctcggtgacgtcgaagaccaacgtgaccgctcgacggagcttgggtggcgtcttgctccggtgtggttgcgttgcgagatcaattaccaatcatgaactgatagacatgggctgtaatcagctttgtccatgacacaccagggccattgggcctatgccggaataaggcctatatagctggttaacaacgatgacataaaattgtgaatggatcagacacgtcagtttatcatttcgttcaatgcagttttggtttattctatcagctgaaaagactagaactgatac

SEQ ID NO: 33080 - DNA, 483 bp, Zea mays
  unsure (1)..(483): unsure at all n locations
gatccttaagtcacctgcggcatgcaagctnggnggacctgtacaatatatgtggatgtatcacatngaacgcgcactcaaaaacctgcgaggcatggttcgaaataaggctagagtagaaggatgcatcgctgaagcttttttgctaaaggaggtttcatacttcacgagtgtgtatttcgcagaggaacataatgtctatgctgctaccatgcgatacaatgtcgatgaggaacctctagtcagtgatctcaacattttccaatggagaggcacaagtactagtaagggcatgttctaccaccttagcatggatgaaaaaatttcctcattgctatacatgtactctaatatggaagagatagagccatatttcatgtaagtctttattttaccccttaatttctttaccaaaggagccatatttaattacttatttgtcgtatagtaagttcgacgaggaaaattggacttattcccatc

SEQ ID NO: 33081 - DNA, 449 bp, Zea mays
  unsure (1)..(449): unsure at all n locations
tggaggtgtcaattggaatcctacttggtgtagatttcttcttttcttcctctgtcgccttgaatgcgacgggttgcacctcgggtgtggaggtgccgccttgctccaagttgataatttggttggagcctttgatcatcatttcaaagctcacaaacttccctataacctcctcgggagacattagcttgtatctaggatcaccacgtatcaattgaacttgcgtaggattacaaaaaacaagtgatcttagaataaccttgaccatttcatggtcatcccatttttgctcccgaggttgcgcacttggttcactaaggtcttgagccggttgtacattgcctatggctcctctccttggntgaggacaaaccgaccgagctccccctcgatcgtctcccgctcggtggttcttgtcacctcgtctccttcgtgcgcggtcttgagca

SEQ ID NO: 33082 - DNA, 397 bp, Zea mays
cttggttccttaacgagccgagccaactcgctacattaacgagtcagcttgagctcgaatgagccaagcagagctgactcaatatccaaccctactcatcgacgttgtttgcatatatatatctttttccccacatctcaccgataagccttgtctcactgatgagccttatctctagtacgtgatgaggacatcactcatatacatacaatgcatgaaccgataacacgagcacgtgcacgtagttgaatcttcaggttcgttctaacatagtgaattgtgtctcagagcttacgtctggtgtcaatgatgtttcgatgattaggaatcttggagaagaccaacaatgacttggaaagggcctatgcgacaatgacgagaagctacgacgtccaca

SEQ ID NO: 33083 - DNA, 443 bp, Zea mays
  unsure (1)..(443): unsure at all n locations
tggganagctgcacggcctnccatggaagctatccgcggttctcttatcgagcagaggtgggcgggaatggttnggtcacngcgggcgccctctggcggctctagcgggtcgcggagaggtcgccggagctgcgggctggctcatgaaagctaggcatggtgcggagggggtaacagggaaaatggccgtgcatgagggcgggctttatagccactcgcgggcacgatatgggtgtgggcacagggacggccgacggcgcgcgggggcgcgcgtgcgaacgagctctgggcgtgttcccgagtgcctgcccacgtcgaacacgtggtggtttgcttctaccggtgttcaaaggcctgtatggttgccttatcgtgtagatctcagcaaaaatctagcgtaaggatcttatctacaccatatcctatcttgtcatgtgagtcca

SEQ ID NO: 33084 - DNA, 319 bp, Zea mays
agcttcgacaacatctctgtctttatttcttttgcaccaagaagcccatcaaagtagcttagctccgctaatgctttccagacatcattttctacaaaaccacgaaacataacaggaaggagtctttccatcatatgtggtagtcatgactcttcaacccaaaaaacttgcccgtcttcaaaatcacagaacttctaaagcccgcggcataaccatctgggaacattaagtttctcaaccattctatcaaatggctcttccctttaggcgtaatactaaaaggagcacggggctccttctgactctctactatctccat

SEQ ID NO: 33085 - DNA, 312 bp, Zea mays
  unsure (1)..(312): unsure at all n locations
cacatgtgatgcttaccgcgttgctataaaagtatatgttgccaaagaataatctttacctatgcataggggggagntagcctaatccatcatatcttgctcctctctttctcatgagctcttcctaagtagaggatctccgaccgcggagtatatcttcgtctatgacaaagggggagaataccctcttcaagggggagaacactattttagggggagtaatcttttagagctaccagtggtaactcctttagagggccagcattattttgcttcctatatgcttttagtggcttccttttcgctgtttga

SEQ ID NO: 33086 - DNA, 254 bp, Zea mays
  unsure (1)..(254): unsure at all n locations
actcagcttcttgagctgctgccananatgagatgtgaactgcgttcctctatctgacactatcttcttcggcacaccatgaaggcagactatccgtgacatgtataactcanctaacgttgctccggtgtatgttgtcttcacgggtatgaaatgggccacctttgntaagcggtccacaaccacccagatggaatcatagcccggcccggtacaaggaagcccactatanaatccatcccgaactcatccca

SEQ ID NO: 33087 - DNA, 242 bp, Zea mays
atttgtaaactataggatcaaactttatgtaacccatcacttactggacttagaatggtagaggagctccggtactctggaaaaaccttcctgaacatgactccactggttggcttcagagtgcccaaatgtaacgctagggctatcaatagcgttaggagctaaatgatgcatatagatcccaaatttgttcagaacatcttgaatcatcctatactatagaaatcccaagctcactttga

SEQ ID NO: 33088 - DNA, 359 bp, Zea mays
catgcaagcttcactggctactggcagattttgtctttttcctggacgggctggagggtgggtggattgggctggccaccgtggtcgtatctctggcggctatggcgggcggaaatgaactcgtcggagctaaggaacggcggctggtcggtgagggtgagtgcagtgcaaatagaggtgcgccccgggaggttttatggcgcggtcgagcacggtcgatggcgttggcgcgcggaggacttgaccggactcctttgcgaacgcgcacacgggtagggcgaactctggcgtgccgaccatggtcgaacacttgtgcccgttctttctaaccaacgatctttcgcgagtgaactctcatt

SEQ ID NO: 33089 - DNA, 358 bp, Zea mays
agcttcttcaccatgttatcactgttattttgagaaggctgagcatgacacttttccttcaaaagagttaagctccttctaagccttccaacttcttccttgagctctttattttcttgtgtgatagaaatatcactaattcctgaaatttctagctcaatggaagattggcttgcttgataacaacaattgttagcacatggtaatatagtttcaatttcaacacatgtgcacatgtgaggttggtatgatttcaaactagttaacacaacctcatgagccatttctaacatgatatgtgaatccataaatttattatgagagcatacaagcatatcatgtttttcttgcaaagcta

SEQ ID NO: 33090 - DNA, 405 bp, Zea mays
  unsure (1)..(405): unsure at all n locations
agtgcatgaaggaaccagtgtgagcgtactgtatgtggtaacacgtcttatggcgatgaagtcaaagtacaccttctcaaacaactgttacaacgatattgtgaaactgattattgatatcagcccaccgaatcataacatgccgaaagacttgtaccattgcaagaagctcgtagctggtttcggtatgaactaccaaaagattgatgcttgcgaggacaattgcatgttgttctggaaggagcatganaataccacacattgcatccactgcagtaagtcaagatatgcggtggtgctagatgaggatggaaacgagggtacgacaaaggtgccgatcaagcaactccggtacatgcctatcactccacggcttaagcgtctctttctaaatcaagagacagc

SEQ ID NO: 33091 - DNA, 367 bp, Zea mays
  unsure (1)..(367): unsure at all n locations
caagctttcatgagaatataagnactatttttttttttagtacaacttatcaccctcagactgatggacagactgaaaggactaatcaagtattggaagatatgttgagagcttgtgcccttcatcatggaggaagttgggataaaaggctaccatatgctgagttctcatataataatagttatcaggccagcctgaagatgtcaccttttgaagctttatatgggaggaagtgcaagactcctttgtattgggatcagactggagaaaggcaattctttgggcctgaattgattcaagaagcagaagaacaagtccgtataattcgagagaatatgagggtggctcaaaccacgcaaaagagcta

SEQ ID NO: 33092 - DNA, 459 bp, Zea mays
  unsure (1)..(459): unsure at all n locations
aactatgcccgtatccaatctgcctgagccggtactatatgctttttgtatgngcccncgnacctggncgaccacgaccaacacccaacataagacttccctagttatttagccaagaccagagccatgatagttctcatggtagcactgttttcccgggtggtcacttcatgttcaaattaatatgcaataatcttgtttaaccatcgggttaacaacaataatgtaaacttaccatttggaacattaatatcataagcgggagtgactgcataaagttaagttgtagcaatatcatagctacgacaggtaagtataattcccaggtgtgatcaacgaataaaggtggacaggctatctaaataggtaacccgtcaaattatgcatatatatccaacagaataaactttattaaatgtattatttgggatcaaatagagtatgcagagggagaagtca

SEQ ID NO: 33093 - DNA, 356 bp, Zea mays
agcttcatcccccctctgctggttttagggcctcacattgcccgaaccaggataaatcgcttgtgtcaactcgcacaccatctaaattctgggcacgcgacatcatttcactagttggttaggatcgctagtccaaacacagacacatactaatttgaattctaatagggattcattaagatggaacttgactactaatgggttgtttactgttcaatcaactctcaacaatggggtgggaatggataacaaggacctttggaaacttaagatacctttgagaataaaagtttttatgtggtacctcaaaagggttgtaactttaacgaaagataactcgggtgggaggaattggg

SEQ ID NO: 33094 - DNA, 90 bp, Zea mays
gtatagctgaccctctaacacacccttaaatgctattgaatcatcacttcttctaaagacagtgacacctacattaataaaaagacagtt

SEQ ID NO: 33095 - DNA, 349 bp, Zea mays
agcttgccagttcttatcaaagtttttacatttaccagcacagcaactgcggaccatacccgtaacgtgtccatttgcgtgttggggactggacatgattggacctttcaagaaagctcagggaggctacactcatgtattggtcaccattgacaaattcaccaaatggatagaatacaaacccattgcttctctaacttcagccagggcagtgtaattcatacagatataatattctttgatttctttgggataccgaatagcatcataaccgacctgggatccaatttcactagctctgaattctttgatttctgcgaacaacggagcattcagatcaaatatgcgt

SEQ ID NO: 33096 - DNA, 497 bp, Zea mays
  unsure (1)..(497): unsure at all n locations
tatctgcgcatagcttcgntatgatcttatccttcttcacaatctcctttcgtcccactcaagcttcgtcttgaccatacccgattccgaagatgcatgttcacacatttcacttggaaaacattgtcaaatcatgtttttgaggaccttcggaagccgaaggcccccaacagtagcccctcgcaatattaatttgctggaacgataaattcatattgcgacatggacgaaggctttaagccgaaggtccgaanaaacaccttccctttgctagaatagcaacagtctttgacaagcgggaccctccagttntcgacgcactaggtgtataaataagagctcaccacgagtttatttggcacgctctcttgccatctgcttttactcacaccaactttagcctgcgcgcaacaatacttgcttggctattaaattttaagcttcggtttcgaaagcctnntctcaacgttgaaagatgtctgaagataagaaagttg

SEQ ID NO: 33097 - DNA, 348 bp, Zea mays
atcttgtggatgactaactttattattttaagctgcaggatgattaccctcatattttggtatgtaaggtgagtgacactaagcagagtgcaggacctgtctcggttgactttgccaggcttcggctactgcgatttgcttatgcttttggataaagatttggcacattcttgtaaaaaggcccttgtcttcaccacaaaatagacagtaaattttcctaagatggttcccatattttcctccgaaacccctggcgcctctgcctattggaactggtggccgaaaagaaatttgatgctgccctcaagattattaagaatactgcgggcctttgaagctgactttctc

SEQ ID NO: 33098 - DNA, 455 bp, Zea mays
gagctagcacgaagcactgtctctactctatgatggttgtagtgggctggccacagtggccgaagctgtggcgacaatggcgggcggaattaatctcgctggagctaatggaaattggccggccggtgatggtgagtgcgacgctaagtgacgtgcgccctgagaggctttatatgcgcggtcgtgcaccacctagggcgtgggcgcgctgcggacttgaccggactcctgggtgagcgcgctcgcggtgtgggcaagctctggcgtgccaccagggtcgaacacgtgtgctcgtgcgttctgccaagttctgcgcgtgaggcgctcattcgacctgctctcgcttgacaatgacaaaacctttttctcctacaactaccatcatgtgtggtggcatagattttgttactggtgtcagatattgaccagcaattctgtctgtcttctgccatacc

SEQ ID NO: 33099 - DNA, 363 bp, Zea mays
agcttcaagtgatttgatgtttctgttgaatcattcccaggtttaacttctccatttcttggcataacgtaatgttagaagtcttcattgtcaaacaatggcaggaagccttgtgacttaacgcatctgccactacattggccttgcctgggtgatagtgaatctccaattcataatccttaataagctcaagccatctcctctatctcatattcaactctgactgggtaaagatatacttcaagcttttgtgatttgtataaatgtgacagacattccccagcagataatgatgccatatttttagggcatgaaccacaacagctaactccaggtcatgagttggataatgttcctcatgcc

SEQ ID NO: 33100 - DNA, 445 bp, Zea mays
  unsure (1)..(445): unsure at all n locations
ctctcgactaagtcngggacagggcctcatgaactgttgaatgtactcgtaaatggcaaggccgaccgagccgagggattcccacgcctctgggatacggatacctcactcgtcccttccgcgagaagcaactctcgctcgcacaaacatccctgttaccgacagggtccagatgctcgaaacaagaggaaaaaagacgcagcttcgcaagcgcggcgagggtgtgtttttctggcctcggcggccgcagaaggcacacgctacaagacgatctgatcctgcaggctcgggtcttcacgctgaagggagctatagcaccctcggcatcgacgacgtcttcagcaaaatccgacccagcctcgggcggcgacgcggtccagggactcctccgggaatccggcccgggcaggcggctcggccggttacccctatggcctcggtcaac

SEQ ID NO: 33101 - DNA, 353 bp, Zea mays
agcttgtgaaggttcttcattcctacatgtgctaagcggcgatgccacaggcagcccatgctagtcttagcaattaagcatgcatctagaccggcctcctcttttgcaaaatcaactaaataaagtttgccggctaatacacccttaaaagctaatgaaccatcacttcttctaaagacagacacatctacatttgtaaatagacaattatatcccatgttacataattgactaatagatagtaaattatatccaagaaactcaactaaaaacacattacagatagagtgttcatttgatattgcaatcttggctaaaccttttcaccttggcttggttcccatcaccgaata

SEQ ID NO: 33102 - DNA, 306 bp, Zea mays
cagcttaccaatggcgtaagaggcttctatttgttcttctagagaggctatgggacaacctccggcttgaaatatgagaccctaccatgtttattgctcttatgcgcttatgggctaagcagcccaagagcatggatgaagccttagagatttcttattgtatggctcaagcggcaggcgacctattatcactaaactctgacagattgttgatgccaattatgtgagaatatatgggctctacaattctatgaaaattatagactaccaaaatcagatgctatagggagtgagatttctagatca

SEQ ID NO: 33103 - DNA, 351 bp, Zea mays
agctttcaggaattattactcgtttcccaagagatcttatttcctttttaaattaattctggaaatttgtttttttataaaaacaatatcaaaaatacttgagaacttataaaattcataggtaattcattttaactccaaattgagtcattccagttgcaataattttgtattaatattgtctattaactagtaatactgtttagccatgaaacttgaattaaaattgttcattaggattaatctattctaagcactaaataattttagaaattcataacttaataaccgtagctccgaatttagtgggtccttgtttctacgaactcgttatgcaaaatagaatattat

SEQ ID NO: 33104 - DNA, 405 bp, Zea mays
  unsure (1)..(405): unsure at all n locations
tctccccgcagacccagcaattgtttgctagccccggnttatatgcataaccatagtattatatgctactttactacacttaatgcttgcaggattgtaatgtgcacttaagtgtaggagttgcttgaaacctctagatgcatgaacttaagaattccttttgagatgaatactagtatgctaggtcgagtagctgctcgctaatcaggatctcggtagaagtcgagtaatttttctagcactcgcgcgaggtcaggaattgattgtattcatcttgataacgggatctatgttagtctattggacttggatccaggaggatgccttgaccatgagacggggaaaagaataaggattaatgtgtggatacctgagtcaagcttttgaacgactaagcacatgccg

SEQ ID NO: 33105 - DNA, 506 bp, Zea mays
  unsure (1)..(506): unsure at all n locations
tcagcttctaggggctatagtaaaagacacgctgatcaaaagtacttgttttatcgcangaatgtgtgtgtatcttcggaataaacaccatcttacacaacataacatcatcgcatcatttcgcatagcataagcatcatacatcatgctgcatatggcacaagaaggggacatgacatcgatcttcggaagaatgttntgaaaggggaaaatcatgctaagttgcaagcagatacactattgatcttcggaagtgtagcttcggagaacatcttcacgaagcttggatattattcatcagaacactacgaatattgttgtgacaaatganaattattcttcacgaagcatgaaaagaagggaagatgttntttcgtcaaagactcanaaacggtacgtatgtaaaatttcatgcatcgtaaagaataaacaataaaacaggtatttacattcnggctcaagatgcacacatattacatttagaagttttttacaatagattaatc

SEQ ID NO: 33106 - DNA, 359 bp, Zea mays
agcttgacaatgaggagatggcgttcgtcttcaagagcttccgccaaatcctcaaacaaaggagggggaaagactacaagtcccgctccaagaaggtttgctacaaatgtggtaagcccggtcattttattgctaaatgtcctatatctagtgacagtgaccgaggcgacgacaagaaggggagaagaaaggagaagaagaaatactacaagaagaagggcggcgatgcccatgtttgtcgggaatgggattccgacgagagctcaagcgactcctccgacgacgaggacgccgccaaccttgccgtcaccaagggactcctcttccccaacgtcggccacaagtgcctcatggcaaag

SEQ ID NO: 33107 - DNA, 102 bp, Zea mays
acgctgtcttaccggcatatagtggagagtctggggacatagcagcgcaggaatttagcagtagtgcagtgattcagcagtagcagccaggaggacttcagt

SEQ ID NO: 33108 - DNA, 340 bp, Zea mays
agcttcaatccttcggaccgtgtcatatatttctcaagctacgggtctgttgctttacaacctttgtcaatatgaccagaaataacctgggaatcggttttaagaaccgcccttctaatccccattgcctttaacttccgaagacccaaaagcaaagcttcgtactcagcaatattatttatgcaactaaaatcaagtcttgctacgtagcaagttttaactttggagggtgcaaccaacacagcagctgctcctgccccgaaggttccccaagaaccgtcacaaaatactggccatactttaggatctttaggtgtttctttttcttgagcccctggcg

SEQ ID NO: 33109 - DNA, 311 bp, Zea mays
  unsure (1)..(311): unsure at all n locations
agtctactacgaggtagattcttctacatcgccgtctccttcgagcgaacaggagacctcttccagatgtcatgaaaataaatcgggtaaatctaaattcaatcgtattccttttaattattctcgcatttctagaaattgattgccgaaactactttctattcctctaagcaagcctcctcactatgatggngaggattattcttggtggaggcataaaatgagtaagcatcatttttctctccaccctataatttggggtttagtagaaaatggaatgcaaatatccgatagtgatgatgatcattttg

SEQ ID NO: 33110 - DNA, 341 bp, Zea mays
agcttttcttccattagtgctacctttggcctatcatgtatatcatcgttccagacttatcccttgtatggccacaaatccaatgaaacattcacatttctgcaacacttatctactgaacatgccttctttgtaggataacattttacaccatgcaatatagtaggtctaaaagcttctatgtgtagtagagccttctttagttatattccatcctttcaagtctcctttcacattttccccatatcaacttcggcattctcatgcctctcttctcatcaaggatcccactacgcattgatacctctagaggtttctgttgaacatgtctaaaccatccc

SEQ ID NO: 33111 - DNA, 471 bp, Zea mays
  unsure (1)..(471): unsure at all n locations
ctcaagctggagctaaactagacattaacatattcttggtcctcggagccagaagagccatatgtcttgaccactagactactagtgatgataatttgtgatagaaatatgaagatcttatagagacctgttgtatcctctctactcctaatgatttcttcgtacgagagcagtactatctgttgttgaagatggatcctagccggatatcagtattgtttcgttcttgccaagcagttatcatcatttgcttcatcaaaagctagttatatggtgattntcctagataaaatgaattcttggccttgtctgttctattccaaagcttctctttttgtcgaacaacgaagagatcgaaataatgctttatagaacaaattggtatataatatgaggagaaatggttgtcatgctggcagcatcacaaatgattaactatgggtataaattctctctcaaattatcatacct

SEQ ID NO: 33112 - DNA, 365 bp, Zea mays
agcttctgcttagcgatggaaaatgaatctctcttaaaggggaaaaggttgtatagtcctcgatagatttccctaagtaaatagtaaatgtcaagcgcgtgaatgtaattctacacaggctgcatcctgtgcctataaatagatgaatagtgacaacatactgttcacgctgacttgtattaactcgcgcgtcacacttgaacttttgccttctgtcaagccgaaggtacaaatgtaattcaatattgtttatgctcattcatgatgatataataaagatatattaatgatatcctatgattttttatgttatttctcacgttatatatgcttctactttcattaatataaactgtgatgatgaa

SEQ ID NO: 33113 - DNA, 449 bp, Zea mays
  unsure (1)..(449): unsure at all n locations
cgatcagatcgtggggggagtactatgggcgccataccgagtatggccaggtcccaagaccttttgcgaggtttctaagagaaaatggtattgttgctcagtattcaacacctggcgaaccacagcagaatggggttgccgaaaggcgtaacagaacgctaatggatatggtaaggagtatgctaagttactctaacctgccattgggtctatggatggaggctttaaaaaccgctatgcatatactcaataaagttcctagtaaatcaatggctagaactccatatgagttgtggacgggcagaanacccacactcaactacttccacatatgggggtgtccagcagaagctagaatatttaatcctggacagggaaagctagatgagagaaccactagctgccattntattggctaccctgacagatcgaagggtacagattctact

SEQ ID NO: 33114 - DNA, 349 bp, Zea mays
agcttgtgaaatgttgtgtatattgtgctgtgatgcctgtctgtgagtaatcctggtttatttgtttgtacagcgatgtatgtgatatgatctgattggttgcctttaatgccgtttgtttagccccaagctgtgaccattatcttatttggcttgtacattcagagggtgatgctgtaattggaagacacgaagccaattttagaatctaatgctgatttagcaactttaagattgagtctttgagagatcaatcattttatgtgaggaaacagtttgttagatgggtaaaaaccgtattttggaaattctaagatctaccatggtttgtatccatggcccattggcc

SEQ ID NO: 33115 - DNA, 285 bp, Zea mays
ttttttttgctctcaagagaggtgactaattaaaaatgtatacgattgtaccatatattatgaacattaaagtgacctcatgtaaatcttaaattcatcatgctttctggattatgattgtaactattttgtcaagccatgaaaattcttgattctcttaaatccacttctgtcgaaactattatactctctgctaaaaattttacttgttattacttaacttggaactgcctttaatgaccatatgtaatataactacaattatggacgcccctaactgctttc

SEQ ID NO: 33116 - DNA, 353 bp, Zea mays
agcttatagtatgcattgtttttttttttttaaatagagcaactcctaaagatgtgtatcccatgcccatagccgacacattaatcaataatgcatcaggaaatagaattattacctttcttgatggtaatgacggatataataagattttcatggccgaagaggatgcgcctaaaacgacctttatatgtctaggcttcattggtttatttgagtgggttgtcatgacatttggtctaaaaaatgcccgtgctacttatcaaagggctatgaatttgatctttcacgaactgttgggaaacactgtggaagactacattgatgatattgtagtaaaatcggctgaatttaaa

SEQ ID NO: 33117 - DNA, 397 bp, Zea mays
  unsure (1)..(397): unsure at all n locations
aagctccacaagggcgaaaaagactacaccaaactggcagttcanagacttattacttgcgcaccagaccaacgtaacagatacaccagaccaggtacgtaacgccttcgtgagcatagccgaatgtgcgaaggcacacaacctcatcatacaagctattacatatgtacaagcgagggcatcacactntacatcggctcaaccttcggaataattcccatatccctatagttaaatagcatcatccttagctcctcacccgcaaaaagacttcgcagctccccctcacctgcactcacagcggctggcaaggacaacagttcctgcctgccagccctactcacacgaagccgaccgtcgtncgcctcactcactctacgcttcgcaaccgcccttc

SEQ ID NO: 33118 - DNA, 347 bp, Zea mays
agcttgaagccaggtatttttttatgcttataatatacgaatggactcgagcctatctacgggtgcataggtttcaccgaaatccaaaccttcgactcgtgaataacccttggccacaagtcgggctttgttcctagtcaccacaccatgctcgccttgtttgctgcggaagacccatttggttcctacaacattttggttaggacgtggaactaaatgccatacctcattcctcatgaaattgttgagctcctcttgcatcgccatcacccaaaccgaatcttgaagtgcttcctctaccttgtaggggtcaatatagggaacaaaagaactatgctcacaaaaac

SEQ ID NO: 33119 - DNA, 345 bp, Zea mays
agcttcaactttatatatattatggtttgtctcggaatcaatccagggtcattggggccttctgggagcaaccggactccgatgaatatccataggcccatggtacgaaggagtattaatgctaaaataagcggggccaaaagatgcatctaactcatataaggtgccacgacctaagagggcgttgtacgggcattacatcgtgaccatatcatgcactaattgatcagaccttgcgaaattcacacagccgaacggtcccggcatgcttttttttcggagtgccccaatctgccgaactccgaaacctctaagagggtgagtacttacatcaaccttggcctc

SEQ ID NO: 33120 - DNA, 362 bp, Zea mays
agcttggagatcttgggttttcatgatccgcatgagcatgaatccatgtgggatgcggcgctctgggctccgacggaatctcactagcccaccaaacgtcctttgagggtaatgatgatgacgagccctaattggaatctggtgggggaggtcttccctttgtcgacttatagtggttgtcgtggtggtggtgttggtgtatgagaccgtggccccaacgtatttcgaggtgactattaggggcccactttggtcaaatgtcctcaattaatagattatcagctatttctaagtctatttcaagtgtaatatggtgaatgtcgaagggctacttcgtctagagatgatgtgcctttatcacg

SEQ ID NO: 33121 - DNA, 426 bp, Zea mays
  unsure (1)..(426): unsure at all n locations
actcagctcttaaaactggctgcatttcctctggcatgtttgttgttttatttctgaaaatatcaaatgtaccttgatcaacttacccccgaggcagtgataagattgggaatcttcgtctgggcggtgaggagccaaggtctggagccaagtgcaagaagcttttgcaatatacacgagctagtatatgagacgaaaccctgngtaaggagcaatatcataataattttggttgctacagcttcggcgcccgctctgggtcaagctgtcctgtgccaacctttcggaagagatggcccggngaatggatgaaggaatggttctatgtgaagaacgatttgaaggttcgggaagatatcacagatatcatcatgcgccctatntggcagcgctntggacttcggaaaccagaggtggaaatggatg

SEQ ID NO: 33122 - DNA, 349 bp, Zea mays
agcttgaagccatggtaattattcttatgcaagtaatatacgaattgactggagcctagctacgagtgcataagtctcatcgaaatccaaaccttcgacttgtgaatatccctttgccacaagtcatgcttggtccttgacaccacaccatgctcatcttgtgtggtgcggaatacccatttggtacctacaacattttgattatgacgtggaactaaatgccataccttattcctcgagaaggtgttgagctcctcttgcatagccagcacccaatccgaatctcttagtgcatgctacaccctggaaggctcaatagaggacacaaaagagtaatgttcacagaaat

SEQ ID NO: 33123 - DNA, 269 bp, Zea mays
agcttttataccatgcttctctttttgtctagaacgggatacatgctgctgggtacatgggaacactccaagccgctgagaatgatcaaggccttggcctttatcgtatgccatcttaaaactatgaggtgtgcgcctgcctcttgatgacccgttcgagggcctatcactacactgatggggctcagtcacgttgtatgcggggaactcctaggcactgttggatgaacctttgtacactattgacacgctgggcttataattttaat

SEQ ID NO: 33124 - DNA, 372 bp, Zea mays
  unsure (1)..(372): unsure at all n locations
gaccttagatactcagcttaccaatggacgtgagagtgcctttctaacggaccaatcttggaagaggtctatgttgagcaacctcccggctttgaagatagtgagtaccctaaccatgtttataggctctctaaggcgctntatgggctcaagcaagccccaagagcatggtatgaatgccttagagatttccttattgctaatggcttcaaagtcggcaaggccgatcctactctatttactaanactcttgacaatgatttgtttgtatgccaaatctatgttgatgatatcatatntgggtctactaacgaatctacatgtgaagaanttagtaggatcatgacacagaaatttgagatgtctatgatg

SEQ ID NO: 33125 - DNA, 476 bp, Zea mays
  unsure (1)..(476): unsure at all n locations
cacgtgataggtctaactaatggaactntcgtaaaagatagaccttgtgcagcttgtcaagcaggtaaacaggtgggaagctctcatcatgccaaaaatgtgatgacaacatcaagacccctggagttacttcatatggacctctttggacccgtcacctatctaagcataggaggaagtaagtatggtcttgttatagatgatgattntttccgcttcacttgtgtattctttntgcangataaatctgaaacccaagggaccctcaagcgcttcctaaggagagcccacaacgagtttgagctcaaagtgaagaagataatgagcggcaatgggtccgagttcaagaaccttcaagtagaggagtatcttgaggaggaaggaatcaagcacgagttcttcgctccctacacaccacaacanaatggtgtggtagagaggaagaacaggacgctactagacatggcgaggacaat

SEQ ID NO: 33126 - DNA, 358 bp, Zea mays
agctagtgaagccaataacaagtttatttgtttatcgatacaaaatttaactggtcctcatgatgcaatgaagccttcgagcagctgaaagtgttattgaccactgttcggtattagctcaaccggatattgaaaagccttttgatgtgtattgtcacgcatcacgcagtggtttaggttgtgtcttgatgcaagagggctgagttatagcgtatgcctcaagacagttgtgctggcatgaggaacattatccaactcatgatttagaattacctgttggggttcatgccctaaaaatatggtgtcattatctgctggggaatatctgtcacatatatacagatcataaaagcttaaa

SEQ ID NO: 33127 - DNA, 424 bp, Zea mays
  unsure (1)..(424): unsure at all n locations
aacaaaacaaagcataatagataacgaataatanaatggcaaacccgtatggacccaaaccccaattctggcccaacttctaatcccgctcggcccaattcctgcccttttgcgccgacagctgggcccaggatgccagtctctccttccgcgcccgtcgccacgcgcatgtggagcagccggtcagcgtgcatttttctctcctgctcgctcgacccgtgcatgctctggctcgctgctgacgctgtgttgcgggcctgngcggtcagaatcgtcagccccaatcaaacgaactcccgcagtcccgcacccctcgtgatccgttcggtgctgcaacggaatcctcaccgaccgcctggaatcacggacgtggacctcgcgcagccggactcgctctctgtcttgtataatccgaaaacgcatt

SEQ ID NO: 33128 - DNA, 347 bp, Zea mays
agcttgtgaagattcttcatttcttcttgtgttagtcggcgacgccagaggcagcccatgttagtcttatcaattaagcaagtgtcgagttcagctctatcaaaatctactaagcatagctgaccctctaacactcccttaaaagctattgaatcatcacttcttctaaagatagtgacacctacatgcgtaaaaagacagttgtagcccattgtacacaattgggaaactgaaagcaagttataatctaaagaatctaccataaaaacatcggaaatggaatggtcatgggatatagccattttactcaatcctttgaccaaaccttgatttccatccccgaatgt

SEQ ID NO: 33129 - DNA, 419 bp, Zea mays
  unsure (1)..(419): unsure at all n locations
ataagcgagttgaagtatatttggtattatgaagccttgacttattatgatgtcgaaatgnaagttatctatattattctgtatgtcagtattaaatcattattaattaaacctgtgatctaaatagttcgtcaaaacagttcacttgtcgagatgtttttgttgggggcctcttatgctgaagatcactcctttacgaagaaacgatcacttgtctaacatgttgctttggcatgaataagtgtatttcaggaatatctctactggcgaacgaagctaactgttgtgcgtttggacccacgaggacccttaaccgactagtgaatttatcactgcgtgtccttgcccagatgggtngatgcaagatggaacacaagaggngtgatgaggcttatattatcttgcaccggggtgctcgt

SEQ ID NO: 33130 - DNA, 355 bp, Zea mays
agcttcagtcttagcgttagtctttgtcttatttagtcttagttagacagggtagtttgctatatcctgtgcatttatgtttgtcatgatgaactatgattggtttggatctttgtaatgattgtcaccagagtgtgggtatcccctgcattttggtttacctattatgttaataaagttagttatatagttgggaaaacctttattctactttcctctttttctgagaagctgtgtggcctgtgttggagatcagtgaaaatgctcatctgttcagtgctgttgaggaattctattctcttttcttatgctgcaagatttgccacatcagttctgatgtgagggtgcgttctgc

SEQ ID NO: 33131 - DNA, 368 bp, Zea mays
agcttggcatacaactggcaattttgtattttctatagtactttcctcaaatgctcctcatgttcttgttcattctgggaatatatgagaatatcttcaataaacaccactacgaacttgtcgagataatccattaacacactgttcatcaagtacatgaagtaagttggcacattcgtcaaaccgaatgacataaccgtgaactcatacagtccatactttgtgatgaatgttgtctttggtatatccaaaggtcggattctaagctgatggtatcctgacctcagatctatcttcgagaacacactggctcctctcaactgatcgaataaatcttcaattctgggtaggggtgcttgttcttgata

SEQ ID NO: 33132 - DNA, 232 bp, Zea mays
  unsure (1)..(232): unsure at all n locations
ctccggggacttcatnttccttacaatgggactattacatgaaatagacttcacaaaggtattagtcccaaattcttagattatagagtaacctccccctgaatttgtgcatacacgttttgaatacttgtaggagacatgcactntgatttgatatcaataggggcaaattatctataatctgagcttttggcacatataagttaaatgatacccccgctgtttcttttta

SEQ ID NO: 33133 - DNA, 346 bp, Zea mays
agcttaccaccagcttatctaattatgaaatattctattggaatcagaacaaatgcacgttactagtttgtcgatttccattttataaaattcatccgccacgtctgtagtaaactagtaacggctgcgcgtgcggtaaatggtatgcaatattgcctgatgaataaagcgagggaacttttttaaaatgatataaaacatggaagacagtttagagcacaacagatttatataaaataaaatatagataagtgagcactggcaggacgtaatatgtttgttgtaatatttgaatctactttgttatatttacatgaaatgtcttcaaaagagatgatgagttata

SEQ ID NO: 33134 - DNA, 233 bp, Zea mays
agacagaacgacaactgcatacttctattgcgaacataccagagtacccacggaccacgatccaatgtgccaacacgcgcacaagcagtgagcacagacaccagcgtcgcctcgccgacggaagtgccaacactcagcaattcgtcgaacagcatcagagcctccctggacctgcctacgtgcaagaaccctgcgaacatggcgcaccatgccacgagggctctctgcggcat

SEQ ID NO: 33135 - DNA, 515 bp, Zea mays
  unsure (1)..(515): unsure at all n locations
ctcagctcacatagccgatacattgcaacattggagtcttctatctcttaagtctcataataagggatattgtctgtagaagcacaccactccattgttttcttaccaggaacctatcgagaaacatttaatcagataatggcatatcatgagatgaaagttgcaatcaaccaatcaccagactataacaatactaaccactttgctttttccaccatctacatcaatcttgttagttgtaaccaagtaagatgaatgacaaagttnttggatctcatgagttagcctgataagaaataaggatgactatgccaagcaatgttgtgacgatactacaagctgtgataagatatacaaatgctatagtattaatagattacaatattacagcagagtcagtctccagacaaaaaatggtaaacatgatgcagaataccagatagtacatttgacanacacaacagagatggattanaggtcaatttgcattacttgtgtacacataaaatctctaa

SEQ ID NO: 33136 - DNA, 326 bp, Zea mays
agcttcggtgatggttaattatttttttatgaaaacagtgcaaatagcagtgaatgctgtggtaacttcacacctactcgtctgtttatatagtgctgcaggtaagaaggcgaagcgccagagtttttacaccaggcgcacacccgcttgcgctcgctgcgcggtggaccgcagggacaaacagtaaactctgcaaggtgggaccgctacgtgctgggaaattaaatcgtttctcggcaacgagctcagagaaggtgttttttggaccttcggctccccgaagcttaagaagactttttcacggattcaactcgttacgaaaaacg

SEQ ID NO: 33137 - DNA, 222 bp, Zea mays
ccgtagacaactgtgagttcggacggtactccgaagcggcaaacaatggtttgccagaagaatttctgcgcagtctttgatattactgtggaaacagccctcgccttgatccatttggtaaaatactcgacagcgacgaaggtgaacttgaggttcctctgagccgtgggcaggggcccgacgatgtccaggccccatcgctggagaggccatgtgtggcaa

SEQ ID NO: 33138 - DNA, 354 bp, Zea mays
agcttctaaagggagagcatattttttgactaaccaatgttcattttgagaaagacaggatttgtagcgcatgccaagcaggaaagcaagttggctctcatcatccgcataagaacataatgacgaccgacaggccactagagctcctgcacatggatctattcggcccgatcgcttacataagcatcggcgggagtaagtactgtcttgttattgtggatgattattctcgcttcacttgggtattcttcttacaggaaaaatctcaaacccaagagaccttaaagggattcttgagaccggctcaaaatgagttcggcttaaggatcaagaaaataagaaaccaccaccgga

SEQ ID NO: 33139 - DNA, 526 bp, Zea mays
  unsure (1)..(526): unsure at all n locations
ctaagcttcggccaacagcagagttcttttctgccgccagcgccaaggtgtataggctctagnggcttcngnggaaggttnggagaccagccaaaacaaatatattgcctattctgtggtgaagacaagggccatactaccaggatgtgccatgttaccatccagaagcagaaggaaatagcagaagcagcagcgcaacagagtcagctgaagcaggtcatgcatactgtttcatatcactcgccttatattccagaatatgtaggcaaccaccctgcagcctctgttgcttctgcgagccaaccccaagcatcttggcagcaacctccaccgccaccgccgatccagcgaggacaacagccagaagggagtcagcacaatcatcttcagagggatntcagagaggagtccgaagctcgcacagtcaacagcactgtgccagagtcgaagcacatttattgacagatatcctacctttcacagcagtctttttgcatttctacattcgctattacccttttgtaat

SEQ ID NO: 33140 - DNA, 232 bp, Zea mays
  unsure (1)..(232): unsure at all n locations
agcttcggctccatctatgttgttggtttttnaagaacccgcccgttggcgttaacctttctagccactcccctgactgtcctaaaatacaatgggccctcgttacccaaggaatcctcatgcatagaaatgctggatgaaatattgcttcacaagaatagagtgtcctaccaccaatgactgcattgcctgggcattccctgtcaacaatgtcaaacaccacctgatctgt

SEQ ID NO: 33141 - DNA, 432 bp, Zea mays
  unsure (1)..(432): unsure at all n locations
tagaagcactttcgtttcttagtctccncgacatgatcttttttcacgcggctaagcgttagaacgaggatgaggctctgataccaattgaaagttgcctagagggggggtgaatatgcaagttaaaactttntcaacaaanaaaactagaagcatactgggtaaaactgaattgatctctaaattcacccagttaactttggaaatgagatgttctaaatgatccacagggttcaaagtagtagatatgagaagggcacttctcataatccacacactaaaaagatataaacaatctttcacggaatggtgagagaacgaagaatacaaacaaacacaatgagcaagaacacaagagacacaagaattatcccgaggttcggtcacaccaccaaagtgccctacttcctcgttgaggcgcccacaaagagt

SEQ ID NO: 33142 - DNA, 356 bp, Zea mays
agcttttatgatctgtatatatgtgacagatattacccagcagataatgacgccagatcttcagggcatgaaccactgcagctagctctagatcatgagtgggataatgctcctcatgccggcataactgccttgaagcatacgcgattactcggccttcttgcattaatacgcagccgagaccactgcctgatgtgtcacaatacacatcaaagggcttattaatgtccggttgagccaataccggagcagtggttaataatatcttcaagtgctcaaaagcttcattacactttgaagaccaattgaatctagtctcatcttcaatagactggtgattggcttcacaagcttaa

SEQ ID NO: 33143 - DNA, 206 bp, Zea mays
  unsure (1)..(206): unsure at all n locations
gaccttagatactaagcttggagtagaaggaaaagaaagatagccagccagcaactatacaacaggaacacnagaatctctcacaagtctaatgcgctagagttgaattgagacttgagcggatnatcacttgaattggtccttggagttaaggtattgctcttgtattgaatgcactgttgtgaatgctcggatggttggagtga

SEQ ID NO: 33144 - DNA, 306 bp, Zea mays
  unsure (1)..(306): unsure at all n locations
cccggatcttaagncacctgcagcatcaacttgactccttttgtttttttccctggaccaccggtcttttgtgggggtggagggttaattctcacaggggagctcaccaagatcctccttaataagcgtggggaataagtgcatgaactcaccaaaggtgggagttctgtgaagtcaaggctgaacaacaatgtggttaagctgagcattgttttaaaaggaggtcaatatattaccgtactattgtagctatacaacccccagcatattaccaaattatattaaccccggcatgcaatgccatta

SEQ ID NO: 33145 - DNA, 371 bp, Zea mays
  unsure (1)..(371): unsure at all n locations
cctagagaccaacactctacgacagagtgcttgatatcatcgttctcattcgatcncgaagacaacctaaagctgtttcgttaatttcgtcgaagagcatggctcctgtctggtagccacatgatatatcatattcctgcagttcctccttctcagccttggataattcttgaccaattatactttgaaagttgaagccttattcttccgaaatatcttcggcaatgtccttccctttctcaggcactgtggccaagacttcttctgcagccgcagcagtctcctccgcagccaaatccaatagcactctatcaatagcggataatgtactcaccagattggtagcttcggcagtcgtaacttctgcagct

SEQ ID NO: 33146 - DNA, 358 bp, Zea mays
agctttgcctcaggcagaccaatttcttatatgctaacatgcaattggagcggagagatggcgaaagtagcatgtaccctctatggcaagaggctggacagtggtgtatctgtgctctcggttggcgtgaacccggtctagtcttgaaaaacccggtggcaagttgacatatgcaagggttaagtgctactgtaacaccataaaaatcatcaaataaaagtaataaatttagttattaaaggtaattatggtaatgaattttattttaagtggttgtcatttatttgcctttggaatgatttttgattgcccataattgatttttgaatgttaatagcatttcttcttaattgaaaat

SEQ ID NO: 33147 - DNA, 469 bp, Zea mays
  unsure (1)..(469): unsure at all n locations
cttcatttagcgagtataccagtatatcatcaatgaatacgaccacagaccagtcgagatattccatgaatactttattcatcaagttcataaagtatgtcggtgcattagttagtccaaatgacatgaccaagaactcatatagtctgtatcttgtggtaaaggctgtcttgngtacatcttcatctcgaatcttcaactgatggtaacctgatcttagatctatcttagagaatatcttagctcctctcatctaatcagacaaatctttaatctaaggcaaagggtatttngttttaatgggtacttcatttaagcttctataatcaacacacattcttctcgaaccatctttcttattcacaaatagaactggagctncccaagtggacgagctcggacaaacaaaacctttntctaacaattcttctatttgtacttaagtcacctagatcttgcatccattatt

SEQ ID NO: 33148 - DNA, 357 bp, Zea mays
agcttctaaagggagagccatttattactaaccaatgttcattttgagaaagacagggtttgtagcgcatgccaagcaggaaagcaagttggtgcccatcatccacacaaaaacatcatgactaccgacaggccgcttgagctactccacatggatctattcggcccgattgcttaaataagcatcgacgggagtaagtattgtcttgtaatagtggatgattattctcgcttcacttgggtattctttttgcaggaaaaatctcaaacccaagagaccttaaagggattcttgagacgtgctcaaaatgagttcggcttaaggatcaagaaaattacacgcgacaatgggacggag

SEQ ID NO: 33149 - DNA, 443 bp, Zea mays
  unsure (1)..(443): unsure at all n locations
ctaagcttgtacacctcacccacatatgtttccttgccatagatcacattcttggtattctggtggagaccatctcttggtcaaaaatctgtaggtgttagcctccggtattattgaaaatggtcgttcatggccttttcaacaaaaatgggggttgtgtggccatttatcatcgactagaggttcgtacacctcaccccacatatgtttcctagccatagaacacattctttgatttctggtggagaccatttcttggtcaaaaatccgtaggtgttagccttcggtattattgaaaatggtcgctcatggctattttcgacaaaaatgagggttgtgtgcgctntgatcatcgaccagaggctcgtacacctcaccccacatatagtttcttgccatggatcaccttcttggatttctggtggngaccatctcttggcaaa

SEQ ID NO: 33150 - DNA, 357 bp, Zea mays
agcttgtgaatggcttgccgaattttttattctgcaggttggttgcccacatattctggtatatagggagagtggcacgaagcagtatgtaggacttgcttcggctgattctgccgagcttctgcttcggcaatttctttttgctttagaatagtaatctggcacattcttgtagtgtggcctttgtcctcatcacaaaataagcaataaatttttctgggttgatccccatatcttcctccgaagcccctgccgcctctgccccttggagctggtggcctgaaggagctttgctgctgtcccgaagactatgaggtgtgctgtggcctttgaaactggcttcctttgtcatcattt

SEQ ID NO: 33151 - DNA, 532 bp, Zea mays
  unsure (1)..(532): unsure at all n locations
ctcaagcttcttcaagtaaagcagttctaggtgagtatgagtcgctnctacttggttaatatatttggaccacatttgcaccatttgcatttgagtttgcaaactcttggtaaaatcttttcaaagtcatttttcttttggccaaaagtataagaatggaatttttcaatagcatttctaagttttgaagacttctccctctttttcaaatgcttttcctttggccaaatagatgtttccccagaataaattctcccccttttagcataaacaagttctgttcctcttagctgtcaagagggttttcacaaatgagagagtacaaatttggaagattaaaaagctttgaaatattgcgtggtggtgcagtccttntgctttggcctagtaatttctccccctttggaattaagcaccaaaacgaagaaatcaagtggcctttacaggaaagatatagaatttaagaacataagcgggggcaagagtattgataacgaacaaatatgcagtggaagcgtctctttgctacact

SEQ ID NO: 33152 - DNA, 364 bp, Zea mays
agcttccatacgaattttccaattttgaaaattttcaccatcaaatacgggaggaggttcatccccaccggacatgttactcaaacggttaaactaaactaggagcaacatggctctgataccaattaaaaggatcacgatgcccaagaagagtggtgaattgggcttttctaaaattcttacaaaagattaaaccctaaacaagagcctaactttacccaatctactagcaagaagtaaaacctatgaaatggagaacaaccgtaagtcattatggcaaatactagtaaagaaaatacacaaggtaaaatgctcaaactaaatgtggaaagtaaagtacggacaagaagagttctccattttt

SEQ ID NO: 33153 - DNA, 509 bp, Zea mays
  unsure (1)..(509): unsure at all n locations
gcctacggatcagatatntnctaagattctttcctgcacatgcaganattctgaaggaccaactcttgtaagttgttacagaatggttgaacattcaacctgccttctcactatattgagaagccaagcatgtaatgtcacaatcatggacaaatatatccccacaatgtggttgtgatggggaagtttgattaccaccatttaatttatgcacctacaacaactgggtgaatcagatgttatgcttacactgcaaatcttcaacatataaaaaggagagaatggcaaaaggatacttgcacaaagtcatgaacaatgcctagataaagattgcaagtgacctaacagaatatactgcgaaggtgtaatagacacaagaaaacatgcagttcatganagaatcaaggggagataagttcacctttccatcatactcgcgacnggatagcacctcaggtgcaatatatgctggcgttcctactgctgatttggtctcgaatcaacactga

SEQ ID NO: 33154 - DNA, 326 bp, Zea mays
ccaagaatcatgagcgacgcaagaagacagcccaaagggagacctcttttatgattaacaaacgttcattgtgagaaagacacgacttgtaacgcatgccagcccgagatacaagctgaagtccatcatccacacaagaacatactgacgaccgacaggccgcttgagctgctccacatggaactattcggcccgattgcgtacataagcatcggcgggagaaagaattgacttgtaaaacggatgataacctcgctacacttgggtatgcttgtacaggaaaaatcccaagccccagagacttaaagggaaactcgagacgggct

SEQ ID NO: 33155 - DNA, 391 bp, Zea mays
  unsure (1)..(391): unsure at all n locations
tggatacacgtgtcatggcgatgaattcaaagtacaccttctccaccacatgttacaacgatattgagaaactgattattgatatcagcccatcgaatcataacatgccgaaagacttgtaccattgcaagaagctcgtagctggtcttggcatgaactaccaaaagattgatgctngcgaggacaattgcattgtgttctggaaggagcatgaaaataccacacattgcatccactgcagtatgtcaagatatgcagtggtgctagatgaggatggaaacgaggttacgacaaaggtgccgatcaagcaactccggtacatgcctatcacatcacggcttaagcgtctctttctaaatcaagagacagcaaagcaaatgaggtggcataa

SEQ ID NO: 33156 - DNA, 359 bp, Zea mays
agcttatgaagattcttcatccctacatgtgctagtcggcgatgccagagccagcccatgttagtcttagcaattaagcaagtgtcgagtttagctctatcaaaattcactaagtatagctgaccctctaacactcccttaaatgctattgaatcatcacttcttctaaagacagtgacacctacatcagtaaatagacagttgtaacccattttgcataattgagaaatggaaagcaaattgtaatctaatgaatctacaagaaaaacattggaaatagaatggtcaagagatatagcaattttacccaatcctttgaccaaaccttgatttccatccccgaatgggatagctcgttg

SEQ ID NO: 33157 - DNA, 480 bp, Zea mays
  unsure (1)..(480): unsure at all n locations
ttctccccataagagaatagttttgcatcagagggctcctctttgctgtcaagaggggtttgataaacaagacaagttcaacacacacaactttttgaaattcacaagtggtggttgatctagttgctttggtcttaatttctccccctttggcattaaccaccaaaatagagaaactagtggcttttaacctcaatgcctcactagagattcgaatgaaaaccaagggaaatgaagaaccaggtgaatttaagacaaagtacaatgatatcgtgcaccattggaagcgtcttcctttgtccaaattcatctttccctttcaatccacctttgggacttcatcaaatcacttaagcaaacacattagtctcaaagggtcaagctatagaatatccaccccctcaacatatgcattaaagcacaatgactntgtgagggtctgggatgaaatattacaacttgagcatcaagataagccat

SEQ ID NO: 33158 - DNA, 214 bp, Zea mays
agctttggcttcagtactaattttcattatcacaacggtgcaatagcaatgaatgctggggtaactctttaccaactcgtctgtttatatagcccgcaagtgaagtaagcaaacacccgacacgctcgtactggctgatcggtggaccgataagcgccgtgaattttatattcggttttaataacattctcaaggaaggcattttttggacctt

SEQ ID NO: 33159 - DNA, 310 bp, Zea mays
  unsure (1)..(310): unsure at all n locations
ttacgcaattctctgtgataagagggtggaacaaatctatcgcgcatagctaccttaagatcttcccaagtcgtaggtgctctaccatccccaactagaccagtccaccaaacaatagcaaaatctttaaattcactaggggcttgtctaacttgatgtcgntcaggtacaaggtgggcagcanatttctgttctatcgtcatctcccaatcaagatatccctcagcatcataatgacccgaaaaagatggtatagaaatattaatcttagcataagggtcgtcaggagcacgattggtattaccttgct

SEQ ID NO: 33160 - DNA, 357 bp, Zea mays
agcttaattgacatatccttttatccatgtctctttcctttggtacatttgcatatttcctatctctcttgtgccaaggctaagactaatatgtttccatgagtatcttgtgtatcaagtcttaaactgaaagggaaatggagtattcggcaaagacatcgcttccactctacacgatcggtattatctatccttttgtcggtattccgccatctctcaaaattggtataatctttcactcatatttacttgtaccaatgggggagaaagtacaaagggctctaaagactccgtttttggcgattaatgccaaaggggagagagtattagcccaaagcaacaggaccgcaccaccac

SEQ ID NO: 33161 - DNA, 473 bp, Zea mays
  unsure (1)..(473): unsure at all n locations
gcttggaaaagatanaattctgcttacactagtggataaaataattgaagacgaagctacctctaaggctcaagctgaagcccataaacgcgaaattcacgatcttcagaaacaactggccagagctaaagaagaacgcatactataagaaacaaaacgagaacttagtgatcaatgggcaaatcatttggaaataaatgttgaagagcttcgtgcttccaagaaaaggtactatgataaatccatagagtgtgttaagaaaataaaattcagcttcgccagcgttggcgcattctctagcgaagaaaatttcacaaggggaatccagaaggcccgattgaatggatcagtcacgaagctgaggccttcgaggaaatcttgaacaaccgcggagacatatgtgctntttcaggcgctatggggattgctactgttctggaaagaaanggctgaatcatgtgaaattttagcgc

SEQ ID NO: 33162 - DNA, 347 bp, Zea mays
agcttattcaaaggtttagatatttctaaagtagataaaatcaatgaattgattgatgctttaaatgaaaagaatagacttttagaaaagcaagaggatattttatatgaaaagcatgataagtttgtaagtgtgcaaaagtctcttgctttagaggttaaaaggaatgaaatgctttcttcggaattatctgcttgtcatgaaactgtgtctagcttaaagagtattaatgatgatttaaatgctaagctagaagtagttaataaatctagttcttgtgtagagcatgttgtcatttgtaatacgtgtaaggattttgatgttgttgcatgtgttgagcaccttac

SEQ ID NO: 33163 - DNA, 370 bp, Zea mays
  unsure (1)..(370): unsure at all n locations
ggagcaagactcacggcttcaccaggaatctctctgatggcttgtatctaacggangaggacgggagaggggctggccacngtggttgctctcgggcggcactggcgggtcgcggggaggtcgccggagttaatggctggctcgggcgagtccggcgaggtacggaggggataacggtgaaggcagccaagcgctggggcgggctntatagccgtggcgcgggcgtggtcacaggcggccgcgggtgcgcgggggttcgcgcacgggcgtgctctgagcgcgcccccggatgccagctcgcgtcgaacacgtggaagcttgcttctgccatggttcaacgaccgattagagcgccatagcgtgcgtatct

SEQ ID NO: 33164 - DNA, 300 bp, Zea mays
agcttatcccttatgtatattcttttataatacaaattttcggaagtaaagtggttatagatttggacaagtttcttatatacttgctctaactgtcgctgtgggcatattcttgtgcttatcaacatgttagccatccattgtgcatattctaatctttttctttatatggtggacttgttttattgttttaccatagctgtgatggtgcatgtatgcgctctttccatgcgaaagaaggaagtggtgaccactcctattgtgagacccttggctacactgaggcataatttgagggat

SEQ ID NO: 33165 - DNA, 344 bp, Zea mays
tccttgcaagtatatgcataccggtgttctatctggattatcgacagcggatgcacaaaccatatgacgtgggataagaagatgttcacctcctacgtcaaaaacacggattccaaagattcaataatattcggtgatgggaatcaaggcaatgtaaaaagattacgttaaattgctatttcacatgagcactctatctctaatgtgtttttagttgagtctcttggatataactctgtatctgttagtcaattatgcaatatgggatataattgtctatttacaaatgtagatgtgtatgtctttataagaagtgatggttcactagctcttaagggtgtatt

SEQ ID NO: 33166 - DNA, 468 bp, Zea mays
  unsure (1)..(468): unsure at all n locations
agaacacattttgggactaacaaatgttcattntgttaaagacagagtctgtagcgcatgtcaggcggggaagcaagttggtgttcatcatccacacaagaacatcatgacgactgacaggccactcgagctcctacacatggacctattcggcccgattgcttacataggcatcggcgggagtaagtactgtctagttattgtggatgattattctcgcttcacttgggtattctttttgcaggaaaaatctcatacccaagagaccttaaagggattcttgagacgggctcaaaacgagttcggcttaaggatcaagataataagaagcgacaacgggacggagttcaagaactcacaaatcgaaagcttccttgaggaggagggcatcaagcatgagttctcttctccctacaccccacaacanaatggtgtattggagaggaagaatangactctattggacat

SEQ ID NO: 33167 - DNA, 368 bp, Zea mays
acctgcagcatgcaagctttaaagtaatcttacctttttttgattacgaatgctcaaggcagaggtatggaacaaattgcttcaattggtagttgatcattagtagttcctttcaagtggcattctttcaattagtaataatctattttatggaaagaaaatgtcaatatgaaggttaaattctttttggcttaaatttgtaaattggtgcatattgttaattcactcctccatgtgcattaacctaaaaggaatttaacttatgcctttatgcctcataaatgatgatttgtttgcaattcatatctaaagatcaccattcattaaatacttccttgtactgctaatatctcttttcaaagttcttt

SEQ ID NO: 33168 - DNA, 412 bp, Zea mays
  unsure (1)..(412): unsure at all n locations
ctccactaagtgccataattatgatttgtaacctttagcgattagcgcctggagagactctagcgagagtgtgatcttgtgttntcttattggctcttcttgcttggtttcttgattgtgctttcttccttctcgtctaattctcattgatttgtaaaactagcaaaaggcacctaagtgtatagtgattcttgcgtggtctgattgaccctcgtgttaagaaggagcactcaatcggtataagttaccgtctgagagggaaagtgttgaaagagactcatcctacgcggactcctcaacagggagtaggtttttagaaccgaacctcgggaaacaaatcgttgtgttctttttgcttaaaacgttatttacgaattgattcttcatctaatgcctctcttagtttcttgat

SEQ ID NO: 33169 - DNA, 319 bp, Zea mays
ttttctaaaagaaggaaaactgcatcaattctttggtataccacaaacaaacttggaaaacaattataaaatcaatgtatctaggaccttctaccgtataagacctccaaaagtcacctcttgcgatatttgtttatttttataatgagctcgaaccgcggaataatcacaggcctcatgatggaggtctgaaaaacaccttccctgaccttgctagtgaaaaaaatgaaaatatgcttttataagcatgtattatagagggtacacttgcacgatggattgcctgtaaattctccaatttcgcctcttcttgtataaa

SEQ ID NO: 33170 - DNA, 325 bp, Zea mays
  unsure (1)..(325): unsure at all n locations
agctttgttggcacaaagctacaaacttacgaagctaaacatgtatatctttcctatactcctttcacgatcactggtctcttcagcttttcttgcttcttctgaggcaagatgagactcttcttcatatcgcctaatggcttcatctgccatctttcgacaccattcatccacacttccgattagaattntccactaagggcagtagcttcgactgacggctccttgatgtcactcgctgaaactgagaagtatggatgaattatagcctcnccatggccacaactagctttttcaagtaaagatatagcttcccgagcgccta

SEQ ID NO: 33171 - DNA, 363 bp, Zea mays
agcttgtggaggttcttcatcccttatgtgctaagcggcgatgccacagccagcccatgcaagtcttagccattaggcatgcatctagaccggcctcttcttttgcaaaatcaactaaataaagtttgccgtctaatacacccttaaaagctagtgaaccatcacttcttctaaagacagacacatctacatttgtaaatagacagttataccccatgttgcataattggctaacagatagcaaattatatccaagagactctactaaaaacacattagatatggagtgctcattataaattgcaattttacctaacccttttaccttgccttgattcccatcaccgaatataattgaatctt

SEQ ID NO: 33172 - DNA, 484 bp, Zea mays
  unsure (1)..(484): unsure at all n locations
agctcgtcctcatcctctcctcgtcgtcgccgcggcctcctgccttgttatgtatatcgctccggctcctgngtttcctgtgcgaactgtgggctcggggcangaggttgccgaaatcgatcgatgtgttcacatcgtcgccatcagactcgtggccttcgctggcccaattgtagtcactgccgctcgtcgatccgttctgcctgcttttgtgctttcttcgctcgctaggaactcgatgaanaggcctcgcgttgttgatatcgtcatcgacccccatgccttctaagggtggtacaacatgggcaactctctggtcatgattgtcatgggcaccattcctcttgcttgagtgtcttcttcggccatcangtgcttggtttgccatcttttcctccattccagcatattcatcagcatgtgcaggtggtcttggaaccctacttctcacggagacaggatcatagattggttcacgcttctg

SEQ ID NO: 33173 - DNA, 367 bp, Zea mays
agcttgttcaaaacatgagggcttttttttttccatggtttgcaaaatatttgttgcgcgtcggtggtggaactgaggaagcgaacaacgatggtgatgttcgtcttccagatgaggtatgtgtgccatatactggtaatgaccgcgaccttgatagactgatagatgacatttaccccaatctaaatgaaaacatgtctaacacaagctacatcacttcaagagcaatattgtctacacggaatgactgggtggatatgataaatatgaggatgatcgatcgtttccaaggggagcagatgatgtaccatagttttgacaccgcggtggatgatcctaataactattaccatcggagtttctaaac

SEQ ID NO: 33174 - DNA, 473 bp, Zea mays
  unsure (1)..(473): unsure at all n locations
actaagctaantatgggcccaattagttgactaattgactggcggtagtaaaattttgatatagtagnatccacctacgaaaccaaatgaaaatgttaaacctctctgtccactccattaagatagcttgtacccgctaattcataatatgcttaaaggtaacaacaatagaaaatgttatttaaacacagaaccagagagtacctctatctttgttacgatgcttatttaatgtaggtcactgcgaaaatatatcatgccctgttttagtataaaataaatatgatcccttctgttttaataaaacaagtgaaacttataataactctacagaaataaccccaacgtaaaaacacccccacccttgcgataactaatgttctattaaggagaatctacgagaaatatgacatctgctgttcgacattcttcaaataataatgtagtagaaagagcctttttgacattaaact

SEQ ID NO: 33175 - DNA, 317 bp, Zea mays
ctttgccatgactgcggtattgcccccatacgaagatatagtctgcttcgtagctcatcatatactgcttctgatctgagtgcccatcatacattgggaagctgaggtagcttgtatgacgagggccatggggtagactgcagttctgcagatagaggagaagcatctttaaaagctaaatttacctgatggaaatcgtcatacctatcatcatcattgtagacattgtcctaacgaacctctctttgtggagggctacgatcctggtcatcttgtgtaagatgacatatttcttaacagcttcatctgtcttcttc

SEQ ID NO: 33176 - DNA, 356 bp, Zea mays
agcttctaaaggaagaacactttttatgtttaactaatgtgcaattcgaaaaagatagaccttgtgcagcttgtcaagcaggcaaacaggtgggaagctctcatcacaccaaaaatgtgatgaccacatcaagacctttggagatgcttcacatggacctcttcggacccgtcgcctatctaagtataggaggaagtaagtatggtcttgttatagttgatgacttttcccgcttcacttgggtattctttttgcaggataaatctgaaacccaagggaccctcaagcgcttcctaaggagagctcaaaacgagtttgagctcaaggtgaagaagataaggagcgacaatgggtct

SEQ ID NO: 33177 - DNA, 493 bp, Zea mays
  unsure (1)..(493): unsure at all n locations
gctcgcaagcacacgcgcgnttatgggggatatacattaccatcagtccttcttatgagaaacttatttacagtgtagatgtaacgtaaccagttanaaccactctgaaggataaaaaccatcgccgattatgagaaatttccaagatggtgcagtgtgtccaatcaccgatcttatgctgttcctacttgcgagaatacacgtcatcaaataactacaatcgaactgtnttttcttcagcaccgctccgaccagccatcaaaccttccacgcatcctattntttgacgatcataattcttgtggttgatttgttttgcgtgaagtgttgttagtagattacctagtactaagctcgtatatgtaaaccaaaccagactagcatactgtataggcttattcctcgtgatgaagtctaaaatataatcagcgccgcaacttggaattacctaacctgctggcttaagcaaacgtatgccgtcttgccacacaca

SEQ ID NO: 33178 - DNA, 284 bp, Zea mays
tacactaaaaggtcaccgctgtgccgattcagtgcagctacacgttgtggatgaactctggcaactatttcaacttccagtccatgaggatgaaagcacttttgaaaaactgaatgctatttgtctctctcaggcagctatggagggagtggctgctccaaaaacagtacagttcatgggtcagcttcaaggcctagaggtgttgattttattggattcagggagttctcattctttcttaaatactcaagtggctgctcatgtccggggccttattcttctgc

SEQ ID NO: 33179 - DNA, 171 bp, Zea mays
tctgaccagctaacaatctggctgtgtagagaatctggctgcggggagaatctaagtatcattacgattacgtgtggaggaagataaagttgttcatacgatccagaatctagatagtgacggattcttactattactacgactcaaccgcgtatgtgtgtatagtgagat

SEQ ID NO: 33180 - DNA, 356 bp, Zea mays
agctttggctccatctatgttattgattgcctctgaatacgaccagctcccttcagcccttctggcagcttcttgactcccatgaacagcaatgggaccttgttccgaaagtatcttcatgcataagtatgttggatgaagtattgcttcgaaggcattaagtgtccctcggccaatgaatgcgttgtatgggtactccatgtcaacaatgtcaaagacaacttgctcagttcttgcgctgtgaatgtaaccgaaggtaactgaaattgctattttgcccagtgccacaatctgtcttcctacgaagccacaaagagggtgtgttgcatcattaaacttatcctccggatcttgca

SEQ ID NO: 33181 - DNA, 402 bp, Zea mays
  unsure (1)..(402): unsure at all n locations
acccgcgccaccggtttatctatattgtgctctccggagnacaaaacggcgccggcgcacgtggaccgggtaagtcactgcgccacttttcgattcaatgctcagatagcctctacatcaccccgtgaagctcattgtgccattggattgaactagatcaccgtggtttggccagcacacccgccgtcgacgagagcacccacctgcgcacgtggaccggacgtttccggccatgttggaacttgctctccggtgcaagttgatccaacggaggagtgtagcaacgcacacagggttttgcacgagatggcaatagctctgtcaatctagcctctcaagggcactgtgcggtgcgtattataggtatctgagtgcccagcgtccagtgttaccgatgcatgt

SEQ ID NO: 33182 - DNA, 363 bp, Zea mays
agcttgtaccaccaccgatgaattatttttatataaataccatctttttctaaagtaaaacttgatagaaacaatgttggatagatagtaggacgagcaggatagacctaggacgtgaagccttaggatgatagaagggtagctaggtggctaagtgattaggccctacaggccaccttaaaggatgtgagttcttccctatcccctttacattggtgaggtcgttcaggacgagcatgcatgcattcttaaattaaacaaatggatatttgagtaaagacttataaacaagatgataaccaactaagtaccccagtaccattttatttaactagagaaaggctgagccttatttttttcttg

SEQ ID NO: 33183 - DNA, 433 bp, Zea mays
  unsure (1)..(433): unsure at all n locations
tagattacttatgtgtatctcttatggaaaggctctaccttgtttaatattgtagttaagttatgcacttcgagtactatcanggcttgtaataaatacatctctttctaccatgtaaaacttgagttctggaatgtaaagtgtactttgtaaaagtcttccgctctatctccaatgtgtgtgtatcaaatgtgattactataatatacctgttatgtgggagatccttgggatgatgagtttcagttggtgaactagatagccttgtaagttacctgtacacgtcacagccatcnaggccattatacaaagactgggcatgtgggcctgatacttggagggctgcacaataatgctcacaataagagtcttgccattattataaaactctaagtctacagatatagttactgctatactgcgaactatggtt

SEQ ID NO: 33184 - DNA, 469 bp, Zea mays
  unsure (1)..(469): unsure at all n locations
aaaaactcagctgacatgcttcctgttggaaccaatgccttcttttgctcttgtgtctcccactatagagcatgcttctagcgaatttaatatttacattttctatttcatgctccttaattgttgcaggtaattgagctatatgatcattttgttctttaattacagcacggtgatcatgaatagtatctatattaacatctctacatctagtacaaatagcaatattgtcaacagtatatgtatagggttcgtaaacatctaattcatctaccttagatattagcatggcattttcatttctaagacatgatatggaatcattgcacacctttanatctttagccttacaaattaaactagcattacgtcacacctggatttgaaggtaaaccgaatgcaaaccgtgtactgtgcaggatcaacaatacacgtacacagcaggtacataactggacattatcacaca

SEQ ID NO: 33185 - DNA, 319 bp, Zea mays
agcttgtggaggatcttcatccttacatgtgctaagcggcgatgccacagccagcccatgcaagtcttatccattaagcatgcatctagaccggcctcttcttttgcaaaatcaactaagtaaagcttgccgtctagaatacccttaaaagctagtgaaccatcacattttctaaagacagacacatctacatttgtaaacaaacagttatatcccatattgcataattgactaacagatagcaaattatatccaagagactactaaaaacacattagagatagagtgctcatttgagattgaattttacctaacccct

SEQ ID NO: 33186 - DNA, 401 bp, Zea mays
  unsure (1)..(401): unsure at all n locations
actcccctcagataaattctcctcttagtgttcaagagggttntaagacattcaatttgaatatactacttgctccccctttagaacacanagagantaccaatttgaaattttccatccaattgaaaatcattaattntaaaattagggtggtggtgcggtccctttgctttgggctcatattttctccccctttggcatgaatcgccaaaaacggaatcattaaagccctatgaagtacgtttggtcataaaataaatgagtgaagattataccaaacgttggagagtgatgcggagcgacggcgaatgatgagtagtatagtggagtggaagcctttgtctttgccgaagactccaattctctttcaatatacctatgacttggttgaaatacacttg

SEQ ID NO: 33187 - DNA, 329 bp, Zea mays
gataccaagacaccgataaacttatcgttcgcagaagcaggaacggtggagtcatcatcccacaactatgacaccgaaggcgctgactactcaaggatctatcgcccatgctacaaacatagcggagaaaactgcagcatcgggagatataccgctcactggtatcattgaaggaaaaccctaccagaacctaaggatctgaacggccatagagacactaaaacaaaaacagaccacaacgacgagtaaactccaatgagcttctgagaaaggaaagcagatcccctctacacctacaaatggaacaaagagaacaccatgactgaaac

SEQ ID NO: 33188 - DNA, 137 bp, Zea mays
tgcatctactattacacttccggagatctgccaccacacgacatatgtagcacttatcccttacatatgacaacacaccgtctgagtactcaagactagacccacttcataccgaccgatagcacatatacaccacc

SEQ ID NO: 33189 - DNA, 362 bp, Zea mays
agctatacttacccggtgtgaggtttctactcctctacctctagaccatgcagctggttggctgcggggtttggtttgccaaaagcactagctgagtctaaaatcaatttttagctttccagtttctagcatcattatcttagctaagtttgctccttctaagaatacatggtagcaagcatttaatacaatcaacaagttatctcaagtaaacctcatttcacttcttactcaatgtagtacaaggggtcaagcagtctcattagctgcgagaagcagatgattcgaatcgagtttttgtccttgcaaggtaaacctaaacacacgacatgtcagggcactccgtccccacacatgtcaac

SEQ ID NO: 33190 - DNA, 385 bp, Zea mays
  unsure (1)..(385): unsure at all n locations
ggagtatntgatcatatgttcaaagctcacaaacttgccaattacctnctcgggtgacatctggttatatctaggatccccatgtattaattgaacttgagtaggattgcgaaatacgagggatctaagaataaccttgaccatntcatggtncatcccatttgtgctcccgaggttgcgcacttgattgaccatcgtcttgagccggttgtacatggcttgcggctcttcccctctgttgaggacgaatcgaccgagctctccctcgatcatttcacgcttggtgatcttggtcacctcgtccccttcgtgcgcggttttgaggacgtcccanatntctttatgcgtcttcaaccctttgcacctttgtatactctctctacac

SEQ ID NO: 33191 - DNA, 363 bp, Zea mays
agcttcggtattatagcgtatctttatatgaatggtcgaaccgacttaaagatagaatgacagtttagtccataagggtctgagtcattgttgtaaacttttataaggggcataattgtaattccttacaggctgtgtcctgtgcctataaatagtgaacagtatttctctactgttcacgcattcatgtaattgcaaacgcatcactcgggaattattatttgtcaaggcaaaggtataaatgtacctaaacattatgttctaacattttagattcatataataaaatatgtgaatgatgtcatctatttctgatatatttatccttaatggttcatattttatattactttgtattatttt

SEQ ID NO: 33192 - DNA, 380 bp, Zea mays
ctaagcttccgaccgtctaacaccgtcagggccaacagttacaatgagttattcaacatggtcatatctcaggaggactgcatcacagcccgtcaggcagaaaagaagagtaagacccctgtggcaggaccttcagctcagccacagctcttcaggattgtatctgaccctcagaacaggggaccccagcaatagcaaggacgttgggtgatccgaccacagcagcagcagcaggcacccaaccgctctcagcccccagttcagaggaacaatcagccacaacagcagtatcgtcaggcaaatgacaatagatgtttcacttgtggtaacaccttgcattatgctaagaattgccccaggaatcagcagaggcagggaca

SEQ ID NO: 33193 - DNA, 377 bp, Zea mays
acaaaatcacagagaaagatagcgtaagagacacggtggtatatcccatggctcggccaaatatacacactcgcctacctccacgttgtggcgatccaatggacgacggttgcgctcaacccctttcaagggatgcaaagatcaacttgtataccacgacttttcttccttatatcttttaccagatgcgaggaatctccacaagttggaacctctcgcccttactagaataatcaccaagaaagcacatgagtctcgttggggagcaacacacacaaattcgcaacacacgcacgcacacatgccaagacttgagctcataatgaaacacagagagttcacaactataactgagctcacatcactaacacgatcga

SEQ ID NO: 33194 - DNA, 346 bp, Zea mays
agcttaagtgatgaaccagagatttattaacacatcgaatgccaaagccggcgtcggccctactcttgctgctcgtcacccacctcgccgacggagagcccacgaccctcgctgccacgccgaaaacgctgaccaagtcagaccacgcaatcaccctccggtggtcgaacctccccgacccgagcccactcgacaactccccgccggcgaccgccgacctcgactacctcggagtactctagctcaactactacgcctactgtgctacgggtgccgacagcctaacgctcccgcgcctgaccagacttcgcgccccctaccagatacgcctgtgccgggggctacc

SEQ ID NO: 33195 - DNA, 425 bp, Zea mays
  unsure (1)..(425): unsure at all n locations
gcttctactcgctttcnagtgtcggctaacatgtttatttttctctgatagtcgctcatgcgtgctgaggccgaatacatggaggataacacaaagctccaaacggtgtatgaatgcagcctattcctatcttctttgctaagctgatctgatggtatccagaatagcagtctacgaaggacaacatagaacatctatcggtcgaatcaaccacctaatctattctacggagtccgaacggatccttcggacagtgtttgtggagatctgtatagtcgacgcacatgcgccaatccactgtattctttatgagtacaagaacaggatttgctagccactcaggatgtaatacttctctaatgaaccctgccgcaactaatcgagctaactcggcgcgaatagcctctcttctgtcacgcatgaaa

SEQ ID NO: 33196 - DNA, 357 bp, Zea mays
agcttgactgcataacatgtttttatctttgaaggtgccactaggaccgcagccgctcctgcaccgaaggttcccaagaaccatcgcagaacactgtccaagcttcgatgtctttgtttatttcttcttcgtgagcccctggcgtccaatcagcgataaattctgctaacgcctaggactaaattgaggatctatgcacatagtcaatggtgaattcattaagttctgcagcccatttcccaatccttcgagtagcttctctgttcctcataatgtccttcagaggctgtgacgaaggaacaattatgcgatatgcttgaaagtaatgccgaagctttctggaggccattaacacaa

SEQ ID NO: 33197 - DNA, 374 bp, Zea mays
  unsure (1)..(374): unsure at all n locations
gctgcccttgctaacatggcctgaagaaatttactcgctgttttacacgtatgcnaacgccgcactgtcaatccaccttctgtcacgtcaactgccatatctatctccgtggctgactgacccacggccccacgcctggtggtttcattgggccacgcgcggggcgcctcgttgctgctgcattggttataaagattaccttttgtcttctggagcagccccaaggaggcgcgctatcgtgtgcgtcggttcgctctttctgcacccgaaatctagcacacaaactgtatgacttatggacccggacccccgtgtcacagactggactgcctgtgtcctatgtgcccatcgaacgggatttcctgtgatgattc

SEQ ID NO: 33198 - DNA, 353 bp, Zea mays
cggatctataatcgcctgctgcatgcactgaagaaacctttttttctcacattttgcctcggagtctagttataaaaaaaaagttactgaattggagaaggtgctatatgctgtcttaatggcctccatgaagcttcgctactactttcaagcataccatataattgttccttcatcacagcctttgaaggatattatgaggaacagagaagctactggaagaattggaaagtgggctgcagaactcaacgaattcaacattgattatgtgcacagatcctcgattcaatcccaggcgttagcagactctatcactgacttgacgccacgggctcatgaagaagaatccagta

SEQ ID NO: 33199 - DNA, 443 bp, Zea mays
  unsure (1)..(443): unsure at all n locations
ctcaagctntatcaaatggacgtgtaaagtgccttcctcaatgttctcttctttgttagatggtctacgtgagcaacctcctggctttgaagacagtgagtacactaaccatgtttataggctctctaaagcgctntatgggctcaagcaagccccaagagcatggtatgaatgcctaagagatttccttatagctaatgactccaaagtcggcaaggtcgatcctactttactcactanaactcttgacaatgatttgtttgtatgccaaatttatgttgatgatattatatttgggtctactaacgaatctacatgtgaagaattattaggatcatgacacanaaattctagatgtcgatgatggnggagttgcagtattttctacgattcctagtcaagcaactgcaataaggcaccttcataagccaaaccaagtatac

SEQ ID NO: 33200 - DNA, 314 bp, Zea mays
tagctttctgactgagagagaatcttcttatttaattctggtattttagctgcagcttccgccaataagccttcggttgtctgaagctcgaagtcttccttttcaagagcagctgattggtcttttattttgctttccaaattctcaattataacctcgggttttttatcttccagatcctgctgcattttcaaagctttgctcagcagcatactctgcacataaacaaccttcatcagaaaacatcttcgttattaaaaacaataaatgtcagagaaaagttgtttaccttgaaattggaataaaataaacta

SEQ ID NO: 33201 - DNA, 376 bp, Zea mays
  unsure (1)..(376): unsure at all n locations
actcaagctccgacacaatntccaatcctaccacatcatagtaccttcgtctcatcctctaatagatatcataagaaacagataagctacaggaagggttagcaagtgggctgcatacttgaacgagttcaccattgactntgttcataggtcttcgattcaatcttagtcactagcagacttcattgtcgattggacacctatggctcatgaagaagtgcacctaacagataccgaagcctggacagtattctatgatggatcatggggaacttccggcgcaggtgcattcgctattctaatttcaccataaaaaatcaaacctattatgtagccagattggagttcaattgcacaaacaacattgcagaatatg

SEQ ID NO: 33202 - DNA, 362 bp, Zea mays
agcttatgacaaactacatatctttttatgccagtttgcaagtatatttatgattctttctggaagtagtcaaacgaacacaggaatcacatttacacaaggaaatatttgtatcttatgggcttttactctctaccagatgaatcatcatcttcgacatccaccgttcgttttttcgacgttgatgtctcattccattgcggggctgcagctatgagtttgttccttgaaccaagaggccgtcctcgcttacgtgcagataggttagccaatcgaaccctattattctcgacagataaacacgtacggctgttgtgatcatcagctatgccacatttttggcatttcctgctcatcttctt

SEQ ID NO: 33203 - DNA, 487 bp, Zea mays
  unsure (1)..(487): unsure at all n locations
tgtcgtcgagtgaggccacgcgtcccgtccctgcgtctgtgtcttgactcctcagagcgtgcgcatcaccggcgggaggcgagggcatgcggtggtggcgatggcctccaccgatgcgcgcttggcggggatcgcctcctccatccgcgtcatacctgacgtgcccaagccaggtgggttcacccttgacttccgtacgagcgtacctcaccttgctcctctctctgtatcaacaacccacctgctgtaccacttgcatgtgttttattttctgcagatcctcttggagttcaaggaagacaaattntaggacaaggaaaatatggatgccgtgagggtgattttactgtccgttntcccacttgttgagacaatgtttatccatagggttgcctattgaaaatataataaaccacacgcgtttcaccccttaacattataatcttcactgactcttttgtctatatcgttggcccgagacacacta

SEQ ID NO: 33204 - DNA, 350 bp, Zea mays
agcttctaaagggagaactttttttgggactaacaaatgttcattttgagaaagacagggtttgtagcgcatgtcaagcagggaagcaagttggtgttcaccatccacacaagaacatcatgacgactgacaggccaccggagctactccatatggatctattcggcccgatagcttacataagcatcggcgggagtaagtattgtctagttattgtggatgattattctcgcttcacttgggtattctttttgcacgaaaaatcacaaacccaagagactttgaaaggattcttgagacgggctcaaaatgagttcagcttgtggatcaagaaaataagaagcgacaac

SEQ ID NO: 33205 - DNA, 437 bp, Zea mays
  unsure (1)..(437): unsure at all n locations
tatgttgagcaacctcctggctttgaagatagtgagtaccctaaccatgtctataaactctctaaggcgctgtatgggctcaagcaagccccaagagcatggtatgaatgcctaagagattntcttatcgctaatggcttcaaagtcggaaaagccgatcctactctctttactaaaacaattgcaaatgatttgtttgtatgccaaatttatgttgatgatatcatatttgggtctactaacaaatctatttgtgaagagtttagtaggatcatggttcacaaattcgagatgtctatgatggnggagttgaagtatttcttacgatttcaagtgaagcaactccaagagggcaccttcatcagccaaacgaagtacactcaagacatactcaccaagtttgggatgaaggatgccaagcccatcaagacacccat

SEQ ID NO: 33206 - DNA, 355 bp, Zea mays
agcttataaagggagaacacatattatgactaacaaatgttcattttgagaaagacaggatttttagcgcatgtcaagcagggaagcaagttggagctcatcatccacacaagaacatcatgacgaccgaaaggtcgatggaactactacacatggatctattcggccagatcgcttatataagcatcgacaggagtaagtattgtcttgttattggggatgattattctcgcttcacttgggtattctttttgcaagaaaaatcacaaacccaagagaccttgaagagattcctaagacgggctcaaaatgagttccgggttacaattaaaaagaatataaccgacaatggaac

SEQ ID NO: 33207 - DNA, 452 bp, Zea mays
  unsure (1)..(452): unsure at all n locations
ctaactctcgcgagaccttnttccatatttttctaaccatggtttgttcattatcgnatgtgatattctatgcatatttacttcatttggtctcttgtatggtgtactgtttgttccctaatttgaatggatggatgtatgtatgcttgcaatcgcatagagaacgatccggttgaagagcccgaggaactctcacgagaagcccctgagcagcagtcggttggtggaggcaagtgtcccttgacctatctctgtcctatacattctttaattcacctcccgcattacacatttatgcctaaggattgactagttttgtgatccatgtccttgttcacctacttgggttggattattatggtttagctctatgctattgctcacactctcatcaatgaacatgatgagattatctatgatacgctgttctccttctcttatatgatgttgac

SEQ ID NO: 33208 - DNA, 355 bp, Zea mays
agcttctaaagggagaacacgtattttgtctaaccaatgttactttcgaaaaagatagaccttgtgtagcttgtcaagcaggtaaagaagtgggaggagcacatcacagcaagaatgtgattaccacatcaagacctctggagctgctacatatggacctcttcggacccgtcgcctatctaagcataggaggaagtaagtatggtctagttattgttgatgatttttcccgcttcacttgggtattctttttgcaggataaatctgaaacccaagggaccctcaagcgctttctaaggagagcccaaaacgagtttgagctcaaggtgaagaagataaggagcgacaatgggtc

SEQ ID NO: 33209 - DNA, 344 bp, Zea mays
  unsure (1)..(344): unsure at all n locations
gtgattcaatgggaaaatactgtgctgtcgtccgaaagctggaagataaattcgagggtctggaatttcatcatatagaaagagatcggaacacggcggccgatgtactgtccaagctcggatccggccgaactcaggtcccacccggagtcttcgtgcaagaaattctgcagccgagtatctcaatggattaaacagaagagtgcaacatcataaatcaactcgagtcagattntaacgactggagaagaccgattatcaagtatataaagaatgaagaagaaccagacgacaagaactcggcagagcgcattgccaggcagtcggctcactatacactcatt

SEQ ID NO: 33210 - DNA, 316 bp, Zea mays
  unsure (1)..(316): unsure at all n locations
agctntaattagtgttgccctcatattttctatttttgtgggagaccgaaagctgcgcttgtgagttttggttgancggacgacaactcacttaaaggactaacaagtgtgtttagtgttgaacaagtgctcactgcaaagctgacagggttcaacacatgtgaacaagtgtgatggcccacggactatatgatgatatataatgggcattacaattaacatggacattgcaaaagtgatacttcgatgcgtagatctgaaacaactgaataaaccaaggaccgaagcaagaatagcttctaggtatccaatgcac

SEQ ID NO: 33211 - DNA, 461 bp, Zea mays
  unsure (1)..(461): unsure at all n locations
agagcatgtgtngcgactaaccaatgtctggctttataatgattgaccttgtacagtatgtcaagcaggtaaacaggtgggaacaagtcatccaatcaaaaatggtatgacaacatctaagaccacacggagcttctccatattgatctcttcgggctcgatgcttatcttatcatcgacgaaagtaagtatgggcttgtaattgttgatgactattgccgcttcactcgggtattcattttactagataaatctgagactcaagaaactctcatgcgcttccttagatgagctcaacatgagtttgagctataagtgaagaagataagacgcgataatggatctgagctcaagaaccttcaagtggaagaatatcttaacgaggaaggcatcaagcatgagttntccgctccctacacgcaacaactacaatggtgtagtggagatgaagaacaagacac

SEQ ID NO: 33212 - DNA, 354 bp, Zea mays
agctttgggagtaagagcggcatctttttcatgcaaaatttgttctatagcttcttcctccgctgccttttctccaatttccgaggatttctctttggtgggctctgaaggcccagcttcggcgtcggcccgactcactgtagcttcggcttcggtcagctttgtcttaatttcaacctgtgtttcaaacccttggcaatttttcctgaagtaaacctgaagtttttatcgtctccagcacatctaacacactagccatcctttttctcttgggggttgctgccagaactttttgtgtcttcggcgcctccactcctaccgaagggcttagaacctctgatggtttcgcctctt

SEQ ID NO: 33213 - DNA, 394 bp, Zea mays
  unsure (1)..(394): unsure at all n locations
ttagcacccgcttccaccctcgatcgtccaccggcacgcccgaattgtgcattctccccaattcggntcaagaacaccgcgaagagcaacctcaccgcggccagccctttctaggtccgtccatccctcactctctcttgtttgagcactctggtcaccctgcgatgcttaccgagcctctaattcgaactaagagactaccactcgccgggaacacgatgatcttgccacgctgctcacggtcaccgtggccagagaagtttagtgcgcaattggtgaaataaagttaggggaaacatcgattaaggtatgaattangtgttagtcgacggagagcgctagtcatagcccctatcggctggtctacgcgctcgccggagctcctccgtgcgct

SEQ ID NO: 33214 - DNA, 363 bp, Zea mays
agcttctcctggacaagtgctgttcttttcgttgagtgcgaagctgccacatataataacaaaggagcccctggcgtaggtggagttaatgttgttagatctatcaaatactgcttcagctcttggaaggctttctgctggattggcccccattgaaagacttcggctgactttagtacttcgaagaatggtaagtttctctctgctgatctggatatgaatctgttgagagatgccagccttcctgtcaatctttgagccccttttttgtacttggtggttccattccaagtataaccttcgattttacttgggttggcctcaattccctttgttgaaactaggcaaccaagaaattttccc

SEQ ID NO: 33215 - DNA, 490 bp, Zea mays
ctcaagcttcgcacctctgaactaactcggctgcatcgatcttcgctggtggtcaatataatcctgacctgaagaccttcccgactagtgttctgcaggctgcatgtattccacattgcccagcatggacctcctccagaagttgcttcccagtggacgggagaacgcatttcatgaggatgcctgacgcaccccttctgtataatatctccccaatgagtgtatagtgagccgactgcctggcaatgcgctctgccgagttcttatcgtctggttcttcttcattctttatatacttaatgatcggccttctccagtcatcagagtctgactcgggttgatctatgacgttacactcttctgtttgatccattgagatactcggctgtagaatttcttgcacgaagactccgggtgggacctgagttcgactggatcctagcttggacagtacatcggctgctgtgttccgatctctttctacatgatg

SEQ ID NO: 33216 - DNA, 354 bp, Zea mays
agcttagtaagaaaattatctttttgttaatcaaatatttctgaaagcacagggtgtcgatcgcccttatttgtttcatcctcttcaatctcttggaaatctgacatgctattcgcacttgatcgggaaagctccttgcggcgatgctgctctgacaacggatgtgccaagcttttcctcagttcatcaaacctcaagaagtatgttgtgaggccaatcttatgacttatagcatctgccacggcaaaggcatcacgacccttctcacggctagcattgtacaggatgcaagcacctagaacaacagcagccaatccacggacacaagcggcgtaacgtttattctaagcaagc

SEQ ID NO: 33217 - DNA, 453 bp, Zea mays
  unsure (1)..(453): unsure at all n locations
acatacnactagtcactgatcttaccatttagaaaggcactctttacatccatntggtagagcttgatattatgtgcacaagcataagcaagaagaatccggattgcttctaatcttgccacgggagcaaatgtctccccaaaatccaatccctctatttgagtatatccttgtgcaactaatcttgccttgtttcttactactaccccatctttattgtgctngttgcgaaacacccattntgtaccaataacattgtgattctttggtatctcaacaagctcccaaacttcatttcgagtgaagttatttaattcttcatgcattgcattcacccaatcaacatcaactagagcttcatctacacgaataggttccatactagatacaaaagagaaatgttcacaanatgaagctatgcgagagcgagtttgaacacccttactaatatca

SEQ ID NO: 33218 - DNA, 335 bp, Zea mays
agcttgacattatctccctgttgtaagccaatgccatccttaatggcaggcgtcttccactatagagcatgcttttagcaaacttaattttttttttagtcatgctcattaattttggcactaagttgagctatgtgatcatttagttgtttaattaaagctaggtgatcatgaatagcatcaacattaatgtctctacatctagggcaaataggaacatgctcaacagtagatgtagagggtttgcaagtacttaattcaacaatcttagcatgtaaaataacatttttatctctaagaatggaaatagaaacattgcagacatttaaattttt

SEQ ID NO: 33219 - DNA, 392 bp, Zea mays
gataaaactctgcttacactggtctatatagtgtatatagacgaagctgcttcaaaggcgcaggccgaagctcataaacgcgagattaaagatcttcagaaacagctggctagagctaaagaggagcgcgcgcttgatgaaacgaaacgagaacttactgattatatggtcagcaaattggaatcaaaagttaacgagcttcgcacatctcagaggaaatgctatgtcaaatctgtagaatgcgtgaataaaattaaatccagcttcgccagcgtaggcgccttttccagcgaagagaatttctctcgaggcaatcccgaaggtccgctggagtggattagccacgaagcagaggccttcgaagagattctgaacagtcgtggcgacatatg

SEQ ID NO: 33220 - DNA, 283 bp, Zea mays
caccagaagaacaatcaaggaaggaatccatgtgggagttcgcaagagaaaggtgtgtgtgtttgcatctatgctccttcaataagcaagctgccaagcaaaagctagaagcctgaagatgattcttgagtagccagaaccagcgtttgcaatcagcaaccggatgcccctcaaaggccagattttgttgaagttccatctcctccaagagtctgcaaagtgaagatatgtatctgaagtaagctatacccataacccttctaaaccgaatctcgtcgacgag

SEQ ID NO: 33221 - DNA, 419 bp, Zea mays
  unsure (1)..(419): unsure at all n locations
tcatgtgcagnaacaaacagtttaaattatctagctgcaaaaaaccgcttgttgcactttttacatgagaacataaccctttagcctcccataaactgtagtagagtgagaacataactctgttcacttgttcgtcaaggagtggcatagatgctcccttggggacctggtgaaacgtcttaagttcgccaaataggagcttgagatatggagtgcgatgctgtggttgggaggtggaggatgtttataggaaacaatgagttgttcgtttcggattaaagtcagttggttagactggtgtagctagtacgtcatatgatccgtcactacttccataacgcatgctgtaaaagaaatcgaataccaaatcaaaagatgatgggaggattggatggagaacaatcattaattactttatg

SEQ ID NO: 33222 - DNA, 332 bp, Zea mays
agcttgaaggaaaaaataatgtattataacttatccggctaccctaccactacaaattcaaaagacatttcaaagtaccctgccaagaatggttgtatacaatcaaagtaatgtgcaacgaaattcttggaaattattctaaaaaagaagatcaattgatgacagcggccttcggcacccgtccgaaacgaaggctaaaccgagtgatggatgctataggctttaaatatcctgactacgagcgactggacaagggtgccgaaagacaaaaaagaaaaagagtggctagtgctcttaataaggacgaccaagatcaatccaagaataaaaaa

SEQ ID NO: 33223 - DNA, 418 bp, Zea mays
  unsure (1)..(418): unsure at all n locations
tcaagccttcgaactgtgtccaggtatttctctatcttctgatctcttgccttanagctcttgtcaatatgaccagaaataacttgtgagtcggttttaaggaccgcccttcttatcccccattgcttntaacttccgaagccccaaaagtaaagcttcgtattcagcaatattatttgtacagctganatcaagccttattgcatagcatgttctgactntggaaggtgcaactaagacagcagccgcacctgccccgaaggtttcccaggaaccatcgcagaacactgtccaagcttcgacatctttatttgcttcttattcctgagcccctggcgtctagtcagcaatgaagtctgctaacgcctgagactgaatcgaggatctatgcacataatcaatgctgaattcgttgagt

SEQ ID NO: 33224 - DNA, 353 bp, Zea mays
agcttttttaactattatcttattatgtagtaccacaatgcggcagaatgtggacaaactaagattagaaattctcattatttgtttagactctatttggttcacccagataatcattatctgctaaacttgataaactttaaataaagcctaaactttgttatcttactccctctgccccaaattaaaatttgttttagttttttaacggattcatacaataattaatgtatatgttatgtatatgtgtctagattcatcatgatcaatttgaatataggtataaaaattaagagctatgctgatgtattgtctgtaatttgttaatctgtagcttattgccccttgcatat

SEQ ID NO: 33225 - DNA, 286 bp, Zea mays
  unsure (1)..(286): unsure at all n locations
tcacacatggagcggtattttatgtaattggatcttttctatttctacatagagtacgttatggtaatgcacacatatggtgtagctcgaattatcatgtgcatctgtatgtaaagaatcgacgtcctttctggtgaaaagttctctgatggcgcagccccgtcacataaagatgcgagcggaagttcaagccaattcaacaatactcccttccgcgtctcaggatactaggngcaacttccaaaatacaaagaccaagaaaaacattaattactactcgttccta

SEQ ID NO: 33226 - DNA, 260 bp, Zea mays
gcttgcaaagaatactgaggtctcttttttgacttcctctgtcatcaccctggatggagttgtgaattgacctcacatgcctcgggtggatttttcctccgaagccccttggtttttcacaaaacctatatgcttcctcccttctttggtggaagaaattgtcggccccgttgccccttccatattctggagcagtttcttcacactctgtggaggttttttagtctatacctgtgcaatacgttctggacatagcccct

SEQ ID NO: 33227 - DNA, 288 bp, Zea mays
  unsure (1)..(288): unsure at all n locations
ccttataacgtttgagaattaccttcatcagcttactcccgaagctatcatcaagatgagggtctntatatgggccatgaggagctatggattggaactagatgcgaaatatttctgtaacatccatgagctatcttgtgagacgaaggctaccagaaaggaacaatatcacaacaacttcagttgctacaacttcgtgcctcgctctggggtgagctatctagttctgacatttcggaagagatggccggcggtctggatgcacgagtggttctacgtgaaacatga

SEQ ID NO: 33228 - DNA, 365 bp, Zea mays
agcttaccatggacactcttcatttataatgcttgcataaagggatattagcattattaggctataactcccatcgtaaccataaggtgaggggaagctaaaagtcttgatgttcactagttttgagctcataatatttttcttctttatatcaccaatcgatgattatgtagaggatgtacaatattgtgcacactacgacatgagcctctatagcttctgtgtgctggctcccaatcatgcccatatttagcatgaccactaacctatgttgtgctccttcatgactctctctttctggtacccttggtaccatgatattgttacttaatgatatcatacaagatttttttacaacgatatca

SEQ ID NO: 33229 - DNA, 478 bp, Zea mays
  unsure (1)..(478): unsure at all n locations
gcttggtgatcttcctcgagccttcgatcatgcactcaaaacttactattattcttataacttcctcggnggnncatttagtatatctaggattaccacgaattaattgaactcgagtagggttaaggaaaataagtgatcttagaataaccttaaccacctcgtggtcatcccactttacgctcccgaggttgcgcgcttggttcaccaatgtcttgagccgattgtacatgtgttgtggctcctcccctttgcgaagccggaaccgaccgagctccccctcaatcgtttcccgcttggtgatcttggtgagctcatcaccttcatgcgcggtcttgagtaaatcccaaatctcctttgcgttcttcaacccttgaactnntgtatanctctctctactcaaagaggctagtagtattgttggtgcttgagaagtgaagtgctcgattggggccacctcatcctcatcatagttctc

SEQ ID NO: 33230 - DNA, 473 bp, Zea mays
  unsure (1)..(473): unsure at all n locations
cactaactgggtatctttatccattgattcactcaacaggacctgcaggatttagaccaggaagccaatccgtgtgttcggaccccctggatcacagctccaaatactagggcacccatcgtggagtggtggagcgtgtaggcttatggtacgggaccaggctaagcggctacatagctccggaccatcctatgggacatgtgttcgttctctagaaccggaccccaggttgctggacccacaggactatagtttcaaatactagggtactcatcacggagtggtggagcatgcaggcttagggtacggaaccaagctaaacggctacacagctctggaccaccctagaacacaagtacctgttctctagaactgccccccaggctgccagaccncccctatcgagggatcccaaactggcagcctggctactcaattcggatgtcattatanccagcagggtgggagctata

SEQ ID NO: 33231 - DNA, 348 bp, Zea mays
agcttatgaagattcttcatccttacatgggctagtcggcggtgccagagccaacccatgttagtcttagcaattaaacatgtgtcgagctcagctctatcaaaatctactaagtatagctgaccctctaacacacccttaaatgctattgaatcatcacttcttctaaagacagtgacacctatatcagtaaaaagacaggtgtagcccatttgacataattgggaaacagaaagcaagttgtaatctaatgaatcaacaagaaaaacattggaaatggaatggtcaggtgaaatagcaattttacccaaacctttgaccaacccttgatttccatccccgaatgtg

SEQ ID NO: 33232 - DNA, 477 bp, Zea mays
  unsure (1)..(477): unsure at all n locations
tctggctcactagatggaagtattcctcatatagtgatggttgtgaggaatacaagcagcaacaaaacgccgatcccagttctggagggacctactggcgaagaaaaaaatatgcatgttaagtttgcttaggatggaaacagtagatgacatctcagaagcaaattgtaaattaagtacctgagctttctgatttcggcgagacaggcaaagcaggcagcgacatttctgaatccaaaagaggatgccaatgtgattagacaaaaactagtactcaacatgttaaaaatagtgagaatcatgttgttatttcgaacattgtagtgtattgtttttgtgacccacattagaatgcctgctcttacctggagcacaaagtgacaatgattggacagaagatgaagatggccatggtgctgcaatattgtcactcanatcgcatgtaaagctaatgcctgtagcgttgcaaacacaata

SEQ ID NO: 33233 - DNA, 326 bp, Zea mays
agctttatgagacagggaacgatttctatgtctcttgagagatcgagtgttgtggagtgaaggttgcactgaagagttctttgttcgtgttgcgtgagtcgtaagggtgagctccccctcccccctttgggaaggcccaacatctccttttataggtacatggaggtgatccagctgtacatatgggggtgtggctatatgctaacgtggccggcggagaagtgcttgagccctgtagaagcgtggctggcggtgcggccccgggtcctgctgacgtttctttgacttcgtagagagcttgaggacagtcgacgtcatgggcccat

SEQ ID NO: 33234 - DNA, 384 bp, Zea mays
  unsure (1)..(384): unsure at all n locations
tataaggacgggtcggtaaagctgtgtgtcgagtgaaaaccgctcctacgctcgntgatgtgtgtgtgggtgtgtgcgcgcatgtatgtttaggcccttgggccactaagcataagaactctaggccttcttcttctttttttgtcccctcgtgactgtcttgcgtggaatatttagataggtggaagtggcggaaccctccgatttgtcttactacctgtgtaattagctatcccggtctcgctgacaggcactgngccaaacggtgtacctaatgctctcacccgttctcttgatggcagcccgagtgctgtacgatacagtgtgtnttgcggtctggaaatgctcaacaatgtgttgggagacgccgaataatgtgttgag

SEQ ID NO: 33235 - DNA, 356 bp, Zea mays
  unsure (1)..(356): unsure at all n locations
agcttgtgtcttattgctgagatatgatattttttaatactaaataaaaatatataaccttgcatcatgcagaagttttgagtgttcatttaaatgttgaattgaaatctggatttaggaatagaaaataagaaaaagataaacctgcgtcgtgggccaaatttcttcattcgaccaggaagcaatctcacgtcggcccatctctctccttcccttttctttttttctccgcgtatcgatgacacgtgggccctacgagtcatgcaaactcgccactcagccgaatcatgcgtgctntgtgctctggcgccgataggtggggccgggttgtctgccgctcggccaggactcccaca

SEQ ID NO: 33236 - DNA, 392 bp, Zea mays
  unsure (1)..(392): unsure at all n locations
tatcatgaccgaagactggcgggcaccaataactctgttcctacatgcgtattatcacccatccgacatcaacgagggcaagcacctcatacatcgaagctgggactttgcactgattgagggccagctctacaagaaggggatcagtcagccaatgctcaaatgcgtcaccgaaaccgaaggtgttcagatcctacgcgaagtccacagtggtacctgtggctctcacgcanggccaagggccctagctgctaaggtgatccgccaaggtttctactggcccgcaatgatttgcgatgcaaatcgggtcacaaggtcctgcgaagcctgccagaagttntcccctcgatcaagcagcccttcgcaatntacaaagatgatcgcccacacat

SEQ ID NO: 33237 - DNA, 359 bp, Zea mays
agcttgcatggataccactttttattctatataatcatggcatgaaccaattgtaaatttcacatggaccatacctgttaccttaagcttaccactatcgttgaaccattggatgtagtaggggtgtggatgtggaagcgtttttagcccaagcctctctaccatggtggtgcttgctaagttgttactgcttcctccatcaattataatacgacaagatcattccaaaactacacatttaatttggaacaagttgtgtcgctggttttgttcaactttaataatttgggcactcaagacacgtcttacaaccaggctctcatagtgttcaacatatgcagccccaatgtgctctacat

SEQ ID NO: 33238 - DNA, 449 bp, Zea mays
  unsure (1)..(449): unsure at all n locations
actcagctaattaatatcaagccctggggaagatgttatgtttttcattgntnganncccaaaccaggaaccctagctttctcaggtaatatttgccttatcctaatagagtactgactcaaaaaaccctagttacccagatgtaccgtgaagaaaagttatattcaagataaaacttactatgttctatcataactgcatattcataacatcacatgagcatacatgtatatatggttatgtatagaanacgaagaagtaagtgtcgaagaagaagagactgctccaccaactgagactccacctgccgggaatagattttattctgatatctgtggaacagatcccgactcccctacaacacaaggcaagccccagtgcatttaccttttccttgtgatgttaaactctttatcactngaataatgcattangtgataggagttgag

SEQ ID NO: 33239 - DNA, 354 bp, Zea mays
  unsure (1)..(354): unsure at all n locations
agcttcgggtctcttgccttgcttcttttgncaacatggccagaaatgacttgagaatcagttttcaggatggcccttcttattcctattgccattaacttccgaagccccaacagaagtgcttcgtactcagcaatattatttgtgcaactaaagtcaagcttggctgcataacatgttctaactttcgaaggtgtcactaggacagcagccgctcctgcactgaaagttccccacgaaccatcgcagaacatcgtccaagcttcggcatctttgttcatttcttcttcctgagcccctggtgtcccatcagcgatgaagtctgcccacgcctgggactggattgaggatcta

SEQ ID NO: 33240 - DNA, 385 bp, Zea mays
  unsure (1)..(385): unsure at all n locations
tagccaanataactcaaataaaaccccatatcaagcttctcatgtggtgacttaatgggaattctgaatttcagaattctgaaattcagaccttgagccaaagatcacgaatgttcaccttgatccctaactcgaatcctaatggccccaataacaaaaatgttcctaattaacccctctgtcatgtgccacgagatggcattgggacgcgtgcctcggacacgtcaaaccagagattttctccctgtgtgtggcagtgagacaaacatgatttctcccctctctatctcttaatccagtcagcgaaacttgctagcctccacacacaaacgacaaagggacctgagaggaagagatctttcaacgggatcgtggccttaatctc

SEQ ID NO: 33241 - DNA, 328 bp, Zea mays
  unsure (1)..(328): unsure at all n locations
agcttgttccacatcataaagtgttatccgtgctncctcatgatgtttgggaaggggttggtagctggtgaggtttacgctgttttttttttccagcctgttttgacacggattcctgtatacttgaactgcgggttggaaatgtaccagctgttaaattcagttgacataatttcttgctgtttgagcctgtaaccatcatctcttcttagatcaattgacacaactgctggaatcgcgtaataatggtaatcaataatgaagaaatgctgtaccaccgcgctggttcctgtaactctcttgggttatatttttccctggaatggtc

SEQ ID NO: 33242 - DNA, 504 bp, Zea mays
  unsure (1)..(504): unsure at all n locations
tgaagtctgacaatggagcatccatttgcacgaaccgtgcatatatatcatatgatttcagacttcagaaaccatgtgtttggttgccttcccgatgggtgtaactgtatctgcatatacaaatnttagtggttgtttggttccctttattacgagagataggctagcacgaaacttaaagcgccgccagccaggcccggcgggaaccctggcgcggtcgcacgcgcgcggccaggcttgggtgagccggctgtntcctcaggcacgcaaatcgagatattgattntgttggttctttgttatatctggtaattaaaagatttaattaccgaaccgattcatatgtgtgtttctgatatttttacgaacganactagactacacatgctatgtatattntaaataaaacaatttacgtgattaagattagtatataattagcgtttattaacatatagttagcgtctctaaataatttaacatatattattgctactatacaat

SEQ ID NO: 33243 - DNA, 378 bp, Zea mays
gatcttaagccccgcagctgcagcttgggagatcttatccttcatgtgctaagcggcgatgccacagccagcccatgctagtcttaactattaagcatgcatctagaccggcctcttcttttgcaaaatcaactaaataaagtttgccgtctaatacacccttaaaagctagtgaaccatcacttcttctaaagacagacacatctacatttgtaaatagacagttatatcccatattgcataattgactaaccgatagcaaattatatccaagagactctactaaaaacacattagagatagagtgctcattagaaattgcaattttacctaacccttttaccttgccttgattcccatcaccgaatataattgaat

SEQ ID NO: 33244 - DNA, 505 bp, Zea mays
  unsure (1)..(505): unsure at all n locations
tctatagggagaacatgtgataggtntgtctaacgtgcaattcgtanaagatagaccttgtgcagcttgtcaagcaggtaaacaagtgggaggagcacatcacggcaagaatgtgatgaccacttcaagacctctggagctgctgcatatggacctcttcggacccgtcgcctatctgagcataggaggaagtaagtatggtctagttattgttgatgactcttcccgcttcacttgggtgttctttntgcaggataagtctgaaacccaagggacccttaagcgcttcctaaggagagctcanaatgagtttgagctcaaggtgaagaagataagaagtgacaacgggtccgaattcaagaatcttcaagtggaggagttccttgaggaggaggggatcaagcacgaagtctccgctccctacacacctcagcaaaatggtgtggtagagaggaagacatgacgctattgatatgcgaggatatgcttgagagtcaagaccccg

SEQ ID NO: 33245 - DNA, 143 bp, Zea mays
cgacacttgtttcacatgtgttggcatgactcaacacgctaccgttgatttatggattaaaacactgcctgcccaagtccatatcatctaaatacttcagcttcgttgtggtgacttttatgacccccaccgtcatcacaatg

SEQ ID NO: 33246 - DNA, 329 bp, Zea mays
  unsure (1)..(329): unsure at all n locations
tctcacccaaaaanattcatgcccggcccaacggttatttactccctgctagtgttaatttggtacagcagaacctacagaggctacggggcgcaaacccccacatcgtcggggctagtccacatagtcagcactacttattggtggacaggacacgagaacgtttcgaggcgcaactcatggacaggagggatcaccgtaacccgatcccacttgaaagtcgcgccactacacatacgacatcgccatactcactagggaactctccactacaggtagtacgagaaagagtgacgctttttggcagacagtcacgatcctgcgtcttc

SEQ ID NO: 33247 - DNA, 257 bp, Zea mays
ttagtattttcactctatattcacggaatgatttagaataagaatctggtgaaacacctcactgagaaacaagaggacctttgcttaagcagatctaatatattcttgtgctggagccatgaattaaccttacaatttaatatgacaatttgataactcttatatggatgatttattttacatatgcattactcttaatattgagcctacatgttcactatctcctacgctgcaactaaacattcagtctaaaatag

SEQ ID NO: 33248 - DNA, 261 bp, Zea mays
  unsure (1)..(261): unsure at all n locations
acatgtgctaagcggcgatgccacagccagcccatgctagtcttagctattaagcatgcatctagaccgacctcctctttttgcaaatcaactaaataaagatggccgtctaatacacccttannagctagtgaaccatcacttcttctaaagacagacacatctacatttgtaaatagacagntataccccatgtngcataattgactaacagatagcanattataaccaagagaactcaactaaaacacattagagata

SEQ ID NO: 33249 - DNA, 405 bp, Zea mays
cttaccttttacagggcttagagagtttatcacatctcatgcgtttttatccgccgagatatataataagaaccttttaattagacgaccatgtcacattcagctcagaatagtgtgttgcatgtatactattcttatgtggcatgcatgcactacacgaagtaatactgtgctagatctgtagagagaaatggtcgactgcaatcaatgactacttaggttgcaacacacttgtcttaaatgcttgattatcttttaaagcattttataagctatatttataatattacaacatttttgaggaaaatgtaacaaataggagaccctaactattttgatcacttatttaaactcgctcccgcttatataattttgacttaacttcaaaaagctgtacacctcaat

SEQ ID NO: 33250 - DNA, 319 bp, Zea mays
  unsure (1)..(319): unsure at all n locations
cttgaactagcttctgacacctgctacgtgggcaactgccattatacatggaccctgcatgtgagcatgtgtaatcataaaatgttcactcttcaagctctgctgagggcccatganaacttcgtgattcacactcaagatggtagttcttctgtgatctgattgattatgaagagcatctctgcatcttgacccctcttgagtgtggtcatcgagatactcatttactgatactcatccttgtgaacaactcagaattcctctcatcgnactattctgatacttaccgctgctaatgcaagctctaatacatatattc

SEQ ID NO: 33251 - DNA, 160 bp, Zea mays
  unsure (1)..(160): unsure at all n locations
ttgagcatcactcatatactatgacacaatgcacttcactttctctatatagaactggtctcattaacctaattatgtgcacttggcatttaaaggccaaatatgtattcctctcancgcacatatttagggggagaaatctatattatatagaactatg

SEQ ID NO: 33252 - DNA, 376 bp, Zea mays
ttaaccactactatatatggagctgaaaacatcctttctttgtcttcgaccatatgaaagcctatcaagatttctcaaattctgagaaatgttaagatgggtccacagaaatgagaatctgtacagtacacatgtatcttgtgtacaatcagtctgctggattacaggccacattcttgaccaagggcacttgattgttggttgttgcgagctacaataatcgtgctgcgtacaaatggacaacttacccaaaacctcattgtggatctactaatcttgaaaagatgaagaaccttactgtaagtctgcctcaggaccttttcccttgtctgacacttactaccttatgacatcgccacatcctgttatactttaa

SEQ ID NO: 33253 - DNA, 325 bp, Zea mays
  unsure (1)..(325): unsure at all n locations
atctcagttctccaatcttcactattaacaggggatatgttaaggatttgctctttcagaagcacgaccgaaggtgctnttattgtttcananaatacttccgaaggtataggcagcccctgngctgctgacttagccaatagatcagcgcattcattntctccacgaggaatatntttgacagagaaaccttcgaaggaagcctcaatccttcggactgtatctagatatttntcaagcttcgggtctcttgctttatagctcttgtcaacatgaccagaaataacttgagaatcagttttaagaatggcccttctgattccca

SEQ ID NO: 33254 - DNA, 285 bp, Zea mays
tacagccgaacctatatgaacctgggtgctatgaggactactccataatgggttccttctgccgcttcagcggaaccagtttgcactgataataatggtcaccaaccctgcgcgccggccgtacaattatgttgcgctatatcatttgcatcctcgtttacattcagcgtcacagcgtatgcccaactgctaaaaatcgcccctgcctcattaactgggatatatctctcccctgaccctcaaggtgagaccaatcccggttaccctgtccttgttttttcccgg

SEQ ID NO: 33255 - DNA, 288 bp, Zea mays
  unsure (1)..(288): unsure at all n locations
aagttggtgttcatcatccgcataagaacatcatgacgactgacaggccactggagctcctacacatggatctanttctgcccgatgcttacataagcatcggcgggagtaagtactgtctagttattgtggatgattattctcgcttcacttgggtattcttcttgcangagaaatctcanacccaagagactntatagggattctcgagaacgggctcaaatgagttcggcttaaggatcaagaaaattagaagccgatatgggacggagttcaagaattcccaaa

SEQ ID NO: 33256 - DNA, 235 bp, Zea mays
actaagcttagaaccgaagcacagtattaaaatacctgcctgcacggacagggagttctacaccatggagacaaagacttgagtgtcatatggacttcgaccggctattactagaggaaaacgcagtatggaattccctctgggtttgcgaataacagactacctttaaatcagatactgaaaagcaacgcataactagggtctgggagaaacattccctaccacaaggggaaga

SEQ ID NO: 33257 - DNA, 266 bp, Zea mays
tactcgcaaagctagtcctgtggtgtgatcaacaccccactctagtgtgagcagattgcacttaaactgtcattatttgcaagatgatttacaagggaagtctttattttaagaccataattgttggatcttaaacaaatatcgtctattaaccttagtgatgaacacttaagaattacctagccgcaggaaattctaggtatattgggggtggtcttgagacccctcaccatcatggtgtaagaaacccttcaatggatctgtag

SEQ ID NO: 33258 - DNA, 247 bp, Zea mays
  unsure (1)..(247): unsure at all n locations
actgagctgcttgcctgacaagacactgtgtacttgcttacaacgaggcaaaatgttttggaagtagaattgattatcttgtcttataccatcttctttttnggtatctacacccttaggccaaatgcgaacaagtgctttgttcataccttaccagtttactggacaacttgaaaacaatttgtacttgtgcaataagggatactactcagctattgaatcagagaatgaatctcaacactgcgac

SEQ ID NO: 33259 - DNA, 386 bp, Zea mays
tcttatcggtagtctcctacgtatggactcaggttcatcaattgggctgagaagacattacccttgagtctgcaaaccacactacagatcacttcgtatgtcgcacggggtgtggggaaatgttctcccgggtgtatagtacactgctctctagctgtaaataaccactggtggtcttaaagccgtatgattatctatataagctttgccacctgattaatatgtctgtggatatcatctgacttgtaatgcctcgagacagtctaactcgcccagagtatattactcttctcagctgagcagattgctgccaactgtgttgaaaatctgaagaacaatttgccttctatcactgtgcctacgaccgccaacctccggaacactcc

SEQ ID NO: 33260 - DNA, 320 bp, Zea mays
aaaatgacggtgcgacacctcgtcaccaggaaccccccctcctgcgttcaacctagttatcggacgttttgtccagagcctgaacaccgtttttttcgaagcccacgaccggaaatcgaatgcccgttcagcggtcacgctacttaactctaattctatatcaacgactatgctgccgcctactagcagaggccgatgattctcataggcgactaggacagtctacacactgcgctactatacgccgagcgttcggtgggatggaccatgactggaatagcgtgtcgattgtctgactcgcagcattactacggcgatac

SEQ ID NO: 33261 - DNA, 324 bp, Zea mays
tcacttcttactcgttaacattttgttcaatgtactctaagtgtctaatactactttaaaaaaatagatctatgcatgcagacacacaaaaatcaccaggatctgaggctgctaaatctgtacaggaagtatattgacatgtgcaaactcgaatccctgcacaacttattatgaatactatcaagacattgtactaagagattcgatttccttaggcccaagaaaatttcccccaaataactagtcactttagtggtatgctacctcttgaggcaatttagatttcatcccagattagtattttttgctcaccagttactgtca

SEQ ID NO: 33262 - DNA, 289 bp, Zea mays
  unsure (1)..(289): unsure at all n locations
ttgaagacttcttgtagctgcttctgagagactgannacaacgtaatttatcgtgctgcatcttggatgagagcatgtaaggaaaaagaacgacgtcttgatgacacatttttttcttttggatatgactttagttgatgcactctaagctaactatggcctcttctttagtgggatttaaatcttatctaaagtaacatgaacttggcatcttatctaatataatgttaggccaaagagataataattgattacctgttttatagatgtggttgagtaatataaatct

SEQ ID NO: 33263 - DNA, 299 bp, Zea mays
ttgtttactatcagcattcacagctagatatattctcaaattgtccatgaaacttaatcctgatttgaagatgtgctgaatacattcattgctagataatatagtgaccacaaatccgtgaatgcgttagataatataacaatgagcagaacaatcaccgacataccgcaagtatctattgtggatgaaaatactcattcttgtcaaaaagttacgtcaatgtgctgacataaaaacggactcagactgtagatacagaataatttgctcgatgaattcctccataccaggaactccta

SEQ ID NO: 33264 - DNA, 174 bp, Zea mays
agggatatctcagttggggcatgacaaatcctaatggtgagtcacccatgttttaacttgtaagcgggattatcaaaataaatcagtcggaacaacacatttactactagatcactcacagttaaatttcattctggacacaacattgataagacccttgtcacatcaaccacg

SEQ ID NO: 33265 - DNA, 201 bp, Zea mays
atctactcttccttcgacttaaaaggccgtaattctcaccctatctaacatggatacctacgattcaccttcttctgacagacaatacagtggctatttcttctcctcctaaacgttgaatctctccctcctgcggcattgtgtttcctttgcaagcagactttcaaaagtcgcttccttacgtctccaaagaccttactg

SEQ ID NO: 33266 - DNA, 166 bp, Zea mays
ctacctagttgtgctgtcgcatctatctcgtcttgacctacaaagctgtcagtgctctattcgagatgtcagctatgctcacaatgtgtggctcgccagcaacctgtattgggtctacgagacgctgattcaggccattgctctcaaccaaaagggtgctagattg

SEQ ID NO: 33267 - DNA, 210 bp, Zea mays
  unsure (1)..(210): unsure at all n locations
gttaatcaaatggccaattcttgtttctaatacttaaccaaagtntaagtacacaatanaatctataaaatgcagaggggaaaacattaaaaaggccccttanagaccccanatccattctttaaatanggagtacactagagctctataatcttctctaagtcanaaataaactctaatctaaagatcagacgtgttcacttggtaaat

SEQ ID NO: 33268 - DNA, 145 bp, Zea mays
cttttacgcttaatactatccaagggttggtccagtcttggtttttcacggctagcaccaaaccgctacactggccatagatgaagctcaaagcatgatgttgcgctctactgctatctaccctcgcaaagagctgcttgtccgc

SEQ ID NO: 33269 - DNA, 216 bp, Zea mays
ttacctacttcgcgcaacgaggcccggcactcgtttgttatgtgttatctcggggccaacaaccttcacgacgttgctggacatctgtgtgaagtcctgcagcctcgattgcgtcccagcttcatgtgagtgtatcccgaggaacgagttgttgatgctcttatgccggttgtatgcgtgtcggctgacattagatttgggatacggtttctatta

SEQ ID NO: 33270 - DNA, 404 bp, Zea mays
  unsure (1)..(404): unsure at all n locations
cttcatccncacatgtgctaagcggcgatgccacagtcagcccatgctagtcttagcaattaagcatgcatctagaccggcctcctctnttgcaanatcaactaaataaagtttgtcgtctaatacaccctctaaagctaatgaactatcacttcttctaaagacagacacatctatatntgtaaatagacaattatatcccatattacataattgactaacagatagtaaattatatccaagagtctcaactaanaacacattagagatagagtgctcattngatattgcaatcttgcctaaacctttcacctttgccttggttcccatcaccgaatatgattgaatcttgggaatccttattcttgacgtaggaggtgaacatcttcttctcccccgcatat

SEQ ID NO: 33271 - DNA, 354 bp, Zea mays
  unsure (1)..(354): unsure at all n locations
tttaggtcacaatanaaataagtggaatatgattatgtacttataagtaacacttaggggagataacaatctattttcanataaagtaaatgtatgttatagttcatgttatacttngaattcagtatcccttatgtagtattgtgtacctttaagatgtgttctaatgtttgtacatgtttggtgtgatgttcatttgtactttctaaatgtatngaatgcatgctcgctttatttagacagcgagcaattcganggttctgagtgtgttgttggagacctccctaagcaacaacccggtgaaggcaagtgtgctctgacctattatgtnctacatactctatgattcactat

SEQ ID NO: 33272 - DNA, 225 bp, Zea mays
ttacttgaatgacgtatcctcttgactatgctacgatacaatttcaactttctaaatcataagatgtataaatgcattctaacttcctgctgatcataccaatatgatctggatctatttgctagaggaacactcttcccgctatgtggatcgttctatcactgacccgacataagaatgtaaacgttgaaaccggatatgaaaccgcactactaaagggtacgc

SEQ ID NO: 33273 - DNA, 190 bp, Zea mays
tatattatattcggatacaacacatctactgctagatccactccagtcaagtcttcactttgcagcaagacatcaatcagttgcttgtccatcaaccacgcagtgacacacgatattgagctcgaagctataataaatcagatgtagatgctttgtgactaaacactacacttgtgaactctcttgcatg

SEQ ID NO: 33274 - DNA, 298 bp, Zea mays
ctatattacccaaggtgtccgcaagtcattttcatgtgacattggctatgacccctaattttttaaactccccctttgccttatttgtacaactttgtttaacagtacccaatcttgaacatgcagagatcatcggagatgagatgtatatactcatacatgctacataaagtttaccagaggaatgccgctgcttgcgtatagtgaccaattaatacattactattcaggtgctgttatgtccttctggttctactctttaaaagctgagtttatgaaatacttttactacatcttg

SEQ ID NO: 33275 - DNA, 308 bp, Zea mays
  unsure (1)..(308): unsure at all n locations
tatgggtgtggacatcacaagtgaagaataatanttgcttattgagtctcagtgctcatatcttggagacagctaccaagccaatgatgtaagcaagaagaactttgatgtaccgagtgcacgggagaaggccaggangccgatgaacccaaatcaatgggtgaagaagaagacttactaagtcaatgttgatcgagttgagaagagctatggtgcatcgaagatcactacttaaggacgtgacttacaaccaatganggaacatctatagttatgtggtgtaagtcataaggcttcatgatcaagtc

SEQ ID NO: 33276 - DNA, 303 bp, Zea mays
tcctggtcacttgcttactctcactgtcgatatacaggccttctgatcctggatactgcgcccctgcttgctggctggattgttaggccgaggcaaaccgctcgcataactttagtgtctcctagacgtacgatgtccggactctttttgcggcatgctcatcgtagagcgaagtgaccgcgctgcctatggtacccaacgctcgacaatggcttgcttttatcagacttttgcctggaattcatgccctccaccctgctcgtatactgacagactggcatgaacaaactgaatgtgaatgtg

SEQ ID NO: 33277 - DNA, 372 bp, Zea mays
  unsure (1)..(372): unsure at all n locations
agaacttaatactgcttgctacgacgaaggatgggcgttactcttgtaccccctgcatcacttcgccgtaactgctttatctacgtgatgccgcgcccatctggtggttgtgagcacccgggccccgtgcgtgctgttaaaataccttgtcttgcacgcacagcgccgcttggtgcgggtgtctttgccccaatcggcaaaccgtgatgtgactgccncgttacaactggtgctgtctgggcccaacggttctgcgataggcccgatgttctacagctagttctgaagataccgggaaatactttatttcatacttgcctgctggtctatccccccccgtccatgttttggccgcgttttagactactggtg

SEQ ID NO: 33278 - DNA, 147 bp, Zea mays
  unsure (1)..(147): unsure at all n locations
agatgctacagctaccgaagctgcccncaccgaagttgcaaatgccgaagctgcaacggccgaagatacaaatctggagggcacatcttctgacattgacnaaatgcttatgaatatggccgccgaggaagctgctgcagccgctga

SEQ ID NO: 33279 - DNA, 324 bp, Zea mays
atattgagggacaatggggaagaatgtgtctgaatggtgttgtagctggcacgcatctgttgaacccccacaactacaacggccatagtaggcctggcattggtcctaaaacctggcgagaaatatatttaaagatattttatgacagagcacatacctgttacgttactattatgtgaatatgaccattgatcacaaattaaaaaatactggatgcattcacaatctgtattattaaatctgctccatcacaggactaggcctttagattatgcaaatatctcactaaggataattgattgtaactttttatggagctccggg

SEQ ID NO: 33280 - DNA, 120 bp, Zea mays
gctggctactacctagatggtggacaaagacattttactgaacctaatacggataagtatgatgcgttatcgcatatgagtttcaatgctgcatacactgtgtagaagtggtaatgccca

SEQ ID NO: 33281 - DNA, 77 bp, Zea mays
tttgacaatcgtgatgtcttcgcgcgcatagaatctgtctgaaacctttcgacagtgttggatgtgatgattcacat

SEQ ID NO: 33282 - DNA, 365 bp, Zea mays
  unsure (1)..(365): unsure at all n locations
ccctgagctcgatgtcgagaaacgatgtatatattctgagtgcaggtggcccactatgctggagtacgcgcgacctggcgattcatctcccacgtgtcgtggtccaccgttcaatgggtgtgggtgactattgagcgagtgcgggcgacttgactaattaccttcacatctgcaacactatataaacagactggtagtgtcaagtaccacagcatcattgcattgcctgtgtgctgtganaattaaccatagcgaacttctatccatttcagcaagcaccatttgattacttacataaatggacttttcaaactgaatatcatacattctagactgtagaatcacactgtggccagacgtcactg

SEQ ID NO: 33283 - DNA, 279 bp, Zea mays
tctcgcttctgcgctcactgctaacatcgttcaccgtgccttgtcgccgatcggaattgtgttcgaagcgaatatacaccaaatgcggcatcatctttacctcctgtaagactctgaccgcaagctgccaaggtcctgtggtcgatccaattacctactaaacgtggcctggaaaaacgactctatcttcaatcataagggactatcaccttgaagttcaaatacattatctttcgcttggagcctcccccaccgatactctcgattataaaagccact

SEQ ID NO: 33284 - DNA, 257 bp, Zea mays
  unsure (1)..(257): unsure at all n locations
gcttcgtgaagattctctccgaagctacaccttcgaagatctatagtgntactccttacanactagtatgagtgtcttcttttccagaacattcttctggagttcgatgttgtgcccncttcttgtgccatatgcagcgtgatgtatgatgcttatggtatgcgaaatgatgtgatgatgttatgctatgcaagatgatatttattccgaagacaaacatacatccctgtgatanaatacataatctttntgaatca

SEQ ID NO: 33285 - DNA, 228 bp, Zea mays
tgcctgaggtcttctactcaagcttgctgctgctgaaaccacccctaagagtatatcaatctatatcaattcgaatcccaaggtatgctctatttattgagatataacctaaaatttgatattccaataaaaaaatatataatgttgctctgaaatagcaatacatggctgatgtagcacagctatatcatcaccatccatactcaatatgtgcatccattagctatt

SEQ ID NO: 33286 - DNA, 145 bp, Zea mays
ctgaggcataaacactcagtctttcacttgatacttcttgaaacagaactggtcaaatattgggctgctttattgcataactttctgacaggctgacttacgctgatgcgaactgcacatataaaacatcgagcctctggcggat

SEQ ID NO: 33287 - DNA, 129 bp, Zea mays
cacaaaacggtaattcttgattgttagagttcttgtgtactagtactgctgctaacctatccttagcttaccactttatcaccagttttggagtcctgcattttgtagaggtctgtctctacaaacttg

SEQ ID NO: 33288 - DNA, 210 bp, Zea mays
  unsure (1)..(210): unsure at all n locations
agagcatggtatgaatgccttagagaattccttattttaaaatggcttcatagtcggcanagccgatcctactttattcactaanactcttgacaatgaatttgttgtatgccaacattatgttgatgatattatatttgggtctactaacgaatctacatgtgaagaatttagtatgatcatgacagagatattctagatgtctatgat

SEQ ID NO: 33289 - DNA, 350 bp, Zea mays
ctatactcctcacataacaggtttctttggtctcttttcttaagctacgaattataaattctgtgactttggacgagtttctacattcttccttctattcgcttatgctttaaggggggtttgaactacaagtcacttaataaatttcaacaattctgcaaaattccaggccttctactggttataactctctgtccaaatatgttgtcaaaaaagacgggtctttctgttaaattatcaaattaaggcaccggggtgtattaactacactccttttacagaaggtatacctaatcatattttttcgcattagatgttaatataccttgtcaaattctaccactatacta

SEQ ID NO: 33290 - DNA, 190 bp, Zea mays
gaacttctctcaatactccgagtatataaaatgatatttgttggccggaaaccaagctgtatcaccgagtgtttgcactgccaacactgacagataagcctgtaaagcattccacacttcgtgtatgcttttctcgtcgagtaagatcctctacatttaaaagtggccggccaatgagattgttatgtca

SEQ ID NO: 33291 - DNA, 342 bp, Zea mays
  unsure (1)..(342): unsure at all n locations
atcactcaaccacacatgagaacttaatcttgatgcatgtatagtgtatagatacctnctctaaagtcaaacaatacacatcaaaatctagtaagatgaaagtatattggctatcccatctacaatatctataataacttatatgttgtttgtttaacacaaatatgaagacaacatgataagggcgagcggngcatctatatggtgttcgagtagagatggaagaatggtttgataaagttagtcttctcgtatcatctaacacagtagtacttgacaactccncgtgatgatatttggcaaagctnttcttttagtcgatgatgaccaacatcatcaaca

SEQ ID NO: 33292 - DNA, 272 bp, Zea mays
agcataggccttgaactcactggagatctcatcactggcttcgcatgcaaccaccaatatctacataaaagtcagtcctcttaaatcatagatactaccttatctcctatagtctgatatatttttaaacgtgtgttgaccctgacctacataggattactgtgtctgcaatgatgtcaataaccaagggagagtatgattgccggggcaagagatacactccaaaggtgctaggaccctataccctttcctctctggagcctgctcctttg

SEQ ID NO: 33293 - DNA, 427 bp, Zea mays
tggcacttaaagatacccttcctcagacccacaaaacccctcatagtgctggaagcctacaacactaggtgcacgaccttttttttattcgtgccccccccccccaaaacaaacatggaaaaaacccgaaaggatttgattggcttatcaatcccatcaatggagtccactaatagctgctcaagtcacagcaaataaaaactcaatctcattggagcaatccactcaagcaaactatggtttccttaccagcaaggtaaggaaacaattaaaacccagttcaaaaagatctcaagcagaagtcagtgcaccagatgagaagaaccgagaagaaaatgtctggagataaacgatcccttcacggtagttgaaggaaggagcaatctatcttctactcgtcatttccctgatgcccacattgaacatg

SEQ ID NO: 33294 - DNA, 448 bp, Zea mays
tatgaagattcttcatcccaacatgtgctagtcggcgatgccagagccagcccatgttagtcttagcaattaagcaagtgtctagttcagctctatcaaaatctaccaagtatatctgaccctctaacactcccttaaatgctattgaatcatcacttcttctaaagacagtgacacctacatcagtaaagagacaattgtagcccattttgcataattgagatacggaaagcaaattgtaatctaatgaatttacaagaaaaacattggaaatggaatggtcaggtgaaatagcaattttaccaagacctttgaccaaaccttgatttccatccccgaatgtgatagcttgttggggatcttggtgtttctcatatgaggagaacatccttcttctccctgtcatatgggttgtgcacccgctgtcgagtatccaacttgagccccc

SEQ ID NO: 33295 - DNA, 416 bp, Zea mays
  unsure (1)..(416): unsure at all n locations
tcattngcatagaggttcttgtgtgcccacataattagacgtcgtgtttcggatctctagccatagcattgaaactagaagaacgtcgtccttcgtggaatgaaaagtgcatggatagcatagcatgtacataccacgtgatcgatctgttttaaaacccattgacgacgtacttgtcattcacgggttccccttcctagatgctatagccctcacgcgccaccttggtacacatgttacagatggcaaacatgatctgggcataaggctgtgatcaacaaatcatgtatatggctgtgcaaaacattgttttatattgtaaacaatattgtttacacattggagtttgaaatatgagatgtgataagacataagatatgagagctgctacagatagcctaagtccccatgtcacc

SEQ ID NO: 33296 - DNA, 71 bp, Zea mays
tagacttcgagattgagacactatattaaactatcttcctgcgactggtaaagagacgcatattaaaccat

SEQ ID NO: 33297 - DNA, 457 bp, Zea mays
gtggacagaggcatgtcagatcatactccccttattctatacacaggatcacctgcttttttggggatatctcggcagttcagatttgagcttaactggttctctcgagaaggtctccatgccaaagttatagaaatttggagcaggccagttaaaggtagcaattcagttcaacgatggaatcataagttgggtgctcttcgtagggctcttcgggggtgggcaagccacaccaacggggtttacaaaaggaagaaaaagagtctgcagttaacaataaatgatctagacatagccgcggaagttagaaacctgacagagcttgaaagggaacaactagcccaagctcgagatgatctagctcgcctcttgagagaggatgagatcaaatattttcagcgagctaacgtgaaagacatccttctaggggataataacactagatactttcagttga

SEQ ID NO: 33298 - DNA, 407 bp, Zea mays
ttaaatgggactcctatgtatcttctaacaattgtaatgatgatgactagaggatcacaaagaataaaacacatgctaccatctccatcaacaacgaactttctctctatgacgcttgtatgaaacaagtgacgcctaagagggggggtgaattatgacttctaatactttcgctaaactaagccacaaataaatccttagagcgaaacctatgcaaataaacaaactagaatgtgcaaactaagttttgtctaagtgttgctatctctacggcaatgtctaagattcaatctacactatataagcatgaatactagatcgaaacttaaatgcttaatatatatgcggacacttatagagcacagtagagaacaaactctcgtggatgacgccggtatctttacccg

SEQ ID NO: 33299 - DNA, 414 bp, Zea mays
  unsure (1)..(414): unsure at all n locations
tgtggaggttcttcatccncacatgtgctaagcggcgatgccacagccagcccatgcaagtcttagccattaagcatgcatctagaccggcatcttcttttgcaaaatcaactaagtaaagcttgccgtctaatacacccttaaaagctagtgaaccatcacttcttctaaagacagacacatctacatttgtaaatagacagttatatcccatattgcataattgactaacagataacaaattatatccaagagactctactaaaaacacattagagatagagtgctcattagaaattgcaattttacctaacccttttaccttgccttgattcccatcaccgaatataattgaatcttgggaatccttattcttgacgtaggaggtgaacatcttcttctcccctgtcatat

SEQ ID NO: 33300 - DNA, 458 bp, Zea mays
  unsure (1)..(458): unsure at all n locations
tgaagccatggtnagtagcataggctaataatatacgaattgactcaagcctagctacgggtgcataggtttcaccgaaatccaaaccttcgactcgggagtatcccttggccacaagtcgagctttgttccttgtcaccacaccatgctcatcttgcttgttgcggaagacccacttggttcctacaacattttggttaggacgtggaactaaatgccatacctcgttcctagtgaaattgttgagctcctcttgcatcgccatcacccaatccgaatcttgaagtgcttcctctaccctgtgtggctcaatagaggaaacaaaagattaatgctcacaaaaatgtgcaacacgagatctagtgtttaccccccttatgaatgtcgccgaggatggtgtcgacggggtgatctctttggattgcttggtggactcttgagtgtggcgggcttgggtc

SEQ ID NO: 33301 - DNA, 472 bp, Zea mays
  unsure (1)..(472): unsure at all n locations
ttgtatggccgatagtatcgtactccgttgaactggtctttaccaggtgaaaggagtttcttcaggccagatatggtaaaggagactgaagagaaagtttggcgaataattcatcatttgaagaaagctcaagctcgttagaagagttacgcagaccaacgacggacacccttgtactttctagttggggattatgtctatttgaaaatctccccgatgaagggtgtatcatatttcggggtaaaggggaagcttgcaccccggtacattggtcctttccctattcttgagcaatgtggaccagtggcgtaccgactccagttacccaaaacattgtctgttgtacataatgtgttccacgtgtctcaattgaagaagtgtcttcnggttcccgatcgaaccattgaagtaacggatgtttccttagaaccaaacttgacatattaagaacaccttattcaagtcttggatc

SEQ ID NO: 33302 - DNA, 440 bp, Zea mays
  unsure (1)..(440): unsure at all n locations
ctggatagtnttctagcgagtaccatcttaaaaaattgtttttgttttcttcaatcgtcaaacattgggaggcccagacatttcaattattgatcaatctaaatntgtctgaattggaccttcaattgcctgccagaacttgagtttagattctgaatatgccttgttgacgagctgtcatcagactcttaagcaactaagcaagcacaaattgcttttcgattcatgtgtgctatatttggtttacttggtagaattgatttctaagtatgcagaatagcattgaattgttttcctctcaaaacaacctgatagccatgtgatatctcatgatactaactgataccatttctgtgattgactactgcagtctggatgcttgaagccaccgaccgtatgcgcattcacttacatgaccgagacgtcctgtgaacaaaccc

SEQ ID NO: 33303 - DNA, 425 bp, Zea mays
gcttctaccggatacaaggcaagcttcgtaactagagacgcttatttctcatttgttaccattaacagaggagctattgatgatggcaatccaatgagtcagagtcactactgtgacgaattaaagtcttggggagctatgctcatgctttcattttttctacaatggcaccacctaaacgccccactatagtgcgctcttaatgaaagacgggatgagatctcttcacttgcgctcgagcttcatcggatcgtagtcgcagtatgaataagaagcaaggcttcccgggaaaagacagattactacctggcacttgtattgtgtctgctctacgagcgctttaaacttactaatgatccgattccctgaattcgccactagaacagattcactcccatgatggaatcgacttcctaaagcgcttg

SEQ ID NO: 33304 - DNA, 473 bp, Zea mays
  unsure (1)..(473): unsure at all n locations
ctcagctatgaagattcttatcccacatgtgctagtcggcgatgccagagccatcccatgttagtcttagcaattaagcaagtatcgagttcagctctatcaaaatccactaagtatagctgaccctctaacactcccttaaatgctattgaatcatcacttcttctaaagacagtaacacctacatcagtgaataaacagttgtagcccattntgcataattgagatacagaaagcaagttgtaatctaatgaatctacaagaaaaacattggaaatagaatggtcaggatatatagctattttaccaagacctttgaccaaaccttgatttccatccccggatgtaatagctcgctggggatcattggttttctcataggagaagaacatcttcttctcccctgtcatgtggtttgtgcacccgctgtcaataatccaacttgagccccaagatgcatgaacctacaaaac

SEQ ID NO: 33305 - DNA, 372 bp, Zea mays
  unsure (1)..(372): unsure at all n locations
gtcatgcttctggaataatattctctancgaagaagaacgagatgctcaacactatgcccagaagctgaaatatacgaatggggcattattgttcaacggcatntgacaagaagattttttgttctatctccccgatagcaaagatatatctgtgtgccgggagatgggttgaaactttggattaccaatgttagaagatgggctctccgtgctgtcaaaagatgaattgtgcgacacgctaacatataacagcatatgggtgtgaaaaacaattcttgtatataaaggcgacttatttcatgagtgatacttaatactatacttctcttgcagagcttgatccttaacaatgccctcacggcacacaaaaa

SEQ ID NO: 33306 - DNA, 416 bp, Zea mays
acatcggctcgccttatgttctaggcttgaaagataaaaatgatcgcttgaaaactattgttcttctatcttatgtctatatgttgctcctatataagatacaaataaagatatgttcaatacattgtacatatagccatgtgaaatactgtttcatatcgcagacaaggcaatttagagaaactgaacgtaagggtgcgttaggtttagctgtgagctatgaaaaagctatcgtgagctgtcagctatgaaaaaactggtgtgagctgatagctatgaaaaagatgaaagttgtttggttgaacctgttgtacaacggtgtgattgatataaattatctataatgcccctaacgccttgctatgtagattgtacgtaacatactcataatgatttgatctatacacataaaataa

SEQ ID NO: 33307 - DNA, 467 bp, Zea mays
  unsure (1)..(467): unsure at all n locations
tttcgagcacactatattcctgatggagtcttgctaatgaaactagaggaattntntaggttaaagcagggtcctgacacggtaatgaagtatctcggaaagtttaattacttgtctcaatatgctgttgaacatgtgaacaccgatgttaaaaagtgagattgcttcatgaggggtttgagttttaagctgtagaagaaaatggctacatgttatgacctaacatttaacagagcagtcagtgtggcgattgcagtagaagacaaggggtaggtgcaccaaaatgctaaaaggatgtggaaaggatctggagttggatctttccaggacccagcaaagcgttaaaaggtaataatcagaacagctggctctaccaacactccctatcgttcagccgcttatcctgctaanactcatatctacatttgtcccactaatatgcaactctaatccctacccacaaatag

SEQ ID NO: 33308 - DNA, 362 bp, Zea mays
actcagctttaagggagaacacggaaggtctactattgtatcttttcaacaagatagaccttgtgcagcttgtcatgcaggtaaacacgtgggaagctctcatcatgccaaaaatgtgatgacaacatcaagacccctagagttacttcatatggatctcttcggaccagtcgcctatctaagcataggaggaagtaagtatggtcttggtatagttgatgatatttcccgcttcacttgggtattttttttgcaggataaatctaaaacccaagggaccctcaagcgcttcctaaggagagcccaaaacgagtttgagctcatggtgaagaagataaagagcgacaatgggtccgaattca

SEQ ID NO: 33309 - DNA, 382 bp, Zea mays
ttgcgcaacttgtcatgcatgtaaacaagtgggaagctctcatcatgccaaacatgtgatgaccacatcaagacccctagagttacttcatatggatctcttcggaccacacggctatctaatcataagaggaaagaagtatgggcttgttataagtgatgatttttcccgcttcacttgagtattctttttgcaggataaatctaaaacccataggaccctcaagcgcttcctaaagagagccccaaacgagtttgagctcaaggcgaagaatataatgagcgacaatgtgtcccgagtcaagatccttccagtggaggagtatcttgaggaggaatgaatcaagcacgagttctccgctccctacacaccacagctaaat

SEQ ID NO: 33310 - DNA, 452 bp, Zea mays
cttattgaagcggccaacaagcacacgaatttgcgaaagagctaagagatattatgtctgtgcatcgattgtgataataagatagcttggagagatacaggagtaatccaatcacatctgctaaaaagagggtttaaaaacaattacacgatatggtcagaacatggtgagttggatccgtgtgaagtgcctggtaatgacgagagagttgccggaattttagatcttaaagttgatggtaaagtggataatgtggatgctaatcaagattttgaagaatctgattgtgaagagatgttgcgccatatggaaccagaaatgttgagttctgtgggatcgcacaaagggctatctaaaatggagggactggaaagtgcctcaaaagaacctttatatgatgaatcatagggttgtgacaaagagtttactacactgcgtacagttctagaact

SEQ ID NO: 33311 - DNA, 356 bp, Zea mays
taatatacgaattgactcaagcctagctacaggtgcatagggttcaccgaaatccaaaccttcgacttgtgaatatcccttggccacaaatcgggctttgttccttgtcaccacaccatgctcatcttgcttgttgcggaacacccatttggttcctacaacattttggttaggacgtggaactaaatgccatacctcattcctagtgaagttgttgagctcctcttgcatcgccaccacccaatccgaatcttgtagtgcttcctccaccctgtgtggctcaatagaggaaacaaaagagtagtgctcacaaaaatatgcaacacgagatctagtggttacccccttatgaatgt

SEQ ID NO: 33312 - DNA, 457 bp, Zea mays
  unsure (1)..(457): unsure at all n locations
ctcagcttaagatccaggaagtacatgcaactatagaaggaccttattgttcatcactgggcgcatctcggaaccgacatttaataaaagctggtntcatgtcatgttctatgggagtttaccaataagttagtgtgttgactttttattcaacgcagtggattgtccgatcatgcatgttagtttgtcattgatatcaaataagttagtgtgttgtgtctctattgtttcaagtgtattgtcagatcgtgcatgttantttgtcatcgtaaggcaataagttggaatgtagcaatcatacgagtgagatcgtacaaacacaatttataacatgaagtttgacaaaacagtacattgatgctacataggataactagtatattttaccaataacaacattntgtataagatctatcataagttatgtgatacactatggttgtctgatgcgttgact

SEQ ID NO: 33313 - DNA, 309 bp, Zea mays
ttgcagggctaaattgcttattgcatctacggcttgtctatcctaattgacagaaccgccaacaaagcgagtgaaatagcttaactcggatcaaacgtgactagtcgtagttttcagcctctagcacttaaattacgacttgttatgcaatcgctggatcttgaaatatgcgtgaggtactgcactaatggggagctttcaaaaaccaaatcactcatgaaacccctaatgcaagccaaaaggcaaatttcaccatgtgcctcatttctcttaaaattatctagcctcaggaaaaatattttgaaaaaa

SEQ ID NO: 33314 - DNA, 426 bp, Zea mays
tcgcttggctgaaaagtaagacaagatagtgcttataacctctcgcaacacttggttgactaattcttgggttaagctaaaaattagaaaatctgatgaaatttaatcgaacacaagtattagatttctctttggaatgttgtgtgactgctacttgggatatccaacttgaatacacttgttagcactaggttggtttcctgcttatactcgttaagtgatgttttagtactgaacaccttatgtaaatgtgaaaattgctcacatcattaaataatcacaatttgtatcttaccatcagtttgagcatttgctaacacatggatttgttgcttaacgcacatgataggaccacttagagtatcttttcattgtaattgatatatatctaaatctcttgcattttatgtatcccttacatttcat

SEQ ID NO: 33315 - DNA, 457 bp, Zea mays
  unsure (1)..(457): unsure at all n locations
ttttgcctgtgtctcctctcctcctaatgggagatctgtgtgtctttgtgggtttaactctgaagtgtttgacgtcagagaatatgaagctggtgaattcttgactcgctctcttgtccttcacagagaaaaaaaatttatctggaatctcgttaatgtttatggggctgctcaaaaagagcacaaatcccgttttctcagtgaactgtctgcagtttgttcaagaagtcaggtccctatgcttattgggggtgatttcaacatcctcagaaaagctgaagaaaaaaataaaccgggtgccctcagtaagtggagatttctggttaatagtatcatagatcatcatggtctactggaatttgagttgaaaaataaactatatacgtggnctaacaaccgcaacgatcctactttttgaaaactttgacagattttggccagacctgactggatcttg

SEQ ID NO: 33316 - DNA, 419 bp, Zea mays
  unsure (1)..(419): unsure at all n locations
tggagtgacggcgaaagatgagtagtagagtgtattgtgtgccctttgctttgccgaagactccaattccctttcaatatacctatgacttggtttgaaagacacttgaaaacatattagtcatagcatatataaaagagacacgatcaaaggtatacttgtgtgctatgtgtgcaaattagcaaaagaagttcctggaatcaagaatattgagctcgtgcctaagtctggaaaaagattgttcatcaagtggcttggtaaagatatcggctaattgatctttagtgttaatgtatgaaatctcgatatcccccttttgttggtgatccctaagaacatgataccgaatggctatgtgtttaatgcggctatgctcaacgggattatccgccatgcgaatngcactctcattatcacat

SEQ ID NO: 33317 - DNA, 426 bp, Zea mays
  unsure (1)..(426): unsure at all n locations
ntgctgatgcttcttacctcttaaacgagcattatgattatcagggacatcgaagtataccatccctctcctataaggccccgtactacctccgggtcaaatagaacatatgaattgacttcctccttacatattttatctatcgctgatgtctcgtcttctgaaagcttctacagcaatgtaacgcatcagttcccatcaatgcaagatactactaatgtatttttttttttttgcattgagagcaaacaatgtatgctttacgtgataggaagatagcactgtatttctttttttctttttcctgtcaaattgcaatgcccttaatcgacagaaataaaaatcaccatgaatggatctgaccttaaattcttccagtgggatgttgacaaatcgatcgcccaccatggttctattgctaaatct

SEQ ID NO: 33318 - DNA, 434 bp, Zea mays
gttagctcattgacaataagagtacttcatgcttgttatcaaagatgcataaacgcaagaatgaaacgtttgagaggataaactaagtctgaagcacggattatgcatggacatgctttctctttcttgtatacaagatatcgtaagaaagtataaaaaaggaagatttatgtacaagtttgaatgataagaactggttttacccttttgtacctctacatatagacgctctcttcattgtgctttgtccttaagcttagttgcttaagacctatacttaatgacaatatattgaaatacttcgcacaagagagagagcttcaactagtgaactctccaagatatcgtagcatatatttacggatcacaagtagataaatgaatcagaaatctcctttgtccttatgcaaatcaaattaatgcaatataaattg

SEQ ID NO: 33319 - DNA, 460 bp, Zea mays
  unsure (1)..(460): unsure at all n locations
tctcttaacatatattgagtgagcggtatagaattcatttcaatataaatattatagtataaacagtggtttaatgtatttgatctctaattattataatgacatttttcttttagaaagaaaagataaatctaaaaggagatcactattcatagtataaataattaggtaataattagtttatttctatagaattggttaagtcattacacgtaggccacatattcttggtcaaataaaaatatagaattntctagtcatgataaatataagcataacacttaattacgtagaatagtaaaatgctcatttatgtcataataaccatgaataggttattaaaagtcttatctagttatttacaattaattctagtatattaatgttagaanaattataaataaataattcttagatatacgtataaattctatgtggaaaggagaaatcgaaagagtag

SEQ ID NO: 33320 - DNA, 373 bp, Zea mays
  unsure (1)..(373): unsure at all n locations
tccactgttgaggttgcaccttattgtttgagctcanatcagaaactaactttgccataggaagagaagaagttggaggaggatgaattgttgatcagtgaagataacattttgcatccttctacagtactaacaaacaatgaggtgatgaggcaagacgtcgagaatagagtttctaagcaaaatgtggagacagagaagaaggcttgtggccatgccccatgttgagtgcaaggaagctgagcttgatgattggttggttcagtatgtagagttgtccgggaaccaggttgggggttcatgcagatgcacatttggatctgcatgagctaggcatggagctttgctccgaggctctcgaggaaattatgac

SEQ ID NO: 33321 - DNA, 258 bp, Zea mays
  unsure (1)..(258): unsure at all n locations
gagagccattctacgattacatatggtcattttgagaaagacatgatntgtagcgcgtgccaagcatggaagcaagttggtactcatcatccacacaacaacatcatgtcgactcgacggccactggagcttctacacatggatctattcggccccgtagcttacattatcatcgaccgggagtagttcttgtctagttattgtggatgcatattctcgctcaacttgggtggtctgtttacaggaaatatctcatac

SEQ ID NO: 33322 - DNA, 311 bp, Zea mays
agaatctcagcttatttaaggtttagatcgaactcaagcagataaaatctttgaattgatcaatgctttaaatgacaagaatccactcttacaatagcaagacgatatttcatatgaagagcatcatcagcttgtcagtgcgcaccagtctcttgctttaaaggttaaaaggaatgaaacgctttcttcagaattatctgcttgtcctgaaactgcgtgtagattaaagagtatgaatgacgatttcaatgctcagctacaagtagggactgaatccagctcttgagcgagcatgcttgcctttgttatac

SEQ ID NO: 33323 - DNA, 305 bp, Zea mays
tgcttaatggctaagacttgcatgggctggctgtggcatcgccgcttagcacatgtggggatgaagaacctccacaagcttctaaagggagaacacgtgataggtctaaccaatgttcattccgaaaaagatagaccttgtgcagcttgtcaagcagggaaacaggtgggaggctctcatcacacccaaaatgtgatgacaacatcaagacctctggagctgctacatatggacctcttcagacccgtcgcctatctgagcataggaggaacgaagtatggtctaattatcgttgatgacttttt

SEQ ID NO: 33324 - DNA, 303 bp, Zea mays
atgccagcacagtatttcttaccataccggtaacatggcctttcgcgtgctggggactggatatgattggacctttcaagaaagctctaagaggatatacacatgttctggtggcgattgacaaactcactaaatggatagagttccagcccattgcttcattaacctccgctaaagccgtggaattcatacaaagcataatattcagattcgggataccaaactgtattatcactgacttgggatccaacttcaccatgtcagatatctttgactgctgcgagcaaaagagcattcataaca

SEQ ID NO: 33325 - DNA, 410 bp, Zea mays
  unsure (1)..(410): unsure at all n locations
ctatgttgagcaaccttccggctttgaagatagtgagtaccctaaccatgtctataaactctctaaggcgctttatgggctcaagcaagccccaagagcatggtatgaatgccttanaaatttccttatcactaatggcttcaaagttggaaaggccgatcctacactctttactaaaactcttgaaaatgacttgtttgtatgccaaatttatgttgatgatattatatttgggtctactaacgagtctacatgtgaagaatttagtaggatcatgacacaaaaattcgagatgtctatgatgggagagttgaagtatttcttatgatttcaagtgaagcaactccaagaggacaccttcctaagcccaacgaagtacactcaagatattctaagcaagtttaagatga

SEQ ID NO: 33326 - DNA, 425 bp, Zea mays
  unsure (1)..(425): unsure at all n locations
tccatcggtaccgcctagactgagaaacctttgttttcttcaatgagagtttccgaggtctccgatctgattaccacatcatctacataggcttccacacgcttgccccagtgatcggctaagcatgtttgaatggctctctgataagtcgctccagccgttttgaggccaaacggcatggaggtgtaacagaaagcaccaaacggagtgatgaacgctgttttttcctcgtcttccttcgccaagctaatctgatggtatccggaatagcaatccaggaaagatagcatagaacatccagcggtggagtctaccacttgatctatccttgggagcccgaagggatcctttggacaatggttgttgagatcagtatattcgacgcacatgcgccaatccactttattccttntgagtacaagaac

SEQ ID NO: 33327 - DNA, 388 bp, Zea mays
  unsure (1)..(388): unsure at all n locations
accttaaatactagctgttatggcctacgaaacgatgttcttctctgttgagacgacccacgggagtaatgactctattagccttctttgcccttagacctctgttcngtttcgaaacaacaacaccaacaacaatgtatgcataaccttacggagcttctttcttcctcttggcagggagttcatcaactgtgtgagatgcattcggatcctggcgccttcggaagtacagcttatgagcgagaatggcgtgcatgtcttgaacgactgcatgcaaatggcttagaaagtcagggctatatgttctgcgcagcctggacagtgtaacgtcgtaaattctacaacagagtgtacttcgcagccacgcagcggcatctcttgtaataaa

SEQ ID NO: 33328 - DNA, 423 bp, Zea mays
acacttagatactcaacttgcacgcgttaaaaagaagaagcaaccatgggaattttgtgatcttatcccctacaacgatgtgaaatatgaggctttaaacggtacgttcacagtaagcatgagggcaagggcatatatatcatgagggtttaaaggtgactactcgcaaagatattggaggggaggtcaatgggcataagaaccaccgatataaataccataaaggatggagttaagacaggacctgccagtggaaaagaacaggatgtgttcaagggctatatatgttaattgccactcttcaattgaagtggaagagaggagaatttttaagatcccatattaaagatgattctctaggcctgatcgatggatgacaaggagatgatgatacccaacaaaactcacatcaaaggatgtaat

SEQ ID NO: 33329 - DNA, 428 bp, Zea mays
ggacacttaaaactcagcttatcggtgttggagctacattcgcacgcgtcgagcatgctcttgcaaaggacacgatgaagaaagacatcattaatggtgctgctgcacgttatgctgctggtgcttctctgggtttaaagggtaagagacatacttatcttgctccagagttatttctgacttaaagctataattaaaataaactcttgggatattgtccgtacctgtatctgtgtgaattgtcatcgaagacattttacttgaaatttctctattaatggcgaccacttggtcacacaattttctttggtggtggggccatcatgctttggaaatttcttatgcaccataatagaaattatcttcgtgctatatgtgaacctcatttctcaattaatagatagaattgcactggtgagaaatgcgat

SEQ ID NO: 33330 - DNA, 396 bp, Zea mays
tgacgaagaaacggagcgacttgtgcagctccgacaaaacatcgagcaagagtgggcacgtcgagcactcgccggaggagcgcgacatcaggcccgggacgtccagcgacgtataattgacgacgccagggcagggctgcccccggccttcaacggggtcggccagagcctatctgcagcggcggtgttacttcgaacaatgtcggagccatccaccaccgaggggcggcgtatccagggcgaactcaaggacctcctggaaaatgccgcggcccgacgagccgagagctctgcctcccgaaggcgaggatgcccctcagagcatcacgcagcgtcctctcgacacatgcgtgaggcctcggtccacaccgagcacacaggagatgggacacctgc

SEQ ID NO: 33331 - DNA, 352 bp, Zea mays
  unsure (1)..(352): unsure at all n locations
tcacgggctactggcggagctagccgaagcactggcttttccatatgatggctggaatgggctggccacggtggctgaagctctggcggcaatggcgggcggaattgaactcgccggagctaaagaaaggtggctggccggtgagggtgagtgcggcgcgaaattgggcgcgcctgggaaggctttatangcacggcgcggtgcacgggcggtcgtggaccggcgagtgcacgctggcgtgcactgggatgcgccgtgcgcgaactggcgtgaaccgggggtgtcagccaccgtcgaacacgtgttcccgttgcctctgcccctgttcaagcgcccattgggagccaatctt

SEQ ID NO: 33332 - DNA, 404 bp, Zea mays
  unsure (1)..(404): unsure at all n locations
taaagatcaaaattagcagcaacgacacttattttggcttgtgaaagctcagagatactagttagtacaaccacatgttggtttcacaattctaagttcacttgcaaatttctctnttggagaaaatacaaaacaaaatatgtagctgcatccatccaaaagaacttttgatcttggtgtagcatccataggcaccaccgcgatctgcttgctattgtcatcatggagtaaacaagtgacttactacctctaggacctccctcctgacaaaattaaaacccaaatcattagtagactacttagaaatccattccaaaataaactatagaatagataccaccattgctccatgattaagctaaatatacaatagttgaacgcaacagaactgcatgatcacacac

SEQ ID NO: 33333 - DNA, 377 bp, Zea mays
  unsure (1)..(377): unsure at all n locations
gcttgaacagcaactggcttcgtctggcacccttggaaactggttatcaacatatccttcagctnctgcctcgaagtgattgtccctggccgaagagaggaataccatgtttgagcgacactcttgacggtcatgacataagactttgccatgactgcagtattgccaccatacgaagatatggttgctttcatagctcatcaacaattgcttcaggtctgtatgaccgtcgtacatggggagctggggtggcttgtaagactggggccatggtgtatgcttcaattcttgtgatagaggagaatcatcatcacaagcaaaatttccatgatggaaatcttcataccagtcgtcctcattgtagaatcctgcatgat

SEQ ID NO: 33334 - DNA, 451 bp, Zea mays
  unsure (1)..(451): unsure at all n locations
ntatcaaatggacgtgaaaagtgccttcctcaatggaccaatctatgtagaagtctatggtgagcaacctcccggctttgaagacagtgagtaccctaaccatgtctataagctctctaaggcgctttatgggctcaagcaagccccaagagcatggtatgaatgccttaaagatttccttattactaatggcttcaaagtcggaaaagccgatcctacactctttactaaaactcttgaaaatgactngttngtatgccaaatttatgttgatgatattatatttgggtctactaacgagtctacatgtgaagagtttaataggatcatgacacaaaagttcgagatgtctatgatgggggagttgaagtacttcttaggatttcaagtgaagcaactccaagagggcaccttctgtagccaaacgaagtacactcaagacattcttaac

SEQ ID NO: 33335 - DNA, 485 bp, Zea mays
  unsure (1)..(485): unsure at all n locations
cattacggacctataaaactcagcttctaagggggaccacattgtaggactaacatatgttctatttgagtaagatacaatntgtagcgtatgtcaagcagggaagcaggttggagttcatcatccacacaagaacatcatgacgatcgagagggcgcttgagctactccacatggatctattcgacctgattgcttacataagcatcggcgtgagtaagtattgccttgtgattatggatgattattccctcttcacttgggtgttctttttgcaggataaatctcaaacccaagagaccttaaagagattcttgagacgaactcaaaatgagttcggattgagaatcaaaaagattagaagcgaccatggaacagccgagttcaagaactctcatattgaaggatctcttgaagaggagggcatccagcatgagttctcttctgcctacacacctcaacaaaatggtagggtggagagaaaga

SEQ ID NO: 33336 - DNA, 526 bp, Zea mays
  unsure (1)..(526): unsure at all n locations
cccttactctctctcaaatattatattccttcttnncaacgagggncttgttgtacctgcattcggaccataaatctcaactcggacctgtagtaaggacaataacgaagccgtatcatgtcttatcgggtgtgttcgccatgctaaatagttcaaatgtatacgcatgatgatgtaaatgtaattttatcaaagatgtgttctacgcctataaatagagcaacaatgccatgtatttagacatctttcttatattggcagaaatgacggttgattctcgcttacgaacctatccgtcttctttcgtcttgtaagcttcacaaagccgaagatacaattataatatctgaattgataataaaaggagtcgaaggaagtatatactttatgttcatatgtacatntctcacattattgctttattatatcacccatattaactacaagaattgcttcatctttaaaattcaccttctttttgaaggaggagaaattaaagatgaatgtggaactctggtctcattgt

SEQ ID NO: 33337 - DNA, 408 bp, Zea mays
  unsure (1)..(408): unsure at all n locations
tctgcgcgtcgatctgttctccgtgcgggcaggcgcatcgtccttccacgggatcatccctgggaagcgcgttcagcccctcgggcggctcgacctttccgtctgcttctgaacgccctccaactttcgaagggagaccttgacgttcgaggtggtcgggttccgaggaacctaccacgcggtactggggaggccatgctacgcgaagttcatggccgtccccaactacacctacctgaagctcaagatgccgggccccaacggggtcatcaccgtcggccccacgtacaaacacgcgttcgaatgcgacgtggagtgcgtggagtacgccgaggccctcgccgagttcgaggccctcatcgncgacctggagaaccttctccaggaggtgccggacgtgaagcgtca

SEQ ID NO: 33338 - DNA, 172 bp, Zea mays
aggaactagactaaaaacagaccggggaagatgttaatgtccctagttggacgctaaacggatcatcaaaaaatttggaaataagaaaggtcttatttacctttgcggcacagaacatatgaaccacttgtaatggaaatctttacaacattgaataacgcgcaataagtcg

SEQ ID NO: 33339 - DNA, 367 bp, Zea mays
tgttacagaagctgatggaggggtaatcttgttacaattccattatgtggaaatcgtatcgagtcgccttggttctaaagactgtgatcctgctccaacactctatgaccccagtgtgctattataaaagaatcggagaataacaagggatcaatttgcatactcccagatcattggctcgctcatgtaccttgcaagagcaaccagggcagacatcttttatgctgtgagtaagctaagtccggttgcgtctaaaccagcagatgatcactggcgtgctcttgagagagtgctgcggtttttgaaaagtactatgacatacggtattcattttaccggatacccaatagcgctggaaggctattgt

SEQ ID NO: 33340 - DNA, 330 bp, Zea mays
ctcacttgactaaactgttctctctagaagtgaagactttacgtgtccaaaatagcacatagtttcatcctgtcttgtgctcttaacagcaaaactggaaattgttttcgctcctgtggcattatcagaagtcacctatgtgtgccttcagacaaaacatgaacatacccttcgggcagttcaaaaccatatgatacactgaacgtgaacacctcatggccatgtgaaataaaatgttgtgtgcgaaaactatgtaggccctaggaataaatgattgatactctcagtctggctattaggctattgttgtgggaaccataagcagcactg

SEQ ID NO: 33341 - DNA, 474 bp, Zea mays
  unsure (1)..(474): unsure at all n locations
accatagaaactaagcttcgctaaatttcatactgatgtgtagtaacgatatttttctattatctcncacttattgcggattttccttcttcgggatcaaaacaatgaatgatccattaatacttctcaggtaaacctcttcttgataaaacttttcacatatatcatagaagtcttgtgcaatgatgtgccaacactttttaataaagttggtgttgaatccatcaggaccaggggatttgttcgaagtagggatttgataatgttggcaatctcctgtttagtgaatggagaatctaaccattgtaaatcttcatttcttgaaaaaagctctgattgagtaaaatcaatacctaagaaatcataagatcccaatctactcttgtaagcattccaaataagatttgatttgtgatcatgctccgagtaaattatcccattcttatctgtcaatgaggcaattgattttcttct

SEQ ID NO: 33342 - DNA, 454 bp, Zea mays
  unsure (1)..(454): unsure at all n locations
tgtggaggaccagatcattgaagcatataagtttctggttgatttgtggtcacccaagtttngttgatgaagcaccagaagactaatcaaggaaggaatccatgtgggagttcgcaagagaaaggtttgcgtgttggcatcgatgcttcttcaataaactagctgccaagcgaaacctataagcctgaagatgatcttgagtagccagaatcagcgtttgcaatcggcaaccagatgcccctcaaaggacagattttgttgaagctctatctcctcgaagagtctgcaaagtgaagatatgtagctgaagtaaagctatacccataacccttctaagccgaatctcgtggacgagattccttntaagtggggtagatttgtagcattccaaaaattcaaattctgaaattttctcaaactcgctctaaattcacaatgaatttcaaatttcatt

SEQ ID NO: 33343 - DNA, 394 bp, Zea mays
  unsure (1)..(394): unsure at all n locations
ngaagccatggtaagtagcataagctaataatatacgaattgtcttatgcctagctactggtgcataggtttcaccgaaatccaaaccttcgacttgggagtatcccttggccacaagactggctttgttccttgtcaccacaccatgctcatcttgcttgttgcggaaaacccacttggttcctactacattttgattatgacgtggaaccaaatgccatacctctatcctagtgaaattgttgagttcctcttgcatcgccaccacccaatccgaatcttgaagagctctctctatcctgtgtggctcaatagaggaaacaaaagagtaatgctcacaaagatgtacaacacgagatctattggttaccccctcgtgtatgtctccgaggat

SEQ ID NO: 33344 - DNA, 435 bp, Zea mays
  unsure (1)..(435): unsure at all n locations
tctaaagggagaacacattttaggattaacattatgttcattttgagaaagacaggatntgtagcgcatgtcaagccgggaagcaagttggaacccaacatccacacaagaacatcatgacgaccgacaggccgcttgagctactccacatggatctattcggcccgattgcttacataagcatcgacgggagtaagtattgtcttgtaatagtggatgattattctcgcttcacttgggtattctttttacaggaaaaatctcaaacccaagagaccttaaagggattcttgagacgggctcaaaatgagttcggattaaggatcaagaaaataagaagcgacaacgggacggagttcaagaactctcatattgaaggcttccttgaggaggagggcatcaagcatgagttctcttctccctacacttcacaac

SEQ ID NO: 33345 - DNA, 444 bp, Zea mays
ttggctcatctcccggcagacagaaatctccttgctgtctgggagacaatacaagaagtcttcttctccgctgccgttgaaaatcaatacccccttcggatatttcaatttttgggcatagaactgagcttctcgcttttctttttcagtcaattttttccccgaagcatgtcgtaaaatataattgagagcttcagaaaatgcttcgggggtggcagtggcagtttttttagccaagatttgctctgccgcttctgtttctttttctctggtttccaaggatttctccttggcgggctctgaaggcccagcttcagtctcagcctggtgctttgtagcttcggcttcagaagctgttgtctcaatttgcgcttttggagcttcggcaattttcttcggagtagagcttgaagactttatggtctctagtacatctagaacatt

SEQ ID NO: 33346 - DNA, 488 bp, Zea mays
  unsure (1)..(488): unsure at all n locations
gacctataaaactcagcttgttacatgcatgcatgcattgactgggtgtaaggaaatatttcacctcacaatttaatagctttcgcctgtttcgtgttgctgtggcctccagagcacagaaagagctataggctgcattgtcacttcagtattactgacaacaccatgcatatgcatcctccatgccttatgctttgttccactaattgattggtctagctgctgcagtgtcaaggctactgttgagaggtacaagaaggcacacanccgtggctcttcctctgggcccccgctcctagagcacaatgcccacgtattntatacctttgctgttcttacagtacagtacgggggtcattntatgatttacaatttctttccataatacacgtaaccatccatatgcatgcattgagagattcttctggaagtaacttaatttgacattagtactaaggctgtagcgcatatgctanatatatacacat

SEQ ID NO: 33347 - DNA, 415 bp, Zea mays
  unsure (1)..(415): unsure at all n locations
ctgctggttatgtcccgccatggcacatatttcttgccttcgatgaggcactgcgcccgctcatnttcggtgatgtagatgtccacctcctacaacaattgttctgaggtggctggcgccttttaaagcatggctcggacgaaggccgagtcattggatccctgatacaagtcttcaattacagctgtctcagtgacttctgggatgcgggtcctcattgcttgataccattttgaggaatgatcggaggatctcatcattctggcgcctgatggatatgaggtctcatggctgcgtcgtcttatcggagagagactggaagattgcgataaaccggcgactgaagtcactctaatcatccataatgtgcccaggtagatgttgaacactacagtgcgtctttccacacgacaat

SEQ ID NO: 33348 - DNA, 431 bp, Zea mays
  unsure (1)..(431): unsure at all n locations
tactcagcctgcttctgccctggttcaacggcggattagagcgctctatcgtgtgtatcttggcaaagtcactgtgtacggtcgcttctctgctccaaatcctatctttttgctgtgagttccaagtcgagatatggtcggggtatggagatacagaggggagaagtttgctgtgtcatctttgcccgaaccgagacaaaaggggtgtcaagtcgtgtctagcgccctactgtaggtgtcatatctctccaaggtgttctagggttaatttggcgccattttgtccattgtgtcgaatggttttgaaaacgggattaaggtgaacatgtggagtctttgtgcaacggttagtntttgtacttacgccaaaactgaattattcctcgtgatgaaccttacgtgaactttctaaggtttttctgacaactttt

SEQ ID NO: 33349 - DNA, 292 bp, Zea mays
ctcaagccttactactggtgcataggtttcaccagaaatcaaaccttccactcgagtgtatcccttggccacaagtcgagctatgttccttggcaccacaccatgctcgtcttgcttgatgcggaagacccattcggtccctacaacattttgattaagacgtggaaccaaatgccatacctcattcctagagaagactgtgagctcctcttgcatcaccaccacccaatctgaatcttgtagtgcttcctctaccctgcgtggcttaacacaagaaacacataagtaatgc

SEQ ID NO: 33350 - DNA, 431 bp, Zea mays
  unsure (1)..(431): unsure at all n locations
gaaaaagaaaaaatccagccctgagccanatgtggctgttacaaagaaaagaaaagctgcagcttcgaagcaaataacaactgatatagaagaagaaattccttcaacgcctcctgcccctgatgtggaggaaatnttaaaggtaatgaccaaatctttacctctcaagctaagtccaccagggccacaactgatgaagcttttatagaagaaagaggagcctgcggtaatcaagaagcctgctgaaaaaaggcgaaggatcattactgttntttatgttattgaagaaacgccaccaccggtctcggcgtcaaaaacaccggttgccgaagatactgcagcaaccgaggatgcccccgccgaagctgtaactgccgaagctgagacggtcgaagatacaaatctagaaggcacnttttctgatattgata

SEQ ID NO: 33351 - DNA, 436 bp, Zea mays
ttcaagaaacattctaagactcctagactcatactcctttcctttgattatctggggtagtgatttgagctccatttgagttgcgaactccgtgtgttgtgttttgagctcaagtcatgacttgtgtgcgtggttgtgctgcggatttgagtcttgcgtgtgttgctctccacaaccttactctgtgctttctttgtgatccctattgtaagggcgagagactccaaactgtggagattcctcgcacatgggaaaagactctaaagaaaaagaccgtggtattcaacgtgatcatcctaagggaaaggggatggtggttaacgacaaggagaatgagtccctcttcaaggagctaagggacgataagctcactgactcatgttcgagtcacaagaagagggacgggaagataaaaggcgcatcatgaaatcattac

SEQ ID NO: 33352 - DNA, 379 bp, Zea mays
ggacacttaaatactcagcttaaggagaaagcaaaaaatgaacttgttctactgctctatcacttcaagtacaagagacatttcaaagagccttgccaagaatggtgggaaacgattgaagttatgtgcaatgaaattttgggccactatactaagaaagaagatctattgatgaccgcggtcttctgcactcgaccgaaacgaaggctgaaccgagtaatggatgccctgaaatttgaataccctgactatgaacggtttaacaagggtgccgaagggccgaagcgaataagagttgctatgtgtatgaacaggcctactgctagaatgatagaagaagatgagatagctctgaaaaagaaaaaatccagtcctgagc

SEQ ID NO: 33353 - DNA, 394 bp, Zea mays
caagcttgagctctgctaccacccgcgtttgattgttttataatctcttagcgcgatcgcatggagcaatgtatcacgcccttcacatcctccctcttactctaatgatttataacataaaaccattgcttcattcacccggccattttttccgaaatattggcacaagacacctcacattagatctgtacacgcaaactctatcatccccacaatgtctatgatattatttcttcccaactgccttcgtctggtacgataattccggtatattgcaaaagcagacggtcgctggttccagcccttggctcctcatcgtccaaatgaaaactccaactttaatcaaagctcctggagtgagctgatgaaagatattcaaatcttttagcacttc

SEQ ID NO: 33354 - DNA, 287 bp, Zea mays
tccatgttctcaacttgtcctcatatataatgacattgtgctatttgtccatcttcattcacacaccattcatcaagcagtgcctttattctttacaaacctctatataatataattgcatctggatattaagttccggacagcaactcggtaggatcataaaaatattgcaagccctggaaaactgttatagccatgttccattcactatcagaaggacaaaagttggtatacttttaactgtgtgttgtcttagcctatcgaaagctcgcttgtaccgcaaagca

SEQ ID NO: 33355 - DNA, 401 bp, Zea mays
tcagcccattcttcgtgcactgcagaatctcctaagccaaggccttaccgccgcggggtcgtcgccgctattcaccgccggagggtgctcccaattggtagagcggcggttgcggctttcataaatgaagccgggggtcgatttggagggttcacggatgtcctcgacccccctctccaccgacgacctcctcatacgggtagcgggcacggtatggaggctggacgctggcgtccttaaccagcccctgatgcgtcacgaccacacgtatgtgtccctggtaagtgtccgacccttcttctgttttgtgccgtgtttcttacgtttttagcccttacccttgggatttttgtttgtccccagaggttgaggaactctaaaacctctcggccaccggtccc

SEQ ID NO: 33356 - DNA, 437 bp, Zea mays
  unsure (1)..(437): unsure at all n locations
cgtcgccatganatcagtaaagcagattcgctaaatgttatatggaatgggaccaatacacttttctggtcggacagatggttaaatgggaagatgatacaagagttcccctgaagttgtctgtatggtgggcagcacatccatttcttcaagaattgttgctcaggcactggataattggcaatgggttagcgacattgtgaatcccttatctttgattgggctgcagcagtacttgcagttatgggatgctttaagtggggttgtgcttacccatgaggaggatagacatgtgtgggtgtattcgggctatatgcatttatcctcaaagtcttgctatantgcgttctttatggactctattccctttgagccatggaaacggtgtgatagccctcgcctccctaaatgccatttctctttgttgggacaatgat

SEQ ID NO: 33357 - DNA, 462 bp, Zea mays
  unsure (1)..(462): unsure at all n locations
tgtgatgctcaccgtgacgcccgactactcaatccggtcccggatgagcaagaacgtttgcccatgatcacaatttccgccgtgcacatggacaagccgttctctgggtgttcgtgccaaattgttaggtgttccgaggtccctggtagtcgctaatgccttcccggtagttagccgtaacagttgtcgccggccatggtcggtacggaccacgtcagggacgaacgacgtgtgcgccatggccaggggtgtttttggtgaagaaataaaaatcgaggggcttatctgcaagttgtcagcgacccggtggaacagtaaccgaacccaacttccattaaccaaaaccacgatgacctctgcgcaaagtctccctcgcgggcgcgggcgcgcgcacgttttcctctaatattgngctggctgggctgaaactggcccatactattggatcttttcttttctttt

SEQ ID NO: 33358 - DNA, 379 bp, Zea mays
acttgctcaaggctcatgggaggaaacgtgttatcctttattgtggctgcacgatgtggcccttcctctatttgtggatacacaaagaatgtctaacatctttggtattgaaatcacataaaccacaacatcctctgttaactattgtaattctctaattcctatggtagaacaacttttttggagctactaagcatggtcttaacagacccaattacaaactgagatggtgcggccctcccttggctcgcatgtagacagtcgcacatggggcccacatccatagatctcaactccttcacgccggtgccgcggtgtggggtgccaccaccggacatgaagtgagagccacacatggaatctgtaagacactgaggtc

SEQ ID NO: 33359 - DNA, 238 bp, Zea mays
gtggagatattgctggtacagggtctaccactttctattgagcgtgaccccattccgctctttctcgatgcgtagagcctcaccctctaggggcgaaggtgcctcgtgctgggccgagggtgcctcgggctcgggcgtgtcttctgtcttgactgagggttgatgtaagtctcgggagaagacgttcggaggaaccgttgtcctgcccgaggctattttatccagctcgtttacagtc

SEQ ID NO: 33360 - DNA, 267 bp, Zea mays
cgagccaacgggataagcctcacagtcatcagaagatgacccctcactcagaaaagggctcaaggaccgacttgctaccggaagcagtctaggcgctgatcacaaccgagtgcagggcgaccggggtcactcctttcaccctcccatacggatcagacgcaatgaacccgcatgaaataaaacacgaggtctctggcatagctacctcagccactcctgatctggatgaaccaacctccaaagatctctatgacagagaccgggtct

SEQ ID NO: 33361 - DNA, 407 bp, Zea mays
gagttatacaagcatggagtctgctctccggtgctcaaatgttcatccagagctgatagtatagaattgatgaaggaaatacacgcatgtctgtgtggatctcacatcagatctaggcccttgctgggaaaagtctttagacaaggatttcattggccgaaagcagcttcggatgcatcaaaattattcctaaagtgtgaaggttggcaaaaatgtgcacaatataaaaaacagccttcatctctgactcagcgtatacagcccacttggctcgtgcaaaggtggggccttgattatgtaagcccactctcaccagcacaacgaaatttaaagtatgttgtggtggcggcagaatatctttccaattggattgatgcgaatcctttaaccccaatatcttctatcac

SEQ ID NO: 33362 - DNA, 294 bp, Zea mays
  unsure (1)..(294): unsure at all n locations
gcggctgctgacgcccccgctggtcatgcaccttgacacaccgtaactgtcatatctatgcctaatggtgactgacccgcgggccccacgcctggtggtattgtgaagccacgcgcggcgcgcctccttgtctgtgcctctggttacaaacataaccattntgtcttctgcaccagccccaaggcagggcgctatctcgtgcggtggataaatttttctgcacccgaaatacgggacacaaaccgtatgacttgtggacatggccccccgtgccacatactgtgttgccttggt

SEQ ID NO: 33363 - DNA, 94 bp, Zea mays
  unsure (1)..(94): unsure at all n locations
acaattaatcccaatcacccnaccccccagccggccgcttgactgtgacccccaacacccaaaaaccccccaaagacgcccccttttacaatag

SEQ ID NO: 33364 - DNA, 414 bp, Zea mays
  unsure (1)..(414): unsure at all n locations
ntgggcttgacatgaattagctgagaccgggccggtgatcttcacgaganaggagtctcggtgtagtgtctccgtctgagtcgattaaagaccgtgtcgatgtaggctcgatgaccgaagaccctttaactggccacatgtctcgtcatgggtaagccttgcctcgggaagactaatgccagaataagataacacgttatgggcgtggagcggtggcgagagtaacgtgtaccctccgtggcaagaggctggacggtggtgtatctgtgctctccgatgacgtgaacctgatctggtcttaagaacccccgtggcgggctgacatatgcaacggctaagtgctacctatgtcgagtgattggagaccctccactgaccttaatcattttgatcgcgcgtccttccctgcttgaa

SEQ ID NO: 33365 - DNA, 385 bp, Zea mays
cgcaccggcaggttctcgctcccaccctctgccacgaaagcgaggaagagggtggaatgttgcatcctagctgggcagcaacagttcgccttccccggcatggctggaggacgcctcctccgcagaactggaggatgtgttccaccaccagaagctggaagaggaggtggccagccgacccgcgcgggaggtagagccccggctcgcctcgctctccgccccagcaaggatgatgaacatccttgaagctgagggcgggaccgagaacgcagcccggtttgcctctccccatccaagggctggtggtcaccgtctcgggtggccaccggcgaggggatgcagccgggccgcgtgatgaaaatccttgaagccgaacgatggctga

SEQ ID NO: 33366 - DNA, 266 bp, Zea mays
agaacacgtgataggtctatcttttgttactttcgcaaaagatagaccttgtgcagattgtcaagcagggaaacaggtgggaagctctcatcatgccaaaaatgtgatgacaactatcaagaccgcctggagttacttcatatggaccctcttcggacacctcgcctatttaagcattggaggaagtaagctttgccttgcaatagatgacgattttatcccgcttcacttgggtattctttttgcatgataaatttgaaaaccca

SEQ ID NO: 33367 - DNA, 463 bp, Zea mays
  unsure (1)..(463): unsure at all n locations
ccatcccacttgnaactcttacctttctccagtagagaggtaagtgtcttctctaacttggaanaaccctcaataaatcttctatagtatcctgccaatccaagaaaacttctgatcttggacgcatcctttggctgctaccaatctaatatctcacttatctttcctgagtccactttaattccaccatcggtaacaatatgtcctaagaaaacaactttcttcaaccaaaatcacacttcgagagttttgccgtacagtggttgtcacgaagctttngtaagactaaccttagatgatcttcatgtgtntcttcattcngagagtatatcaagtatgtcgcaatgaatacgaccacaaactgatccagatattccatgaatactntattcatcaagatcatanagtatgctggtgcattagtcagtccaaacgacatgacccaaaactcatacaacccata

SEQ ID NO: 33368 - DNA, 273 bp, Zea mays
cttttgaaaagacagggttgtaccgcatgccaggcagggaagcaagttggagtccatcatccacaccagaacattatgaccacctacaggcctgtttgactactccacatggatctattcggccccaattgctacataagcatcggggggattagtattgtcttgaaaaatgaatgatattctcgctcactgggtatttttttgcggaaaaaactcaaacccaaaaccttaagggattttgagacaactcaaacagttctcttagggtcaaaa

SEQ ID NO: 33369 - DNA, 247 bp, Zea mays
ccacaaagcgagttgaaaagcttaactcgggtcaaacttgacaaggcttatatttaagcctttagcacctataattcttactttgtatgcaaatattggttctttgaatatgcctgagggactgcacttatggggagtatttcaaactccaattactcatgagaacccttatgcaagccaaaatgcaaatttcaccatttgcctattgtctttaaaaattatctagcctaatggcaaatattttgaa

SEQ ID NO: 33370 - DNA, 382 bp, Zea mays
  unsure (1)..(382): unsure at all n locations
cctttgcgagctcgcaccccgcaggcattgtattcgttcgcantccccctcaataacctaatgatctgtgcgacgcaatgcacgcatgcccatcggcgttagtccgacgacgactaccacaacgttttcgttacagcgcgcttgccttgccttgccggcgtcactactgtcacagcctaatattgatctgtgcaccgcacggtgtcgcatcgcgatctcacgctctgctgtgttcccgccggtgtggacgcgtggcagttgctgatgttcgatgccggcttgagagtttctgcgaagaaaactcgggcatttgaaaccaccgggctcactgctcaacccagtacccctgctgcagctagctggtcgacgagctctgcatgca

SEQ ID NO: 33371 - DNA, 426 bp, Zea mays
  unsure (1)..(426): unsure at all n locations
tagttagctcatcattatggttgcttatgaattccattttattaagaaaacattcataatcttcttgtgagctaaataatttaactttttgtttgccattttgttaatcaactagtcattggtaggggtccttgcattagcttacattgtcaatttattagataactcaacattatgattcgtaaaaatctcatatttgtcaagcaaatatttataagccctttgtgaggtactaaattttgatttaatattnttaaattaaacttttacttagtacaaaccttttcaaagaacttgactgcttgtgcaagttcttcattagacgggttttcatcatcactatcactattactagcattgtcactagcgggtgtatcttcaatgttacctcatgtcataaggcacatgtggtaagaatgtgatgat

SEQ ID NO: 33372 - DNA, 334 bp, Zea mays
  unsure (1)..(334): unsure at all n locations
gaagaagcatgtccaaacaagctggaagcaaactcatctattgcatcatcattccttgatgggttggtatgtttagtcgagaaaccatcgatgtacctagaacaaaacaccatgcattcatctgccaaaaatgaatctgcgatacaagcttctggataagttttattacgaacatatgactttagctttcctaagtacctacaacacaaacaaaataactaaattattagattgaacaaccaaattatttgtataacgaatattgttaccatagctcattagtacctctcaatataatacatccatcgatnattgactggtccagcaatcttac

SEQ ID NO: 33373 - DNA, 333 bp, Zea mays
  unsure (1)..(333): unsure at all n locations
gcgtgagccgactcctctatggaaggagttggtgattcagagtactcggaggaggagttctcctccgagcccgaagggtctccggctcccgtctctcccccggcgtcgtccgatgactcggacgactcccaggaaatagccgcggaggtctggacatacatccgggccgtcgagcgcgccgggctcgaaaggctcngatgaatcngagtactcctcngatgaagaggactcggacggcggcgacgagggtgaagacgacgacgacgacgactacgatgatgacgacgacggcgacggcagcggcatatgcggtggcgaccgcatggacagcac

SEQ ID NO: 33374 - DNA, 322 bp, Zea mays
  unsure (1)..(322): unsure at all n locations
agcttataacaagagaatagaggcaagagctctttcatatgttataatagaaggggagttgtacaagcatggagtctgttctccactactcaaatgtttatccaaagccgaaggtattgaattgatgaaggaaatacacgcaggtctgtgtggatctcacattggatctaggcctttgctgggaaaggtttttcgtcaaggattttattggccaaaggcagctttngatgcagcggaactagtccaaaagtgcgaaggctgtcagaaatgcgcaagagatcaaaaacagccttcgtctctgactcaattaatacaacccact

SEQ ID NO: 33375 - DNA, 452 bp, Zea mays
  unsure (1)..(452): unsure at all n locations
gatataggaacccaaacgtcctttgtgctagcactaggtaaactcattacctttctagcacaatttgcaattntgggttgcctagctacatgagaattaattgaccagctacgagtgggattgttaccaatgggacaatccttgcattgatgtcccttctttcggcatattgtaccataggcgatcctaagtcttgaagattcttatttcttgttctttcttgtacatggttagtgaatattatcttttctaacattatgcctttttgttttaaatggggacaagacctaaacaagtgtcccttcttggagcatttaaaacaaagttgatcatccctgntaataatcaagtcatttttaatatagggacatgacttaatagagtngcccctttcaaagcattcactacacttcttacttctcttagtgtgaagtgtaacttgattattacct

SEQ ID NO: 33376 - DNA, 424 bp, Zea mays
  unsure (1)..(424): unsure at all n locations
tgcacagtcaacaacattgtgccctagtctagacataattactaangcaacacaggggctcgaccagaatgtttccaagttcaatgtattcttacttttttgtctctaaattttccccttcgaagacaatataagaaggtttaacctttggcctattgtaataaatctatggttccaccatcaagggtaccaaggtgacaaaactctaaagtcgttctaaggtgatctagagctaaaataccacctaagtaaaaagtgaagaagttccaaagttgttcctaaggtgatgcagagcttaaatgccacctaagtcaaaggtgaagacgctccatagttggggatacagagcttagctccaaactcgttcctaagggaatgcagagctgaaatactacctaagtaaaaggtgaagagactccaaagt

SEQ ID NO: 33377 - DNA, 467 bp, Zea mays
  unsure (1)..(467): unsure at all n locations
tcagaccaaatcttatgccaatggttaggagtatcagatgtcttcttttttatcaaattaatcaatggcctattactagactcggcctggccattggcctgagcataatatggagatgaataagcagcttaattctggataattcagcaaattcacgtacctcctatgacataaaagaagtaccttgatctgtagttaaggtctggggaatgccgaatctatgaataatatgctcagttataaactcaattacctccttgtgtgtcatgttctntagagcaacggcttcagtccatttggtgaagtagtcagtggcaactaacacaaaccgatgccccttngatgatgaaggatgaatttctccaattaagtctaatccccatcctctgaacggccaatgcttgatgataggatgtaattcggctganggactaactgtatgtcgccgaattttgacacacttggca

SEQ ID NO: 33378 - DNA, 393 bp, Zea mays
  unsure (1)..(393): unsure at all n locations
agctttaccaaatggacgtgaagagtgtctttctaatggaccaatcaaggaagaggtctatgttgagcaacctcccggctttgaagatagtgagtattctaaccatgtttataaactctctaaggcgctttatgggcttaagcaagccccaagagcatggtatgaatgccttagagatttccttatcactaatggattcaaagtccaaaagccgatcctactttattcactaanactcttgagaatgacttngttgtatgccaaaantatgttgatgatattatatntgggtctactaaccgagtctacttgtgagaatttatttggatcttgacgcaaaatttcaaaatgtttttaatgggggagttgaagtttttcttaggattaaagtaa

SEQ ID NO: 33379 - DNA, 480 bp, Zea mays
  unsure (1)..(480): unsure at all n locations
ctaatagtgctgtgccanatctagcccaagcggcccaacaccagttagataacacgcccacgcccgcgcgcactggtaagtttgcagaaaggtcctctggttnttagctaactgggaacaagttctttcactgtttcatgaatcgctgacgggttgcagtatggtccctggatttctatttctttacccgacacaaccttgactgcgcccgcgcttggagccgagctccggcgagcaagaccggctcgagggggccacgaacggcgctcccgagcagcggacacaaacttggatctactccgaccgtttcccctaagttaattgcacggatggcgacctacaccgccctgcccacgggaacagcggacgcatcggatagaatcgcgtgttccccgtgatctacggcggtnntagtcaatctancaggtcgagggagttgagaagagcttanggatgctagaacgagcacagcgcacatga

SEQ ID NO: 33380 - DNA, 421 bp, Zea mays
  unsure (1)..(421): unsure at all n locations
gcttcgtgaatatatgtgccgaagctacactccgaagatcaatattggatctctttgagacttagcatgattttccctttttcaaagcattcttccgaaggtcgatattgtgccatatgcagcatgatgtatgatgcttatgctatgcgaaatgatgtgatgatgttatgctatgtaaaatggtatttattccgaagatacacgcacatccccgcaataaaacacataatctatttaaatcagcgttgacttttcgctgtaagcctcccttaagagcttcttcgccttttacttcagcggaatcagcgtttatttttcgctataagcctcccttaggagctncttcgccttttacttcagcggaatcagcgtttatttttcgcttgaagcctcccttaggagcttcttcgccttttacttt

SEQ ID NO: 33381 - DNA, 443 bp, Zea mays
  unsure (1)..(443): unsure at all n locations
ccatgttagtcttagcaattaagcaagtgtcgaggtcagctctatcaaaatctaccaagtatagctgaacctctaacactcccttatatggctatggatcatcacttcttctaaagacagtgacacctacattagtgaatagacaggtggtacccatttgacataattgggatacggaaagcaaattgttatctaatgaatcaacaagaacaacattggaattagatggtcaggtgatataagcaatttacccaatcctttgaccaaaccttgatttccatccccgaatgtgatcgctctttggggatcttggtttttctcatatgaggagaacatctttttcttcccagtcatgtgggttgtgcacncgcttgctagtattcaacttgagccnccgatgcataacctacaaacatattagttcttgactttaggtaccaact

SEQ ID NO: 33382 - DNA, 328 bp, Zea mays
agcatgggtctgtctccataaaagtagttgatccaattcacaggttcgaatgatgaagaaaggagcattggttcttttgcccagcgatatgaaatcagtcccttgcagtttattgttgacctacactagagaaattatgtttcttatgaacactgattttatgcttctctgaattaaatacttaattcggtggatgtgtgttggttactttcttcatgtcaccaattttgactgtggataattacatgtttggtggttttcattcaattactaggttagaacttttgttttgcacaattattgttgaaacatgggttcctttttgctg

SEQ ID NO: 33383 - DNA, 465 bp, Zea mays
atcgggcgtcatcttgatcttggggggggcggtctcgaacctcaggtcgtggatcaaatccagccttcgctgatactctacagccaaaacagcgaagtttcccttcattgctgcacctaatatcttcagattaagctaatatcggaatgagaagtatctgtcgcaggaacgcatgcaggtacaaacatttcaataacgcaaccaaagaagccctctcgattacatgtgcatatcctgagggttacttgaacaaaggcaacagcagacccataatttatgcacagcaaacaaagcccatttgccaacaccacattagaagttcctcacaggacataatcttcaggtatgtctagtatttatcaaaggaatagatagaagcacacgtactggcctaatgtaatggggcctgcaactaatgattcggatatagtaaatgccagccaagtatacagctacgtttacaac

SEQ ID NO: 33384 - DNA, 263 bp, Zea mays
agcttaaccgattactcgacttgttgggggtcccaagtccttgatgctccatttcttgcttatcttcctttttccaccttgagactatataggatcactcaagaaccagttagtctcaaaagacacaagttatgtgtgctcccctaaagttgtgcatcaaatatttgaatgacttggactttgcacatttttacattcttcaaacttgaggggatcaccaccttccttgggctaaggcttatttatcaattgcgtcacaaaaa

SEQ ID NO: 33385 - DNA, 313 bp, Zea mays
tcactgaaatccaaaccttctacctgggagtatcctttggccacaagtcgcgctttgttccttgtcaccacaccatgctcatcttgcttgttgcggaacacccatatggttcctacaacatcttggttatgatgtggaactaaatgccatacctcgttcctaatgaagttgttgagctcctcttgcatcgccaccacccaatccacatcttgtagtgcttcctctaccctgtgtggctcaatagaggaaacaaaagagtaatgctcacataaatgtgcaacacgagatctagtggtaccctcttataatgtcc

SEQ ID NO: 33386 - DNA, 266 bp, Zea mays
gatggacaaacccggccgtcggacattagagatgtcaacccgtttaccggtcgactggtgagccccacagctgttatcactactacagggatcctctgtacaggcggtccggttagcctctacacaggcggttcaacgaaccgcttgtggtgcaccgcctgtgatgtaaaacaacatcacaggcggtcaatcaaaaaccgcctgtgatacacacacatcacaggcggtccggtttaaaagaaccgcctgtgatagacacacatcac

SEQ ID NO: 33387 - DNA, 470 bp, Zea mays
  unsure (1)..(470): unsure at all n locations
ttctcatactgattcttgagacacatatatttcccaaacttatcacccttgactattggaccaggcgaggcattacacttgtgcatattatacctctttagtacattttctataaatgacttctatgagagtcctaatactccctttgtctgtctctgtgaatttctattccaacaacataagaggcttcccatgtctttcatatcaaaattcgaggaaagaaacctttttgtttccgctagtagatccttatcactactagctaagagtatgtcatcgacatatagaacaaggaagatatactttcctttcctaaatnntgtataaatgccaatggcttcctttgtttcctcgaaacaaaattttctgatagtctggtcaaacatgatgtaccactgtccgggaggactgttcaatccatanatggaccttctcaagtgacatcccatgtgttatttaccgctcacaac

SEQ ID NO: 33388 - DNA, 263 bp, Zea mays
aaaaaaaattggggtttcttatacgatgtcaagaccacacaaaaaaatcccaggagatctggaaggttgtctgagatctggtacagtgacagcttgatgggacagggggggaaactccgaaacgccctggcgacaaccatcagttatggtaatcacttcaagaaatctctgtcatatagagaggtatttcggattgccattggagcggacaaggaaaaacttgcccatccaagaaagaatctatgtccaactttgaactgact

SEQ ID NO: 33389 - DNA, 464 bp, Zea mays
actcagctggtagttctaggagccatctaagatggagcgcaacttttatttaaaacatgggaggccaagacatatcaattattgttcaatctaaaattgtctgaattgtgaccttcaattgcctgcaagaacttgagtttatattctgagtatgccttggtgacgagctgtcatcagactcttaagcaactaagcaagcacaattgcttttcgactcatgtgtgctatatttggtttagttggtagaattgatttctaagtatgcagaattgcattgaattggtttcctctcagaacaactgattagccatgtgatttctcaggatactaactgataccatttctgtgactgactactgcagtctggatgctgcaagccaccgacgtcatgcgcattcacctacatgaacgagacgtactgagaacaaaaccctcgtgtcccgaccgtaccaatgatcctgact

SEQ ID NO: 33390 - DNA, 381 bp, Zea mays
agcttcgctctatcctttcgacgatccggtgactctcttctcccttgaggtgctggtgtcgcgggtccgtaaaaaactggcgatgctgggcgcgcacgaccaactcgtcacgcttcgcggggtcggctatctgatgatccaacccgtatgcggatgacaggcgggcgatcgatcattgcggaactccgctctcgttttccgtggatggcggccgcgggcaacatcatgctcgccgctttccttgtcgtcgatttcgagctgctccaggctgaaatccgccaaacatacggacatattggcatcgcgcacgaggtcgtcgaccatgtgatattttcgatcattggcctgctcgcgccgatggcgatcgcaacccggtggctg

SEQ ID NO: 33391 - DNA, 367 bp, Zea mays
  unsure (1)..(367): unsure at all n locations
ctcagctgtccgatctgtanggacatcgctggcagccggaacgttttgatccgctcaacggcggcattccccagctgggcggaactgccccaatcggcacgatgcaagcaaggggagatcagtcattgaacaacctcgatcaaccccaccttctgggcaagtgggcgaagcgaattctccgcgcttgcgcgtccggacgacatgcgtttcgccagtcaacttcagctcgatggtgccgtctaccacgaaggcctccttctcgaaggtcccgtcgatgttcatgcgcccgcccgacagatgacgcgccgcgacctcgatcgtgcctcccgacatgcggttggtgtcgatggtccagccttcaccggtc

SEQ ID NO: 33392 - DNA, 333 bp, Zea mays
  unsure (1)..(333): unsure at all n locations
aattcttgcaatttagcaatatcctgacttctgtcaatagccgcacctcccctcttcgctagtttttgctaaattcctgaaccaacaagaactggtcaaaaatatacctaaggttctgatgaagatctattttcagaataatatgtcgtttagggtgcaaattgatatggtgtagtatagtggtgtgacctgggtgacccccaaggcattatgtgatacagcataaagggattcaagccttcatggattaaacgaaatgcaccaatcacattggaatgtgtcaatctactaaaataacatatnatcatattgctaaatactccttatgttcat

SEQ ID NO: 33393 - DNA, 155 bp, Zea mays
tactcagctggcttgctcaacttatggtcccactatttcttggggtatgggaactatgccctgaataagacacttgcaactattagccacgtggttggatgacgccaacaccaaattgatatagaaatgtttagctttttcctttcaaaacccct

SEQ ID NO: 33394 - DNA, 460 bp, Zea mays
  unsure (1)..(460): unsure at all n locations
gttcggatcttaagtcactgggctgcagctgcattgatgttaaatttctggattgatctatggcttgtctaacctagttgagataaccgccaacaaagcgagtgaaaaagtttaactcggatcaaacttgacaagtcttagttttaagcttttagcacttaaattcttacttactatgccatnggtggttcttgaaatatgcatgaggtactgcacttagggggagtattcaaactcaaaacactcatgaaaacccctagtgcaaggccaaaatgcaaatttcaccatttgcctatttctctaaaaattatctagcctatggcaaaatattttgaaaattatgagaaaatatatgagggtgtcaatacctatcccaacaagtgttattttgtgtgattataagttgggatttggtttggttgaaaactagatagaaaatttgaaaatttcaaaatttccc

SEQ ID NO: 33395 - DNA, 288 bp, Zea mays
attttttctagccatgggtgataccgcacttgtgatcttacaaaagactgtcggcaaacggctcccatcgccctgtgcttcggacggcccagatataaacgctaagccttacgatagcgttaggagttccgctgattgatagtagatcgccaaacctctacaaaacatgtgcgataatcccatgtagggggaatctcaacccagcctttagaaagctcttgaaaatgactatttcatccttctctggctgcggcgtgggtacttccccccccaagcgtagtagcttct

SEQ ID NO: 33396 - DNA, 391 bp, Zea mays
  unsure (1)..(391): unsure at all n locations
ccggacagaaacttcatgttattacctttaccttctcctttgaaatttgtacctctcttactctgctatttggtatatacaggatgacgaagctgaaattgacaatgctgaagttgacaaactgagatgaaccttaatgaagctacaattgctataatgtgcttcctgcaaacatcttggagaaactcttgtaacatagatatggaataatntatgntaaattgtacataccttgtaatatattctgtctcccttatccgcatccagtctgctttgctgtggacgaaacattctcttttgagccgaaggcgaagaacacctttccttcttttcgtacacaacgaagcatagaangattctncttcgaatgctttcttatttctgaacacct

SEQ ID NO: 33397 - DNA, 428 bp, Zea mays
  unsure (1)..(428): unsure at all n locations
agcttgtaccaccacagaggaatcaataaaatataattcttcctttccaaagaaaactggatagaaacaatgttggatagatcgtaggacgatcaggatagacctaggacgtgaagccttacgatgatagaagggtagctaggtggctaagtgattaagccctacaggctactataagggatgggagttcttccctattccctttatattgatgtgagggcgttcaggatgagcatgcatgcattcttaaattaaacaaatggataattgagtaaggactttaatacaaaatgatgaccaactaagtaccccagtaccattgttatatntagagagaggctgagttgtgttccttttttctttntataattctttntcttttacttacgcttaaccgtacacaaatgacttcccacggatcctcaaac

SEQ ID NO: 33398 - DNA, 518 bp, Zea mays
  unsure (1)..(518): unsure at all n locations
ctaagctggtactaggatgcaagatggaatctttacactaaggagtatatttaacagagaccacagaaatgcgatgtgtcgaaactacaaggcagcatagccatgaatgctattacaaaacaatcaaagattgaataatgtcaatgcttcataaccagattatcaatttgttcagtaaatgcacgcaaatgatttaaattcgaaaagaaaaagaaagccactgaatgaattggaagtagatgttattcagagaacccataactttgtagtaatatagattggttcactgtanagtataaacagaaacctatacagatataaacagcaccctttccattctggaatttgatcagccatcaatttcttcccgaagttaaccatcttgagtttaaaatactaatctgccaatgaaagtagcactggtgtagcacttagcagcacaaacagacaaagaanaaagatattaatgatagttgctgagatgtgagtgacatacaanaggaataataatgtcaacg

SEQ ID NO: 33399 - DNA, 386 bp, Zea mays
cttgatccgaagtcttagttatcaaagaaaaattataccagaattggagaaggtactgtatgctattttgatggcctccaggaagcttcggcttatttcaagctacaatataatagttccttcttcacaaccggtgaagggtattatgagatatctagaaactactggaaggattggaaaatgggctgcagagctcaatgaattttgtattgattatgtacataggtcttctattcaatcccaagcgttggcagaccttattgctgactggacgccatgggctcaagaggaaaaaacgaataaagatgccgaagtttggacagtggtttgcgatgggtcttggggaaccctcagaacaggagcagcttgtgtgttggttcaccttc

SEQ ID NO: 33400 - DNA, 443 bp, Zea mays
  unsure (1)..(443): unsure at all n locations
cagagcagcaatgtgattatcttgcttcgngctntttacaatgatatcatcaacataggttagcacattcctgcctatctgagaatggaggaccttcgctgtcattctgctgaaacttcctccggcattcttaagcccctcaagcatccgaaggtaacaatatgttccattgggggttatgaagctggttttcggttcatcctccctcttcatccagatttggtgataacctgaatagcaatccagcagactcataagctctgatgaagctgctgcatcgactaatgaatctattcttggcaatggaaactcgtccttcggacaggccttgttgagatcggtataatcgatacacattctccatttaccaatggccttctttaccataacagtggtagcccacccattctggatatattacttctctgataactccggcactg

SEQ ID NO: 33401 - DNA, 150 bp, Zea mays
gacctaagcactgcgctgcactacctcatatgtctattacttatttttgatcgacggctgcttactggaaggatgtcaataaataaaacaccctaatatagcagactattggtaagtgacgacatgttgagttgatcatgataaaatgga

SEQ ID NO: 33402 - DNA, 243 bp, Zea mays
  unsure (1)..(243): unsure at all n locations
ctgcttgccgttgtcaactgttanttcggacggtactccgaagcggcaaacaatgttttgccaaaagaatttctggacagtttttgatgttattgtggaaacagcccttgcctcgatccatttggtgaagtactcgacagcgaccaaggtgaacttaaggttcccctgagggtgggcaggggcccgacaatgtccaggccccagcgctggagaggccatgtgtgggcaatcagctntgtatac

SEQ ID NO: 33403 - DNA, 459 bp, Zea mays
  unsure (1)..(459): unsure at all n locations
acccggatcttaagcaccgcggctgcagctccttctacctgtaaaattaatgttcttaacattttagtttgagctagtaatgtgtaagagatggattaatatagcagtattgtgattaagaagtatcatacagttggtggagttgtagtaaataattnttccaaagttgtagatggagagtcttccaataacatcggttttgatttgttttgaggtgttgatggtccttgttgatcagaaattcctatttgcattggtaaagaacgttgtctcccatgtgcagcaacaatagaattaatgcggaacacgtttgggcaactggtttgttggaaaagagattgattgtcaattgtgactctgaatgtaaatttcagagatatgatttgtgctagatcaggtgggataggagactgttcagtgacacttcgtaaaacaatctcacaggatntaccaacgatg

SEQ ID NO: 33404 - DNA, 347 bp, Zea mays
  unsure (1)..(347): unsure at all n locations
actcagcttctcaggacaagcgccgcactcactgcagagtgcgaagctgcctcatacagcagtagaggagcccctggcgctggtggagttagcgtcgntagatctattaaatactgcttcagctcttcgaaggctttctgctgagctgatccccattgaaagacttctgcccgattcaccacttctaagaatggtaaatttctctctgctgatctagatataaatcgaatcaaagatgccaatctttctatcacgcgctgagcccccttttttgtgcttggcggctccatcccaagaatggtgtcaatttgtttggattagcttcgatcccctttgttgaaactata

SEQ ID NO: 33405 - DNA, 406 bp, Zea mays
  unsure (1)..(406): unsure at all n locations
acgtggatcctaactaggggcctatgtttttcggtcaggggaaaaggagaaataaacagngactcagatgacgcagtaaacaaatgacattgttgaaaggtgctaatcagcacatagtaattaggatccatcaacagaatgttaacataaaacttctattacaatgattagtcattaaaatttgagtgatactgaggttaatagttcaacaataacatttgtaaaaaatatcttatttaataagtttttggtaaaccttttggtcatgctaactatatttggaggttaattatataaaaatttctgatctagcaactcttcccttgcctatagtcatgcggataatctcttaataattttacgttgataacgtataaataataaataatattggatgaggaacaac

SEQ ID NO: 33406 - DNA, 399 bp, Zea mays
  unsure (1)..(399): unsure at all n locations
actcagctggagcgtcattggattcttcttggtgaagcaccttcttcttttcttctggtgcttngaatgcaatgggttgcacctccggtgtggaggtggcaccttgcttcaagttgacaatgtgtttggagtctttgatcaaaagttcaaagctcacaanacttgcaatcacttcctctggagacatctgtntatatctaggatccccacaaattaattgaacttgagtaggattatgaaaaacgagggatcttagaataaccttgaccatgtcgtggtcatcccatttggtgctcccaaggttgcgcacttgattcaccattgttntgaaccgattctacatcgcttgcggctcttctcctttgttgaggaggaatcgatcgagcttgcccttgatcg

SEQ ID NO: 33407 - DNA, 344 bp, Zea mays
  unsure (1)..(344): unsure at all n locations
ngcttagntaaactaagtgataagtttattttgtgtgtctactgatttctctttaatgtctcagtgagaaattattaaaaattcttggtcaacttaatggagcgaggcttatccttcctcacgttccttcttaatcttttatgccttaaaggtgggtttgaactaaaggtaacttaataaatctccaaaaaatctacaaatattacaggggcttcttactggtgtgcaagtttctgcctccaaatttgggttcaaaaagtgaaggggtcctctctggttaaattatcaatattaaggcagagggggtgtttgaactacaactctttttaaaaggggctattctc

SEQ ID NO: 33408 - DNA, 400 bp, Zea mays
tggctcaaggttccatgctgaatcattcccaggtttaatttctccatttcttgacataatgtgatgtcagaggtcttcacttgtagacaatggcaggaagccttgcgacttagtgcatctgccaccacattggccttgcctgggggatagtgaatttctaattcataatccttaatcagctcaagccatctcctctgcctcatatttagttctgactggataaaaatgtacttcaaacttttatgatctgtatatatggcagatatttcctagtagataatgacgccatattttaagggcatgaaccacaacagctaatctaagtcatgagttggataatgttcctcatgccggcgcaactgtctttaagcatatgctataactcggcccccttgcatta

SEQ ID NO: 33409 - DNA, 423 bp, Zea mays
  unsure (1)..(423): unsure at all n locations
acttgatgatcatgcctcaatttgctcacataaaatgatggttcttgggttagcacttgagagaaaccctatgtgacactggggtgtcacatagactcttctttcttctcttctgtcgcattgaatgcgatgggttgcacctcgattgtagaggtggcgccttgctccaagttgacaatatgtttggagtctttgatcagttcaaagctcacanacttaccaatgacttccttgggagacattagtttatatctaggatccccacgtattaattgaacttgagtaggattacaaaatacaagggatttaagaataaccttgaccatttcatggtcatcccatttggtgctcccgaggttgcgcacttggttcaccatggtctntagccggttatacattgcttgcggctcttcttctttgttg

SEQ ID NO: 33410 - DNA, 402 bp, Zea mays
  unsure (1)..(402): unsure at all n locations
ctgacaaaagaataaatgggattgcttgttgttacgaggaaattaaaaagacacatgacggatttttggtctcctctgataaaaactaaataaaaaaggtgagccaaataaatagtagaatgaactttaccttttctatttgattattattaggggttctancttaaagtactcatgatccaatgaacctatttggactacgaattctactctatattggtctagatgaagtctggacaaaaaaagtctatattgtccggtagttatagagagatgacctaaaaatgaatggacaaaaaatatgctgaaattttgcctctttattattagctatagcttaaggactaggtttttatttatgatttgctgcataatgcctagatacctctaaatttcataatg

SEQ ID NO: 33411 - DNA, 333 bp, Zea mays
  unsure (1)..(333): unsure at all n locations
ttcttggtgacatcttcatcaatatcttgatcatacangntgaaagacttggacggccatgatattccaggtcttggaatgcggatgagcttcacagatattatgttgtaactatgtaattctcttttttccctacgacacccttttcctttcatgaggggagaaagggttttaatggggccatatggttgtaattnttcatttntttgtgcagcctttgtgcaatacaagggcccaaattccccacatgtaaaatgtaaaatctatgattacaccattgagtgtaaaaaagtatgaaaaaactccaaagtcatccctaaggggatgcagagc

SEQ ID NO: 33412 - DNA, 421 bp, Zea mays
  unsure (1)..(421): unsure at all n locations
ctgcagcttgtcaccttcatctgggcttgactttttatctactggttacccaaaacctcatgaactggtcataggagaggtccacactgagcaatctactgctatccagtttccagctaatctgaacaaaaattcagtcaatgcaaactcacagtccattttgggccactttcactctatttttccatacacccccaaaccaatacctacttaaggagaatggtttagcatcatatgagcttctctatcttatgcagagcacaaaatatgcacaactcgactgaggaaacccttgaagttacctggtcacggcgaggtggactaactgccgacgatggtcaccacctanggactggtacaccaagctctgggcagatggaccaagatattgggaggggattaactccggggaaacataggc

SEQ ID NO: 33413 - DNA, 366 bp, Zea mays
ctgcccttaattctgaatctctagacacccttggtgggtgataccttaagattaacatgatactccacctcaaactgtagaggcttccgcctcttgtcatgaaagctcttttgcctaacctgagcagcttctaagttctttggaataaccctgaccttttcctctggctcaagtccaaatctgccccaatatctcctttcttctgctgagaccaatcagcggggcctgcatttctgcatacaacttcaaaggtgcctcttaactgactgatagtgtatataaaaacttgcaagaaaaccttgcccaatctttcgagtgtatgccatgccccacattcttcaaattgatactctctcgctggcattg

SEQ ID NO: 33414 - DNA, 150 bp, Zea mays
aactctatctccaatctgaaactctctgtcagatctatgcttatcaacatggagtttcatcccattttgagcagctggcaacttttccttcagcatgctagcatgttacttgttgtcagcccacactttagtcacagaactaagagaaac

SEQ ID NO: 33415 - DNA, 268 bp, Zea mays
  unsure (1)..(268): unsure at all n locations
tgtttttgcatggtcagcccatgatctctgcggaagtaataaggatgttattgaacactcgctcaatgttgacccatccttcagacccagaaagcagagacttcggaaaatgtctgatgataaggccgaaggtgctcgtaatgaagtcaaaagactcctcagtgcaggagttatcatagaagtaaagtacccagaatggctagctaacactgttatggtaaaaaaagccaatggcaaatggcgaatgtgtatcgattntacagatctc

SEQ ID NO: 33416 - DNA, 394 bp, Zea mays
accatactcaagcaaaaacatatgatgatgtccagggacacagggtgttaggaggaaaaaccactatcaaaactcccccttacttattgaacatatgccctatcaacatttaaggtagatacctatatgcaaaaagaataataccttctttggtacctttaccatgttgtagtgtacttcccatcttgaaagtatttaatctctcgagagactctccacccttgtgcctgaatctttatcctaaccttttctttgtgctaagacaccaaacttagaacaagttatagtatttggcacaagaagaaacttctattctaatgattattaaaagatgtcaattgaagcaaactatcaccgctaccaattgaaagaaccaattgcaagttcatttatt

SEQ ID NO: 33417 - DNA, 436 bp, Zea mays
  unsure (1)..(436): unsure at all n locations
tatagtaatagcctgatgatcagatgaattatatgttgagggttgaccatgtcacgtgttctgctagctagcggaaagccaccgacattatactcagcctcaccggtcatatctgccattgagccacagctaaactcctcatcgatggctgattcattgaagagggggcgacggacatcatttaatgaatgtaaaacatatatntacacttcatattctttccctctntggttgatatctgccttatgtgccatgtagtcattagctgaattgtatgtgatcaatggtcaatacgaaaaggcactttctctttatgctgaagtaagtacatcctaaagttgtatctgaggcacatatcacaaatacactttattgtaaattcctctaataaaccattggtcacttctgaaccagagattcagttatgagaaacaca

SEQ ID NO: 33418 - DNA, 429 bp, Zea mays
  unsure (1)..(429): unsure at all n locations
agcttcccatcgtttttgtgctcatcagaagcatgccagctcataagtctggcatcctcaggattagcgaacaaacacctcaatcgatcgacgacggggaggtaccacatcaccaaagcaggaatctttttgagcgcataatagtctactttttctttgctcgtggattttgaagtctttttttgggctttctttcgcttcttccctttagacacggatgcaacacactctttgtcctctcgatagtctntattcgtcttgtacctacttgcaccgcactttgggcagctctccaagtctttataatcatcacctcgataaaggatacagtgatttctacacgcgtggatcttctccacacccatagtgagcggactgattagtttctttgcatagtacgtgttagcaggcacattgttctcctttgga

SEQ ID NO: 33419 - DNA, 491 bp, Zea mays
  unsure (1)..(491): unsure at all n locations
ctcagctggggcgttatggtgtcacttggggagactccttcttcttttcttccgtcgccttgaatgcgacgggttgagcctcggatgtagatggatcatcaagctcgttgatcttcctcgagccttcgatcatgcactcaaaacttacaaaatgcccgattacttcctcgggggtcattttagtatatctgggattaccacgaattaattgaacttgagtgggggtaaagaaaatgagagatcttagaataaccttanaccatttgtggtcgtcccattttatgctcccgaggttgcgcacttgattcaccaaggtcttgagccggttgtacatgtgttgtggctcctccctttgcgaagccggaaccgaccgagcttccnnctcgatcgttcccgcttggtgatcttggtgagctcgtctccctcgtgcgtggntntgagcacatcccanaacctcttgcactcttcaaccttgtacttgtatactctct

SEQ ID NO: 33420 - DNA, 453 bp, Zea mays
  unsure (1)..(453): unsure at all n locations
gaccttaagtcacctgcggcatgcaagctntaacccctgcgagacctgtctccgtntttttctaaccatggtaaatgccatatcgcatgtcatatgctatgcatgtttaatctacttattctcttgtatggagtactgttggtttcctaaattcaatggatggatggatgcatgtttgccaccgcatagagaacgatctatttgaaaaacctcaaaaactctcaagagaagcccctgaacagcagtcggttggtggaagcaagtgtccctagaactatctctgtccattcatttcttaattcacctcccgcattacacatttatgcctaaagaattgactaagtttgtatccattaccttgcttacctatttgggttggattattatttgttaactttatgctattgctcaactataatcaatgaacatgatgagattatctatgatacactg

SEQ ID NO: 33421 - DNA, 473 bp, Zea mays
  unsure (1)..(473): unsure at all n locations
ctctngggactccattntgcttcaatgagactactatacataatagacttganaataggtattagtctcaaagactaggattatagagtaacctccccctgaaagtgtgcatacaagttttgaatacttgtaggagacttgcactttggttttgacatcaaaaggggcaaattatctataatccgagcattggcacatataagtcaaaatgacaccatttggagaataccactagtaggatataaactttgacacattaatgtcatttacttaggaatgttaaataagctatgtgccgagcttaactaaacattttaaaccatataggcttgctcaagaatatgaattgaaagcgcacatttcctaccatatgattgacctagtatgcatgcagttaatatcagaagtatatatcacatgtcaaactacgtatgtaagggtaaactagatacatgagaatagatacacatatc

SEQ ID NO: 33422 - DNA, 406 bp, Zea mays
  unsure (1)..(406): unsure at all n locations
agcttctaagggagaacacgtgataggtctatctaatgttcaatacgaaaaagatagaccntgtgcagcttgttaagcaaggaaacaggagggaggctctcatcacaccataaatgtgatgacgacttcaagacccttggaaatgctgcatatggacctttttggacccctcgcctatctgagcctaagaggaagtaagcttgggttagttattgatgatgaactttcccgcttcacttgggtgttctttctgcaggaaaaggccgaaacccaagggactctaaaacgcttcctcatgagagcctaatattagtttgagctcaaagtgaatataatatggagcgacaacggatcccgagttcaaaaccttcaagtagaagaagtccttgaagaggaagggatcaag

SEQ ID NO: 33423 - DNA, 418 bp, Zea mays
  unsure (1)..(418): unsure at all n locations
gagaacacgtgataggtttgactaatgtgcatttcttaaaatatagaccctgtgcagcttgtcaagcagggtaacaagtgggatgagcgcatcacagcaagaatgtgatgaccacttcaagacccctggagctgctacatatggacctcttcggacccgtcgcctatctgagcatatgaggaagtaagtatggtctagttattgttgatgactttngccgcttcacttgggtgttctttatgcaggataagtctgaaacccaagggaccctcaagcgcttcctaaggagagctcataatgagtttgagctcaaagtgaagaagatcaggagcgacaacgggtccgagttcaagaaccttcaagtagaggagatccttgatgacgaaggatcaagcacgagttcttcgctctcacacac

SEQ ID NO: 33424 - DNA, 427 bp, Zea mays
agcttctaagggagaacacattgtgggactaacaaatgttcattttgagaaagacacgatttgtagcgcatgtcaggcagggaagcaagttggtgttcatcattcacacaagaacattatgacgactgacaggccactctagctcctacacatggacctattttgcccgatagcttacataaacatcgacaggagtaagtactgcctacttattgtggatgactactctcgcttcacttgggtgttctttttgcaggaaaaatctcatacccaagagaccttaaagggattcttgagacggactcaaaacgagttcggcttaaggatcaagagaataagaagcgacaacggaacagagttcaagaactcacaaatcgaaggctttcttgaggaggagggcatcaagcatgagttctcttctccctac

SEQ ID NO: 33425 - DNA, 351 bp, Zea mays
agcttctaagggagaacacatttttgattttaaatgttcattttgagaaagacaggatctgtagcgcatgccaagcaggaaagcaagttggagctcatcatccacacaagaacataatgacgaccgacaggccactggagctcctacacatggatctattcggcccgatcgcttacataagcatcggcgggagtaagtactgtctagttattgtggatgattattctcgcttcacttgggtattctttttacaggaaaaatctcaaacccaagagaccttaaagggattcttgagacgggctcaaaataagttcgggttaaggatcaagaaaataagaagcgaccacggga

SEQ ID NO: 33426 - DNA, 322 bp, Zea mays
  unsure (1)..(322): unsure at all n locations
tcaccagcaagtaccatatatataagggggtcattgcatcaacaccatgatcgcaaagaacagctgtacatatatcagacatggcaaatgccttctattgttcccaaatacatgggcaaatgcatcataacagtgatcacaaagaacaactgcacatattatcaacataaataatgtattgtcatgctgtcaanaaaagatgacaaatgcagcaccagcaaaaaaaatattgctctgacaacattcaaacagatagctggagaggaattagagagatacaactaaattcctggtcacattggcgtcaagccatcaatggaca

SEQ ID NO: 33427 - DNA, 420 bp, Zea mays
aagcttctcttgacaagcgcccactcactgttgagtgtgaagctgccacatacaatagtaatggagcccctatcgcaggtggagttaatgttgttagatcaatcaaatattgctttaactcttcgaaggctttctgttgagttgggctccgttgaaaaacttcggctgactttaatatttcaaagaatggcaagtttctttctgctgatctagatatgaatctattcaatgatgccaatcttcctgtcagctgttgggcccccttctttgtgcttggtggctccatccgaaggatagcttcgatcttgcttaggttagcttcaatccccttcgttgaaactagacaaccaaggaacttactcttcttcactctaaagacacattttctggatttaatttcaggccagcttgcctgaaatt

SEQ ID NO: 33428 - DNA, 393 bp, Zea mays
  unsure (1)..(393): unsure at all n locations
tacatagacgaacagcgagaacagatgcaaaatatcatatgggttatgcaaaacgattgtaggagactagtacgtgcatttgataaatctagtatagcaaattttccttcacacgagggtgaattatgagataatacacgtaatacatccgttaaaggttgtcacgaccagtcacaacccccttataggatgccgatggacacgtaccctgagcaaacgcanatctgtagtaaaccagccgatctacacatgtccggaccgtccgctcgcgagcgcggaccgtccgggtcagccacagccgggcccatttttaatgagttacctagacacgcacccgagccaccacatatggcaccaaatntaaactatccagtcggacggtccgcatacaac

SEQ ID NO: 33429 - DNA, 424 bp, Zea mays
  unsure (1)..(424): unsure at all n locations
tagttcatatcataaggtttccttgcttttagtaacctacctgatttacacatacaaagggttgctaaataggaaactagtgcttgtgttactaatgcaatctcttgtattaggttcattgatagaaaattcatgaaaagagattgtgcttgttcaattggtaaaatgacaaccttaaactgaggtaaggattgtggaggcaaagtgttttaacaaggtctttccaagtggcttcaaaaggtcagacatcatcatgatacaagctcacttggattgatgaaatcattgaagcaaaggagataatcatatatgaaaagaggcttgaagttaatattaagcatgctttacttttagtcctaaaattacttactttgtaaagctttctataataaactaagttgtaatntaaactctcatttgatct

SEQ ID NO: 33430 - DNA, 406 bp, Zea mays
  unsure (1)..(406): unsure at all n locations
ctaaccgatgtctatgttgagaaatacagaccttgttcagcgtgccaagcacggaagtatgtgggaagcactcatcaaagcaagaatgtgatgacaacatcaagaccactggaacttctacacatggatctctttgggcccgttgcttatctcaacattgggggaagtaagtatggtcttggtattgtagatgattttttccgcttcacttgggtgttctttntgcaggataaaactgaaacccaaggaactctaaagcgcttcttaaggagagctcaaaacgaatttgagcaaanagtgaaaaaataagaagcgacaatgggtctaagttcaagaatcttcaagtcaaacaatatcttgatgaggaaggcattaagcacgagttctccgcttcctacacaccaca

SEQ ID NO: 33431 - DNA, 382 bp, Zea mays
  unsure (1)..(382): unsure at all n locations
agcntttaggataagaaaaatctcttaagctatatatgttccaatggggacaatctaggttatctagttattttataaatatatttttatatctatgtgtatatgcagatgcaattgtggacattactccacaactcatcacacccaatcaaagatccaaatcagacatgtatcataataacaaacattcaagtacataaacacttataaaaatagttttgtttttgttcctaggattaggtctcctattcctaaaggtcactttaggcacaggatttcaaagtgtgaaatccaagtttgtctttagaaggaaaaggtaaggataatcagagcaaagcggaattagatgagaaaagattaagaaaagtttagaaaagaatca

SEQ ID NO: 33432 - DNA, 441 bp, Zea mays
  unsure (1)..(441): unsure at all n locations
ntagttngattctcataggaacatatatggaccaacatctttctttgtatgtctattcatgaatccttatatcctcttcattttggtttgacacttcatatcatttacttcaatcttaatcttcatatgtctatcttgatcatatcaatgcaaggtgattntccaaatctttgtccatataagcaaaacaaagtagagaccatgttatacccattgtatattgtctcctttgtcatttgaccttctattggtatttcctcacttattcactcttggttccttctttaatagaatatcatcaagtntaacttgttgttgaacatttgcatactactcattatacattattcaagtgtattcaatatactcaatttcctgttcaacactcagcaaacttgtcagtccttaaactgtgttgtcattcaattcaccgaaaatcac

SEQ ID NO: 33433 - DNA, 429 bp, Zea mays
  unsure (1)..(429): unsure at all n locations
agctngagacacaaagcaccagtcaagtttttctagcagtggttggtggtgctgcatgttagaccacatgaaaacttgaccttttagctgtatttcttgcactcccagtgtactaattgctgaattaaaattcaacatgtgatgcatgttcgctcctgatttatttctattctccagcgaccgaattaatttgaaatctctcagaaatagccacggtctgtcagacagaattgatcttttgaaaaccattgaagaaacatctctctaccattaggcatgcagggcacatagatatttgtaaaccaccgtgtttgattggttaactttgagcgaaactgaatcgtatgctcatattcattttcatttattaggattccagggaagcatgaagtttcctagacagtgagtataccccccgaagctccaata

SEQ ID NO: 33434 - DNA, 408 bp, Zea mays
  unsure (1)..(408): unsure at all n locations
actaagcttatggcttacctcagtctatagtgtctgacagggaccccatttttaccatcanattatggcaagaactcttccggttggctggcactcagttgtgcatgagcagcgcctatcatcctcagtcggacggtcagaccgagcgtgtgaaccaagcataccttcgctgtttcgtccattcatgccctcgacagtggtattcctggttaccgctggctgaattctggtataacacatgttaccatacagcagtgggtaaatccccttttgaggtgttatatggtcatgctccattgcagctgggtttggagtctgttgatcagtgttcagtgcctgacctgagtacttggttgcacagccatcagcagatgttacaacaagtcaagtttcatcttcaacgtgcac

SEQ ID NO: 33435 - DNA, 429 bp, Zea mays
agcttgtgaaggttcttcatccccacatgtgctaagcggcgatgccacagccagcccatgctagtcttagcaattaagcatgcatctagaccggcctcttcttttgcaaaatcaactaaataaagtttgccgtctaatacacccttaaaagctagtgaaccatcacttcttctaaagacagacacatctatatttgtaaatagacagttatatcccatattgcataattgactaacagatagtaaattatatcctagagactctactaaaaacacattagagatagaatgctcattagaaattgcaattttacctaacccttttaccttgccttgattcccatcaccgaatatgattgaatcttgggaatccttattcttgacgtaggaggtgaacatcttcttctcccccgtcatatgggttgtgcat

SEQ ID NO: 33436 - DNA, 304 bp, Zea mays
aacaaaaattgggagaccgaaactgggccttcagagctttccaagaatgaatccttggaaattagaaaagaaatgaaaaaagaatctgttgaagaaattttatctgagaaaattgccatccctattctcgaagcatcttccgaagcccttaactatgttttacgtcatgcttcgggtaaaaaattgactgaaaaagaaaagcgagaagctcagttctatgcccaaaaattgaaatatccaaaggggcgctgatattaacggcagtggagaagaagacttcttgtattgggtctcccgacagcag

SEQ ID NO: 33437 - DNA, 409 bp, Zea mays
gcttatgaagattcttcattccaacatgggctagtcggcggggccagagccaacccaagttagtcttagcaattaagcatgtgtcgagttcagctctatcaaaatctaccaagtatagctgaccctctaacacacccttaaatgctattgaatcatcacttcttctaaagacagtgacacctacatcagtgaatagacagttgtagcccatttgacataattgggatacggaaagcaaattgtaatctaaagaatttacaagaaaaacattggaaatagaatggtcaggagatatagcaattttacccaatcctttgaccaaaccttgatttccatccccgaatgtgatagctcgttggggatcttgggttttctcatatgaggagaacatccttttctccccggtcat

SEQ ID NO: 33438 - DNA, 280 bp, Zea mays
  unsure (1)..(280): unsure at all n locations
gaccataaatactcaagcttaaggctcataaagatgcanaagatgagagcaatcacatggctttataaaccttcgttcggaggttataactttgagaaacgaagctctctagaaggataagatcctgctctctttggtggaaagattaaaatctagtgaagctaggctttctagccttttcgaagcatagcagagggttaaggtgttttgaatgaagcaacaaaaaatgtgaaccgcattgctgacttggagtatgcgctatttgttcaagtagaaatgc

SEQ ID NO: 33439 - DNA, 419 bp, Zea mays
  unsure (1)..(419): unsure at all n locations
agcttaagaactagcaagcattagtgagcattatctataaaattgagaaaacaaggcaaatggcacaagcagcgtaccaaatgtggttgatgcgagttcttatttatacgctcggcacgctccanattggggggccctgtctgtcattggatgttgctattctagcaaagggaaggtgctttttcggaccttcggctaaaggccttcgtccatgtcacagtctgaattcgctatcataaacaaattaatactacgaggggctactgttgggggccttcgtccttcgaaggtcctcaaaaacgtgatttaacaatatcttccaagtgtgacatatgaacaggtaccttgggactcgggctaaaaacacgaacgatgttaagagcatgatcgtgacgaaggttggaattgcttccaaacta

SEQ ID NO: 33440 - DNA, 464 bp, Zea mays
  unsure (1)..(464): unsure at all n locations
tcagccgaatgactgccaaagttcttcactcccatattggtagatatgtggaaacatatgtcgatgacatcatagtgaaaatcacaaaacaagagaaccatgttgctgatttgcaagagacatttgccaatttcagacaagctggtcttaagttaaatccaaaaaaatgtgtcttcggaatgaagaagggcaagtttctcggttggttggtatcaacaaagagtattggagctaacacaagcaaaatcaaagctatcctttggatggagccgccaaattcaaaaaagggggctcaaaggttagcaggaaggctggcatcattgaacagattcatttcaagatcagcacagaggaacctgcctttctttgaaatattgaaatcagccgaagtcttccaatggngtccagcctagcagaaagctttcgaggagctgaagcagtacttgatagatctaacaactctt

SEQ ID NO: 33441 - DNA, 424 bp, Zea mays
  unsure (1)..(424): unsure at all n locations
agctngtgaaaccaatcacaagtttattgaataatgatactaaatttatttggtcttcaaagggtaatgaagcctctgaacaattgaaggtattattaaccactgctccggtattggctcaaccggatattgaaaagccctttgatgtgtattgtgacacatcaggcagtggtctcgactgtgttttaatgcaagaaggccgagtgatagcttatgcttcaaggcagttgcgccggcatgaggaacactatcccactcatgatctggagttagctgcggtggttcatgccctaaaaatctggcttcattatctgctgggaaatatctgtcacacttatacagatcataaaagcttgaagtatatcttcacccagtcagaattgaacatgagacagaggcgatggctcgagcttattaaggacta

SEQ ID NO: 33442 - DNA, 380 bp, Zea mays
  unsure (1)..(380): unsure at all n locations
tctanacatccttagataaatctactagaagataagctcgactgtactttgtatgaaaggatttcacttctcaggggttgggtttcgtgctattcatgagtctgctaaagtaggccaagctgaccgaactacatgactaggccaacctccaggatatatagagtgggttttcttaattacctaggaccccaaagccaaccaagttgatctatgatctcagctatgctgacattcccgtgttcttgaccttttaagaagtgttactgagttccaagtgtccattctccgatccatttgttctggtatctttataagttgccaaggaacactcttttctaagatatcaaatcggcttgatcgatggctgcaaggctattctg

SEQ ID NO: 33443 - DNA, 393 bp, Zea mays
  unsure (1)..(393): unsure at all n locations
atcacactgagccatggaagccctggaaaatataagattctggtctccttagtagatagactaaaagtcagcgaagccaggcttaatacacaagtcaaaactcacaaagccgaagttgacgatctaaagaaaaaactggctgaagtgaatgaaaattttgatgtggcgaaggcaaagcaagagataagtgaatggacaagtttaaggctagaaaagaatgttgaagagcatcgtggttccagggaaaggtgttatgaaaaatcctgggactgcgcgaagaagctaaagggatagcttgcgaaggtgggggcgtattcctcagaacannaaattattcgtggcgaccccgaaggggttatctaatggataggtgaagaagccgaagctntcgat

SEQ ID NO: 33444 - DNA, 326 bp, Zea mays
  unsure (1)..(326): unsure at all n locations
gcttgggatgaagtcttcctccgaagcccctaatcatttcagaaaacatgtatgcttacttccttctttggcggaaatcattatcaagccccgatgtactgtcacacccggatttaacggacaaagccgggtgcatctcatacatgcgccaaagaagacaacatatataataacagagtgtatagagataaatgtcataaaacatcagagtatttattacatagcggaagacttaataccanataaaagaattaacataaaacgaactattgatcgtcggcgcaaatgtcaactgagaaacgccacctagatcagatcatacttct

SEQ ID NO: 33445 - DNA, 139 bp, Zea mays
caaattttgttacatatgccttgagtcaaaaggagcgtgtcttttaactgttgtgcccactactcatgggattgttgaaaactaggaggcttacctggggatattactcacactaataggttatattgagtggaactac

SEQ ID NO: 33446 - DNA, 427 bp, Zea mays
  unsure (1)..(427): unsure at all n locations
gctgctcactgcattctgtaccgaaggatcatcttgctctanctacgcgacaagaaggagcttctgcataagataaanaatttcaactttgtcagaacgcaagaaattcaatcatcaaatggctagggcacgctcaaccgctagggttactcgcgacggagaggaaaccgaagctgctgaaactgcgcctatctccaaattatgaagccgtcgggattggttgtgactgaaagcgccattgacaaaataataacccgctgctgaaaccgagcaggtagatattgaagagggtgatggtaatgaaggagagattgattattacatcattatgccatcgaaccccaccatctggatttgggaatcaactggtctgaagctgattgactatgatgacgaactatgctattcaaaaaaaccgagaagagtt

SEQ ID NO: 33447 - DNA, 430 bp, Zea mays
aacccctgcgagacctttcccgcgttctttctatccatggtaaatgcaatatcgcatgtcatattctatgcatgtttaatctacttgttctcttgtatggtgtactggtggtttcctaatttcaatggatggatgtatgtatgtttgcactcccataaagaacgatcttggtgaagagcccgaaaaactccaggagaagctcctgagcaccagtcggttggtggaggcaagtgtcccttgacctatctctgacctattcattctttaatccacctcccgcattacagatttatgcctaaggatttactagctttgtcattcatgtccttgcttacctatttggttggataattatagcttaatcctatgctattgcttcactctaatctagaacatgacgaaaatgatcaatgttaccctgttttccctt

SEQ ID NO: 33448 - DNA, 433 bp, Zea mays
  unsure (1)..(433): unsure at all n locations
tccgggatanatctgcggaatagccagccagtccaatgaatacttcaacttgatgtacagtggttggcgggtttcactctataatacccttgaccttgctgggatcaaccgcaatcccatttgcagacaatacatgtgctaaaaattggatttccttcatccaaaatgtgcacttgctaaatttagcatataattgatgttcccttaagcgtgttaatacgatccgtagatgctgagcatgctcctcttcattcttggaatatatcaagatatcatcaatgaagaccaccacanatttgtccaactcgagcatgaataccgagttcattaaatatgtgaagtgggcaggagcatttgtcaatccgaaggacataaccaaatattcgaataatccatatcgcgtagtaaatgcgggcttgggtatatcttcggg

SEQ ID NO: 33449 - DNA, 425 bp, Zea mays
  unsure (1)..(425): unsure at all n locations
cacctcggctgcagctttacttgctagggcagctgtatcttataaggaggactgttatgacttgtcagcccacatggcccatgttggcccatgaccaactatctgaaggtaataagggtagcaatcganagaaaggcaaggggaaattcttcataacatacaccactctattcgacctttgagtctactgtacatcttactccccaagtccttttcccctgtaaagaagcttttggtttcctttaactaataactatccccatgcttgctatcccttcccatgattatctccaccaaactgtatcacacgcatgtgtctagtggttctttgtataatagactaagttgaagattggggctgcttacaccaacctcacatttggtgagataggggagtttagaggagacaaataaattaaattgta

SEQ ID NO: 33450 - DNA, 431 bp, Zea mays
  unsure (1)..(431): unsure at all n locations
agataggcctgaaggaagcaagaatngttggccttgtcagtcatgcgtgcacactactgtgcagccaagtgatgttatgtttgagcatntggtgtgcaatgggatacttgagaattatgaccgatgtgatttcatggagataccttctggcatggaaataataatatggctcaaaatagtcatagtaacgaaagacaagttaatatgacgcaaatgattcatgatacaatacaacacatgtatgatgacacacctatggttgatggcaatgctcctacgaaagggtcctgtctggatgcagcacagtttataagatgattgatgaatcaaatcanctgctatggacaggatgtgagttgacaactctgactttattggtgcttctatctagtataaaatcaatgaacacatggacggataaatcttttggt

SEQ ID NO: 33451 - DNA, 191 bp, Zea mays
cactcgggatccttaagtcacctgcggcatgcaagcttgtaaagagagagcacattgtaggactaacgaatgttcaatttaagaaagacaggatttgtagcgcatgccaggcagggaagcaagttggagttcctcatccacacaagaacatcatgacgactaataggccactcgagctcctcacatggatt

SEQ ID NO: 33452 - DNA, 379 bp, Zea mays
  unsure (1)..(379): unsure at all n locations
atacaattccttcaagggtcttaaattttctttttctttgtgcatgtagtcatcggcctcacctaacattctaacaagatcatcatatgaatagccatcatcatcaacatcatcgatatcatcatcatcttttatatcatttaaaatcggtgatgaattttaccttaccatctccctttgccatgagacaatgggggatgagaaaagtgagggagcttcctttatggcaattccggcattaagcttggatgaggtgtcatcatcatcatcatccgagctatcatccgagtcccattcaactaaataggctntgccatctttcttcttggtaaagtatttctttttcttcttggcactttcatctttgcccttcttcttc

SEQ ID NO: 33453 - DNA, 431 bp, Zea mays
  unsure (1)..(431): unsure at all n locations
agcttgtgaacagtacatattcagaagggagaatgcatcttcagcagatcagccgaagcccatgctattgtgtgaggacatagcaaagcagaaggtgctgttgggctcgcaattatctgaagaccangagaaaaccttgataaggtttttattcaacaacaaagatgtttttgcatggtcggctaatgatctctgtggagtaaatcgggatgttattgaacattcgctcaatgttgacccatccttcaaaccccgaaagcagaggcttcggaaaatgtctgatgacaaggccgaaggggctcgcaatgaagtaaaaagactcctcagtgcaggagttatcagagaagtgaagtatccagagtggctagctaacactgttatggtgaagaaggccaatggcaagtggagaatgtgtatcgatttcacagatc

SEQ ID NO: 33454 - DNA, 421 bp, Zea mays
  unsure (1)..(421): unsure at all n locations
tgaggagatggcgctcgtcatcaagagctcccttcattttcttacaaggagggggaaagactacaagtcccgctccaagaaggtttgctacaaatgtggtaagcccggtcattttattgctaaatgtcctatatcaagtgacagtgaccgaggcgacgacaagaaggggagaagaaaggagaaagagaagttcttccaaaaaaatggcggcgatgcccatgntttgcgggagtgggattccgacgaaagctcaagcgactccttcgacgacgaggacgccgtcaacatcgccgtcaccaagggacttctcttccccaacgtccgccacaagtgcctcatggcaaaggacggcaaacggaagaaggttaaatctaactcctccactanatatgagtcttctagtgatgataataatagtgat

SEQ ID NO: 33455 - DNA, 432 bp, Zea mays
  unsure (1)..(432): unsure at all n locations
ngctngtgaacagcacatattcagaagggagaatgcatctttcgcagatcagccgaagcccatgctattgtgtgaggacatagcaaaacagaaggtgctgttgggctcgcaattatctgaagaccaggagaaaaccttgataaggtttttattctacaacaaagatgtntttgcatggtcggctaatgatctctgtggagtaaatcgggatgttattgaacattcgcttaatgttgacccatccttcagaccccgaaagcagaggcttcggaaaatgtctgatgacaaggccgaaggggctcgcaatgaaataaaaagactcctcagtgcaggagttatcaaataagtgaaatatccagagtggctaacttacactgttatggtgaagaaggccaatggccagtggagaatgtgtatcgatctcacagatct

SEQ ID NO: 33456 - DNA, 330 bp, Zea mays
tttttcttatcaagaggggaaaacacagcccgtccagaaggttgtcaaatgggtagcccggcatttattgctaatgtctatataaggacagtgccgagggacgacacaatgggaaaaaaggaaaagaaagtctactcaaaaggccgcatcccatgttgtcgggtggattcacaaagctagcgatctccacgacagacccgcacatctcgcaccaggactttttccacgtggcaaatgctatggaagacgcacggaaagtaattactctcataatatatcttatatatatatatggagagaattcggtctttgcattactgaccaaaaata

SEQ ID NO: 33457 - DNA, 436 bp, Zea mays
  unsure (1)..(436): unsure at all n locations
agnnctgaaaatatctggatatggttcgaagagttgaagcttccttcgaagggttttctatcaaaaatatccctcgaggacaaaatgagcatgctgatttgctagctaagtcagcagcacaggggctgcctttaccttcggatgtgttcttcgaaacaataaaagcaccttcggtggagcttcttgaaagaagcagccttaatatatctcctgtttttagtgaagattggagaaccgagatcatctcttaccttcagggtaaattcctttcagatgacgaagcttataacaagaggatagaggcaagagctcgtccatatgtcataatagaaggggagttgtataagcatggagtttgtgctccgctactcaaatgtttatccaaagccgaaggtatagagttaatgaaagaaatacatgcaggcctgtgtggatc

SEQ ID NO: 33458 - DNA, 281 bp, Zea mays
  unsure (1)..(281): unsure at all n locations
ctcagctatgtttgactcncacctgtatatgctcctgagcagctggttattctgtccacacaagggttactgctaacaccgtcagcaacgatgcttgggatcacatcatgatgcctgccgtttgaaccggcttcacactccacgaaatgatctagatcagatgtgacctccatgttggtgatgcgcagccagtaactctgccaccacgactgactgtgcatgttcatgaagaacctcacgcacttgctgacaacaacgacgtgcgtggagttgatgaaatg

SEQ ID NO: 33459 - DNA, 381 bp, Zea mays
  unsure (1)..(381): unsure at all n locations
agctagacaaaaagggttggctgctcgctcttatggagtntctaaataactctttgaacgtagagaaaattatcatgaatntgatcattttgaatgaacgcgttttgggcagtgaagacgatctcgttcattcttggcgcaagtctatttgctaaaatcttggttaaaattttcatgaaactgttgatgagactgatcggtctaaacatgtcgatcttgtcaagccccttccctttttttgtaaagagtgatatttgcctcattaacaagatgcaggcttttacatctatggttataaaaatcatgaattgcattggatagatcatctttaatcagctcaaaacaacacttataaaatatccctatgaaaccatctggacc

SEQ ID NO: 33460 - DNA, 435 bp, Zea mays
  unsure (1)..(435): unsure at all n locations
actcagctnnttaaagctgggctgagatttcctctccatggaattattggatatgtgtntgcaaaaattggcatttattttcaccaattgactcctaacgccatcgttagactcaatgtttatatctgggccctccgaagccaagctgtggaaaccgttgccgacagcttctgccgagcccacgaattacattaccaaacaaaggccagaacagacggactacatgataatttcggctggtatcaatttgcctacccgaagacaacaaagtaccctgtcatcagctaccgaagcaaatggccagcaggctggaagtctgagtggttctacgtaaaagttgacgaagacagagaannaatggtacanagccctctggaataatcttcgggagacaaggcacgctgcacatcgcgattaagggtctacctggcgtct

SEQ ID NO: 33461 - DNA, 409 bp, Zea mays
agcttcaagtacaagacatcgttatcagagcattagatgagatggaagcacaagataccatatgaaagttttaagatatactaacttttccttgctgtatgtcctcaatggcttctgcaattgatgtgaagtcctctgtcgggctatccaaatcaagttagtatcagtgtcatcgtctgcaaacatgtctataacacgttccacattatcagagaggaattctggcgtaatcatggaatccattgggagtacagggtcagcaaccggatggtcctggccacgaatggttgtgctttttggcaatagagtgtcgtccttccaagagacaccgccagctggataaccaccatcatttttgaaggatgatgctactttcaagtccgctgatttcaccgtggtgctctttgaa

SEQ ID NO: 33462 - DNA, 348 bp, Zea mays
  unsure (1)..(348): unsure at all n locations
cgccagtacctgtcanaacaacaacacctgccattctattgcttaaaccataccagtaactnggccctttgcatgctggggaatggatatgataggacctttcaagaaagctcacggaggatacacccatgtattggtggcaattgacaagttcactaaatggatagagttccagcccattgcctctttaacctctgctaaagccgtggaattcatacaaagcataatattcagatttgggataccaaacagtatcatcactgacttgngatccaactntaccagttcagaattctttgatttctgcgagcaaaaaagcattcagatcaagtatgcatctgtagccca

SEQ ID NO: 33463 - DNA, 324 bp, Zea mays
atcttaatgcacaagatctaataattgatttagtgggagcagatggcccgagagcgtgtcaatgagtttgccgtatgaccgtatttatacgccaaatgcgttgaaaatgacagaacccgcttgtcagtgaatggtgctattctagcaaagggaaggttgtttttcggacccttcgcggaaagccttcgtcccatgtcgcaatctaaatttattattttaaacaaattaatattgcgaggggctactggtgggggccttctgcttcccaagggtctctaaaacaggatttaacactatttttggagtataatgtgtgaacaggta

SEQ ID NO: 33464 - DNA, 223 bp, Zea mays
tatgtgctctcataattatgtggcgtacccgccatttgaagtggcggaggatgatgagaatgaaagggccttcggatcgctgcccgtacgagtagtgggtgcgatctagttgaggagttcatcgggtacgggggtgtggcccttggcgcatggatgggcgttgggcgaagtatgccctcgcgagatgccctcctatgtggacggaaagtgcgaagtccacttt

SEQ ID NO: 33465 - DNA, 400 bp, Zea mays
  unsure (1)..(400): unsure at all n locations
agctgcgagaacgaagagaaagttgcttaattgtaagcgccatgacactactacccatctgccaagaattgcaggatgttaatttaactggagcgacctttaccgtacacaggttcttaacatgaatgacaatccaacaaaaaatgatagtcctaataacatcgcactgctcctgaaagctatttttcaatgctccagcggcaaatatagcatgttctggtacatttgtcttataatttacagaatggtgagcttctgacttctngaactcattgtaggtactgttttccactgagacatttgcaatgggtgtcaatgcaccggcaagaacggtgagattcaattttttatttagggtttcaatgctttggcaatcttgacaaatcactctagttctact

SEQ ID NO: 33466 - DNA, 211 bp, Zea mays
  unsure (1)..(211): unsure at all n locations
attaatgatctngacgaagttatagctgggcatggtgacttctgtgtcctggtagcttctctgggcacagctgttgcctttctgaagtctggctgtgaacacggaaaagttgtcaatagacccaacttcagnttgcaccagcagacctagataacattcccaacctggcccanagtattgcgaatagatntataanattagtatggacaaa

SEQ ID NO: 33467 - DNA, 376 bp, Zea mays
acctgttcgatgaagccagcgcgtagcagctttcggacctcctcacggatgaaatcctgccgctcaatggactgtctctaggggcttctgactcaccggtttggcatcagggtggatcttcaaatggtgctcgatcacctcccttgggatcctaggcatttgcgacggttcccatgcgaatacgtcggcattttcctagaggaaggcaatgagcatgatttcctatttctccttcacattgcccgtgatgcgagtggtctgggaggaatccaccctgacctggatggtcttgatgggaccgccgtctcctccagatggttgcaccttaggcaccttggtaggcgcctttgtacaagaagtcaaggggtccctcccc

SEQ ID NO: 33468 - DNA, 296 bp, Zea mays
  unsure (1)..(296): unsure at all n locations
atcttggtatgtgtgtcccatctgtgtacagggtangggtgcttatangtaacaaggaggggtagtgggtccccaagtattggtatacccncgattacctgctacattcctagaatattccccttaatggggtcattacagtgaacaaagtgttgtaaattggacgctttacaatatctaccctgcaagggggcttacaagtgggaccggatgactgangggcggagtcctangctcctncatagcctatcaaggcctcagctcgtgtgatgcacncttgattctgcgaagtcatg

SEQ ID NO: 33469 - DNA, 362 bp, Zea mays
ccagctggccaggaataaaaaacacctggaccaaaaggaggaggccgtcacagcactccatgataggctgaaagcttataatgcagtgctggagaaacagcgggacaagcaagctactgctgaggcgaagctgcagcaggagctctccgacaaggccagtgacattgctcgtgttgagggaaacctcaaggcgagggaagcctccctggcgaaacgaacaactgacctcgcttggcaggaggaagacctctccttcagggaggagatgtgggcaaagcggaacaagctgctggatgagcttgagctcgaggccgaagagaaagtgaagcgtctggaagggaagttgcgggcgctggaggggc

SEQ ID NO: 33470 - DNA, 451 bp, Zea mays
cgaccttataaactaagccttagcgttggttccaaccttgctttcgagccagacattaatcccttcctaaattacctccggaagtaagtgaataaaggtaaatttgaaatgttttcaccacctaaacaacaaaattgctcaagggaaatctaagcccatcctagacgaggcttcagaaaatcacatcttcatcttcttcaggggtgggagaagtcttttccccggcatcagctctcacaagatatttgtccgaaatatatcgccctcttattatatatgtgagactctgcgagagggtgtgtttcccaaacactgagagacttggtcgccacggtcgatcttcggcctcttccccatcactatccacatcatagcgtgcgctatcatcagtatcttcggacaaaccttcgagattctccttcgagattctctctgtattagtctctgccat

SEQ ID NO: 33471 - DNA, 408 bp, Zea mays
cgctcacttactctgcaaaaaacttaccttttaacaagagtaaaagaatgtttgaaagttaactatgttgaagcacgggtaaatgccaaggacatgctttctcttcttttgataagaatgccagaatgttataaaagaagaattacgaccagcttgaatgaaaggaaggggttttacccttttggacctttacataaagacgctctcttattgtgctctcgctttagattttggttgcttaagaccctgtacttaatgacaatatgtggaaatactctgcacaagaaaaaagtctacaactagtgatccctttcttaatcattggttagcatttataaagatggatcacaaattgcataaatgtatcatgaattcctccttctaacttaatgcatatcaattgaaaac

SEQ ID NO: 33472 - DNA, 424 bp, Zea mays
  unsure (1)..(424): unsure at all n locations
agttccatctatgtaagggattgcttttgagttctgccaatntccttcggcccttctggcggcttcctgacttccatgaatagcaatgggcccttgttccgaaggtatcttcatgcaaagataaactggatgaagaattgcttcgaaggcattgagagtaccacgaccaatgattgcattgtaagggtattccatgtcaacaatatcaaacaccaacttgtcagtccttgtgttgttgataaatccgaaggttactggcattgagattttgtcgagtgctacaatctaccttcctccgaagccgcagaggggatatgtggcatcaagaantttatcttcgggctcttgcatctgtctgatggccttaacaaatatgatatctgccgcactgcctgtatcaaccaaaacattgtggaccaaaaat

SEQ ID NO: 33473 - DNA, 387 bp, Zea mays
  unsure (1)..(387): unsure at all n locations
cgaccttgcgcagcttgtcaagcaggttaacaggtgggaagctctcatcatgccaaanatgtgatgacaacatcaagacccctggagttacttcatatggacctcttcggacccgtcgcctatctaagcatacgaggaagtaagtatgggcttgttatagttgatgatttttcccgcttcacttgggtattctttttgcaggataaatctgaaacccaagggaccctcaagcgccttctaaggagagcccanaacgagtttgagctcatagtgaagaagataaggagcgacaatgggtccgagttcaagaaccttcaagtggaggagtaccttgatgaggaaggaatcaagcacgagttctccgctccctacacaccacagcaaaat

SEQ ID NO: 33474 - DNA, 432 bp, Zea mays
  unsure (1)..(432): unsure at all n locations
agcttcgcacctctgaactaacccggctgcatcgttcttttctgtcggccaatagaatcctgacctganaaccttcccgactagtgttctggatgctgcatgtattccacattgcccagcatggatctcctccagaagttgcttcccagtggacgggagaacgcacttcatgaggacgcccgatgcaccccttctgtataatgtctccccaatgagtgtatagtgagccgactgcctggcaattcgctctgccgagttcttgtcgtctgggtcttcattctttatatacttaatgatcggccttctccagtcatcaaagtctgactcgggttgacctatgatgttgcactcttctgtttgatccattgagatactcggctgcagaaattcttgcacgaagactccgggtgggaccttgattcgactggatcc

SEQ ID NO: 33475 - DNA, 333 bp, Zea mays
  unsure (1)..(333): unsure at all n locations
tgatgtataatcgttatatatagctagtcaggtattcctgcagaatagtaaaaaaacatccatggaccatggaagtcagcaacaaaacccccttcacctacctacatgtcaatgcaacggtattatcattcacctgataaaaacagatgtatgtaccaccaagggggctcaatatgttgacaggaaagaattatattataagcacaacatacaacacaagggccaactgaacagttgcatagagccatactgcaaagtctggcatgccagcaccacggtctacaaaatgtttagttgagagaattttatcattttttatattntctcatggga

SEQ ID NO: 33476 - DNA, 429 bp, Zea mays
  unsure (1)..(429): unsure at all n locations
agctngccataacattcatccatntactnttggtgcaagttccatgggggttttgtaacctttgtattggcatcaggtatggagggtgaatggaaatgtcaagacttttctttcagctgctgaccaatcaaaattttacactggagattgttacanttttcaatacacatatgctggagatgacaaagaggaatgtcttatcggaacttggttcgggaacagaagcgttgaggtaacatctgctcataaaatcaacatcagtgatggtttcaagaatttaaacccacacagatttatttaagtcaagagatattntcattgttccttgttggatctccatatgtttctaataaatgtgtntttgaggcaagttactccttgtgaatcgatcttacttgcttttaagtggagagggtgtcagcgctgtca

SEQ ID NO: 33477 - DNA, 328 bp, Zea mays
aaatccactgcttgctctctgtcccagcatgaaccaattaagtgtgagaagaaaccatccactgctgcagccttggccctatggctagtaaggatatcattcccatcaaccaacgtaacaataaaattctttctcttacggtgtttggcatgcaggtggaagaatttcgtgttggcatcaccatccttgagccataaaatccttgatctcatcctaaccatagtacgcttcacggaggataaaagcatagaattgtttttaagcttgcctttcagccaaaattcatccggagtcaacaccctttcatcctgagcaatatacagcttat

SEQ ID NO: 33478 - DNA, 412 bp, Zea mays
  unsure (1)..(412): unsure at all n locations
gacctcanagtcacctgcggcatgcagcttatacaggaggatagaagcaatagcttttctctatgtcataatagaaggggagctatacaagcgtggggtctgttccccgttgctcaagtgtttatccagatccgaaggtatataattaatgaaggaaatacacacaggcctgtgtggatctcacattgtatctaagcctttgctcgggaaagtttatcgtcaaggattttattggccaaaggcagcttcagatgcagcggatttagtccaaaagtgcgaaggttgtcagaaatgtgcaagagatcaaaaacaaccttcgtcttaactcaattatacaacccacttggtcgttgcaaaggtggggccttgatttactatgtccattaccaccagcacaaggaaacttaagata

SEQ ID NO: 33479 - DNA, 439 bp, Zea mays
tcccatgttagtcttagcaagtaagcgtgggtcgagtatatctctagtataatccactctgtatagctgaccctctaacacgcacttaaatgctatcgaatcagaacttcttgtaaagacagcgacaccttctcaggggaagacaatgtagcccatctgacataattgggaaacagaaagcgtgtcggaagtctaatgaatctcacatgataaacagtggatatggaagaggcaggtgaaatagcaaatgtacccaaacgcttgaccaagcctagatttccattctcgaatgtgatagctcgatggggatctttgctttctcattgaagagacatactttctacctgtcatgtggattggcacccgctgcgagtatccacttgagccgccgatgcataacctacaacaaaatagtcttgacttaagagcaaactggttg

SEQ ID NO: 33480 - DNA, 406 bp, Zea mays
gcttaccctgtggtccgtactatgagatggttacattatgtgtgctatatgcacgttgaccatttctagcatctgcgtaatgaggactctacggagaaacctcgttatgagacccttgccattcacctccgaagtgaatacgggtctagcttacccgggctataagggaatcacgactcatgggttaaaatgcgccacctttgcagagttgtaaactgatattatcaaccgtgctcacggttatgagcagccctggactccttccatgataattgaacttgaagatggaaataaatcgagatccgatgatctgccaatggtttgcttaagtggtgtcacttaagtggtggtgatatattcctatgcctctgttaatgggaatacttgggattcacactttataata

SEQ ID NO: 33481 - DNA, 390 bp, Zea mays
agcttatagattgtataagatgactaggggcttctgaggaagaatccactctaggcttgtcagatcaatccacaactccagtcagaatgactataaagaaagccagcttcagaggccacaacacaccttacagtcttcgggacagcagcaaagctccttcaggccaccagctccaaggggcagaggcgccaggggctttggaggaagatatggggatcagcccaagaaaatttattgcttattctatggtgaagacaagggccacactacaagaatgtgccaaatcactattctgaaacaaaaggagaatgccgaagccgaagctcaacataatcagccgaagcaggtcttgcacactgttttgtgccactctccttacataccggaata

SEQ ID NO: 33482 - DNA, 420 bp, Zea mays
  unsure (1)..(420): unsure at all n locations
cagcttatgagtgcataatactgccagntcaatttttttgttgttagagccntctctacaatgaaaagaattaacgaactgcgcaacatgatttcagaccaatggttcaatcacttgatggtgtgttacacagagcgggaattattcaaagcacttgataattctaccataacacgacgctntcaaagtataaagactcgaataatgagtctacctcgtgttatacgagactagcacattatatacatgtaagaaattctttaagcactctatagaatatgaattatttttttaattcatatgatcttttaaagttgcccacgcttctaaaaatgtctggctccgccactgccgaancccgacacgtttntgacccaggaccaatccgacccggctcgctctccaccgagctcgggccgg

SEQ ID NO: 33483 - DNA, 427 bp, Zea mays
gcttatgaagattcttcatcccaacatgtgctattcggcgatgccagagccagcccatgttagtcttagcaattaagcatgtgtcgagttcagctctatcaaaatctaccaagtatagctgaccctctagcacacccttaaatgctattgaatcatcacttcttctaaagacagtgacacctacatcagtaaagagacagttgtagcccattttgcgtaattgagatacggaaagcaaattgtaatctaatgaatcaacaataaaaacattggaaatggaatggtcaggggatataactattttacccaaacctttgaccaaaccttgatttccatccccgaatgtgatagctcgttggggatcctggtttttctcgtaggaggagaacatcttcttctcccctgtcatatggtttgtgcacccgct

SEQ ID NO: 33484 - DNA, 316 bp, Zea mays
  unsure (1)..(316): unsure at all n locations
tcactatagagttactagcagatgtaaacggcatgggtgtaattttacatgggttgtgtcccgtgcctataaatagatgaacagtgctcccgtactgttcacgctgacttgtcattctgcttttgcgtcacgctggtacttttaccttctttcaagccgaaggtacatttgtaatttgatatcatttcctatttttcatgataatagaatagaaacaagcttacaataatatataattggtcatgttanttcttatgtttcatacatttcttctttcattaatgtatactgtgatgatgaaggtatgtccttcatg

SEQ ID NO: 33485 - DNA, 344 bp, Zea mays
  unsure (1)..(344): unsure at all n locations
gcatgcagcttgcaatactagactaaagttaaggtctctggtgtttcattanaacatgctttactcggccataattaaagtggacaattgggggaaagaattgtggctcatatttgtggaaactgggcaccattcttatgcacccccacaaatacaacgggccataaaaaggccctggcaaattgctcccagaaacctggcggagaaaagtatatttcaaaggagatttttatgtgcaaaacaaatgaccttgtcacagcttactattatttgtaaaatatggaaccatctgaaacacaaatttagaaaagatacatgaaatgatctacacatgaactgttatt

SEQ ID NO: 33486 - DNA, 384 bp, Zea mays
  unsure (1)..(384): unsure at all n locations
ttgctacaagtgtggtaagcccggtcacttcattgcaaaatgtcctatgtctattgacagtgacaggggcgacgaccagaatggaagaagaaaggagaagaagaaattcttctagaaagagggcggcgatgcccatgtttgtcgggagtgggacttcgacgaaagctcaagcgacttccttcgacgacgaaggacgcnncgccaacatcgcccgtcaccaaaaggccttctcttccccaacgtcggccacaagtgtctcatggccaaggacggcaaaaagaaggtaaaatcaaggtcctccactaaatatgaaacatctagtgatgaggatgatgataaaaatgaggaggataacttgcgcactctttttgctaaccttaacat

SEQ ID NO: 33487 - DNA, 432 bp, Zea mays
actgaaatggaagacgatcatgacgaatgatgttacggtctctaagctatatgcagaggagcttctgcttgacagcataaaggggaaacccacttaaagatgaaaagcccaatcagccctcgaagaattactatagagatattgataaaagtaaagggcattaatggaattttatacgggctgcgtcccgtgcctataaatagatgaacaatattcctgtactgttcacactgacttggcatcgacatcacgtttgtgtccttactttccttcaagccgaaggtacatttcgaatttgtcatcatttatataataaagatgaatagaaataaattacttataatgtttaaagtagttatgttattttccatattctatacataaatcatttctaatcttctattatgagtatgaaggggtgaccttcataac

SEQ ID NO: 33488 - DNA, 173 bp, Zea mays
gatgctgcctcaactcatatgcccaaacttctggatgagtgatgtgctatttatactccaaatatctcacataaaatggggttgctatggaagaaatatggatcattagaagaagatggaaagaatgatttttctacttggctgagagtgatcggctgatgcatattgagata

SEQ ID NO: 33489 - DNA, 416 bp, Zea mays
tatttttgttaactatttatggtcaacaataacttaagagaggttaaatggcttggcgattctatatatcaaaaaaaagttgttggataaaactgatctcaatgatataagcgatgactttgtatcacaaaatgttagaagatatttttaatgatatcaaataagaagtaagtgcttttgactatattttacatttgttatcttataagcatcaaaacaatgcataataatttttatatgttaaatattccatattgtatgtataattatatatatttgtgtgtggatggaccctctatatcggatttcgttcaaggccctgaaaagtcaggaacggccctgatgctgacattctctcgtctgcgcggcgtacattcgcctagccgccttcagatcccgccagcggtatgactccc

SEQ ID NO: 33490 - DNA, 311 bp, Zea mays
tgcgagaccttttcccgggtctttctaaccataatgaatgctatatctaatgtcatacttgatgcatattcactttatctgttcccttgtatgatgtactgtttggttcccaatttgaatggatgaatgtatgtatgcttgccatcgcataaagaacgatccggtcgaagagccctaggagctcgcatgagaaacccctgatcacaatcggatggtggaggcaagtgtcctttgacctatctctgtcctatatattcttttaattcacccccgcattacacctttatacctaaggattgactagcttttgg

SEQ ID NO: 33491 - DNA, 434 bp, Zea mays
agcttctccttgtcgtcatcaaccttgacatataaccactctgacttccaacctgctgcccatttgcttcggtagctgattacaggaaattttgtggttttccgataagcaaaattatagcaaccaaaattgtcatgtaatccatcttttctagccttcgtctgatagtgcagctcgtgaactcgacaaaagctgtccgcaaacggctccaccgcttggcttcggagtgcccagatataaacactaagcctaacgatagcgttaggagtcaactgatgaaagtagataccaaacctcttcagtacctctgcaataatcccatgtagggggaatcttaatccagcctttagaaagctcttgaaaatgactatttcatccttctccggctttggggtagtttcttctcccccgaagcgtaatagcttcttctgatt

SEQ ID NO: 33492 - DNA, 482 bp, Zea mays
  unsure (1)..(482): unsure at all n locations
gtgcactctnttcattggcaagattatcaatagaggttttcatggtaattacttctttatctttattgtgaatcaactcttgaagctctagggttctttcctttcctatgataagcaagtcttcttgagcatcaagagttgcttttcttttatctagcttttcccattaatttgtgataacattgtatccatttaagccaaattctttaatcattttatntttcatggaaatntgatcatcatcatcatcatttgaaaaatcattactaaataaagttaccttatctccctttgccatgaggcaagttggagtgtaggagtcgtcttgaaggttggtgaagagttgctcgcttgatgtagattggatggccacatttgccacctcttcctcttcctcggagctagaactctcttcatcggagttccattcttcaccaatatgagctngtccatacttcttcttcttgaagtatcccttggtc

SEQ ID NO: 33493 - DNA, 424 bp, Zea mays
  unsure (1)..(424): unsure at all n locations
agcgtaataccctacatccactgtccgtaagttgtattgaccgngtcccttgtaacgctntgtcccctcccttttatagtttaagggaggtacatacaaggatgctgagctccgacatgcgggcccaggagcataatggaaggaatacattatgtgaataatcaatgctgactaagccttaaacaaggtagccgttcagattccctccgccttagtaatgcatgagtaatcagcgggagtcatgatgactgcagtccatgcagcattgataggcagtgacccttttcttggaaatgcgcgagtaatggtgagtcattgtccttgctatggtaacgtgtgagtaacagcacggcccacgcaacgtggactaggcacgccgcctgtcactggaacggacaggcgcacgtcttatgcgtaatgagtg

SEQ ID NO: 33494 - DNA, 381 bp, Zea mays
  unsure (1)..(381): unsure at all n locations
tggaccgaatcanagcannatggaggacgcgggctgggtacgcttctctatctgcgtgcgccaatcaccaaggcgctggtgctcagtctcgagtgcctctcactctcgcatgatcgccgcctttgtcttccggagagcctgatgagcgcgggacaacacccgatggaggggaagcggcgccgtttctggaccggcgccggtctggaaccgccgtccaagaataaccttcggctcctccggaatgggcggcgggattgagtcaggcgtgcccaccgcatcttccgccgttgccgatggtatattcggcgacatctccgccgccgttgggtctgcagtacttgttgcggtctatttctactggcccctggctgagcctggggc

SEQ ID NO: 33495 - DNA, 434 bp, Zea mays
  unsure (1)..(434): unsure at all n locations
gcttaagaatgagctacgacatcttatattcttggaactntgattganacattgcacacatagctcatttattaaaccttgatcatgtctctttcattttgtacaaatgcatatttcttattcttcgtgtgccaaggctaagactaatatgcttccatgagtttctctatgattagtcttggattgaaagggaaatggagaattcggcaaaggcaaggcttccactccaactctgtcggtatcatttatcctttgccttacttatcaacttccaattggtataaaccttcactcatatttcttttaccaaaggaagagaaaatagggccctaaagggggagaattgtagggctcaagattctttcgttttggcgattaatgccaaagggggagaatttattggcccaaagcaaaaggaccacaccaccactcat

SEQ ID NO: 33496 - DNA, 272 bp, Zea mays
  unsure (1)..(272): unsure at all n locations
gagggaagtgagttcccggagtgggcgccaatgttgggacttgttcttcaatgctatgagttaagaacaaggcaacacaaaatatgttaaacggtaaagtcccttcgtctctcaagcattatattccttaggatataatgaatttccgacgaagggttatgaaggcgcaccttcntaaacacaacatacgatgatgaagaatgaaccctatgacatatgaaagattacatagacaattatatattattatcaacttatgtttgccttactat

SEQ ID NO: 33497 - DNA, 415 bp, Zea mays
  unsure (1)..(415): unsure at all n locations
agcttggtgccgatggagaggcagaagtccctatagtcctggctgtcaaactgtttgccgttgccgactgtgagctctaacaggactccgaatcggcaaacaatgttntgccagaagaacttctgggcagtcttcgacgttattgtggatactgccctagcctcgatccacttggtgaagtattcgacagcgacgaaggtgaacttgaggttcccttgagccgtaggtagcggcccgacaatatccagcccccagcgttgaagtggccatgtgtgggcaatcagcttggtgaactacgtagggttgcccgagcggtgagaaaacttctggcaagcctcgcacgacctcgtgacttgattcgcggtgcagattattgcgggccaataaaatccttgacggatcaccttggcagcaa

SEQ ID NO: 33498 - DNA, 307 bp, Zea mays
  unsure (1)..(307): unsure at all n locations
tgtaccttanaaccggaggatacaagaagctggagtggtcgtcttatgctttngaactgcttgaagcatagctgcggtgactttgtgactgatcagctctggaagtactaaagtgatgtacctgtgggcttttgaacaatagctggagtgatattgaaaccttagcgatgtaattatgggcttttgaactgctttcagctggagtgatgccgctgtggtgcttttatgactgatcggctctatagcctttgtgaatgaactaactagctatttgaaatgatctatttgcaaagaattataattggga

SEQ ID NO: 33499 - DNA, 218 bp, Zea mays
agcttctatggtaacaaaactatgtgacatttgatgtatgtaacattgaatcgaatatgtaaattattgtaatttatttctttgtgatgcatgaaatttacacacatatcgtttttgagccttcggcgaaaaaacaccttcccttcttttcatgcttcgtaaagaaagagatcccttcttattgataggctgataaaactgtatttccccgagcttac

SEQ ID NO: 33500 - DNA, 340 bp, Zea mays
ctcctgctcacatcttcggcgctatatcaaccttcgtattatttgtgcttctcctactgtgatatcgactcgagtccgaagatacctgttcacacattatactccagaaacactgttaaatcttgtttttgaggaccttcggaagccgaaagcccccaacagtagcccctcgcaatattaatttgttagaataataaatttagattgcgacatggacgaaggtccgaaaaaacaccttccctttgctagaatagcaacattcactgacaagcggggtctttcaatttcaacgcactgggcgtataaataagagcataccgcgagctcatttggtacgctc

SEQ ID NO: 33501 - DNA, 325 bp, Zea mays
  unsure (1)..(325): unsure at all n locations
agctttatattatctatactatacttaaatcatcttttcacaaataacccccacagttatttcaaattaatctgttccacgcctatagatggacaaacggtggcccgacacgggctagatgcccgcgggccataaaaacagtgaaggatgtggggttcgaacccatgctctgagaaagaaggccgagagactgggtgaagctgtctaactaatagaacatcatgctcagatantttttaatattgaatataaatggatatatgtatatatatttttttaaaataaaaaatatataatcgtgtcgggccgggccgggccagcacta

SEQ ID NO: 33502 - DNA, 349 bp, Zea mays
  unsure (1)..(349): unsure at all n locations
aagcagcttcagcagatcatccgaagcctatgctcttatgtgaggacatagcagagcagaaggtgctgttaagctctcaattatccgaagagcaggagaaaaccttgataaggtttttgttcaataacaaagatgattttgcatggtcagccaatgatctatgcggagttaatagagatgttattgagcactcgctcaatgtcgatccatccttcagacccagaaagcanaggcttcgaaaaatgtcagatgataaggccgaaggtgctcgcaacgaagtcaaaagactcctcagtgcangagttatcagagaagtgaagtacccagaatggctngctaacactgttat

SEQ ID NO: 33503 - DNA, 443 bp, Zea mays
  unsure (1)..(443): unsure at all n locations
cgaccgggatccttaagncacctgcggcattgcaagcttgaatgggcattttctcatgcagtaccatcctagtatgtggcaagatgcttaaagaaaaccgatgtgatcacatcgagttaagatgcttttggtttgcctagccccaccaaaaggcaggggggcatatgtttggcaccaaaaagagccaagcggacggtccggccctggaaccggacggtccacggtccggacagtccgcgcctgtgggccggacggtccgcgcctgcgcaaaacaaattaaggttccgagatttgtgctatgtttgttagctattttcgcgggcttatctcggaatccggtcgtgtaagggtccaccccccttcttataaaagaaagtctccgccgattggattataatctaataatacactttatgtccatttttttaagaagtgtctagtta

SEQ ID NO: 33504 - DNA, 191 bp, Zea mays
  unsure (1)..(191): unsure at all n locations
tcgcatanatgaaccgaaatagaaaattgcagaatggaattgggattcaggtgggtcaaattcaggcgatagaaatcaaggagaccgcagaataagggggaaataggaggagcaagaccgtggagaagaaaaggaacatatacaacggattcgtgggtgtcctctattggaacagtgaccccgtggcaaat

SEQ ID NO: 33505 - DNA, 166 bp, Zea mays
  unsure (1)..(166): unsure at all n locations
tcttaagncacctgcggcatgcagcttgccttttggctttcttaagagaagcatcttgttttccactctttgcatatcttttctgtagcanaagataatgggaaaagtcatcaccacggatcgtcaatgaaatatgaattgccaagaccccctaattcctattacc

SEQ ID NO: 33506 - DNA, 177 bp, Zea mays
tatagacactcaagcttctaggcgatatatgtgcttaagcaagcaccaagagtgtagtatgaatgccttatagactctttggtcgcaacatctttaagggggggaaggctcattcaaccttttttattaaaatgcggatgacgacctatatgtatgccaaatatatgtcgatgacat

SEQ ID NO: 33507 - DNA, 397 bp, Zea mays
gcttcgaattctcattctgttgtcagtgatcgacatcataaatgactacacagagtgatcctacaagcctacaactataagagacgtcatctgccaactgcaatccgttaaggaattgttgcacaatacggagaccagactgaatttcaaactctttccatggaactacattcttccgttataaaaaatattatcctggttacacacaatccgaacaaaccatactaaacgagtagcagaagctacctatgaagggcgcatgagattacatctaccaacgatggaaaccggacggctataacaaggataaaaaacaataaactgttttttttttttttgcaaaatctgaggcgcaagaacaggcacgaaccttggcggcgcgggtgaggcgatcccc

SEQ ID NO: 33508 - DNA, 373 bp, Zea mays
  unsure (1)..(373): unsure at all n locations
atgccaagcanggaagcaagtggaacccatcattcacacaagaacattatgactactgacaggccactggagctcctacacatggacctattcngcccgaatgcttacataaacatcggcgggagtaagtactgtctaattattgtggatgattattctcgcttcacttgggtgttctttttgcacgaaaaatctcatacccaagagacattaaagggattcttgagacgggctcaaaatgagttcggcttgaggatcaagaaaattagaagcgacaacaggacggagttcaagaactcacanaatcgagggcttncttgaagaggagggcatcaagcatgagttctcttcntcctacatgccacaataaaat

SEQ ID NO: 33509 - DNA, 381 bp, Zea mays
  unsure (1)..(381): unsure at all n locations
ttgangatagcctgagcagaaatccaataagctcatgagttccgaagtagctgctgcatctataagggaatctattcatggcgatgggaattcatcctatcgacatgccttgttgagatctcggaagtcaatacaacaatctccattgtacgttagctctctttaccatgacagtgttggccagccactctgggtatgttacttctctaataacatcggcccttagaagacttttcacttcatttcgtgcaccttcggctttatcatcggacatttgtcgaagcctctactttcttggtctgaaggacgggtccacattgagtaagtgccaatgatgtctctattgacaccacatagatcattggttgtccaagcaaaaac

SEQ ID NO: 33510 - DNA, 278 bp, Zea mays
  unsure (1)..(278): unsure at all n locations
tggtatangagcaagtcgaaccactctgaaatgagtccaactgctagagtaaatctaggctctgaactacacggaatacaatgaggatatccttcaaacagagaatgcatcggataatctaactgtggattgtgagaaatacaacaattaatccaccacgagatccacatgatgaacaaacctatattcctatcttgccgactagaataacataatcatggatccaagccagaacacaagacataagatcttatctccttgtgtggccacaccacaaa

SEQ ID NO: 33511 - DNA, 386 bp, Zea mays
agctggccaaacaattaaataaaactctaatcaagcctctcaagggggatttcattagggaattctgaaattcataattctgaatttcagaccctgagccaaagatcaagcgtgttcaccttgatccctaactcaaatcctaatggccccattgacaaaaacgtgcataactaacctctctgtcttgtgccaaaagatggcattgggacgcgtgccttcgacacgtcaaaccatagatcttctccctgtgtgcggcagtgagacaaacaggatttctcccctctctatctcttaatccagtcagcaaaacctgctagcctccacacacaaacgacaaaggaacctgagaggaagagatctctcaacgggatcatggccataatctc

SEQ ID NO: 33512 - DNA, 404 bp, Zea mays
  unsure (1)..(404): unsure at all n locations
tcgctacgccgatggaggagaccagcgcttggctgagttcgcttgtgtgtgctgagcgcatgtacctccgtttcngggcagaagacgatcggagacacacggatggatctcgctagagttgtaaaacgtcgtcgcgctctggaccggagcagtcgtcgcctcacccaccggtaacacatcgtaacccaggtcggtatatcctccgcgtcgtttatctggggtcagtgatgaaggttatgcgccggatcgccagttggccgtgcgcggcaatggctgccgccgcatgggtggccctgcgccaccgtgccccggtgtatggagatagatgatgaagcatgagccgctcgatttgacttgtatggtcgagattagatcaaccaaataacccttcgttatttaaatcc

SEQ ID NO: 33513 - DNA, 421 bp, Zea mays
  unsure (1)..(421): unsure at all n locations
tgcggcatgcaagcttctaaagggagagcacantttgggactaaccaatgttcattttgagaaagacagggtttgtagcgcatgtcaagcagggaagcaagttggtgttcatcatccacacaagaacatcatgacgactgacaggccgcttgagctactccacatggacctattcggcccgatcgcttacataagcatcggcgggagtaagtattgtctagttattgtggataattattctcgcttcacttgggtattctttttgcaggataaatcacaaacccaagagactttcaagagattcttgagatgggctcaaaatgagtttggcttgaggatcaagaaaataagaagcgacgacaggacggagttcaagaactcacaaatagaaggcttccttgaggaggagggcatcaagcat

SEQ ID NO: 33514 - DNA, 250 bp, Zea mays
gaccctgtgcagcttgtcaagcagggaaacatgtgggaggctctcatcacacccagaatgtgatgacaacatctagacccctggaattgctacatatggacctcttccgacccgtcgcctatctgagcatatgaggaagtaagtatggtctagttatcgctgatgacttttcccgcttcacttgggtgttcttcttgcaagataagtctgacacccaacggaccctcaagcgcttcctaaggagagctca

SEQ ID NO: 33515 - DNA, 421 bp, Zea mays
agcttagcttgcccacacgcccacgtccgcattcataccacattcaatgggttaatgataccgacaaggttaaggtaacacaaacggtacgcgtgcatttttccattggtagatattctgattatgcggattgggatgttgtacctatggaagcatgctctcttttgttatgtagaccttgggaatatgataatgatgcacgtcaccatggtcggagtaatacatacactttcatgcataagggcaagaaaattactttgcttcctttgactcctactcagattgtacaagctgacaaggatacactacaacacaaacacccctatagcaacacatacattgcaacaaaatggtttatgcgttgcaagaaattaggtatcaacggatgttagcaacacatatatctatatgttgcaagaaa

SEQ ID NO: 33516 - DNA, 83 bp, Zea mays
taatgggggaaatgcccacaacaattgccatatgatgactgtgatgagggtcattcttgatacccccccaatgggaattcaaa

SEQ ID NO: 33517 - DNA, 314 bp, Zea mays
agcttgaggtaggtgtagttgggggactgccattaacttcgcgtagcatggccttcccagtactgcgtggtaagttcctcggaacccgaccacctcgaacgtgagggtcttccttcggaagttggagggcgtcccaaagcagaccggaagatcgagttgtccgaggggctatacccgcttcccggagatgattccgtggaaaggcgcaacgcctgcccggaccgaggacagatcgacacttaggagcccgagggtctcggcgtaaatgatgttgaggctgctgccttcgtccatgaggacctttgtgagcctga

SEQ ID NO: 33518 - DNA, 380 bp, Zea mays
ttgcagtaaccacctcttccaaacgtgcgatgttctttatagctgaggagtttgttggtaacaacatccgtgtggttagagatttttcggatgtctttcgagaggagttacgagggatgccaccagatagggaagttgagtttgtagttgatattttacctggaactgctcctatatctaaacggccatatatgatgtctgtagaagaactaaaggaacttaataagcagttaacagagttacaagaggccgggtacattcgttcgagttcctcaccttggggagcgtcggttctatttgtacagaagaaagatggatcacaacggatgtgtgtggattatagatcccttaatgatgttactgtgaagaacaaatacatg

SEQ ID NO: 33519 - DNA, 335 bp, Zea mays
agcttggtgaaagaatagcatagagttgcattggcacaaactttacaattaaataacttaaatatatcatacactgaaaatattttacaagatgtgtgttaaaaccttcactttgttttactaataataacatttctgatcttttcatagggttatcatgttttgaaaaggatatccgatgttatttcaaaggcggacaggagacatcttgagcaattgactgggtaagctaattattactaaccttgggattaacaatagatgattagtccctaaggactatatatatatgcagtaggcctgggcgggtgtgcctaatgggctttacacccctt

SEQ ID NO: 33520 - DNA, 302 bp, Zea mays
  unsure (1)..(302): unsure at all n locations
tcacgaagaggaaccttcngctatcttatacaaacagcttcaccctangaccacttctttctataagaccttcggcgacgaagcatagacccaacagtcgattccgccaccggcgggcgggttgtctgccgccattgtcactgtcgcgcggcgggggaaggagtatcatgttgtagctgccgtcgagggacatgaactcaagactccctatacggagcaccgttccgggctggaaaggttgctggagactacccatctggagcttgacnggaagcggttcgtcaacacgtagcaggccccta

SEQ ID NO: 33521 - DNA, 317 bp, Zea mays
ctttggtcctgtcattgttggcacaaaacataaacaaaaaggcaacaaacaatgtgaaccctacaactatctctcaaggtggtggtggtggaagccgatgcggtgtaatacaaaatatgaagcgtcttaccccgctcttacaacgctcttaccaacactgtatgtggcaaacggtgaccgatgtgactgtccaatgagcgtatgtgtgattgcaaaggagtaccatgtttgctcgagaaaaagctggagctatgggaaggctgactaaatatatatatgtggcacacaagtcatgaacaaatagcaatgctgaataa

SEQ ID NO: 33522 - DNA, 346 bp, Zea mays
tacagcaacgcttggaacatcgaacaactaacgtcgcttttacccttaaaggggttcaagtcattcatgtatctcgattcctttacatgcattaataaaaagtctaaccgtcaagggaggatcggcttgctcactaaaaccgaacctactttcggggctagaaggtgggaaccccctcttcgtcaaaattttcctcggaaaaagtttctaccaaaacgactttcgagcctttcgactatatcaataactgaatcctatagacgagcgagagggaacttgtacggcatggccgaactatccgatggactcctacgcctccgggatactgatacctcactcatcacct

SEQ ID NO: 33523 - DNA, 395 bp, Zea mays
  unsure (1)..(395): unsure at all n locations
cttcttggtggtatcttcgtcgacacttggatcttacatgttgaaagacatggatggcaatgacttaccaaggtcttggaatgcaaatgaacttcgaagatattatgtgtaaactatgtaattntcctatttttccctatggtacccttttcctttcaagatgggaaaaaggtttttaatggggccataggttgtaattttcatttttgtgtagctctgtgcaatacaatggccaaattccccaacaagttaaatgttaaatctggaccatataaccgaatataaaagccatgaagaagctcataagtagtccctaaggggatgcagagcttagatgccacctaagatgtgaagaaactccaaagtcgttccttaaaggacgcagagtaagtatg

SEQ ID NO: 33524 - DNA, 230 bp, Zea mays
aaaatgcctcaaattatcatcaaccaatgaatattactgtttgttagactttaggacccagagcaataagtgtacaaatttacaataattgctaagcatagcatcaatatacacccatattctttaaacaactatataacctctatggattggacattggttctcgcactatatgtaagcaccacagcttataatatgaaagtaaaggtttccctacccaatgtcatctg

SEQ ID NO: 33525 - DNA, 163 bp, Zea mays
aaacccaggaaaggtcttttagttttttaaaaagctggatggtacctgaacgtggaaccctttctccaacgagcaagtaaaccggtttctattgacgtggccccgccttacttgtgttggctggtggatatggatttcgtcattggttcttttagaaattgac

SEQ ID NO: 33526 - DNA, 237 bp, Zea mays
ttttttcttttaaaaaaaagaatcttacccttgcatccgtgaacatgtggatcctcttcccactgatctttttacaacctacggcctttgactgtcaaaatggtttttagcccatgctttcattactcgaagagaaccattgctggaaaagggagaaatttccgcttaattgggattctttacagaaaaactcatcccacaaatttaaggattttgaaaggctcaaagatctggtta

SEQ ID NO: 33527 - DNA, 401 bp, Zea mays
tcatccctacatgtgctaagcggcgatgtttcaaccagcccatgctagtcttagctattaagcatgcatctagaccggcctcttcttttgcaaaatcaactaaataaagtttgccgtctaatacacccttaatagctagtgaaccatcacttcttctaaagacagacacatctacatttgtaaatagacagttatatcccatatgacataattgactaacagatagcaaattatatccaagactctccactaaaaatacattagagatagaatgctcattagaaattgcaattttacctaacccttttaccttgccttgattcccatcaccgaatataattgaatcttgtgaatccttattcttgacataagatgtgaacatcttcttctcccccgtcata

SEQ ID NO: 33528 - DNA, 440 bp, Zea mays
  unsure (1)..(440): unsure at all n locations
cactaactgaaagcgggattgtggggtctcatctctccggtgtcttatgaggagaagtgcctatatgcaacgaatatttaatgccgaagctactacacgttaagcgcttaatgatgacaactttggctcaaagagggtatgaaaattgagcatggtgtcgaattgaaaaggaaaagaccaattagttcctattaattatattaagataatatgtatgtatcaaaggtcatgaatgtacttttacttgggctacgtcccaagcctataaataaatgaactgtacccccatactattcacactggattgttattgctcttgcgtcattaccttcaagcaagccgaatgtatcaatgtaatacaaactttgataagtatctctattntcattatgaaataaatatgtggcttgctttacatcttgtaaataagtttcgtctaa

SEQ ID NO: 33529 - DNA, 243 bp, Zea mays
aatgcgcgggcggtcttttttgccaagcttgaacctggcggccctaaaatatgactccttttaacaaggaaggtttttggacttactaagccttgtactccagctgattgtaatgcaaacaatttactgagggcatgtagggctcccctcgaagtccaaacttacacagtttaatatagagtcaaagctcacttaaaaggggcatgtaaggggtcaagagacaacacttgactggtgagactt

SEQ ID NO: 33530 - DNA, 335 bp, Zea mays
tttaaccttgcatttacctattacctagaaaaagtttttgcttacttctaaagacggagacaatcatgctatcatgctaatatttctctcaaaaatgctacttgagattgctaataaatgagagctaaggcctctgtgattgccaatgttaatctatacaatgtcagatactttattttgttgctcattataatagatgcttctaaggacagttaaagctaagtgaaattactttaaaaaaatgatatgcttattttagaaattatggatgacatatatataacatgtatgagtggaaaaactaaatcatcactactctgcctgttcaatgaact

SEQ ID NO: 33531 - DNA, 318 bp, Zea mays
  unsure (1)..(318): unsure at all n locations
cgtcgtgataagattgacttanaaaattaatccattcataccaaacagaataatctctttggttgttataagactatgaaggagccacatatgcaaatcatgtgtcacaaattctacaaataaattgcttaatgcataagcaatcaaataattcacccataattctttatatcaaactatattaaacctctattggattgtgacattgtgttcctcgcactaataggttaagcaccaactagctaatcaatatggaaagtaaaaggtattcacctaccacaaatgttacatctgaatcaatctaacttagggcaatgg

SEQ ID NO: 33532 - DNA, 56 bp, Zea mays
atttgctctaaattacctaataatatttacataatacaataaccatgtacattcaa

SEQ ID NO: 33533 - DNA, 264 bp, Zea mays
ttcgagtcttgcctaaacatggcagaatcttgactcaatgctctgccccacatggcctgccggggatatggatctcattatatctttatggctcaaccatcgtcttgcccatattactctgactggtgaaatgtcttcaactttatatctgttatatgtgacaattttccacatattggcgccaatctttggctgaaccacacacttctccaatcatattggatatgctctatgcgcgcactgcttgacataccatactcgcct

SEQ ID NO: 33534 - DNA, 374 bp, Zea mays
ttctggttgaacactgtcaggaacgccggcttgtggaccttcacctcgtcaaagtcggcagctacaatcctgtacacgaacactttcttctgttggccatgcctgatcgcgcgcccgatcgcctgacgggtgacagatgggttcacgtgaacgtccaaaatgaagactctcgacgcgccgacgatggatatgccctctccacatgccctgatcgaaccgaacagaaccttcgcatcatctgagctgttgaaacggtccactgccgcttctctgtcttcttggctagtgtcgccagatatcatgataatctgtctccccaattgccgaccttcttcttaaccagcagcctttcaaagaagtcatgggaagatata

SEQ ID NO: 33535 - DNA, 352 bp, Zea mays
gattaacaaatgttcattttgaaaaagacaggatttgtatcgcatgccatgcggtgaatcaagttggtgtccatcttccacacaataacattatgacgaccaacaggccgcttgagctactccacatggatcttttctgcccgattggttacataaacatcggcgggagtaaatattgccttgtaataagggaaggatattctcgcttcacttgagattcttgttgcaggaaaaatctcaacccatagaccttaaagggattttgagacgggctaaaatgaattcggcttgggatcaagaaatttatagcgacacgggacggagttaaaaactttaaattgaagcttcttga

SEQ ID NO: 33536 - DNA, 370 bp, Zea mays
atttacaccctaccggttatcctgaacacaaaattatgagaattcactctatgaagtttcactctggtcctaatcatgcttttatgtataagagtgaggcatctagttctatgcaatcaacccatgctaaattgcctaagaagaaaactcctgctacatcaaatgatcataatgtttcattcaaaacttttgatgcttcctatgtgctaactaacaaatccaacaaggtatgtgccaagtatgttgggggcaaacacaaaggatcaaagacttttgtttgggtacccaaagttcttgtatctaatgtcaaatgaaccaaaactgtttgggtacctaatatcaagaactaaatttgttttgtatgtttatg

SEQ ID NO: 33537 - DNA, 281 bp, Zea mays
acttgtcattgaatgttgctattctatcaaagggaaagtgttttttctgaccttcggcataaagccttctttcattcgcaatctgtattattatttcaacaaattaatattgcgaggggctacttgttggggaccttctgcgtccgaatgtcctcataaacatgatttaacagtatttctgtagtacaatatgtgaacatgtacccttagactaaaatcggcattgcagcataccggaataattcgaatcttgttacataacccaatgtgttgaacacgaa

SEQ ID NO: 33538 - DNA, 392 bp, Zea mays
catgttcaagcagcttcttctgatactgtttctttttgcaggaccttcggcgacgaagcatggtcccaacatgcggttctcaaaactgattcccaagttatttctggtcatgttgacaaaagttgcaaagcaagagatccgaagcttgagatatatttggatacagttcgaaggtttgaagcttccttcgaaagggtttttgtcaagaatattccacgaggagaaaatgagcacgctgatctactatccaagtcagcggcacaagggctgcctttaccttcggaagtgttctttgaaacaataaaatcaccttctgttgaccttcttgaaagagaagtgctcaatatatctcctgtttatagcgaagattggagaactgagatcatgtcttt

SEQ ID NO: 33539 - DNA, 191 bp, Zea mays
ttagaataattctacataaaataaaatacaatcagaatataaaaattcttcacacttatattattaaattatactattcaaactgatgaacagacattcacaaaattggaatttaaacttgaactcaaatggaatttgaaaaatggagaaaaaaaattcgaatataaagataaaaaaacactatgccttat

SEQ ID NO: 33540 - DNA, 379 bp, Zea mays
gaagttcagtggttggtggtttccacttcaaaatatccttgactttgctgggaacaaccgcaatcaccttggcagacaattcatgtcccaaaaattataactccttcatccaaaacgcgcaattactgatattgcatataattgatgctcccttatgcgcgtttatacgatccgcatatgccgagcatgctcctcttcatttttggaatatatcaaaatatcatcaatgaagactaccacgaatttatccaactcaggcatgattaccgagttcattaaatatgtgatacgggtaggagcatttgttaatctgaaagacatatccagattttcaaattatccataccgcgtagtgaatgcgatcctgtgtattccttgg

SEQ ID NO: 33541 - DNA, 358 bp, Zea mays
ccatttcttaacggtgtgtatactccgttttccaaatattctcgaactaaaaccctagttccaatatgttcagattcaattctaaactcatatacaacatctgggcatggtgcccaccgcgtcatgttgcactgatgcctaattatcccgaaagttaacttcatcgggctctgcactagcttatcctttttctcatcaatattaacatataaccattcagatttccaaccggtcggccatttaatgcgatagctgaccaccggtgttttcatatctttgcgataagcaaatttgttgcatgcgaagttctatgcagtccttctttcctacgcttatctgatagtgaagtcatgtactc

SEQ ID NO: 33542 - DNA, 273 bp, Zea mays
tcttcaaccatcccatggggaaatggccggatgaatttatcaaagtggtgtggagccacaacacaacaatatcaatgtcaatatgttttacaccatttcaattgctgtttggtgacgaatcaattaccctataagaagcttaagcatgatcaataataacaatggcttctgtagaatactgagctgattattctgtggcaaaagatgctatataagggatcatgcttcatgctgtatataatatcaataaatatcaagccgaaacaataaaat

SEQ ID NO: 33543 - DNA, 377 bp, Zea mays
caatgtctatcactttggggggccaccagttaaaataagacaacttgttagtctgattatatgcttctttgattaaaagggctatgttcaaacaaaacattccagtaaactggacaaattatcttgaactgggaaaagcacttcaaaaatacacattctttttctacaggtcaataactcacaacttcaattctggatgcaagtgtttattattatatactctgatgattcaaacctgaaaatgtttgcagttgcgaagagaatatcaaataaaatacttgtcgagcttaagtttcttcatcaaatcatttttgggaggcttcgaaaggtaattatatgtaaatgttgtgacttttcattggatgatgcatatttct

SEQ ID NO: 33544 - DNA, 380 bp, Zea mays
  unsure (1)..(380): unsure at all n locations
gagttncaatatatatgctatatggtgacgtaccaagaataggtgcggcattctatccaacatcctgatcaatcggatctaacttgccatacgggagaacctgtttcctatactggaacaattgattctagctaccatatggagcagcttctagttactatatgtgacagcattactaaactaacctatgcagacagacctcacgcatgatgaagcctatgaggattaccataatagtcttaacagtaaggagtagaggaagtggtggtagatctacttacagtangaagtgatttacaccatacctgtgaaggtatatatccgccccttttgatgtatgtgtatatatgtatgcaaggatgcaatcatagcagcttaac

SEQ ID NO: 33545 - DNA, 327 bp, Zea mays
agattatatgaagaacttctccaataattaaagagcttcgaacaagagagaaatgatgtacaggctaaatacgaagctgaagctgacaaaaatacaaagcttgaacagactttgaaagagcttcggaacatatgtttgagcgttggcaacagctgtgtacaacgattgaaaagagtcttcaacttggttggagccagctccgaagagttaccccttcagctgaagatattccaacaccttcgaaacattgaatgcgaagttgatgcgcttgatgaagtgatagccagtcacggtgacttctatgccctgctggcttcctgtggcacg

SEQ ID NO: 33546 - DNA, 402 bp, Zea mays
  unsure (1)..(402): unsure at all n locations
cagcttcgtcaacagcttcttcggcaattcttatttagtgccgccttcatggctggatcggcttcgagatcatagggcttatgtggtggtgaaagttcagctacagtaaaagtaataagttgttaatccgaagccaggaaaaataccgaagctatgaagcaattaaaatacctatgcgcattgcgcgctcggcagcctcttcggctcgcttggcttcttctcgggcatcatgggattctttctcgttcttctttatagcttcgtcggctaattctcggacgcatttcatccaaatgtcagagtagaatttcccaaccataagagtagactcagccgagggatccttcgtattctctacagtgaagacagcctctgtctgggttgcagctntaacatgatcac

SEQ ID NO: 33547 - DNA, 450 bp, Zea mays
  unsure (1)..(450): unsure at all n locations
tcctgngcatacagatgattaggtaatgtatcatcatatatctgggntcaacatatggctaatggtgaaggacattccacatgatgatacaatagaagaacaaagcatcaatggtttggcatctggactatcacgccaggtcacaacatggcaaacctatgacattagtggatntacattttgtaccaagtccattgacataatcagcttgtcacaaaacagtggtgttcgatgtgaggccataaatgatgaacctggtgagactattacatattttggctttattgaggacatatgggaactagactatggtacatttaatatctcagttttctgatgtcaatgggttgaagacaaacatgtcacgatagacaaatatggtgtgagagttcttgatctaagtaaggtaggttacatagatgacccatggatccttgctaatcgtgttgc

SEQ ID NO: 33548 - DNA, 347 bp, Zea mays
ttcgaagttttctgcgctagcgtatcggagcaagtgaccaaacaagtggacccgggagtggttctacgtgaaggttgatacgaagaggagggaagatctatatggcatattgatgatgcctatgaacgttaacttcgaaataaagagacttatgtgcaatatgagtggagctacacatattacatataattcctttaacattgttgtctacattattagcactcgtgacatgttgcaagagtttctagcatataggatttccctatgaaatctagttggtctatgccagagatgaataaagaggaagaagtaaacctatcttttatgttatgcttccatacaaattc

SEQ ID NO: 33549 - DNA, 310 bp, Zea mays
caacttgtcaagcatgtaaacaagtgggaggagcacatcacagcatgaatgtgatgaccacttcaagacccctggaactgctgcatatggacctcttcggacccgtcgcctatctgagcataagagggagtaaatatggtctagttattgttgatgacttttcccgcttcacttgggtgttctttttgcaggataagtctgaaacccaatggaccctcaagcgcttcctcaggagagctcaaaatgagtttgagctcaaggtgaagaagataatgagcgacaacgggtccgagttcaagaaccttcaagt

SEQ ID NO: 33550 - DNA, 219 bp, Zea mays
attttttggaaaatgcacctaaaaagtggattaccaagcttccgataaaatttcctattggcccggaaatcccctactgaattacaacctacattgagggaagaactcaaatatactgggcggactttggcggtgtttgggcactgtcagttctaacggtgcaatgaaatgaatagcaattactttacctatctagaatcgactgccagatcttaaatt

SEQ ID NO: 33551 - DNA, 438 bp, Zea mays
aaagtctgaaatgaccactataattaacctgtttccttttattcccccgggataccataaaccctaattggatccctgtgaaaccctattaccaaatcctatggacttatgtgcgaaagtgatgaaccattggactaaagtgtatatactactatgtttaaacatataaagtcatgtggttcacaaatatgggaatttgccagttaaaccctaagttttgggcttatttgcaaaaatcacctcttaagcactataaagcctaagtctgaaaattcagtttagttggttaaactttggagccctgtattttctgaaatatatgggttttggcctaggtcaccacaccatatttgttaagcaattataggagaacaatcttgctaaagagtgtgagctcaattgttataaaaatctatagataatcatgctcaaaatctg

SEQ ID NO: 33552 - DNA, 449 bp, Zea mays
ctctagtagagctgagaattttggaatcgatgtgatacttggaatatactacttgaccaagtatgatggagtaatatcatgtgccaaaaggatggttacattaaccagtctgcaaggagaaagaactgaagtcaatgtcagtatgccagcaacaacagaggcaatggtgaatcagttggaagagaaatctttggagcacatcagaatagtgtgtgaatacccaaacgtattttctgaagaattaccaggtatgccacctgatcatgatataaagttttctattgaactattactcggaaccgcaccaatttcagaaaagagcttaccgaatggatgtcaaagatttaattgaactaaagaaacaaatagaagaattactatgaaaaggttgtattcgccacagttcgtcaccatggtgagccccatttttattcatgaacaagaaagat

SEQ ID NO: 33553 - DNA, 406 bp, Zea mays
acactttattatactcaagccttcacaagttggactaactctgcggcatcactctttgttttttttcaatagaaaccagacctgaaaactttcccaaccagagttctggatgctgtatgtattccacattgtccggcgtggatttcatacaatagctgcttccctgtagttgaggaatgcacttcatgatgactcctgtcgcaccccttctgtacagtgcgcccctatgatggtgtagtgggccgactgtctcgcaatgcgttctgctgcagccttatcatccggttcttgttcattctttatgtacctgatgataggctctctctagtcattatggtccgattctagttggctcaaggtgttgcattcttccgcctgatctgagggaatacttgggtgtgatact

SEQ ID NO: 33554 - DNA, 301 bp, Zea mays
tatggtcttgcatcctcctggattcagtgctagacaacatatatccgttataaaatgaatataataattcctgacctcgcgcgagtgctaaaaaatactcgactttccgagatctgattatcaagctctactcgactagatactatatccatctaaaatagaatcctaattcatgcaactagaggtttaagcaactcctaccttaaggccattacaatctacaaacattaatgtagtaaagtagcatattataactggttatgcataaaaccaggcttgccttaatatctgggctggggga

SEQ ID NO: 33555 - DNA, 390 bp, Zea mays
ctgctaggcgaaaacacagcttatctgagaagctggtgaaaagcaacttctgctaggtggctgtttttagtgtattctgagaagcggctgaactgataagctgctgcagaagctgcctgtttggcacaacttctgcttaatttgtgaagaagctgaaaataagctgtgccaaacagggccaatatcacgtctaagtctaatgcaactgacagttaagagccttctcctaatatagtaaagttaattagggtgacaacagatgttcttggaccctgtggatggtcatgtctacgatgttttacacccattagtatatatcacccttctataaacatgagttataagctataaaataacttcattagtattgtaacctatatagctcctttg

SEQ ID NO: 33556 - DNA, 348 bp, Zea mays
tcttgcggaagagaagatgaatatagtgctccgctcggctctggtgcactgtttgccagcagacccagcaggcgcaccgtctactggatgaccttgacgccgcctgccatcggatgggacgggacgcattaaatgctgaatgggcacgtctgccgtcggcgtattggcaggcggcgcgtcttttcctcaataaatgcaggggctgcacgacttctcgtcatgttcggcccggtagcttatgtcatgggccacaagcagcgggtctccgtctgaacgggaagtggagggcaaggcctgcacatgtgtcagcaccggacccctgcacataccatggtccttctcattccg

SEQ ID NO: 33557 - DNA, 344 bp, Zea mays
cttctcattgtctatccccaccgttgtgcgatgaactgtgtccattcatgatccaggtctctcatcaaacatgccacaccgatgccaccaaccggcaccaccatagtccttctcaacgctggtcgagccccctttgctcccgtagctccaggggtgttcgaggtcagaccatgcatatgcatcgccgccccatgaatcctcctgcgtctgcccttgcttgacgaatcatctggcgccacggtcaccgtgcccgccaccgtcgccgtgcgtccccgtgggaacgccactggtccggtcatgcggatcaccaacgagcgttgtggtattcacaacgaccgtgtcac

SEQ ID NO: 33558 - DNA, 413 bp, Zea mays
  unsure (1)..(413): unsure at all n locations
ctcactgtattctcaaccgaaagatcttttttctctttcttcgttacaaganggagctcacgcaaaggttaataaatttcaacttcgtcaaaacgcaagaaattcaacattaattggccaatgtgcgctcaacagctatggttactctcgactgaaatgaagccgaagctgctgaatctgctccgatctccgaagttatgaaacagtcaggattggttgtgactgaatgcgcttctgacttataatcacccgctgctgaaaccgagcatgcagatattgaaaaaggtgatgctaatgaaagagagattgattataacatcattattccatcgaagcccaaccatttggattttggaaaatcgactgtgtctgaagttgatatgactttgatgaccaatctaggcttcttcata

SEQ ID NO: 33559 - DNA, 445 bp, Zea mays
ctaagctaaattgctgacaggaaactaattttattccaattttttgtgatttatagtcatcgatgcgtactacaaacatggaatttaattatttgactcctaaaataacgaatcatgtgtacctgaacattgtgcccacattctctcataacattaagatacttccctgttgttaaaatcgttgcggctacattcgtaaggaaactatgaattccttcttttatgctgtaacgttgctgccaatatttggcatcataatcttgagtgaggctctcctatcaaaaccaaaaagaatagatatataccaagaacctagttgaaataagataaagctagactcgacatgttatgcttaatatgatgcaaacaacagtgagatatgacagtccaaagatttagaagaaaaaagataccttctgcagagatttgttttcagcaatgaaaa

SEQ ID NO: 33560 - DNA, 298 bp, Zea mays
ttcgtcgcctgaatgcacgggatgagcttccgatggctccccaagctcattgattttccttcgaccttctatcatgcaactcaaacttacaaaatgcccgataacttccctcggggtcattttagtatatctaggattaccacgaatcaattgaacctgagtgggatttagaaaaatgagagatcttaaaataacatttaccacttcgtggtcgtcccacttcttgctccccaggttgcgcacttggtttaccaaaatcttgagccggttgtacatgtgttgtggctcctcccctttg

SEQ ID NO: 33561 - DNA, 398 bp, Zea mays
cacattcatgagaaaatgaaagccccatatagcaatattgtttcagaaacgatgattagtatggtttaataaccgcatattgtgcctaaaatgatgatgtctgccgacaaattttatatgaagcacatcttatttgatatgccattcaccccaaatgcactaagatgtatcatgatctatagcaacattattggtggacaaaaatgaagatcgaaattgcatgctatgtggcgagatgcgacacttgtagacgtgtcatagccatacacatgaagactgctggtccactgcaatctttgcctatcccgacttggaaatgggaggacattaacatggacttcattgtgggattacccaggatagcaaaagggtttgattctatctcggttatcattgat

SEQ ID NO: 33562 - DNA, 211 bp, Zea mays
tctcacctcccaaatatcccaattctcatatacctatcgctgtgtccaaaaacttaccaaatcaggtggtatgtttcgctggctcaaaataggtatcctctcatctcatatcatccctcaactgaatcgtcagcttacaatcagtaccttcgacatcctcttggccaacagaccgatgctcatactttgaatgggcctgttcgcacttggc

SEQ ID NO: 33563 - DNA, 424 bp, Zea mays
acactcaagcctataagtttctggatgaaaagtggtcacccaagttttggttgatatgtcccttattaccaatcatagaaggaatccatgtgggagttcacaatatgaaggtttgcgtgttggcatctatgcttcttcaataagctagctgccaagcgaaagctataagcctgaatatgaattttgagtagccagaatcagcgtttgcaatcggcaaccggatgctcctcaaaggccagatattgttgaagctccatctcctcgaagagcctgcaaagtgaagatatgtagctgaagtaaatctacacctataacccttctaaaccgaatctcgagattattttaagtggggtagatctgtagcatccaaaaattaaatcttgaatttttctgaactcactctaattcaaatgaatttaaattt

SEQ ID NO: 33564 - DNA, 249 bp, Zea mays
catttatgctatgaatttactccaaaacttaattgagaaacaaaatatgtggatttcctctgaatgatcgtcatgctacatacatcgagagagatctttgctttaaatttaagtgggatgaaaagaatttatggaaactctattggattggggaagtgtaaccagatatccagtttgcaaccttttgccattctaacatggtcaacttttgtttattcatgtgcaacttattctattgtgatgtaaact

SEQ ID NO: 33565 - DNA, 370 bp, Zea mays
gaacttgaaactaagctggacgattctgcgaggtcttgtgaacctcgtttcgtatcaccctggtaatggcccctccaatgtaaacttgttaccactagtactgttttttctgcacaataacatgtgattcaaacctgcttttggtcttggattaaaagcatgggattaaagggggttcttaaacggttccatgtatttctggcattttgcaagattgtaagtaagaacccaaacctgaaaatttttaacccggcccgaaaatggagctccttagaggattttctgataaaatttcccggaggaaaaagaacgcctgattgctccaaattagcacaacgggcgccttaccttggaagattttcaaacataa

SEQ ID NO: 33566 - DNA, 236 bp, Zea mays
aatctatcttacccccccgcgcgcgcggttttttcttttttttaccaaaggtgccgatcgatgcctactatactacccctatagttcctgttgacgacagatgcgtccacttaatggagatgctgctgctacacactctttacacggcccgtggacacccgggaacctcagtgatcccctggcattaacggtagtggatggagttcccttgtctaatatgccaatttatttttttt

SEQ ID NO: 33567 - DNA, 363 bp, Zea mays
tcatattctatgcatgtgtaatctacctgttctcctgtctggcgtaccgctggtttccctaattcaatggatggatgtttgtatgtttgcactcccatataaaacgatccggcttgataacccgatgaactagcatgagatagccctgaacatcactcttgtggtggaagcaagtgttccttgaccaatatctgtcctattcattctttaattcacctcccgcattacacatttatgcctaatgatgtactatctttgtatccatgtccttgtttacctatatgggttggattattattgtttaccattatgctatcgctcaactctaatcaatgaacatgatgagattatctatgatacgct

SEQ ID NO: 33568 - DNA, 379 bp, Zea mays
atgcagtttcgaaatctgtctgtcagtggacaaaacacaacaagcagtttgtaaaattcataactcctaaactgtcatgcctgtggttatgataatttatcacaatctacattacatatacatattcaactttcttataacgaccatgaactgattgctaaattaaattgagcaaacaatgcagtttctgaaatctgtacagaatttggacagattcagttactgaatttgtaaaaagcataactcctaaacgatcagacttatggctgtctaattgtaacaccagaaagataattatgttatataccactgttctattgcacatatctacagaaaacacaacttagttcatcatacatacagcatggagaaatcactg

SEQ ID NO: 33569 - DNA, 382 bp, Zea mays
tatctcggcgtgctgccgcatattggtttatggaaatatctgtatcactgccgccctgtgatggccggtgggcaacatcatttggtcggatgtgcaagtttatatatgcgccgtgtgcggaataccgagtatctcgagatacccctcaaagacagcattaaaggttggcgtctggagtggtttataatggacaattatggaaattctctcccttcccgctcatgaagacagccagacgttcgtactccgagttggactgagtctcccacggaccaataagtggccgatgcatgcgtgttgcttactgaagttggattactgaaagagagaggtctgactgccgaatctgtggtcacatattttgttttttaaaaacattcat

SEQ ID NO: 33570 - DNA, 416 bp, Zea mays
  unsure (1)..(416): unsure at all n locations
atggcttttgagtctgtcctatttccctcattctttccggcagcttcctgacttacataaattgcaatatgcccttgttccaaatgtatcttcatgcatatgtttgctggatgaaaaattgcttcgaaagcattaagtgtcccacgaccaatgattgcattgtagggtattccatgtcaacaatatcgaacaacaacctgttcatgtcacttggtgttgtggacaaattccgaatgtcactaacatcgtgatcttgccaagtgcttcgatctgacttccttcgaagccacaaagatggtgtgtagcatcatgaatcttgtcctctggctcttgcatctgtctgaatgcttancaaatatgatatctgctgcactgtctgtatcaacgagaactttgtggaccataattccttattg

SEQ ID NO: 33571 - DNA, 420 bp, Zea mays
atacacatttatgacatacaagtaattctgaaaagactggtttgtagcgcatgttaacaagaaagcaatgtggtgttcatcatacacattataacatcatgactaccgacaggccagttgagctactccacatggacctattcggcccgatagcttacattagcatcggcgggagtaagtattgtctttaattggggatgactattctcgtttcacttggatgttctttttgcaggataaatctcatacccaagagaccttaatgggattcttgagatgggctcaaaatgagttcggcttaaggatcaaaaagattagaagcgacaatgggacagagttcaagaactctcaaattgaatgctttcttgaggacgagggcatcaaacatgagttctcttctccctacacaacctaacaaaa

SEQ ID NO: 33572 - DNA, 304 bp, Zea mays
aattaacatcttttgttaattttgctagaagccctaggttaaaattgcatgcatgcttgattctgctcatttattatatacacgggtgtcatcttccccataaaaattgtccgaattaaatcttggtagtatggaaagaacgcgaaactttattcttatctggacagcaggggagtggggacttcttttccatttactgcttcatttctgagctaaaacctggaatctattaaagcttgattcctgagctcttttaagggttcatgtttataattgaattttttcggaactgtctttatcaact

SEQ ID NO: 33573 - DNA, 346 bp, Zea mays
cactaactgcttaaataaagtagttatgaaatccttctctttttcatctcgatgtctgaatgctacaagagggtgaacgttctggtaagtgggaaagatccgacttgtcagtagttatgggcacctactggttgtctgatgtctgtgaaacaggacaactgttgtggcctaatacttggaagttcgcacaattgcttctgaatgcttaacgctctatctgcttgggctataaaggaccctatgccatggtgacacacaacatttttacattctatcaccaacttcattcgacattcattttgtgatacactaactcatttgataaaacttttgattggttgaactc

SEQ ID NO: 33574 - DNA, 335 bp, Zea mays
taagggcgagattgctctgtatcctaatgcacatgaatgcgtgggtttcacaaagatttcttcattgttaggcttcgttttcctatgcgagaaataacggaagagatcttggattcatataacatataaatgcaccatttgacacccattgggatatcaaatattgccctcttgtctatgttgttaaatacagcaggtgatttagaatgttttcactttttgcgccttgcatgatttgcattgcctatttaagaatcatattgttgaaggggcgaatatgaacattatattgttgaacgtataagtcatgtcccaacacgaatcagattacacta

SEQ ID NO: 33575 - DNA, 235 bp, Zea mays
ctgaatttattgtatacacacaagagactattctgcccatattgtgcttgcctactgctggaagtacggattaaaacaatttccatgttttttcggtatttcctataccgatgtctaaattttttgaccaaatcatcaattacggtatttttcggaaacagaatcgggtttctgatttttctatcgaaatcagcagtggtttttactgaccgtttccttcgagtacatatttttg

SEQ ID NO: 33576 - DNA, 404 bp, Zea mays
tcacctatattgcacaaaggcgaatgtacgatctaaagtctttaccttcaaaaaagaagaataatttcagatgcctgctattatagaaagtctcatatgatgaatgtcaagacctacgcaacaacgataaaaggagaaaatcaattgtaccctgatgtcacttgtatacaatgaatgtaaatacttgaggggcacaattgtaattttatactaatgcgcgtcatcttccctataaataggtgaacaatgccctacataaagtacctttcttatggtcatatcttcgtgctgcttaacctacaaagaaccttcatgtcatcctgtgtccaatagccgaagtatgtttgtagactcattcatcatgagagatggaataaaatgcgatcaaagatggaatacaatgc

SEQ ID NO: 33577 - DNA, 378 bp, Zea mays
  unsure (1)..(378): unsure at all n locations
gcaacttgtcaagcatgtaaacaagtgggaggagcacatcacagcaaatatgtgatgaccacatcaagaccactggagctgctgcatatggacctcttcggacccatcgcctatctgagcataggaggaagtaagtatggtctagttattgttgatgacttttcccgcttcacttgggtgttctttntgcaggataagtctgaaacacaaaggatcctcaagcgcttcctcaggagagctcaaaatgagtttgagctcaaggtgaagaagataaggagcgacaacgggtccgaattcaaaatcttcgagtggaggaagttcctgatgaagangggatcaagcacgagttctccgctccctacacacctcagcaaaatg

SEQ ID NO: 33578 - DNA, 71 bp, Zea mays
gggattctctggtagtcatcagtcatataaaccaggaatgggattgctcaaatgattcaatggggagatac

SEQ ID NO: 33579 - DNA, 360 bp, Zea mays
  unsure (1)..(360): unsure at all n locations
ctgaattcaaaattatttgcaagcacattggcactaaggatttggtgcaagaatttctggctttcaaaatatttccaactatgaaagaatgggctatgcctaagcttaaaggtgagaaaaaagaggggagcttgtccgactaccctatcattataaattcaagaaatattntaaggcaccctgccaagaatggctcgatacaatcgaaataatgagtactgaaattcttggaaattactctaaataagaagaccaattgatgacagcagccttctgctcccggccgaaacgaatgctaaacagagtacttgatgctatatgcttngaatatcctgactatgggcgattgggcggagatgc

SEQ ID NO: 33580 - DNA, 358 bp, Zea mays
tttttgagtggcagaagcgaatgtggtcataagcccaagcctatcattcctgaatagatctacccttgatgataccatattggttcctatgaattaaacaagacatgaacggctatatacgatttgccaaaagcttcgctaggatttgcatactattgtttaataacgaaataggcctataatcttccaccttctacggattctccttcttcgggatcaaaacaatgaatgacccattaatacttcttaagcaaacttcatcatgatagaatttttcacaaacatcatagaagtcttgagcaatgatattccaacatttcttaatgaattggttttgaaccctcaggaccagaaatta

SEQ ID NO: 33581 - DNA, 370 bp, Zea mays
atataaaagaaataatgacatgcctccattataggtaaatatattatatattttaattccgaataaaacagacatataaatcagataaatgccatatgaaattatagcagcaatgaacagtagcaattctaagacatgtaaacatgtaacatagctgcttaggtccatttcaaaactaaacatggcttgtagatgaagaaggcagattaaacacataaacacaattgtgtatctttttatattgctctcaaaatagtgggttgctgtaataaacagctctccaacgctaaatggtgatcagagatcctcgactaacgtgacagtctaatcttaccaaatcatggtttaaatcagatgtaataagtctaat

SEQ ID NO: 33582 - DNA, 390 bp, Zea mays
taatactcacacttccacgttaaatgtgagctggttatcggagagcatgtgctgtgtatcggctaatgttaatcaattttgtatatgccagaaacagtgattctggaaaatgtcgttgagcgtgtcaatgacatgacttagaggcaacgatgatctatgaaagggttaatgaatatctacgataaaaacttattagtggtggtttatatatacgaaatgcttctgtgctaggttggagagaggcatcctaacatctagccatcgtcatctctcaactatggttacaggtgaaatgatcaagataagcaaagatttggtgaattagacttcactacagaataactagaaaaaacgccacccatgttaataacgtcggtgccgacgttctta

SEQ ID NO: 33583 - DNA, 386 bp, Zea mays
  unsure (1)..(386): unsure at all n locations
caagctataaagcaagtcccaatattctctgtcttcaagatttgagtntatcaaagaaaaactacacagaattggagtacgtgctgtatgctgtgttaatgtcgtccaagaagctttggcattattttcaagcatatcacataattgtttcttcatcacagtccctgaaggatatcatgaggaatagagaagctactggaaggattggaaagtgggccacggagtttaatgaattcactattgactacgtgcacagatcttcaattcaatcccaagcgctagcagatttcatcgctgattggacgccaggggctcacgaagaggggacaagcaaagatgccgaagcttggacagtgttttgcgatgggtcttggtgagccttcggt

SEQ ID NO: 33584 - DNA, 428 bp, Zea mays
tcaactctatagcccacagcttcgtgaaagtatttcattcttctagacaattccacgatagaataataccgcctttccgctggtggccagtggacggtattcaatacaacatacgtggatagagattcttccatcaatatatggaaacacccgatgtgcttcctggtgatcattcgtgccccaaaaaatgattgcacatgcctacattatagccgatcgaagaatgcagaacttggtttaaaatattgtgtaaatttaataaaaaaaagaaagataaatatttaactggaaaaattatgataaatagctaaatatgtttctagtatatcttatttttattttaaaattaatcaacatgtttgttaaaacaatgataaccaattaaaaacacgaaaaccggcaactatgtggtcactattattattgca

SEQ ID NO: 33585 - DNA, 380 bp, Zea mays
ttcctgtagaaacgaacagggactcggcagtctggactgtgaatccgggactaagggttccacatgtaacatctgaactaagcaaccgagaataaaataattctccagtcttgattggtaatatcaactgaaactaaatataacacgggtccatatctacggtagagatggaaacgggtatgggtatagataaataaccgtggataattattcaacgagtactggtatgatgaaattttgtattcacaagtatggtatggacatattaaggtatacacgagtatatttgtcgttggaatggatatccagtatccatatccattactcgataggtattcgaatgaatcaatgtagaaattggagtggaactaaatgtgata

SEQ ID NO: 33586 - DNA, 231 bp, Zea mays
aacaaaaacacaaacaccaacaaacaacaaccaaaaaaccccaacacaataccaaaaaacccaacccccacacacccaccaaactacaaaaacaacctaaaaagaaccctacccaaaaccaaaacaaacaatccaccaaaccccaacaaagccacaacaatcaacaaaacaaaaatcccattaaaaacgaaaacccataaaaacaacaaaaaaaaaacccaaacccacaaa

SEQ ID NO: 33587 - DNA, 412 bp, Zea mays
  unsure (1)..(412): unsure at all n locations
gcttgtgagcaatacaagaagaaaggagaatgctgcttcngcttatcagccgaagcccatgcttttatgtgaagatatagcagaacagaaggtgctgctgggatctcaattatctaaggagcaagagaaaaccctaataaagttcctgttcaacaacaaagatgtcttcgcatggtcagctaatgatctctgtggtgtcaacagggatgttattgaacactcgctcaatgttgatccatccttcagacccagaaagcagaggcttcggaagatgtctgacgacaaagccgaaggtgctcggaatgaagtgaaaagacttctcagcgctggagtcatcagggaaataaaaatacccagaattgctagctaacactgttatggtgaagaaagccaatggtaaatggagaatgtg

SEQ ID NO: 33588 - DNA, 388 bp, Zea mays
gtagcataggccaataatatacgaattgactcaagcctagctacgggtgcataggtttcaccaaaatccaaaccttcgacttgtgaataccctttggccacgagtcgagctttgttccttgtcaccacaccatgctcgtcttgtttgttgcggaagacccatttggttcctacaacattttggttaggacgtggaattaaatgccatacctcgttcctcgtgaagttgttgagctcctcttgcatcgccatcacccaatccgaatcttggagtgcttcctctaccctgtgtggctcaatagaggaaacaaaagagtaatgctcacagaaatgtgcaacacgagatcgagtggttacccccttatgaatgtcgccgaggatggtgtcga

SEQ ID NO: 33589 - DNA, 222 bp, Zea mays
gctccttacccaacgcatcaccctcatggtgaacttatgtgactagtctctccagaagctaaaggtatcgcgtcgctgctactcttgcagttggctttctatataataatttgaacctatctcgctttcacatatcggctaagaacaccttaccagtcaaccattacgatacactctctcttagttaagggctcttgtcttctgtagcttatatataaatcc

SEQ ID NO: 33590 - DNA, 409 bp, Zea mays
  unsure (1)..(409): unsure at all n locations
agctnttcaccgaaaccctaactccccgactctttgtgctcggtgaaatgccctaaccagccaaacttgctccttttgaacccaaatttttcaggcaccttcacaacacttctagtaacctacttgccaaatttcacgccaatccgagatcccaggcttaaatttcaccaaaattcccgttttgagcgatcgtttccgagccgagtgcccaaattcccttttcttcgcctacattcaaaccaagcactcacttcactaatattcacctatataaacctattcgtgaagtctcggctcaatcccaaatcgtttcgtgcctcaattctaattccaatcatcctatgtcactatttgtctgtcaaacgttgttttcacgtcgtttgatttcttgaacgtcccgtctcgtgcc

SEQ ID NO: 33591 - DNA, 402 bp, Zea mays
  unsure (1)..(402): unsure at all n locations
agctntaccaaatggacgtgaagagtgccttcctcaatggaccaatcaaggaagaggtctatgttgagcaacctcccggctttgaagatagtgagtaccctaaccatgtgtacaaactctctaaggcgctttataggctcaagcaagccccaagagcatggtatgaatgccttaaagattctcttatcactaatggattcaaagtcggaaaagccgatcctactttattcactaaaactcttgaaaatgacttgtttgtatgccaaatttatgttgatgatattatatttgggtctactaacgagtctacatgtgaagaatttagtatgatcatgacacaaaaattcgagatgtcaatgatgggggagttgaaggacttcctaggatttcaagtgaagcaac

SEQ ID NO: 33592 - DNA, 395 bp, Zea mays
gaagaacctgagctgcaactaatgaattcttgttgtttcccttttatgccacagaacacaaattgcgagtctccaactgacttaattactggaaccaaacactccctaaaaacatcatctcctctgtagataccttggcatagcctgtgtaattccatctacagaattggagctatttggcacatgtttatttcggcttcttgccgccagaattggcttctggccgctaaatgattcgttaattgtctctgttatgttaaaatcatctaaatcaatgtgaatgtataatccaccaaatcatcacgacacaaggaatacacccgttgtactaaactcaaaccataaagctcataccgtgtagacccctttatcttactttacaaagccttgtctgc

SEQ ID NO: 33593 - DNA, 385 bp, Zea mays
atctggtatgaatcggcggtaatatccagccagtccaaggaaacttcggatctgatgaacagtggtcgggggtttccactccaaaatgtccttgactttgctgggatcaaccgcaatccccctgccagatagtacatgtcccagaaactgaatttcctccagccaaaacgcgcatttgctgaacttggcatataactgatgttctctcaagcgcgttaacacaatccgtaaatgttgggcatgctcctcttcattgttggaatatattaaaatatcgtctatgaagaccaccacaaacttgtccaactcgggcatgaataccgagttcatcaaatacgtgaagtgggcaggagcatttgtcaatccgaaagacattaccaggtat

SEQ ID NO: 33594 - DNA, 197 bp, Zea mays
ctatgcaactgatggtaacataaccaaagatctgcacacccccaaatcaccaagcatgtatcctgtcgcatcacttcatcctgggcccgcagggctaccttatgcaaacactaacacgttttcttatttccgtgagattccactgactcctcaaataccataccgatagttgatacaccccatccaatcccacccgc

SEQ ID NO: 33595 - DNA, 399 bp, Zea mays
agcttgtgaagattcatcattccaacatgtgctagtcggcgatgccagagccagcccatgttagtcttagcaattaagcaagtgtcgagttcagctctatcaaaatttactaagtatagctgaccctctaacactcccttaaatgctactgaatcatcacttcttctaaagacagtaacacctacatccgtaaaaagacagttgtaacccattttacataattgcaaaactgaaagcaagttgtaatctaaagaatctacaagaaaaacattggaaatggaatggtcaggtgatattgctattttacccaatcctttgaccaacccttgattcccatcctcgaatgtgatagcttgttggggatcttggtttttctcgtaggaggagaacatcttcttc

SEQ ID NO: 33596 - DNA, 151 bp, Zea mays
  unsure (1)..(151): unsure at all n locations
tcgtgtctacatactctcttcttggcangcacacacacacatatatatatatatacatataatatatatatatatatatacacacngcgtgtgttacaacggctcacaagtcacaacaatacccacgtaaattatctactanaaatatctc

SEQ ID NO: 33597 - DNA, 133 bp, Zea mays
ctgtttcatattaccaaggcttatgtcaaaatactcaagaaggccctaccctattgctacaatgctgctattccctctggaattctacaaaaacttgaaaagctcacctcaacgttcaaatttcgacttggct

SEQ ID NO: 33598 - DNA, 391 bp, Zea mays
agcttgccttcgcttcagtctatcatccgtagtccaacggggtcgtggagcgtgccaatgggaaaatcttcacagctgtcaagaagatgctcctcgatgaaaaaaaaggcagatggtccgatttactaccggaggcagtctgggcgctaaacacaactgagtgcagggcgatcgggttcactcctttccgccttctatacggatcggaggcaatgaccccgcaagaattaaagcatgggtccccgcgtacagttccgtcagccgtccccgacgtggacgagccaacttcaaaagatctcattgacggagaccgggtcttcgccctacaggccctaaacaaataccaagcccagaccaaagcctggcgcgaccacgcagtcatcccgagaga

SEQ ID NO: 33599 - DNA, 386 bp, Zea mays
  unsure (1)..(386): unsure at all n locations
agcttgangttattttattacagaccagactaaaagtgagtgcatagagtaatattatgcaaaccagggaggcaaaaactcctcccgagaagctaaaaacaaaagatcttaagtggaggaccgagtcctcccgcacttcagtcttgattttcttcttttgaaaccaccttggagcagaagcaacaaaagtttgtcgcttcctcacctaaaaacaacaaagggataaaccctgagtatggaatactcagcaagtcttacccgactaaggaaaagactctcaagggtatgctggataaataggagtcaaggagaggctttagcaaaaatcaacttatagttttgcagaagaagcttactaagtgagtccttacttttcatcttttaat

SEQ ID NO: 33600 - DNA, 369 bp, Zea mays
tcacttgtgcggcatggttgtgccatgaatggaaaatctctcaatacttgcactgctgaacgactcgcatggactggcgttgagggtatactgcacgcaggacctacgcatgatcctcgcgcattggcctcgcgccgatctgccgagggtaatacgcggggaaaaactaccgcgtactgacgatcgcagcgcggctccttgtacacctgtaattacgcggactacgctcgggtgcaccttcactcgtacactactacggacgtgtacgccacgagacacatgcttgttccttcacgctctactgattcgcactggtcttataacccagctcagatccacgacaatgctattgtaaccattctccatgtt

SEQ ID NO: 33601 - DNA, 388 bp, Zea mays
aagacacattttcactaatactcagctagacttacccggtgtgaggagtcttgtcggggaccataattaggggtaccctcaagactcctaaatctcagctggtaacccccatcaacacaaagctgcaaaggcctgatgggtgcgattaagtcaaggatcggtccattcgagggacgcgatcacgcctcgcccgagcccagcctcgggcaagggcagccgaccccagaggatttacatctcgcccgaggaccccctccagcaacggacacaccttcggctcgcccgaggcccagtcttcaccaagaagcaaccttggccaaatcgccacgccaaccgaccgaatcgcaggggcatttaatgcaaaggtggcctaacacctttatcctga

SEQ ID NO: 33602 - DNA, 415 bp, Zea mays
agcttgttcttagcaaacatgaatgggctcaagtcgagtttagtggccagccatgtacctttcccatataatcattttagttgacattttgtatgtttttaggccatgacttatcagtttccttctggtgcaggaagtttgttcttttaacaatatgtcgagggaggagaatgtttacatggccaagttggctgagcaggctgaaaggtatgaggagatggttgagtatatggagaaggtggctaagactgtagatgtggaagagctcactgttgaggagcgtaaccttctgtctgttgcatacaagaatgtgattggggctcgccgcgcttcatggcgcattgtttcttccattgaacaaaaggaggagtcccgtaagaacgaagagcatgtgaaccttatcaaggaatatcgt

SEQ ID NO: 33603 - DNA, 414 bp, Zea mays
agcttatgaagattctgtatcccaacatgggctagtcgacggtgccagagccaacccatgttagtcttagcaattaagaatgtgttgagttcagctctatcaaaatctactaagtatagctgaccctctaacacacccttaaatgctattgaatcatcacttcttctaaagacagtgacacctacatcagtaaagagacagttgtagcctattttgcataattgagatatggaaagcaaattgtagtctaatgaatctacaagaaaaacatttgaaatagaatggtcaggagatatagcaattttaccaagacctttgaccaaaccttgatttccatccccgaatgtgatcgctctttggggatcttggtttttctcataagaggagaacattttcttctcccctgtcatgtgg

SEQ ID NO: 33604 - DNA, 407 bp, Zea mays
  unsure (1)..(407): unsure at all n locations
gctngagcaagtctcacggccttactatgaagctatctgagggcttggatcaaacggaggaggacggggaaagggctggccacggtggttgctctcgggcggcactggcgggtcgcggggaggtcgccggagctaatggctggctcgggtaagtcaggcgaggtacggaggaggcaacggggaatgcagccaagcactggggcgggctttatagccatggcgcgggcgtggtcacgggcggccgcgggcgcgcgggggttcgcgcatgggcgtgctctgagcgcgcccccggatgtcagctcgcgtcgaacaggtggaagcttgcttctgccatggttcaacggcggattagagcaccataacgtgcgtatcttggcaaaatcactgtgtacgggcgcttctctgct

SEQ ID NO: 33605 - DNA, 408 bp, Zea mays
agcttcagcagcggttgctgctgcatcattatcgtttaccacagattgtattgcaaaaaagaacaaatccgtccagcaagaagtgatcccttaggtacccactacaggtctgttgtacacccatccatgtggattggaggagatttggtagtttaaattcagagcaagtcaacatattgtactaactattttccaatcctttatccaatccatgggacatactaataaccgaacaaggcttacatttggggctgctaccttctgaccgattaaggctttcacctatacgaaacatagcttcagctttagggtcaaatacacctatgacctatactcgaaatttattccgaaatgcaattcacatgagaactaagttttcagaattaagcaaaacaaagcatagtataa

SEQ ID NO: 33606 - DNA, 376 bp, Zea mays
actttatcttttggtgccgatgttgatcctagggcaatagatcttgccatgaaaatcgccgaaaggatgttcctcaaaatgaaggaagatgaggcgaagaacaagattgaagaagaagaaaatgatcgatggagaccaaacgacgaatccacctcctcacaagggtcgtctttcaaatccacttctcatatgtgctttattgctaatgggagtgacagtgaaagcgaaagtgaggatgaggaggagcaagaaagtgatagtgaagatgaggatgatcttcaacaattcttcactcaactaagcaagaaacatcggatgagcttgcttaaactcatgaaaagagcggaagaacaaaaagaaatgcttcataagcaag

SEQ ID NO: 33607 - DNA, 222 bp, Zea mays
aactcgctcatgcttgacatggtaggattgactcgttgatgcaactttggttggttcactcagtctggttgggcgtgcgtggctagattgagtctggtggtgcttccatctactctgtctttttggactatttgaggcagagtcactggagacctcacgaaatctaaaaaaagacgggattagtcatataatactgaaaggggagtgcacctcgcattggac

SEQ ID NO: 33608 - DNA, 317 bp, Zea mays
agcttcgtcctaagatgaggagcctctgctcctgtaggcaagctctcaaccatcatctctgtcgcatctgacgaaggtgacaaaaacacctcagcaacagactgttgtctggccatttctattgaaaaagtgtgtttttcaactggctaaggctggtttgaaggtggaaaacgctcgaagcaagcttcgaaggcagagtgggctttaacagcaacaagcgcaaacaacaaatgttgtgtcaatgctgttaggcgtcgttttcttttatatttgtagatttttgaatttaaccattatactcactaaaacctggaccc

SEQ ID NO: 33609 - DNA, 257 bp, Zea mays
  unsure (1)..(257): unsure at all n locations
tctatctatagtctgagttccatgagcctatcttaaatgtggtccctgatctataaacttgaagttntctcgggtacctgtctttgatcaaactcaataggtgctaagatgtaagtcggtcaagacacatctgtacttaatggtcgacggaacccaagacctcttaatgtacactgaacaatatgccacaacatgttcggagtgaatcgacccatggcccatgctataccagatggccatgactggtgcagctctta

SEQ ID NO: 33610 - DNA, 382 bp, Zea mays
  unsure (1)..(382): unsure at all n locations
agctnggtgtttgctctaacaaagctcagtgtagttgctttgtcgattnttgccacaaaagtttagccccaattcacgttttcgtaaaatctcagacaacgtttgatgaaaacccgtttagaaaacatagtaaaatccatccttgcttctttggcccaataatttagtatatcagcagtaggcgccaccagaccacgcaagcggccatgagcacgtacaggtacaggaagatgcctacgccatcagtcgacatcaaaacgcgatctcccccttctaagaaataaaaaaggatatgtccaccaaccagatcgccatgaactccaagaaggaaagaccatagcaaaaaaaaaatgtaataagaaaaagataagggcgctcggaa

SEQ ID NO: 33611 - DNA, 383 bp, Zea mays
  unsure (1)..(383): unsure at all n locations
agctntntaaaagctgggttacgattccctataagcaggttcgtggtagaagttctgaaaacatatcaagtttaccttcatcaacttacccctgaagcaataataagaatgggaatcttcgtctaggctgtgaagagccagggcctagagccaagtgcgaaaagcttttgcaatatacatgaattattatatgaaacgaagccctggggtaaagagcaatatcacaacaactttggttgctacagcttcggtgctcactctgggtcaagctgtctcgtgccaacctttcggaagagatggcccggagaatggatgaaagaatggttctatgtaaaaaatgatttgaggttcgagaagatttaaggatattatcatgtgcccca

SEQ ID NO: 33612 - DNA, 301 bp, Zea mays
tgcgtgcggagctctccaagatcctaagccttctggaacgcagcgccatggaagacttcaaccagtccccttgtgttcctcagcccccacaggtcggtggcggggcgcccatctgctccgacgaatcacaccgacggtccttttgggcaccgccattcctcgacaatacaggagcatggtttgggtgtggtctacacccaataccatctccccgacaacggtacagctgatacaccccattttcaattattccagcttatcatccattcacctactattgctcatggcgacaacactaatt

SEQ ID NO: 33613 - DNA, 166 bp, Zea mays
cgacggactttacaagaacataactgactttgcttgacgccttactagaagtgtattgaattcctctggcttgagattacagactacctctggtaaatgcagaaaagcacgcatcactaaggtctaagagtacatctctcccaagggaagaagctatgagatgaaa

SEQ ID NO: 33614 - DNA, 395 bp, Zea mays
  unsure (1)..(395): unsure at all n locations
agcttctaaagggagaacacattntaggactaacaaatgttcattntgagaaagacagggtttgtagcgcatgccaagcaggaaagcaagttggtgcccatcatccacacaagaacataatgacgaccaacaggccactggagctccttcacatggatctatttggcccgattgcttacataagcatcggcgggagtaagtattgtctagttattgtggatgattattctcgcttcacttgggtattctttttacaggaaaaatctcaaacccaagagaccttaaaaggattcttgagacgggctcaaaatgagttcggcttaaggatcaagaaaataagaagcgacaacgggacggaattcaagaactctcaaattgaaggcttccttgaggag

SEQ ID NO: 33615 - DNA, 388 bp, Zea mays
  unsure (1)..(388): unsure at all n locations
agctntgccatccgtaggcgcttaccaagttctgcttctttctgctggatgctctaaaggaaaggggtggatgaagccactaatctgtgcttgcttagcaaaagaacctgagaaggtgcttgttgtcggggtttgtgggaagcccaggcttggggctgtccaggggaatgcgtttggtaacgcttttaggtccgcaacagaggagattggtgtggactatttccatgacatgtttgagtcatcatggattattttggatgttgttgttgtcagttctttcatgattcgattaacatagaagctatgatcagatgacatgagctctgtacaatgcggatcattctttcagttcccaggatgggagactcacgcttgattctcttcaatt

SEQ ID NO: 33616 - DNA, 321 bp, Zea mays
cctgtgtccattattaataatacgggtgtctgagtcggacttcttgcttgttgcaactgaaagtaaccatatatatactgtgctttgaaaatgtaaaaacagggttagcactgaagcgctaagggggaaagcaatataatatacttagccactcagcgggtacgtaaatatatcatcaagaatgcaaacaatacaagaataacgtgaccagatgttacaggttgtctgaactactcatgagggaagacaggattaatttctttaacgataatatgactctataatgcataacataaccccactggttgtatcatgtgacaa

SEQ ID NO: 33617 - DNA, 387 bp, Zea mays
acttagcttcaataccacatttgcagagtactggatcaaatttgacctcttcttccgcccacccgttgtatctcttttcctttacctctggctctggccaatgggacaaaggaccatacaaccactctctgaaacgacacttacgccacccgtatggctgcaagagaaaaaattagttatttattgtaaataaaaactagttcatacatttagcgtatcaatgggctcacataatcaatgttcggacaacagaactgcttgtcatagtcttcgtcgatgacagcacggtctccataatcgcatcgaggcggtgagtccatccgtctttctgttgctacctccttctccgcatccgtcattgagggaggattcgggggaggaggtacc

SEQ ID NO: 33618 - DNA, 367 bp, Zea mays
atgaataactttggggatgagttctttgccatgcatgaaacttttacatacataccggttttgagccttcggcgaaaaaacaccttcccttcttttcatgcttcgtaaagaagagcttttatacttcgtgaaaaatcctccaatcatcgcaaaaacattaatgcttcgtcatcaatagatttttcctccacatcaaagttgatgaagttgtatttcttcaaaacttactttgtgccttagcacaatttcactttttcgaagcattctccaaagattaacattgtatccccttcttgtgccattgatgcaacatgatgtatgatgttatgttatgcgaatgatgttatgcttatgcaaaatgatattt

SEQ ID NO: 33619 - DNA, 404 bp, Zea mays
  unsure (1)..(404): unsure at all n locations
tagtggtgttaatggtgtgcgttcgacgatatgtagttagctaacgctagtgtgtgtgggtatntgtgatgtctcactacttagtggttaatcactagcgtgtacttaaagtatcatgtgctatntcattatattcatgcatatgcatcttgatctcattangaccagagatctatcggcaggatgtggcacacagatcagtggggacactgagatgatgactaccgtgatgctgcagcagtcttccacaaactttaatgtaataaagcagccgtttctacctatttcattctcctagtgagtgctgcctaggtgatgataactttgtactagatcttgagtctttgtgcatctgtaatagatcggagcatatttcctgcagcgatgtgcccttctatgtatgt

SEQ ID NO: 33620 - DNA, 399 bp, Zea mays
taagcacctgaggcatgcaagcttagcttcgaagtcgttactaagggaatgcagagctaaaataccacctaagaaaaaggtgaagagactccaaagtcattcctaaggggatgcagagtcttatcttttatgtttcgtgcgccaacatcatttgcatcatgccatcacatcatattgcatcatgacatcgcatcatacaccattttgcatcaacaaaatcattgaaaaacaagaattcctccttcagcgtcggcaaagactcatgaaagagtattaaagatgcacagtcccatgtttgagaatactgtcatgtgaagttgtgctttcgacaatactattcctacgcaacatgtcaccaagaatcaaacatcatacagtagctttcgcgaagaaggggga

SEQ ID NO: 33621 - DNA, 196 bp, Zea mays
  unsure (1)..(196): unsure at all n locations
ctatcatatatcttggaataagatggtgactaggataagaatcatatactntatgatagcactaattgtctgtgtttactaaaacaaatatgaatgtatactacttagaactaaatgtgaatcangatcattaacaaaaataatagtaatttaatcgaatgaagattctaatatcactcatcaatggatgtgaaga

SEQ ID NO: 33622 - DNA, 409 bp, Zea mays
gcttaaagctcaaggtacactcaactttgtttctgacaaggttggttctcttgttgtcaaccccaatgaatacaatcatgaccacactcgtctattaattgcaaagatgatcattgcccatgagtatccatttagaatggtagagcatacttggttcaatgtcttgatgaattggttgaatccccattatcagtacattggtaggaagggtataagaaaagaatgcatgaaggtatatgaatctgaaaaagaaatcttgaagaaggcacttaaagatgttgactcaataagtttaacttgcgatttgtggacttcaaatcaaaacattggttacatgtgtctggtcgcacattacatagatcctaattgggtgatgcaatgtcgtgtactaaattttgttgatttggat

SEQ ID NO: 33623 - DNA, 330 bp, Zea mays
actgcaacaccttattttcccagcaaatttaaaatttctgatccaatttacgtttttaagtttaaatcctgcttcgtctttgaagccatttttggcttacatgtttgacttcactatcttgattactgactgacactattttatgtacaaatatttgcttcaactctctatcaacttacagtgtcacatgtcctattatgtttggttagctgtagaacctgaagaaaatattacagattattcacaatgctttctatcttctattacactctgattagcttcataatcagtatttcgaaatctttcgaataaatttccgtacacctggta

SEQ ID NO: 33624 - DNA, 410 bp, Zea mays
agcttctccactaacaccagaactacaatgtacaccatggccactactatacaggcttcctacattgcctatctacgatgacctaattgacccgaagcaattcctcattagctacgaggctaccatatcctcatatggtggtaactcaacaggcatggcgaagtcttttgtcatggcagtccgaagtgtggcccagacttggtattcgtcacttgggccaaggactgttaattcatggccaaagctcaaggaatgctttttaccagcttctagggtttttagtccaaacccttcactacacaagccttgtttcaatacaccaaagagccatatgagtaccttcagtcatttgtctgaatattccttaggctttgggcttaggccctagtagtttaagatgacatcgtcat

SEQ ID NO: 33625 - DNA, 84 bp, Zea mays
ctctatgccaaagaagctgttcactcgttaaagaaccgaggttacttagaaatgctaacacccgactgggatgcaaaattcatg

SEQ ID NO: 33626 - DNA, 429 bp, Zea mays
  unsure (1)..(429): unsure at all n locations
gacccggaggggagagtcacctgcngcatcaagctttgcactgttttattatcttgtttcagnactacgcggcggcatgtgttgctgtgttcggcaagctccagtgcaaccaccgcttggacgcggtccagagcggctgcaccgtgctgtccatcttcaaatagggggacctcatggtcgtcgccaacgccgacgactatcgggttgttatgggcaccgcattcgacaacggcgtcgtcacaccgtccagctcatcattcacctgaagctcatccttccacataagtcactactgaccgaacatgaattcttgtgcgctgggacgacggccgttgctgacgttgtgtgaatgtcctcgaacaagaattatgtagaggagttacacatcctgtggtaaaacggctaggtgtactaccttcctgatgagcc

SEQ ID NO: 33627 - DNA, 410 bp, Zea mays
atcctcagagtcacctgcggctgcagcttgacacattgtcttatgctactatgaacactaacttttcggagcataattcgtccagtagaaacagggaaactaaagaacaatagggcattgtcatccttgcaaacacgcaagtccaccaacaaatgcaaagaagtcaggaaacatagcagggagtcatggagaaagcaagcaggtattacctggctataaaaccgttcagggttctcttccctcaggttgtgtatatctaaggcaacctttgcatcacagccaacccctgaaaaagcgccagtattatggttatctgactatgcaggaatctactaaagaattctagctatgaaaatagttgcatcgacataccaaagtagttgttcataaattttggtggtctcataagt

SEQ ID NO: 33628 - DNA, 387 bp, Zea mays
agcttagaaaatctggttgaatctgctgttatacccagccagtccaagaaaactccggacttggtgaacagttgttgggggtttccattccaaaatatctttgaccttgctaggatctaccgcaattcctttagctgataacacgtgccccaaaaattgaatttcttccagccagaacgcacacttgctgaacttggcatatagctggtgttcccttaggcgcgtcaatacaatccgtaaatgctgagcatggtcttcttcattcttggaatatatcaagatatcatcaatgaagactaccacgaacttgtccaattcaggcatgaacaccgagttcattaaataagtgaaatgggcaggagcatttgtgagcccgaaagacatcac

SEQ ID NO: 33629 - DNA, 391 bp, Zea mays
agcttctaaagggagaacacgtgataggtttaactaatgtgcaattcgaaaaagatagaccttgtgcagcttgtcaagcaagcaaacaggtgggaagctctcatcacaccaaaaatgtgatgaccacatcaagacctttggagatgcttcacatggacctcttcggacccgtcgcctatctaagtataggaggaagtaagtatggtcttgttatagttgatgacttttcccgcttcacttgggtattctttttgcaagataaatctgaaacccaagggaccctcaagcgcttcctaaggagagctcaaaatgagtttgagctcaaggtgaaaaagataaggagcgataatgggttcgagttcaagaaccttcaagtggaggagtaccttga

SEQ ID NO: 33630 - DNA, 390 bp, Zea mays
agcttctaaagggagaacacgtgataggtttgactaacgtgcaattcgaaaaagatagaccttgtgcagcttgtcaagcaggcaaacaagtgggaggagcacatcacaacaagaatgtgatgaccacttcaagacctctggagctgctgcatatggacctcttcggacccgtcgcctatctgagtataggaggaagtaagtatggtctagttattgttgatgacttttcccgcttcacttgggtgttctttttgcaggataagtctgaaacccaagggaccctcaagcgcttcctcaggagagctcaaaatgagtttgagcttaaagtgaagaagataaggagcgacaacgggtcttgaattaagaactttcaagtggaagagttcttga

SEQ ID NO: 33631 - DNA, 391 bp, Zea mays
agcttgcattgcatatttaaatttcttgtacatctagggcttgtctaacctagttgagataaccgccaacaaagcgagtgaaaaagcttaactcggatcaaacttgacaagtcttagttttaagcttttagcacttaaattcttactttctatgcaatttttggttcttgaaatatgcatgagctactgcacttagggggagtattcaaaactcaaatcactcatgaaaacccctagtgcaagtccaaaatgcaaatttcaccatttgcctattttctctaaaaattatctagcctatggcaaaatattttgaaaattatgagaaaatatatgagggtgccaatacctgtcctaacaagtgttattttgtgtgattataagttgggatttg

SEQ ID NO: 33632 - DNA, 389 bp, Zea mays
agcttgcatagaacaattgggatttcctctttcattctatgcaaaacatttaacttcaatgtcctagcacataattgttgaaaaaagttacctagttcagcaattgctatgtacatgtcattatccatgattcctcgaagagcggcaggtaaaatacgttgcaatattatatggcaatcatgagtttttaacccttggaggttgcatccatcagctgtaatacatgttgctaggttagaagcatatccatctggaaactttacacttcttagaaagtcatagaaagcaagtttttgctttttatccattgtgtatggagcaggaggagcgctatatgaatctccatcacgcttcaagtgcaaagattttcgtatgcccatgtcttccat

SEQ ID NO: 33633 - DNA, 180 bp, Zea mays
taagacccggacgactgatcgccttatgatctatttattactgccgcgttacaacgcaactggaaacctgcgtaccactaatgcctgctacatcccttttcagtgcgtatacgaaagccgaccatcccttcaacagtgccactgatggaatgggctgatcggatttctctaccatctggc

SEQ ID NO: 33634 - DNA, 417 bp, Zea mays
agcttaataatagagccaaaattagttgctctatttgactggggttagaaaaattttgagaagtttgtatctacctactaacccaaataaaaatgttaaacctctctgtccactacattaagttagtttttaccccttattctataatatgcttaaggataagaaaaatagaaaatgtaatttaaacaatgaaccagagagcacctctatttttgttaggatacttgtttaatgtagttcactggaaaaaatatatcataccctggtttagtataaaataagtaggataccttttatttcaataaactaaggataacttagaaaaaccctacaaaaataaccccaaggtaaaaacaccccaccctggggataacaaatgttttattaataagaacttaagaaaaatatgaaatctgg

SEQ ID NO: 33635 - DNA, 136 bp, Zea mays
tggagcccatcatgcacacaagaacatcatgacgaccgacaggccgcttgagctactccacatggatctatttggcccgattgctacataagcatcggcgggagtaagtattgtcttgaatagtggatgatattct

SEQ ID NO: 33636 - DNA, 371 bp, Zea mays
  unsure (1)..(371): unsure at all n locations
agcttgcagttgcgccagagccggacgcatgtctccgtctccttgctgcaaagagtagggcaggcccatgtgtgttaacccagcgaggcggntgtgctcccttctttatcatctcaggcgtcagatttcccagaaagaaccgtaggagccttgccacgttgacagcatgtgtggctacaaaacaaaacgtcacgtgacatgcagcacaagccgccctcacggcccagcctacaaataacggaagcggacgaacacatcacaccacacggatcccatgggccgcaagatcgtcgccgccctcgcgctggcgctcctggtgctcggcgcggccgaggcccangtcctgccgaccccctgctgccgcattgact

SEQ ID NO: 33637 - DNA, 343 bp, Zea mays
  unsure (1)..(343): unsure at all n locations
gcttctactgaagcttcggctaacaagctgaagctgaagctggttcttcanagcccttcaaagaacaaccttttgaagccgaagcagttaaaattccggaaccaatattagttgaagaaacggacaccgtcatccccgaagcacctgccggcatgcatgattacatcatacgacatgcttcggggaaaaagctatctgaggaagaaactcatgaggccaaccattatgcaaaggagctgaaatatccgaagggggcagtaatattcaatggaacaaatgaagatgacttcttatactgtctgcctgataacaaagagctatccgtcttgcgagagatggcgag

SEQ ID NO: 33638 - DNA, 412 bp, Zea mays
  unsure (1)..(412): unsure at all n locations
agcttctaaagggagaacacattntaggattaacaaatgttcattttgagaaagacaggatttgtagcgcatgtcaagcagggaagcaagttggagtccatcatccacacaagaacatcatgatgaccgacaggccgcttgagctactccacatggatctattcggcccgattgcttacataagcatcggcgggagtaagtattgtcttgtaatagtggatgattattctcgcttcacttgggtattctttttacaggaaaaatctcaaacccaagagactttaaagggattcttgagacgggctcaaaatgagttcagcttaaggatcaagaaaataagaagcgacaatgggacggagttcaagaactcacaaatcgaaggcttccttgaggaggagggaatcaagcatga

SEQ ID NO: 33639 - DNA, 419 bp, Zea mays
tctaagtcacctgcggctgcagcttatactttcttttgtttatcatctgtttagaacgcatgtgcatgtgctctttgtttttttacttattatacatggaacaaatgaatgataacttacttcgtcgaaaagtgccccaacagtaagtgtagatcaagtgcagtgcatatacatgcatgagaaataattttactacattagctattgcttgatgccatacttaaaaaaattgactcggaacagtttaatttaattcaaattgttcagtctttgagctgtggaattaaaggcgaggattccatgtaacattctggagggtcaagtatacgtagtgtctgaacctgagcccaatcactggtctcgagcatctgcaccacctggtgcgtggtgggtcgcagcagcgggttcggctcgatgca

SEQ ID NO: 33640 - DNA, 400 bp, Zea mays
agcttgaaaaaatagcgcaagcagttgagatggcacatcaaaggctatcaatacgggttcctatttatatgcccagcgcatcacaacttggtgggccctacatgtcattgattttcgctattctagcgaagggaaggtgttttttcggaccttcggctaaaggccttcgttcacatcgcagtctgaatttgttaatacaaaaacaaattaatactgcgaggggctactgttgggggccttcctcctccaaaggtcctcaaaaacgtaactaacatgtttttcagtataacagactgttacaggaggctttggctttgagatgaaggtgtgtgtgatatgaaggtgtggtctaaaggaagggtgaatgagcgccgaagctgtggctgaaggaacttcggct

SEQ ID NO: 33641 - DNA, 218 bp, Zea mays
  unsure (1)..(218): unsure at all n locations
atatgaatggacctttcaagaaagctcaaggaggatacacccatgtatnggtggcaatngacaagttcactaaatggatagagtntcagcccatttgcctcttaacctctgctaaagccgtggaattcatacanaacataatattcagatntgngataccgaacagtatcatcactgactngngatccaatttcaccagttcagaattctttacttct

SEQ ID NO: 33642 - DNA, 388 bp, Zea mays
agcttgagaagtatttagatgcagtccgattgttggaagcctcttttgaaggattttctgtaaaaaatattccaaggggagaaaacgagcatgtagacttattatctaaatcagcggcacaggggctccctttaccgtcggaagtctttttcgaaacaataaaagcacctttggttgagctcatggaaagggcagtgctcataatttcacttgtacatagtaaagattggaggactgaaattgtatcctttctccagagcaactgtctttcggacgacgaaggttataataaaagaatggaggcaagggaaagaacatatgtaataatagaaggggagttatacaagcacggagttttctcttcattgctcaaatgtttatctagaac

SEQ ID NO: 33643 - DNA, 108 bp, Zea mays
  unsure (1)..(108): unsure at all n locations
atatactcntaaccgaactctaaattagtgatctcgacctngatctcgtacgatgtaatcatatttgcattggtttatgttggtgtatttaattgtggggccttctct

SEQ ID NO: 33644 - DNA, 387 bp, Zea mays
agcttatgcattttaagcatttaagtttctatcttgtctttatacttatatagtgtagattgaaacttagccattgcggtagagatagcaacacttagactaaacctagtttgcacattatgaattgattatttgcatagtttttgctctagggatttaattgtggccttgtttagtgaaagttttagaagtcctaattcacccctctcttaggcattacatgtttcctacaatatgctaaagaatggcttgaagactgagtgcactggacaccagagcatacactaaacagggtgcacagagagcactacagagtggccctatgagttaaaaggcaccgggcatattcaatgtatcaccggactccacaccggatgtggtactcat

SEQ ID NO: 33645 - DNA, 387 bp, Zea mays
agcttgtaaaagatcacaagtctaatgtatttcaaggatttcagttgaaaacttactttcacactggaccattcaagctccagcttattgttgtagtacttctcatcatcacactataggcttaagcaaaaatattgaaatacttaaactgacaggttcgggccacaagagtaacaaagctaactaatagtgtaaggatagaaagcatatttgtaggtgagataaatccaaccataaattgacctaaatcgggcatgattcactaccattgacaagcaggcatctctttcttcccaaactatgagaaaacagaaaaataaacttccagcttatacaaaacttgacgacattcaattacatataactatatgaagggttgtctggtac

SEQ ID NO: 33646 - DNA, 385 bp, Zea mays
agcttgtggcgaaatagccacttgctggtgaccacgtaggtgcctggtggacacggcaccaggtcccaggtgtggttggccaagagggccgcgtactcctcctccatagcgcgtcgccaatgtgggtcggcgagagcggtgcgaacggaggaggggaccggggaggcatccaatggagtggtagtcgtattagctgccaagatcagccgatcgataggtcgaagaatgtcagtggcgcgccgggtcaccatcgggtggacgtgcccggggtcgcggtggatggcgaccgggtggtacaccggtggctcggggcggtctaccgggatgtcggaggccgcgggcgtggccgactcgcggcggtgatagacgacggcggggtcggcga

SEQ ID NO: 33647 - DNA, 382 bp, Zea mays
agcttataacaggaggatagaagcaagagctcgactatatgtcataatagaaggggaattatacaagcggggggtatgttccccgttactcaaatgtttatccagagccgaaggcatataattgatgaaagaaatacacgcaggcctgtgtggatctcacattggatctaggcctttgctcggaaaagtttttcgtcaaggattttattggccaaaggcagcttcggatgcaacggatttagttcaaaagtgcgaaggttgtcagaaatgtgcaagagatcaaaaacaaccttcgtctttaactcaattaatacaacccacttggccgttgcaaaggtggggccttgatttgctaggtccattaccaccagcacaggggaac

SEQ ID NO: 33648 - DNA, 185 bp, Zea mays
  unsure (1)..(185): unsure at all n locations
tataacttcatcatcatggtcatggactgctgttgacatggtccatangactntgtcattaccttgngaacgtctgtgacttcaattcttgctgatactaatccatcatactcnacatcagtttataccagtcatactgatcatgtcatagatgcaactacaactgaatgtcttgatgaactgat

SEQ ID NO: 33649 - DNA, 412 bp, Zea mays
gcagcttctaagggagaacacgtgataggtctaactaatgttcaattcgaaaaagatagaccttgtgcagcttgtcaagcagggaaacaggtgggaggctctcatcacaccaaaaatgtgatgacgacatcaagacccttggagatgctgcatatggacctttttggacccgtcgcctatctgagcataggaggaagtaagtatggtttagttattggtgatgacttttcccgcttcacttgggtgttctttttgcaggaaaagtccgaaacccaagggaccctcaaacgcttcctcaggagagctcaaaatgagtttgagctcaaagtgaagaagataaggagcgacaacggatccgagttcaagaaccttcaagtggaggagttccttgaagaggaagggatcaagcacg

SEQ ID NO: 33650 - DNA, 392 bp, Zea mays
gctttggcttcttcaccgatccatttgatgattccttcggggtcgcctctaataaatttttgctcggatgagtaggcacccaccttttgcaaactgtcctttagcttcttggcacaatccaaggatttttcgtaatatctttattttgattcccgaagctcatctacattcttttgcaaccttgcgctagtccactcacttatttcctgcttcgccttagccacttcgaaatcttcattcttctcgacaagctttttctttaaattttcagtttcggctctttgagtttcggactgtgcagcaagattggcttcactagccttgactttgtctactaaggaaagcaaaattttgtccttctctgcagcttcattcctcagtttgataacctc

SEQ ID NO: 33651 - DNA, 85 bp, Zea mays
cgccgtgtcacacgtgggctatacccagtaatacacattggagggtcactctcaatacttcatgtcaaccatacgcctaacacca

SEQ ID NO: 33652 - DNA, 427 bp, Zea mays
  unsure (1)..(427): unsure at all n locations
agcacctgcngcatgcaagcttcggggcaacagcaaggccccttccgaccaccagccccaagatgcagaggcgccaggggcttctgcggaagattcggagatcaaccaagaagaatcttttgcttgttttgcggcgagaacaaaggtcataccaccaggatgtgccatgttaccatccagaagcaaaaggaaatagccgaagccgcagcacaacaagctcagtcgaagcaggtcatgcatactgcttcgtatcattcgccttacatcctagaatatgtgggcaaccaccctgcagtttctgttgcttcggcgagtcaacctcaagctttctggcaacagcctccgcctccacctccgctgcaacaaggccagcagccagaagggagccaatatgctccacaccaaagggacttcagagagcagtccg

SEQ ID NO: 33653 - DNA, 200 bp, Zea mays
  unsure (1)..(200): unsure at all n locations
acctttcaagaaagctcaagggggatatactcatgtatnggtggcgaatgacaaattcactaaatggatagaattcaagcccatngcttctntaacctctgctaaagtcgtggaatncatatatgacataatattcagattcnggataccaaacagcatcatcactgacttatgatccaaacttcaccagtcagaaatct

SEQ ID NO: 33654 - DNA, 370 bp, Zea mays
gcaagcttaagtgctccactgttatagagtctattatctttatttatttaaataagggtcccataacattaactttatcctaatgactaaccagtaattgggacatgggaacagcatggaaacattgcataaacagattgataataatattatgaacattttgcaatttgaagcacctaatttggagttcatatggcaaagttatgaattttacaagtttaggggtcaaaattataccctaaggacttatcttgaattaaattaaaggtccgaggacctaactgcgaaaaaccaaggacggcgggcgcacattccagaaaacagggtggttctttagaatatgcgcggctatgggttttggctcctacag

SEQ ID NO: 33655 - DNA, 183 bp, Zea mays
gcacctttctatgtctattatgaggccgcaaacaaaggtaaaaatggaaaaagtctcagaaagctggcagtccatggcggatgactcgcaactcccactctctcgacagcgcgcacataccgtcacaggactctttcccactcacaaatgttatggcagcacaaattaggcctttgtctcaat

SEQ ID NO: 33656 - DNA, 321 bp, Zea mays
ccaaagcaaccgcaaaggcttacgttacctacggcagctcaaagcctgcctgaacgtgcataccactacaccacgtcacgtcatgcaagatacacagccaccacgggtccacgacgtacggtacgggtacagctcacgcgtgccgcggtgaacaagcggcgcctggctgacgcgcaactgcggcgtgctatcttcttgcactggtggctgttgtcgacagacgcgcccgccgccgtcggtactcctcgctgttggacgacagctccgccacttatgtcgtgaagcgcacctttatctttcttttcttcgtcgtcgtgccac

SEQ ID NO: 33657 - DNA, 399 bp, Zea mays
agctatccttcagaatattttctttctctttaggtgatggaggtccacagggacttcgtccactaccaatggatagataggagcctgccgtggtggaggaatgtagttggtgttcacccgagtggtctggatagtacgcaccatctacaagagaaaatgtcaacttagttgaattttaaagaggtaagattaataaaataaatttgtaatagcaaaataagcatattttgaacatactaggctttccatttctaactagtctaacgacctagagttagtatagctttgataccacttctgtcacacccggttttgagggcaaaaccgaatgcatagcatatgtgtgccatgatccattttctacacatatgttgacgtcacaagtgtatatatcaaaag

SEQ ID NO: 33658 - DNA, 182 bp, Zea mays
agcttaaccagctagtggccacccgacctcactacaccaaaatcatacacttcctacgattttttaactttctacaacttttataacaaaccgtaggaaattcacgcggcgatagacatgttttaatcttccaaaaaaccatcctataagggctagtttggaaccccttttttctaagggat

SEQ ID NO: 33659 - DNA, 360 bp, Zea mays
  unsure (1)..(360): unsure at all n locations
gcttcacgacaaactatagacatgcaacttgcttgatagaatntaacaaacatatacatgcaaaattgaaagtcaacaaagtaaagaatcaggaaatcaacacaactacacagtccatatccacatatataagaagtttcaccttgtaatgcttccagagcaattgtagcctgagcagggttgtcaaaatcgacgaaacacaacacatgtggatctccaccaggctgcagaaaggttgagagataagaatcatccatcgctagagcagtaaatttctaatgggtcaaagggtgcagatagttaacttacatgtctggactccttgttgacaagacgaacttcacgaaaaccaacaaatgg

SEQ ID NO: 33660 - DNA, 207 bp, Zea mays
  unsure (1)..(207): unsure at all n locations
tgacattcctatgctggagtccgtaaggcttcactgaaaagagttttctatgaaggacttangggaacagcatatattttgggcataaggatctatanggataggtcgaagaggcttatanngataagtcaagatacgtacattgacaagggtntgatacggttcaacatggaacagtccaagaaanggttcatacctatgtcacat

SEQ ID NO: 33661 - DNA, 349 bp, Zea mays
acaacgaccacacctattattcaattttaatatgacattttaaggctggcactacaacattatatttatggcatgtgcaagtgaatgatgtctacaatactcgggtgggccatactgtgatgatcatgttataccttaagtatgcaaattacctttgaattggctgtgtattatatcacctttgttacatatgctatgtacccgaacttaaagttagtacaattctagaattctgtgggagttctcttttcataatttgacgacaaagtgctcctatattttcctttctgataccaaattctttaatgtgtcctctgtgtgaatcaagttcctatttactagaccatac

SEQ ID NO: 33662 - DNA, 222 bp, Zea mays
  unsure (1)..(222): unsure at all n locations
tatttatataggctatgtacttcactctgcttgacaataactgattatagattctgagatctanaccatcttttggtggtcacaaaaaccacaatcgccaagaaatttgatggtaataatacatacatacaagattntcagttcttaagaaaatgagactattgccagaactaactctataactaatgaccactcttttcactattttttatcaactataca

SEQ ID NO: 33663 - DNA, 378 bp, Zea mays
  unsure (1)..(378): unsure at all n locations
agcttgcaccccggtacattggtctgttctccattcttgaacaatgtggaccagtggcataccgattccaactacccgaaacattatctgcagtgcacaatgtgttccatgtgtcccaattgaagaagtgtcttcgggttccagatcgaaccattgaagtgacggatgttaccttggaaccagacttaacatattcagaacatcctattcgagtcctggatcaaaaggacagggttacccgaagaagaactctcaaattttataagatacaatggaaccaacacacggaagatgaagctacatgggaaacccaagactttntagaaaagaatttcccagcctttttagcttcatgtaaattgtgagatatgcacaatt

SEQ ID NO: 33664 - DNA, 367 bp, Zea mays
agcttgcgtagtctacttcatcatcactagactcatcatcacttgaagaagcatatgtaacaatacttcgagtatttaccttcttttcctttgccatgaggcatgtgtgatgctcgttggggaagagagccgacttgttgaaggctgaggcggcgagtccttcgttgtcagagtcggacgaggagcaatccgaatcccactcctttccaaggtgtgcctcgcccttcgcctttttgtaggtcttcttcttttcccactttccgctctttccttgttcctgatcactatcattgtcgggatagttagcaataaagtgaccaatcttaccacacttgaagcaggagcgctttcccttcatcttgctctt

SEQ ID NO: 33665 - DNA, 470 bp, Zea mays
  unsure (1)..(470): unsure at all n locations
tctactgtgctacgtgtatggtgcttacaaaagatatagttgttgtgtaaacatacatatgagagactcaattcattgttaaagatctggtagaaatggacatgtcttactatcttgttactttcttcatggtgctgctaataatacaataatacatgagggttctctgaatgctaatattgacagatcagtgcacccatggaagtacagttgtgctttagatattagatngtcataatttatggcaatttctttattatatacttataattatctacacgtcatgatatatcagatgtgtgcagatataacggagatttgtgctatgtatatcaacaatcagtgatcatttaaggactgcatgaaaaatttaaccttcattgattcattattgaatatgattgctacacatctatatacaattttgatctcacaaggtatatagaatatacctgattacagcttttttt

SEQ ID NO: 33666 - DNA, 382 bp, Zea mays
  unsure (1)..(382): unsure at all n locations
aaagcagcttcngctgatcaaccgaagcccatgctgctgtgtgaggatatagcagagcagaaggtgctattgggctcgcaattatctgaagatcaagagaaaaccttgataaggtttttattcaacaataaagatgtttttgcatggtcagccaatgatctttgtggagtgaatcgggatgttattgaacattcgctcaatgttgacccatccttcagaccccgcaagcagaggcttcggaaaatgtctgatgacaaggccgaaggggctcgcaacgaagtaaaaagactcctaagtgcaggagttatcagagaagtgaagtatccagaatggctagctaacactgttatggtgaagaaggccaatggaaagtggagaatgt

SEQ ID NO: 33667 - DNA, 287 bp, Zea mays
  unsure (1)..(287): unsure at all n locations
actcgcatgtattggcactaatcacttgcgatacagttgactgaaggaacaccacagcgtctgctcaagtcccaaatcctacaaacactatcatcttngcgcttattgttttctctgacctgcgtcagcacataactgtacccgacgatgaacatactatcaaaaatatgcctcgcattcatctcaagcttgtcttaacctaagtggaagacattggactgaaagccacttgactaacctaacactttatcgtatttgtacgactaacaatcgacgtcgtgctactt

SEQ ID NO: 33668 - DNA, 431 bp, Zea mays
tcttaagcaccgcggctgcagcttattctactatttaaaatctctcaagtggtagctgatccatttatcgctttggcctttattttctccccctttggcatcaagcaccaaaacgggatcaatcttggccctttaaccccattgcctcaccaaaatcttcagataagaacacaaaggcaataagagtacatgagatgaacttggaataagttaccctctcatcggagtgcagtggaagtctttcatggtccaagtccaccgtttccctttcaaacctcctttgagactaaaacaagtaaactaaagcatatggttagtctcaaagggtcaagttgtagcaaagctccccctaaatatgtgcatcacttgcaaaaaggacttgtgaggtccagggagtgtttgtacaacttgagcaccacaagtaaggaaca

SEQ ID NO: 33669 - DNA, 135 bp, Zea mays
  unsure (1)..(135): unsure at all n locations
tagtacacccttaaaagctagtgaaccatcacatcttctaaaaacagacacatctacattggtagatagacatatatccatatacataattgctaacagatagtanatatatcatagagactcaactaaaacaca

SEQ ID NO: 33670 - DNA, 424 bp, Zea mays
  unsure (1)..(424): unsure at all n locations
tctcagcttttagacataagcattgtgtataaatatactaagtgttgacacatatgtgtaatcataatttggcgttagaaggacgagttaaacgacgacgaaatnagctgtcataccattaaatgttgatatgttacggaactgtgtcagaaatataagttgatgtataaagaagactggagacagttattggcataatgaactgaatatgacaattacatgatagacatgtttcggtagtcgtttattattactaatgtcgactaagattgtgtcttataatgtgatggatatttcaaaaagggctagattatataatgtgggactattacttagctacacactcagatgatggatgtaccctcttccaacaggagatgaaatatgctctttctaacacctctattactacgtgtccctcatt

SEQ ID NO: 33671 - DNA, 377 bp, Zea mays
tatacgaattgattcaagcctagctatgggtgcgtaggtttcaccgaaatccaaaccttcggcttgtgaatatcccttggccacaagtcgagctttgttccttgtcaccacaccatgctcatcttgcttggtgcggaagacccatttggttcctacaacattttggttaggacgtggaactaaaagacatacctcattccttgtgaagttgttgagctcctcttgcatcgccaacacccaatccgaatcccttaatgcatcttctaccctgtatggctcaatagaagacacaaaggagtaatgttcacaaaaatgagcaacacgagatcgagtggttacccccttttgaatatcgccgaagatgggtgtcatggggg

SEQ ID NO: 33672 - DNA, 400 bp, Zea mays
agcttgccaatacttgtcaaaacaacaacatctaccagcacagcaactgcagaccataccagtaacttggcctttcgcatgctggggactggatatgattggacctttcaagaaagctcaaggaggatacacccatgtattggtagcaatcgataaattcactaaatggatagagttcaatcccattgcctctttgacctcagctaaggccgtggaattcatacaagacataatattcagattcgggataccaaacagcatcataactgacctaggatccaacttcacaagttcagagttcttcgacttctgcgagcaaaaaagcattcagatcaagtatgcttctgtagcacacccgagagccaacgggcaagttgagcgagtcaacgggatgatactg

SEQ ID NO: 33673 - DNA, 394 bp, Zea mays
  unsure (1)..(394): unsure at all n locations
agcttgcttggcttaatgcagttctccaaagctaactntaaaaaaaataccatgttgttcacaacaataaaatcatgataatagtaaagtactttgaaatatgaatgcaaaagtaaccattattataacactatctacataactttagagtaataatcagtcaaatggcaccaactttaaaatgtaactgtgtttctaccatcaaacatcacattgataaacattgatagggattgttcttttcatttgctcgaatgtaaatggaacacaagaaaggttcagcacaaatattactaatagctttgttcctggtagagtttgttcttctgaacaaattggcatcatcagccaggtttgtgccttgtatagtacaggtcactggtacaagcattac

SEQ ID NO: 33674 - DNA, 398 bp, Zea mays
agcttgtgaagattcttcattccaacatggtctagtcggcggtgccaaagccaacccaagttagtcttagcaactaagcaagtgtcgagttcagctctttcaaaatctaccaagtatagctgaccctctaacactcccttaaaagctattgaatcgtcacttcttctaaagacagtaacaccagtatcagtaaaaagacagttgtagcccattttacataattgggatacggaaagcaaattgtaatctaaagaatctacaagaaaaacattggaaatagtatggtcaggtgatatagcaattttacccaaacctttgaccaaaccttgatttccatccccgaatgtgatagctcgttggggatcttggtttttctcatatgaggagaacatcttttt

SEQ ID NO: 33675 - DNA, 162 bp, Zea mays
  unsure (1)..(162): unsure at all n locations
agtctccacgtagcttcttctactgaatggtgactccactgaaacttatacattctgatngacttggcccgcgtngatctctccttctgatccagcactctgacagnngtgtcctgatagacagtctggtctatctcaattctgggtcaggtaatactcagt

SEQ ID NO: 33676 - DNA, 396 bp, Zea mays
  unsure (1)..(396): unsure at all n locations
agcttgtgatttatccaaattaaaacaagcaccatctcttaacatagattntctatggataaactcaacacaagagatggcattagtagcacaagcactagtttcttatttagcaaccctttatatgtggaagacaagcgtgttgctaaaatagagaaacatcataatatggactaaatttccttgaaccctcatgcacaatattttgaatgacatggataatatgcatggttattcaatgaagtctaaagggatgacttaatccatattatgatgagtgtctaatatagaagaatcaaatccaaattaactagatagagaatacatcacataattttggattgttcaccatatgataatattcattcaacttccaattggacctttatttcataa

SEQ ID NO: 33677 - DNA, 382 bp, Zea mays
agctggccctcatcaagaattgtatcaaatgatatcactagaaggatattaaattaaactatgtgaatgataccacttgaaggagtcctcaaaagattactccccctaaatgagttgtctcctttagaaagagtttttctccccctttagagatgaagaaatactccccttgacagagatcctctacttaggaaaaagcatgtgaaaattataggtgcaagacatggtttgaaaagactaacttcccttatgcataggtaacagaataagagttaactacttatgcatttttagcaacatggaagcatatgatatgaattatagtctaatcaaatattggagaagacatgtaaatgatactaaatgtagtctcaaaagatac

SEQ ID NO: 33678 - DNA, 392 bp, Zea mays
agcttcttcaccatgttatcacggttatcatgagaaggttgagcatgacactttcccttcaaaagagttaagctccttcttagccttccaacttcttccttgagctctttattttcttgtgtgatagaaatatcactaattcctgaaatttctagctcaatggaagattggcttgcttgataacaacaattgttagcacatggtaatatagtttcaatttcaacacatgtgcacatgtgaggttggtatgatttcaaattagttaacacaacctcatgagccatttctaacatgatatgtgaatccataaatttattatgagagcatacaagcatatcatgtttttcttgcaaagctagattttcaatgtttagcttttctaccgtgttctt

SEQ ID NO: 33679 - DNA, 210 bp, Zea mays
  unsure (1)..(210): unsure at all n locations
cgacttgtgaataacccttggcacaagtcgggctntgttccttgtcaccacanccatgctcatcttgttgttgcggaagaccccacttggtcctacnnacatttgattaggacgtggaacaagatgccanacctcattcctcatgaagttngtgagttcctcttgcantgccaacacccaatctgaatccccttaatgcgtcttcaccct

SEQ ID NO: 33680 - DNA, 386 bp, Zea mays
agcttcatactcggctgcattggtagaggccgggaatagcaactggtgggcgtacttgaggtgttcgcctccaggtgcggtgaagaggatcccttcccctgctccctgcagcttcagcgagccatcaaaatacattcgccacacttctgcagtttctggattatcaggtacttgctgttctgtccactctgatacgaaatcaactagtgcttgagttttgatggcagtgcgaggcaggaacttgatgtcgtgagatcccagctcgcaagcccacttggctattcgtccaatggcttccttgttgtgaagaatgtcccctattagaaaaccagtgactactatgactttgtggtcgtcaaagtagtggcgcaacttgcgggcagtta

SEQ ID NO: 33681 - DNA, 196 bp, Zea mays
  unsure (1)..(196): unsure at all n locations
tgtacataaatgttcatgcatcgcanagaactgaattacatacaattcatatattacattcaagcaccatatattacaagcatagttcagcagatgtacaataatattatagagacgtgttacaatagtcactcttctttcttcagaactntatctgcagcttcgatcagcagttggtaacgacttcgtctacaat

SEQ ID NO: 33682 - DNA, 387 bp, Zea mays
gctcaacagatggtgatgaagctcgaatacctagctgtggaagaattctaagaaaactcttgtattaatctttataaagaatattgtaacttgagaatcagattctactctgtaaatttgtccataccttgtaatatatttttacctttccatcgatgtatgaaatgctttgatgtggacgaaacttgtatttttttgagccgaaggtgaaaaacaccttcccttcttttcgtacacaacgaagcatgaatctgcttttgaagttgtatgcttagagccgaagcaactgtctgtatctgtatgatatgatgatgatgatgatcctatgtatgtctaaatgaatgtttatgaatgcaatgtatgatgtaatgtatcgtgcaaatgaat

SEQ ID NO: 33683 - DNA, 396 bp, Zea mays
  unsure (1)..(396): unsure at all n locations
cacattttgggacttacctatgttcattttgagaaagacagggtttgtagcgcatgccaagcaggaaagcaaagtggcgtccactatccacacaagaacataatgacaacggacatgccactagagttactccacatggatctattccgcccgatagcttacataagcatcaacaggagtaagtattgtcttgtaattttggatgattattctcgcttcacttgggtattctntttgcaggaaaaatcacaaacccaagagaccttaaagggattcttgagacgggctcaaaatgagttcagattgagaatcaaaaggataagaagcgacaacgggatggagttcaaaaactttcaaattgaaggctttcttaaggatgaaggcatcaagcatgag

SEQ ID NO: 33684 - DNA, 373 bp, Zea mays
ccacacattgggagtggagagatggcgagagtaatgtgtaccctccgtggcaagaggctggacgggggtgtatctgtgctctcggttggcgtgaacctgatctggtcttaagaaccccggtggtgagttgacatatgcaagggttaagtgctacatatgtcatgtgattggagatcctcagctgagtataatcgattcggatcgccgtaccttcacggttatgaagacttggtcactgccctctacgtagaactccagtaaagataaagggttgttaagaaattggctagtgcaggtcaagtgattgaactatggtagaaagaactctatagacaggttatcttacttagcttgacaagtaaaatttgatttt

SEQ ID NO: 33685 - DNA, 224 bp, Zea mays
  unsure (1)..(224): unsure at all n locations
tagtgaacacatgggtcagaaacntcggactaacaatggttgaatgtccctctactacggtgatagtggctgatgggacttgtatagtcaataataaggtggtaaagaacgctgaatggtggcttatgatcatgtgtccacactgatatgacagtntacctctcattgctttgatgaagtctacgctatgacgtggtgacgaatcacaaccctatgcaacgtga

SEQ ID NO: 33686 - DNA, 406 bp, Zea mays
ttaaccactgagctgcagctgcttccctagtctatatcctatttcacggggttttgaacgcgccaatgggaaaatcttcacagctgtcaagaagatgctccttgacgaaaaaagggcagatggaccgatctgctaccttaggcagtctgggcactaaacacgactgaatgcagggcgactgggtttactcccttccgccttctatacggatcggaggccatgaccccgcaagaaataaagcatgggtccccacgaacagtttcgtcagctgtccccgacgtggacgagccaacttcaaaggatctcattgacggagaccgagtcttcgccctacaagccctcaacaaataccaagcccagaccaaagcatggcgcgaccacacagtcatcccgagggagttcaacg

SEQ ID NO: 33687 - DNA, 153 bp, Zea mays
gcctcttctactttcttataatcgacaagttctgattctaaaaatcacttaagctaacagttcagtcttttgaatcctggcagaaattgggcagattcagttactgaattttttaaaagcataactcctaaactgtcagacctatggctggca

SEQ ID NO: 33688 - DNA, 381 bp, Zea mays
atttgtgtattgtataccctccagaaccctatataaggctaagtaccctatgatagggacatattcgcaaaatgccataacaatacaacttgcttgaaattattacctagcgaatgcatcctaggtgtgtcaaacatatgaaatgccaatgctgatgatgctacgctcaagctttagaaacagcaacaccaggggtgttacatcctcccccccataaaagaatctcgccccgagattaaaagtcctaggggaagtaatggaaaaggaaatgctccaagtttctatatcctgaatatcggacaaggcaggggtggttaggggctcactccattattacaacacgtatatacgctttacaaattacatgagggctacaagccc

SEQ ID NO: 33689 - DNA, 399 bp, Zea mays
  unsure (1)..(399): unsure at all n locations
agcttagaanaatctggtatgaatctgcgataatacccagctagtccaagaaaactccggacttgatgaacagttgttgggggtttccactctagaatatccttgaccttgctaggatctaccgcaattcctttagctgataatacgtgccccaaaaattgaatttcttccagccagaacgcgcacttgctgaacttggcatatagctggtgttcccttaggcgcgtcaatacaatccgtaaatgctgagcatggtcctcttcattcttggaatatatcaagatatcgtcgatgaagactaccacgaacttgtccaattcaggcatgaacaccgagttcattagataagtgaaatgggcaggagcatttgtgagcccaaaagacattaccaagtattca

SEQ ID NO: 33690 - DNA, 78 bp, Zea mays
acctagactactacgtacccaaaaagaaaagtaccgcccctacgcgacgcgctgtgatatcagcggtgcgtgcgccca

SEQ ID NO: 33691 - DNA, 395 bp, Zea mays
  unsure (1)..(395): unsure at all n locations
agcttttgaagaaattttgagcgatcgcgttgatgtctgtgccttctctggcgcaagaggagttgtagctattttgaagaaagcagggtgcgaacatgtgaaaagtttggcccaagccgaagctgctttctctgttgatgatacgaaggacccctcggccgaagcaagcttaattggcggaaaatatttcactgacatctgggaaaatggcgaccgagggatggcccacgaaataataaagaagagcgaaaaagatactcatgacgctagagaagcaatgaaagcagctganaaagctgcggaactcgaaaggcagataggtattacttaatagcttttaactttattggtttttatgacttcagactaatttatgttttctaccgcagctgagc

SEQ ID NO: 33692 - DNA, 398 bp, Zea mays
agcttataacaggagaatagaagcaagagctcgaccatatgtcataatagaaggggagttatataagcgtggggtctgttccccattgctcaagtgtttatccagatccgaaggtatagaattaatgaaggaaatacatgcaggcctgtgcggatctcacattggatctaggcccttgcttggaaaagtttttcgccaaggattttattggccaaaggcagcttcggatgcagcggatctggtccaaaagtgcgaaggttgtcagaaatgtgcaagagatcaaaaacaaccttcgtctttaacccaattaatacaacccacttggccgttgcaaaggtggggcctcgatttactgggcccattaccaccagcacaagggaacctaaaatatttagtag

SEQ ID NO: 33693 - DNA, 155 bp, Zea mays
  unsure (1)..(155): unsure at all n locations
gcttgatagcgacggctctcgtaacggctgacagtgaaaattctctgctgttgganagaacgaaagaagtcacaatattatattgaagagccaactcgtagagagtatgcaacagcacgaaaccttgtcttctagtgggatatgttactaagctc

SEQ ID NO: 33694 - DNA, 378 bp, Zea mays
agcttctaaagggagaacacgtgataggtttgactaacgtacaattcgaaaaagatagaccttgtgcagcttgtcaggcaggtaaacaggtgggaggagcgcatcacagcaagaatgtgatgaccacatcaagaccacttgagctgctacatatggacctcttcggacccgtcgcctatctaagcataggaggaagtaagtatggtttagttattgttgatgacttttcccgcttcacttgggtgttctttttgcaggataagtctgaaacccaagggaccctcaagcgcttcctcagaagagatcaaaatgagtttgagctcaaggtgaagaagataaggagcgataacgggtccgagttcaagaactttcaagtgg

SEQ ID NO: 33695 - DNA, 389 bp, Zea mays
agcttcgggtctttagccttgcaacttttgtcaatatgacccgaaacaatctgagaatcagttttaaggatcgccctcctgatccccatcgcctttagtttccgaaggcccaggagcaaggcttcgtactcagcaatattatttgtgcagctgaagtccagtcttgctgcatagcaagttttaaccttggacggtgaaaccaaaacagcagctgctcctgctccgaaggttccccaggagccatcacaaaacactgtccatgcttcggcatctttatttgcttcttcgccctgagcccctggcgtccagtcggcaataaaatccgccaatgcttgagactgaatcgaggatctgtgcacataatcaatgtaaaattcattaagctccgc

SEQ ID NO: 33696 - DNA, 247 bp, Zea mays
atggtacactcaacttgaagctgttgactttgaccggctttactagagagagatgtacattggaatttccttctgggttttgcgaatcaaccagacctcaccttctagaactcaaagtactcaggaaaaagacaacgtcatcaatctatgagatctgaagagatacgattctctccccaaaagggtaagaacgacttactgagaatcgtataaccactttgcgacgaagtgcgctaagtacttctaa

SEQ ID NO: 33697 - DNA, 193 bp, Zea mays
attttttctaataccaaacttcgcttttgggtccttggaagttgataggaaaggggattaaaaaggggggtctcaaaactggattccaggtatttttgggcctggtgacaaaaggtgccaagccagaaatcccaagcctgggaaatttttgggatacattcgagaacttgaactttcttctaagaggtttctg

SEQ ID NO: 33698 - DNA, 220 bp, Zea mays
  unsure (1)..(220): unsure at all n locations
taatacacccttaatagctagtgaaccatcacttcttctanagacagacacatctacanttngtaatagacagntatatcccatatggcataatngactaacagataacatantatatccaagagactctactataaacacattagagatagagtgctcattagaaaatggcaatttacctaaccctntttaccttggccttgatcccatcaccgaatat

SEQ ID NO: 33699 - DNA, 410 bp, Zea mays
  unsure (1)..(410): unsure at all n locations
gcttctgagatgtntgatctgcacaatgttgtcatatctatacctctgcccgcagttcgggaggctccaagtgtcatacagatagatggagagtggaagtaaaattttctttcctcttcaatttattcatgctcatgtttactgaagcatatacttgtaaatggccttatgccacttggttgctgtcctttttttatgtgaggcctttttattgttaatgttaacaagtcaaatgtgatattcatatccccaagtttttcgctgttataactggtatatcaaactgtgacagtggacttttgtgtatataacttgacttctgtatcctagatggtccgagtaagctgtgcaatatagatttaaataagatatgcactgtagatctgaatacgctgtgctactgcattatt

SEQ ID NO: 33700 - DNA, 254 bp, Zea mays
  unsure (1)..(254): unsure at all n locations
ttacatgttccacccaccttctcaaatatctgcactcnctcgaccagatacgtgcgacgtcctgcggcgtcaaattcttaaacttggtcctgtgtcatattccctagacgcttatagtgttgtcaaccccacatgcaactgctttttttagctcaaatttaacatttttgtgccagttgcctgttacacatttcagaatatgcttgtacttaaccataatgctacaggttagttacatctgatcatgctgatac

SEQ ID NO: 33701 - DNA, 410 bp, Zea mays
gcttcgtgaaaatgttgtccgaagctacttatcatgattttcccttttcaaaacattcttccgaagatcgatgtcatgtccccttcttgtgccgtatgcaacatgatgtatgatgcttatgccatgcgaaatgatgcgatgatgttatgctgtgtaagatggtgtttattctgaagatacacacattcctgcgacaaaacacataatcttttgaatcagcattgtctttttactataagcctcccttaggagcttcttcgccttttacttcagcggaatcagcgtttatttttcgctgtaagcctcccttaggagcttcttcgccttttactttcagcggtattcgcgttgacttttcgcgcttcgccttttacttaggcgggatcagcgttgacttttcgctgtatgct

SEQ ID NO: 33702 - DNA, 411 bp, Zea mays
  unsure (1)..(411): unsure at all n locations
gcttcttcgctttataagagcttggtggtagttttggtgggtttggtagtaattgggacagaaaattcaaaagacctgtgaagctagtatcagaccatccgacgctagccttcaacttaagaagttctagaactgtacgcagtgtagtaaactctttgtcacaaccctttgattcatcatataaagattattttgaggcactttctagtccctccattttagatagccctttctgcgatctcatagaactcaacatttctggttccatatggcgcaacatctcttcgcaatcaaattcttcaaaatcttgattagcatccacataatccactttaccatcaactntatctaaaattctgacaactctgtcgtcattaccaggcacttcacacggatccaactcaccatgtt

SEQ ID NO: 33703 - DNA, 411 bp, Zea mays
  unsure (1)..(411): unsure at all n locations
agcttctgctatgggtactcccttcgcccctcgttctcctgatgtacctcttcaccctcctcctccagatgtgaatgagtggtaccagcaggcgtatggggtacctttctcttcagccgatgacgtcgaagaagaaacttatgttgatgatccggagcagtttgacccgcccccatatcgcggggatccgggtcaatcgtcctcttaccctccgccccaggacccgtctggcagtgctcctcctccgacccagtctggagaggaacattttgcctacgacctggcgcaacacctctttgctcctcatcaacctcctcctcactggtgatccttggcttggcgcgtctctctctcttnttttttggttcttggtgccaaaaagggggagatacgttactattcagtacttta

SEQ ID NO: 33704 - DNA, 239 bp, Zea mays
  unsure (1)..(239): unsure at all n locations
cttatctactgacccctgagccccgtgagaattagccatctcttggtcattgctaccattgcaggcccaccaaatcactatcgccgtgaggtcccggtcgaacccgcagtgggcccagtagggccctgctgtgacatatntccgtgagtctaatgacaatttacagactttacccggacggcttgttggagctcagtatgtcctgcggggtatactggactcttcccgacacacacaca

SEQ ID NO: 33705 - DNA, 389 bp, Zea mays
agcttatgtaactcgtcatgaatagttcttctgtctgtagatgcaagaatacttaaacaatggagctgttagcaagcgaaacttgattgcagtttaagcactcagatagttaaacaacatgagaatccagctcagatttggctcatttggataaaaaaccaagctccagctaaaattcagaagagccaaagtgcagaactagagctggtttgtgtatcatgattcacaaacatatgcaatgtgtttaaaatattctcagatatggaagttcaccaatgataaatactaggtaaggtgaccacatgatacaagttagcaagcctctcattatgagatacagtaaacagcactcccctggaaggagataaacaaataccaaaagaaacatg

SEQ ID NO: 33706 - DNA, 351 bp, Zea mays
tatgcgaatcgactcaagcctagctactggtgcataggtttcaccgaaatccaaaccttcgacttgtgaataccctttggctacgagtcgagctttgttccttgtcaccacaccatgctcatcttgcttgttgcggaaaacccatttggttcctacaacattttgggtaagacgtggaactaaatgccaaacctcattcctcgtgaagttgttgagctcttcttgcatcgccaccacccaatccgaatcttggagagcttcctctaccctgtgtggctcaatagaggaaacaaaagagttatgttcacaataatgagcaacccgagatcgagtagttacccccttatgaat

SEQ ID NO: 33707 - DNA, 201 bp, Zea mays
ctggagcaccagttgtgaagctatcatgtttattcttactaccgaaccttaccgttggtggcacgctatacttcattggacttgggccgtgcgtcgagcatatggtgctagatccgctagacttcactatactactctgtggatccaaatagctctttgtgtatttgccaaccgactaagtgagtctttcctgcagtaatt

SEQ ID NO: 33708 - DNA, 388 bp, Zea mays
agcttataaatcatgtgaactcagaactgaagtgatcctaaataacttgagattagcgatggctcgagcccaagagaatgactaaagcaggcaagtttgctgatgcatagcctacggtgaatggctgaaatatgagccctcaaatcaactgcaaccggtcatcatatcatgcttgccaaagctgggtcgatgtgcaaaagctgctgaggactgtgatatgtgtgatgttaattagttatgtcatatgaatttgtgtttatatgtattgttagttgaaataatattggattgtctaactctgtatcaaaattatcaaactgcctgtctaaaaatagggataaaaacacaatgatcataatacaacaggggcaaaaatatatggcaaaat

SEQ ID NO: 33709 - DNA, 383 bp, Zea mays
agcttggcacatgtgcaaaaatacttatggttctagaaaagaaaaagaaacatgtagctctgctccaacacatcagctgcagtttatagatttgagtagagagagatatttttgttcattggatgaaactgttttagaaaacattttataaagcaacttttcatagtagaacaggtagagggagctagtaggatacgctactctttttatcacggcatttaaatttcaagagcaagaattcactcaataatgccctaaaacgtttggagaggaatccaggaccccttccagatcgtgactatctcatctcagctgatcatcagccatcatgatcatggctgttcctatagaaagaagtaagaaaaaaaattaaaatctagctg

SEQ ID NO: 33710 - DNA, 397 bp, Zea mays
agcttgcattgcatgtttaaatttcttgtattgcatctatggcttgtctaacctagttaagataaccgccaacaaagcgagtgaaaaagcttaattcgggctcaaacttgacaagtcctagtgtttaagctttttggtacttaaatttcatttactatacaattgttggttcttgagatatgcatgtggtactgcacttagggggagtattcacaactcaatttgttcatgaaacctcgtgttcaaaaccaaaatgcaaatctcaccatttgtctattttctctaaaaactatctagcctatggcacaatattttgaaaaatatgaaagaatatgtgagggtaccaatacctgtcccaacaggtgttcttttgtgtgcttataagttgggatttggt

SEQ ID NO: 33711 - DNA, 324 bp, Zea mays
  unsure (1)..(324): unsure at all n locations
agctttctgccacacactttgatgctacctgaaggatctgtcaataggcaaagttcccagaatcagcctttcattcaaaatgctttcagcatcttatgagttatattagcttatatatgtgataagggtattataccttaaacattatgatccatggaatggaacccataccgaaggagaaggcagtgacataagcctgaacaaagtagttgggcaaaaaacttacagattccacatctaaaatccagtgttcggacgaaatgtgtcagcgtccaacccnctgcctagcccacacttcgacagcttcggcgttcatgcgctcgt

SEQ ID NO: 33712 - DNA, 389 bp, Zea mays
agctttggcactgtgggggccttctttctccgaaggtcctcaaaaatgtgattgacatgtgtttttagtatgatatggataattacagggggcttcggcttcgagatgaagggtttctcttataagggtaaagagtagcccgaaggtgataagaatggacgacaaagttgtagccaaagagcgtcggttttgatgtgatgacgaagatcaagtatgataatgactcaaaagggacaaagactattcagtccttaatattttgtgttatgataatagatgaatgtcagggacatggatgtaattttacccgggttgcgtcccgtgcctataaatagatgaacagtaacaccgtactgttcacgcagatggtattcactctcttgcatcca

SEQ ID NO: 33713 - DNA, 236 bp, Zea mays
accgagtaagaccgcgcgcctgaccggaccctgccgttcattctgccgtggcttggtaccgtaactctatgccctaatgactggcgcgtggtggcgacagaccgcgcgacccgcgctgtgtctgcaggtagtcgacactcacacaccgaatggggacgtggactccgacgtatgacaccgcgacttatgcgcgtacccacgcgaatgacgtgcctgtaccgcagaccggtaattat

SEQ ID NO: 33714 - DNA, 368 bp, Zea mays
agcttgtatagaggaatcgcgatatccgtttgtattctatgcaaaacatataacatcgatgtcctaccacatgattggcgagaaaagttacctaaggcacccattgctatgtacatgtcattatccatgattcatcgcagagcgggaggcaaaagaccctgcaatattatatggcaattatgagcttttaacccttggaggttgcatccatcatctgtaatacatgttgctaggctataagcatatccatctggaaactttacacttcttacaaagtcatataaagcacgtttttggtttatatccattggggatggagcacgaggagcgctatatgaatctccatcacgcttcaagtgcaaagaatt

SEQ ID NO: 33715 - DNA, 369 bp, Zea mays
agctttgggaactatgcccgtattcatctgcctgagccggtactataagtgcttgccagatgccctcgttccggtcgaccacgaccaacacccgacataagacttccctagttatttagccaagaccagagccatgatagttctcatggtagcactgttttcctggctggtcactccatgttccaattaatatgcaataatcttgtttaaccatcgggttaacaacaataaagtaaacttaccatttggaacattaatatcataaacaggagtgactgcataaatttaaagttgtagcaatagcatagctacttgattagataataatcccaggttaaacaacgagtaaggttggaaaggctatgggta

SEQ ID NO: 33716 - DNA, 382 bp, Zea mays
tcgacgtggcgcaaccgggttcaccggcgtttccactgcggctcacgcagaccgcccacgtcgcagtgactagaatcacggcgataagctctgatgtgtgatcctatccactcctccccgcgagatctttacttcatcgaagttatctccccgccagcgaacacaaatcccaacgacggcgtgaatcacgacgtgtgggtcatcggcggtgaaggggaaagaaggggtatcttctgcagttactgtaccatggtaaaaacctgattcagtcgcctgacagatcatgtttaggtcacattttctctaaaatttgcatgtgaacttcatcaaacctctgtaccaaagttgtagagctaaagttaatcttcaactttgccaaaat

SEQ ID NO: 33717 - DNA, 367 bp, Zea mays
ctgaggcctgcagcttgcgaagaatccaataccttactgtgctagacggcgatgccggagccaacccatgctagtcttagcaattaagcaagcgtcgagatcagctctactcaaatccaccaagtatagctgaccctctaacactcccttaaatgctattgaatcatcactccttttaatgacagcgacccctatatcagttaaaagacagttgcagcccattctgccatatttgagaaacggaaagcaaattgttgtctataagaactctaccaagaacaaactattggagacttgatatgggcaatgagatataagccattttacccaatcctttgaccaaccttgatttcctcccccaaatgtg

SEQ ID NO: 33718 - DNA, 383 bp, Zea mays
tgtgtttacacgaaggaaagtgggagcgctatttgttttttgatcttgtatgtggatgacatattattgattgggaatgacattcctatgaaggacttaggggaagcaacatatattttgggcataaggatctatagagataggtcaaagaggcttataggattaagtccagatacgtacattgataaggtgttgaaacggttcaacatggaacagtccaagaaagggttcttacctgtgtgacatggtatacaccttatccagaagcaatgttctgtgaccgcatatgagcaggagcgcatgagtaaagtaccatacgcctcagcaattggatcaatcatgtatgccatgataagtacacgcccacatgtttcatatgctat

SEQ ID NO: 33719 - DNA, 361 bp, Zea mays
  unsure (1)..(361): unsure at all n locations
ncagcttgtttatactcaaacttacgaaaattaatttaagggacttaaagtagaaaccatagggcaaccatatttttcctagcatgcctaagacatgttattcacaagaaaaatctattaacccatagtccagtggaaagaaattacactcttaattattcatgaaatatagagaaaactttaaaaggtcctaaaaaaataatcctaaggtgaaaacaccccataccttgggataattaatgttttgttattaaaaacatacgaaaaatatgaaatctgctgcttgacattttgtaaataacatggtagtggaaagtgccttttggccttaaacttttggcattcacaactaaattacctc

SEQ ID NO: 33720 - DNA, 383 bp, Zea mays
  unsure (1)..(383): unsure at all n locations
tccacgtgttcgacgcgagctggcatccgggggcgcgctcanagcacgcccgtgcgcgaacccccgcgcacccgcggccgcccgtgaccacgcccgcgccacggctataaagcccgccccagtgcttggctgccttccccgttacctcctccgtacctcgccggactcgcccgagccagccattaactccggcgacctccccgcgacccgccagtgccgcccgagagcaaccaccgtggccagcccctctcccgtcctcctccgttcgatccaagccctcagagagcttcctggtgaagccgtgagtcttgctcaagcttgacccagggacccgcgtcaccggaatagcccaatcgtgcgcaccggagttcaagaacccgccg

SEQ ID NO: 33721 - DNA, 363 bp, Zea mays
agcttgccttcgcttcagtataccactccgtagtccaatggagttgtggaacgcgcaaatggcaaaattttcacagctgtcaagaagatgctcctcgacgataaaaagggcaagtgggccgatttgttacctaaagcgggctgggcactaaacacgactgaatgcagggcgactgggttcacccctttccgccttctatatggatcggaggccataaccccgcaagaaataaaacatgggtccccacggacagtctcgtcaactgttcccgacgtggacgagcccactttgaaggatctcatcgatggagaccgcgtcttcgccctacaagctctaaaaaaaaccaagcccaaacaaaagcat

SEQ ID NO: 33722 - DNA, 386 bp, Zea mays
tcggctaaacgatttttatgtcatcagctgagaaaacaaattctcgctgagctacaaccttgacatgttcgcaaccagccttttctaagatggatgtggccccccgcgcaccagcaaaggcgcaaaaatctcctcgatcacttagaatttcttcaaaagctttggcttccccgttaatccactggacaactccatcagggttgccgcggatgaatctctgttcagaggaatatgccccaaccctagtaaagttgtcctttaatttcctgtcgcattctaaggatatttcataacacctttctttggaagcacaaagctcgtcagtgttcttttgtgctcttgatctttcaatctcgcaaatctcatgcttcactacctcaacttca

SEQ ID NO: 33723 - DNA, 374 bp, Zea mays
actctgctttgcactatcgcgtatgcaacgactttttatttttccgacttaaagacggaatgactttttagtccataaaggcctgagctataatgggatcttctgtatggggcatgattgtgatctcttatacgctgcgacatgtgcctataaagatgtgaacggtactcccgtactgttcacgcgaacttggcatttattctcacgtcgcgctagtacccctgatttccttctaacccaaggtacatttataatctgtcattgtggatacagtaacgcaaataaaaataagttgataataacatttaaaggtgctatattattttttcatatcttgtgtatgaatccttcttcatcatttattgggatcattg

SEQ ID NO: 33724 - DNA, 377 bp, Zea mays
  unsure (1)..(377): unsure at all n locations
ttccagattgtatttaaacttcaaaatcggatatgatatgtatccnggggggcaaaaacgaaccagagatgtttttggtgatggtggatctcgtggtgaccaaaacgtggtagaactcaaaactctaaaggaataaactaagaccagcaactcgacacaaccgatgcaaccaaaaactcaacaagccctaactaagtagtactagtaaatgctcaatggtttataggattgcggtaaaactaatctactatttttttggctttttctggactataggagataagaaaacaacgaagaaaagtaaatctctcaccgataaaccttgctctgataccaactgatgtgcaccccgtgggtgattgcccgatctttcgatg

SEQ ID NO: 33725 - DNA, 380 bp, Zea mays
tcggctccatctatattgtggattgcttttgattctatctagtttccttcggcttttctagcaacttcctgactcccatgaacagcaatgggcccttgttccgaaggtatcttcatgcatagatatgctggatgaagtattgcttccaaagcattgagtgtcccacgaccaatgattgcattgtagggatattccatatcaacgatgtcaaacacaacctattcagtccttgtgttgtggacgaagccgaaggtcactgacatcatgattttgccgagtgctgcaatttgccttcctccgaagccacaaagagggtgtgtagcatcatgaatcttgtcttctggctcttgcatctatctaaaggccttagcaaatatgat

SEQ ID NO: 33726 - DNA, 361 bp, Zea mays
agcttgtgaagattcttcatcccaacatgggctagtcggcggtgccagagccaacccatgttagtcttagcaattaagcaagtgtcgagttcagctctatcaaaatctactaagtatagctgaccctctaacactcccttaaatgctattgaatcatcacttcttctaaagacagtgacacctacatcagtgaatagacagttgtagcccatttgacataattgggatacggaaagcaaattgtaatctaaagaatctacaagaaaaacattggaaatagaatggtcagaagatatagcaattttaccaagacctttgaccaaaccttgatttccatccccgaatgtgaatagctcgtggg

SEQ ID NO: 33727 - DNA, 378 bp, Zea mays
ttatcaaatggacgtgaagagtgccttcctcaatggaccaatcaaggaggaggtctatgttgagcaacctcccggctttgaagatagtgagtaccctaaccatgtctataggctctctaaggcgctttatgggctcaagcaagccccaagagcatggtatgaatgccttagagatttccttattgctaatggcttcaaagtcggcaaagccgatcctactttattcactaagactcttgacaatgatttgtttgtatgccaaatttatgttgatgatatcatatttgggtctactaacgaatctacatgtgaagaatttagtacgatcatgacacagaaattcgagatgtcgatgatgggggagttgaagtatttcct

SEQ ID NO: 33728 - DNA, 361 bp, Zea mays
agcttgacgcctttcgccttgagacatcggaatgtcgtttcaaggtcggaggctttcctcgtcttgactacgatgtcatcaacgtaggcctcgaccgtgcggccaatgtgttcgccgaacacatgtttcatgcaccgctagtacgtcgcgcccgcattcctctaaccgaacggcatggtgacatagcagtacatgccgaagggtgtgatgaaagaagtcgcgagctggtcggactctttcatcttgatttgatgataccctgagtaggcatcgaggaaagacagggtttcgcacccagcagtggaatccacgatttggtcgatgcgaggcaaagggtaaggaaccttcggacatgctttgg

SEQ ID NO: 33729 - DNA, 371 bp, Zea mays
ttgcgagagagggaacggatcccacgtctttttataaaactgggggtggggaacgaaaggtgcactggccaattctttggtggtggtgcgtgagccctatcggggagctttcaaaacgtgtcttgggaaagtcctaagccgcttcttttataagtacaaggaggtgaccagtctatacaaatgggggtgcagctatgcgctaatgtgaacggcggagaagtgcttgagcactgtaaaagcgtggccggcggtgcggccccaggtcccgtcccctgtagcggtgcgaccggctccactgagttgaagccgagccctgtagcgtcgtggccggtgatatggtttggtcgtcgaggtggccttgaagttcgtgt

SEQ ID NO: 33730 - DNA, 362 bp, Zea mays
agcttgaataattctatataatatagattgctccccctaaatatgtgttttgagaggaatacaattttttggtttcaaatgccaagtgcacataattaggttaatgagatcatgtttatatcatagagaatgtgaagtgcattgtgtcatagtataagtgtgatgctcatgacagtttatgcacttatgaaagcatgttataaatatctcaagcatttatccttaaggatttcaaagtggcttaaggaccatccacctttagaacaaaggcaacttatcctcgttacaaggttaagctttaagctctttgacaataaaattacttcacctagttttaacaaagatgcaagaatgaatgtttg

SEQ ID NO: 33731 - DNA, 361 bp, Zea mays
tctaaagggagaacatgtgatatgtctaaccattgttactttcgaaaaagatagaccttgtgcagcttgtcaagtaggtaaacaagtgggaggagcgcatcacagcaagaatgtgatgaccatatcaagatccctggagctgctacatatggacctcttcggacccgtcgcctatctaagcataggaggaagtacgtatggtctagttattgttgatgacttttaccgcttcacttgggtattctttttgcaggataagtctaaaacccaagggaccctcaagcgcttcctaaggagagctcaaaacgagtttgagctcaaggtgaaaaagataaggagcgaccatgggtcccagttcaag

SEQ ID NO: 33732 - DNA, 346 bp, Zea mays
agcttctatagggagaacacgtgataggtctaactaatattactttcgaaaaagatagaccttgtgcagcttgtcaagcaaggaaacaggtgcgaagctctcatcatgccaaaaatgtgatgacaacatcaagacccctggagttacttcatatggacctcttcggacccgtcgcctatctgagcataggaggaagtaagtatggtcttgttatagttgatgatttttcccgcttcacttgggtattctttttgcaggataaatctgaaacccaagggaccctcaagcgctttctaaggagagctcaaaacgagtttgagctcaaggtgaaaaagataaggagcga

SEQ ID NO: 33733 - DNA, 372 bp, Zea mays
tcgtcttgaccatgcttttgtatacccgcaatctgattccgaagatacctgctcgcatacttggaaaacattgtcaaatcatgtttttgaggaccttcagaagccgaaggcccccaacaggctccttctccgggcgacgcctgactctgccggagcagtcttctttgaatgcacatgtgtcttttgtggccactgaggcccgaatacttttttatcgtagtataaggttgtgttccttttcctcccgttttgtgtatctggccccgttcgtcggtagcagggtggcttgcccaagtaagagtcatttttcgtggtaggtgacgagtaaggtatccgtatcccagaggcgtaggagtcccttcgctcggtcgg

SEQ ID NO: 33734 - DNA, 368 bp, Zea mays
agctttgcaagaacagaggacatttttttaatcaattgagatacttccaaattattggttccctcatgtaccttgctagtgcaactagacctgatatcttgtttgttggggtgcactaaaacttgtaatgagatacttgagaggtacttttgcgtatggacttcactatactgggtaccttgctgtacttgaagggtatagtgattccaactggatctcagatgcatctgagataaaggccacaagtggatatatattcactattggtggggctatagttccttggagggcttgtaagcagactaccttaacgaagtctactatggaggcagaacttgtagcacttgagtcagccactactgaggcag

SEQ ID NO: 33735 - DNA, 386 bp, Zea mays
  unsure (1)..(386): unsure at all n locations
nttgcttacgtggtatgacacatagatccacatttagagcatgctctattatgcttttgtccactccacacatgtcttttgctgaccaaacaaaaacatccttgttgtgaaacaaaaacctttggagattagactcttgctctgaagttagttgattgccgaagaaaaccatctactctgcaacatcatcaaagagaagtaccagctttgcctgatccgccaaagatgccttttcttttactggcttttcaaattcctagatttgcacatcagcttcatctatgttaagacaatctttggctcttgcagggtcccttcttgccttcttcctgcctcttggctaccataaactgatatgaccccttgattgttgggtatcttcatgc

SEQ ID NO: 33736 - DNA, 381 bp, Zea mays
tgtgaaggttcttcatccccacatgtgctaagcggcgatgccacagccagcccatgctagtcttagcaattaagcatgcatctagaccggcctcctcttttgcaaaatcaactaagtaaagcttgtcgtctaatacacctttaaaagctaatgaaccatcacttcttctaaagacagacacatatacatttgtaaatagacaattatatcctatattgcataattgactaacagatagcaggttatatccaagagactcaactaaaaacacattagagatagagtgctcatttgaaatagcaattttacctaatccttttaccttgccttgattcccatcaccgaaaattattgaatcttgggaatccttattcttgacgt

SEQ ID NO: 33737 - DNA, 301 bp, Zea mays
acgaaacgttcagtcatgagcccaatctgcccaccccaatatattatcgggcctctcggatccactatataatcgacaccgcccaccagtggtgtacattcacgcacctagggtttttgcgccgacggcgccgccgccgccgtagccgcaacaatggtaacttcctatccgtcccctaattctcgttttccatggagctggcctgcgccgccttggatacagtgattctctgacttgcgtgatggcgtacttcagtggttgcgcagtcgtctcacaagaccttacggatcaagaagaagct

SEQ ID NO: 33738 - DNA, 364 bp, Zea mays
  unsure (1)..(364): unsure at all n locations
agcttnctgtgatagtatatcatactgttaagcatgttagctgtgcttttaaggaccttcataagacgaaggcccccaacagtagcccctcgcagtattaatttgttcttgtatcaaacaaattcagactgcgacgtgaacgaaggcctttagccgaaggtctgaaaaaacacctttccttcgctagaatagcaaaagtcaatgacaaatggggcccgcccagttgcaatgcactaggcatataaatagaaacccacaacggcaacatttgttacgccatttcggctgcttgcgctcttttctcaaatttttaacccttgctatcagctctcgcttgattttggagcttcgtgaaatacacaac

SEQ ID NO: 33739 - DNA, 386 bp, Zea mays
tctaaaaggagagcacattttgggactaacaaatgttcattttgagaaagacagggtgtcagggaccataattaggggtatccccaagactcctaatctcagctggtaacccccatcagcacaaagctgcaaaggcctgatgggtgcgattaagtcgaggctcggtccactcaaggacatgatctcgcctcgcccgaggccagcctcgggcaagggcagccgaccccggaggattcatgtctcgcccgagggccccctcaagcaacggacacaccttgggctcgcccgaggcccagtcttcgccaagaagcaaccttggccaaatcgccacgccgaccgaccgtatcgcaggagcatttaatgcaaggatggcctgacaccttatc

SEQ ID NO: 33740 - DNA, 402 bp, Zea mays
  unsure (1)..(402): unsure at all n locations
ctatannaaactcacgctttggaattgaaactaggtgttcactacaagcattatttgttaaatctttacacctagtacaaatttcaacatgttctacacacgaattggatttatttgctacttctaatttcgcatttaaatcattgttgacacctttcaaagtagaaatggtttcatgacaagtagatagttcaaaagagagcatttcatttcttttaacttctacagcataggatttttgtgcctcaacaaatttatcatgctcttcatacaacaaatcctcttgcttttctaaaagcatattcttttcattcaaggcatcaattaattcattaattttgtctatcttagatctatctaagcccttgaacaaacatgaataatctacttcatcctcatcac

SEQ ID NO: 33741 - DNA, 181 bp, Zea mays
gagacgccaaacatcgaacggagccgaacaaaggagacacccaaaaaaggaaggaagagatccaaagagagcctagaaccaacagcccaagctgcaatcccacccagagaaggaaagccctatggccactagcgccaagggaaccacgccccgggacgcagacagaagacacactaacggg

SEQ ID NO: 33742 - DNA, 361 bp, Zea mays
tagtggctacagcaatgtggtggaaattttgtttatcaggcagctcacaattttgaatcctttcttaagattgcacacaaagctgcacaagactgcttaagcgctcatgaagtggtccaaggctcttattgggaataataaattactgatgcttgcggctaagcaactgatttggatctttgatgtggcccaagattacagacccctaagcaaccttgagcttacgttacataagcaactcaaaaactgatttttgggactcgcagcggtagaaaaactcagggcgcgacaagcgtccatgttgacaatgatcaaagcatgccacacaaattctaggctattctttctcacaataaatggc

SEQ ID NO: 33743 - DNA, 372 bp, Zea mays
tgacactatgaaactcagcttactcgcttggctgcctgctactaccgctggaccgcttcaggagacgcgctaccttctggaggccggaggccagaacagaaacgctgactccccgacgcttgacgttgaagatcttgaccgcgaagtctgacagatggacatgcttcgtcatcatgtgcaaaggaagctcgagcttaaggaccgccttactgagcagcatatgcccgactgacgaagctttcgttattattcggaatacactcaggagagcctatccgaatgccttacgaaaaccaccgaccttcggagggactttacgaccatgacgtatggcttgactataatcatcagggcagaagtgtatctgatgat

SEQ ID NO: 33744 - DNA, 285 bp, Zea mays
agctataactctcgcgatacctattctcattccttctccaaccatggtgaggtcattatccgcccgtgatattctcagcatacttacctccatttgttactctccgtatgtgtactgtttgttttcttatctgaatggatggatgtatgtatcgcttgcaatcgcataagaaacgatcctgtttaaaagcccgtaggactcgcaggataatcccctgaccactcatggttggtggaggaaatgtcccttgacccatctctgccctattcatttttaatctccctc

SEQ ID NO: 33745 - DNA, 379 bp, Zea mays
tctaaagggagaacatgtgttaggtctaacaaatgtaactttcgaaaaagatagaccttgtgcagcttgtcaagcaggaaaacaagtgggaagtgctcatcacatcaagaatgtgatgactacatcaagacctctggagctattgcatatggacctcttcggacccgtcgcctaccttagcatcgggggaagtaagtatggtcttgttattgttgatgatttttcccgcttcacttgggtattctttttgcaggataaatctgaaacccaagggaccctcaagcgcttcctaaggagagctcaaaatgaatttgagctcaaggtgaagaagataaggagcgacaacgagtccgagttcaaaaacctgcaggtggaagag

SEQ ID NO: 33746 - DNA, 378 bp, Zea mays
tgtgaaggctcttcatccccacatgtgcttatctgcgatgccacaaccagcccatgctagtcttagctattaagcatgcatctagaccggcctcttcttttgcaaaatcaactaaataaagcttgccgtctaatacacccttaaaagctagtgaaccatcacttcttctaaagacagacacatctacatttgtaaatagacagttatatcccatattgcataattgactcacagatagcagattatatccaagactctctactaaaaatacattagagatagaatgctcattagaaattgcaaatttacctaacccttttaccttgccttgattcccatcacccgatataaatgaatcttgggaatctttattcttga

SEQ ID NO: 33747 - DNA, 354 bp, Zea mays
agcttgatctaggtacatattcttctcagcctcattttttataaagcttgatctaggtacctcacacaacctaacagatcaaagtaatacagttcaccacacatatttacaacaaacagaatgtttagaaaaaatgctcttggtggaatgcggacagccattcatttactcattgcgccatcattgtttccaaatgaacagatgctagggtctaacaaatttgatcatttgacaccattttcacagagtgcacttggccttccctctggatcctacacagcaaaatacatgcctagctgggtaccccaaaataaaaataaccaacaactttaaaacttcggcagaagccaccca

SEQ ID NO: 33748 - DNA, 381 bp, Zea mays
tctaaagggagaacacattttgggactaacatttgttcattttgagaaagacaaaatttgtagcgcatgtcaggcagggaagcaagttggtgttcatcatccacacaagaacattatgacgactgacaggccactcgagctcctacacatggacctattcggcccgattgcttacataagcatctgcgggagtaagtactgtctagttattgtggatgattattctcgcttcacttgggtgttctttttgcaggaaaaatctcatacccaagagaccttaaaggggttcttgagacgggctcaaaataagttcagcttaaggataaaaaagataagaagcgataacgggacggagttcaagaactctcaaattgaaagctt

SEQ ID NO: 33749 - DNA, 352 bp, Zea mays
agcttttagctttgaagcttcggctttgaaaacagttttttagtgtttccgaagatgtctgaagctgctaagaaggctgctgctgagatgaagctgagtcttgatgaagagaagaacttaggatttcttatagcgatgtcaaagaccaatacagaaaaaatcaccaaggagattctggaagggctgtctgaagatactggtgacagtgaaagttatgatgtggacagcggtggcgaagactccgaagatcgcccctggcgaccaagccattcagtttatggtaaatcaactatcaaagagaatcatcttgttaacatgagaggaaggtatttccgggatttgtccgttgtga

SEQ ID NO: 33750 - DNA, 373 bp, Zea mays
ttgcctcccaaaggcagggctacccctcggagtatcgcgccgcgacttcccgattcatgcgggaagcctcggtccacactgggcgcgcgcgcaacacggcgcctgcggccccgggttgcctcggcaacgagcaccaccaccgcaaccgtcgagcccacctcgacgagagggtgcgccgaggctaccaccccaggcgtgggggacgctacgacagcggggaggatcggagtccctcgcccgaaccacccggtccgcaggctttcagccgggccatacgacgggcgccgttcccgacccggttccgaaccccgactaccatcacaaagtactcgggggagacgaagccggaactgtggctcgcggactaccgact

SEQ ID NO: 33751 - DNA, 307 bp, Zea mays
agcttgagctggctcgtatagctcgcgagtcacaacaaaaataatatacatgtatattacaagaatataatcaattgctagttaattcataataatttaacagaagaaaagactaacaatactcataatttcatatatcacatcatttaaaccccaaattaacatacttcatagtatatccaatacaagtgtaggctttgtttttctgatacatgctagctcattagagctaatgagctagctcgagctcgtgtcgagctggctcgttaacgaaccgaaatgaaatgttggctcaactcgtgacaaa

SEQ ID NO: 33752 - DNA, 374 bp, Zea mays
tgataagctcgactcaagtgcttcttttgcatttgcaagactaactatagaggttttagcaatagaaatttctttctctttatcctctatagttatttttgatgtaagacatttccttagtcaatacttctagcatttcatccttattggatagcaacccttgaagttctaggtttatctccttttgtaggatgagtaagtcttcttgagcatgaagggttgtttttcttttatctagcttctccattagtttagtgattacattatatccatttaaaccaaattctttaatcattttatttttcatagcaagttgatcatcaatatcatcatctggtaaattaacattaaataaatgtaccttatctcctttt

SEQ ID NO: 33753 - DNA, 377 bp, Zea mays
gcaagctttccaagaaaggcatgagctttatccatgtgtaaaatattaatgctcatatgatgtgctctaacaatgtacctatcgtgctccaactaataaagatcacagacaagcgataggaggtgctatggatgcaaggagaatggccatgaaattgattcatgcccccacatgaacaatcaagaccttgcacgatcaacaaagatgaccatcaaaaaggacgaaatcaaaaggcaaatgcattgcaaggacaagcatcgcatttgctacgattgccgagaaaaaggtcatctattcaaggtttgttcaaagggtaaaacacctaagcctaacttttcaatacattcccatatgcttacgagacccaaatctgactc

SEQ ID NO: 33754 - DNA, 378 bp, Zea mays
  unsure (1)..(378): unsure at all n locations
ntaccaaatggacgtgaacagtgccttcctcaatggaccgatcaaggaagaggtctatgttgagcaacctcccggctttgaagatagtgagtatcataaccatgtctataaactctctaaggtgctttatgggctcaagcaagccccaagagcatggtatgaatgcctaagagattttcttatcactaatggcttcaaagtcggcaaagccgatcctactctctttactaaaactattgcaaatgatttgtttgtatgccaaatttatgttgatgatatcatatttgggtctactaacaaatctacttgtgaagagtttagtaggattatgattcaaaaattcgagatgtctatgatgggggagttgaagtatttctt

SEQ ID NO: 33755 - DNA, 170 bp, Zea mays
accgaggacgatttaactggacacatgcctagtcatgggtcatcctttcctctagcaaactactgccatacctttattactcgacaagggtgtgctacggtggctacaggactcagtaccctccatgtgtatacgccggactgaggtgcatacgtgctttatgtaaaggg

SEQ ID NO: 33756 - DNA, 224 bp, Zea mays
cgctccagatggaagatctctgctctctcgctttttcaacacggataaatcttcataaagtaccttgtgtgacactcgggcgcacgtgtctcttgcgctcggcgtacttgatctggagtccgtttgatacccggcgtctgatgggtcatatatgtaagccacattctgatcgaacttcggttatatcacccaacggggttggcttggtcttttggaatcacgcc

SEQ ID NO: 33757 - DNA, 387 bp, Zea mays
taacaacaccatttgacattttacataaaatttttgatatcaagaatatttaactcattcctcaacatgcaaaagcgggtcttaatcaagtggcttaatgaaaatatccgctaattgatcctccgacctcacttcttctaaaatgatatctcctttaacaacatgatctctaaggaagtgatgacggatatcaatgtgcttggtgcgagagtgttgtacaagattattagcaattttaacagcactctcattatcacacaacaaaggtaccttttctagtactacgccatagtctagaagagtttgtctcatatataaaatttgcgtgcaacaagcaccctgcggcatgtattccgcttcgcgagtcgcacaggcccccctgctctc

SEQ ID NO: 33758 - DNA, 290 bp, Zea mays
agctttgaaccaagtatcgccgtatattctttactgcaaacgccactaatattgaagtatgttatgttattaccccaaaaatatcaactttacttatttatttttatattgatccatgagtcaaatgcacaacaaaatacctgaaagtatgagcattggtccaaaactgtacaagctaaatgtatgggttgcaacatttgataacacacaatcacacattcatattcccaaaacactaagaactcacagccgtgctattggtggatacaacttggcttttattcttactt

SEQ ID NO: 33759 - DNA, 383 bp, Zea mays
tcagctccatctatgttatggattgcttttgagtcattccagtttccttcggcccttctggcagcttcctgacttccatgaatagcgatgggtccttgatccgaaggtatcttcatgcaaagataagcagggtgaagaattgcttcaaaagcattgagggtgccacgaccaataattgcattgtaagggtattccatgtcaacaatgtcaaacacaacttgctcagttctagtgttgttgatgaacccgaaggtcactgacatggtgatcttgcccagtgctacaatttgtcttcctccgaagccacagagaggatgtgtagcatcatgaatcttatcttctggctcttgcatttgtctgaaggccttagcaaatatgatatc

SEQ ID NO: 33760 - DNA, 362 bp, Zea mays
tgaccactaggaaacgacgctcatcatcaagatcttctgccaaaaactcaagcataggaggggtaaggactacaaaccccgctccaaaagggtgtgctacaaatgtggtaaacccggccatttcattgctaaatgtcccatgtctactgaaagtgacagggacgacgacaacaatgggaagaagaagaagaagaggtactacaagaagaagggcggagatgcccacgtgtatcaagaatgggactccgatgagagctacaccgactcctcctccgacgaggacgccgccaacatcgatgccaacaagggcctcctcttccacaacgtcggccacaaatgttttgtggccaatgacggcaaga

SEQ ID NO: 33761 - DNA, 382 bp, Zea mays
tcgcgcgatatagcaagataggtggctgtgtctatttatgggacgaccgagtacaggattgggccaacaaacgggtccattcatggactgaggtatgagatttccgcccagcacaggtaagagttttatttttttctttttcttttattttttcatctatcttagttttcaaattttcaaatccctatttcaaattcaaatctgacttgggtttcaaactaactcaaagacccatcatgtatgcaaagcgtataaataatcattattatcttatttaagtaacatgcttttaaatatgcaattcacaaaaaaatagttgtctttacgagaagcaacttcaaggagaaagttcttattagaagataattcaaaatctttagag

SEQ ID NO: 33762 - DNA, 351 bp, Zea mays
tgccagccccaaagggagaacacggattcgttcgaccaacgcacaaagtcgagaaagaaagacccttgtgcacgctaggcaagcagggcaacaggtgggaagagcccatcccaggcaagaatgtggatgaccacttcaaaacccctcggacctggtgcatacggacctcttcggacccgccgcttaactgagcataggggggaataacgatgggctaaatactggcgaagactcttcccgctgcactcgggtgtcctttcggccgataagtccgaaaccaagggacccccaagcgctgcctaaggagagcctaaaaagcagttgaacccaacgggaaaaaataaggaacca

SEQ ID NO: 33763 - DNA, 372 bp, Zea mays
ttaagctctttgacaatagaatcacttttctatttttagcaaagatgcaataatgcatgagtgaaactttaagaggttaaactaggtatgaagcacggataaatgcaaaggacatgctttctcttccttatatataagatatgcaaagaatgcttataagaggaagatttaggtacaagtttaaatgaaaggaagtgattttacccttttgtaccttctcatagagatgctctcttcattgcgctttgtccttagtcttagttgcttaagacctatactcaatgacaatatatggaaatactttgcacaagagagagttctacaactagtgatctttttcaagttattgctagcatatatcaaatggatcac

SEQ ID NO: 33764 - DNA, 388 bp, Zea mays
ggaactataaaactcaacttctcctggacagtgctgcacttaccggtgatttctaagctgacacatatcataacaaaggagcccctggcgttggtggagttaccgttgctacatccatcaaatattgcttcacttcttcgaaagctctctgctggactggtccccattgaaaaacttcggctaacttcagcactttgaaaaatggtaaatttctctctgctgatctaaatatgaatttgttgagagatgccaaccttcctgtcaatctttgagcccccttctttgtacttggtggttccattcgaagtataccttccattttgcttggattagcctcaattccctttgttgaaactagaccaccaaaaaatttccccttcttcactcc

SEQ ID NO: 33765 - DNA, 358 bp, Zea mays
ccacctgccgcatgcaagcttaatcctccttgtttgttttttacaacaaaaccggtgggagccattgggtaatagatagctgctgcactcaacgcatgaaaggagacccatgtatgttcacctcactcaatgaacaagtgaaagataaaaacaatttcctttagggaccattcaaaaggcaaaggtaaagttttgggcaaagtatctttacaaaagatcactaaatttaaatggtctattatttgcatttttaagcttcatatgtgatctgttggtcaatatatgaacaacaccggggaagagtgggttttcacatcaaagcctatcatccggctccgctcgtcccgctaacgttcta

SEQ ID NO: 33766 - DNA, 381 bp, Zea mays
  unsure (1)..(381): unsure at all n locations
tataagntctctgagatgactagcggcttctgatgaaaaatccaccctaggcatgtcagatcaattcatagctccagtcagagtgatgacaaaggaagcccgttctagaggccacatcgcagctcatagtcttcagggcagcagcaaagctccttcaggccaccagctttaaggggcagaggcggcaggggctttggaggaagatatggggatcagcccaggacaatctattgcttattctatggagaagacaagggccacactacaagaacgtgccagattaccattcagaagcaaaaagagattgccgaagtagaagcccagcagaatcagtcgaagcaggttttacatactgcttcgtgctactccccttacataaca

SEQ ID NO: 33767 - DNA, 350 bp, Zea mays
agcttattgtctcatagaccgttgttgtttatgtaagaagtgatataaagaatgggatcttacttatgaaagcatgtacatgcttaatcacaaagttgctaatgaagattcatattagaaaaatgtacaacaacattagtagggattattggaggaaattaaattcaggtaagtatgtggcattgaataaatggtaactggatagcagggtcgatatcaatatctgccaaaataaagcatggcaatgttggcattcatagtctggtgttccaagatgggacctatctcgggatgaaggtgaaaatgcctttgttacaatatatggcgcggggtatgtataaaaaaaaaat

SEQ ID NO: 33768 - DNA, 370 bp, Zea mays
tcggcagataagagtaccatgtttttatgatttgttacgcaaggaaaggcttcggcaaaaagaggaagcggccttctatgcttcgttgtgtacgaaaagaagggaaggtgttttttcgccttcggctcacaaaactgatttcgtccacatcaaagcaccttaatcgaagggtaagaatatattacaaggtatgtacaaagttccttgaagaacagtttaattctatttacaagagttgctacaaaattatcctgagttttctaaagcacacttctgctagtcttcattaagcttcagcttcgacgacaacttcggcgacatatcctaagcattatcttcaccttccgcatcctacatgaggcaaggaatc

SEQ ID NO: 33769 - DNA, 334 bp, Zea mays
agctcgtgaacaagacaaggacatattagagattgctgcttcggccgaacaggcgaagcccatgcttctatgtgaagacccagcagagcagaaggaattgccgagggcctaattacccaacgagcaggagaaaacttcgataaggtttttattcaacaacaaagaaaattctgcatggacggacaacgatctctgcggcggcaacagggaccggattgaacattcactcaatggccatccatccctcaggcccacaaggcaaaggcttcagaaaatgtctgacgataaaactgaaagcgctccgagtgaagaaaaaacacctctcagggctggg

SEQ ID NO: 33770 - DNA, 381 bp, Zea mays
tgtgaaggttcttcatccccacatgtgctaagttgttatgccacagccagcccatgctagtcttagctattaagcatgcatctagaccggccttttcttttgcaaaatcaactaaataaagtttgccgtctaatacacccttaaaagctagtgaaccatcacttcttctaaggacagacacatctacatttgtaaatagatagttatatcccatatgacataattgactaacagatagcaaattatatccaagactttccactaaaaacacattagagatagaatgctcattggagattgcaattttacctagcccttttaccttgccttgattcccatcaccgaatacaattgaatcttgggaatctttattcttgacgt

SEQ ID NO: 33771 - DNA, 359 bp, Zea mays
acctgcagcatgcagctcgctagaccgatccatattctaacctcacgaaggccgggtccaatcattacctctaaaatttctcgcacaccaaaacaagtggtcgatgggactcttcacaacgcctccacggagaacatcttctctcttgcccacgggttgacgacctaatctcaacttccttaaatgctgaaggctctgcagccaacattggctcctctgccaaccccaccctcccgcccttctccaaagaacttcggtcgtgcctttaagaatacaaccctcttttaactcccctcgcctcttcgcaagtctctcaaaacgggaactcgaagcaaaggcaccataatcgaaatcaccgt

SEQ ID NO: 33772 - DNA, 389 bp, Zea mays
  unsure (1)..(389): unsure at all n locations
tctccaccatgtcgctgctagccaagttgntgctatttatctccatcaatgatcaaacgacatgaacgctccttaatgacacactttgtttgaaacaacgtatgtcgctgattctgctctgccttctccatttgtgcactaagaacacactatataatgaggctctcataatgctctgcatcatctgcaccaatctattcttcgggtggttccttagtgcctgcatcattagccgcaagcaaagcaagtgtagcttcatccaaatcactagcagaggaatacccaccatcatattttaccacgaaaacacgctgattaggacaatcacgctgcacatgtccatagcccttgcatcgataacacagaacatctcttgttctacccatgga

SEQ ID NO: 33773 - DNA, 274 bp, Zea mays
  unsure (1)..(274): unsure at all n locations
anctntcagaaggccagcaaaactttatacatttctgccacccataaccgagaagccttgggtgacgaacaaagaacctccgacccaaaagataatggggcctgctgcaagacaaggcctacaaacatctcccggacaagggctgcatttaccgctgagcgccaagcaggcacagataagaacaacggagcccctgacgcggacggggatagacgcgcgagaactatcaaataccgaaccagatcttggaaagctctccggcggaccggggccc

SEQ ID NO: 33774 - DNA, 383 bp, Zea mays
tgataaatgataatatggctgtaggttttagttttattatttacaatcatttcttattttacattgtgagatcattggattaccaatttacggggtcaaattataattctatgcatgcaaactcgcaaacccgcacctacagagatgttattgttttttttttgcagatcatgtttatatttttttaaagggagggtataagttcatgtttatgttgaccctactaggactggagcaagtgattgctgacgtaaaagatatcaaataagaaaactaaagtacacacaatgtgttttaatcattctctcactgtcttaattacacggagcctcaattatttttaatgctagcgtcagtttcatgtgttgcgttttgtttgtatg

SEQ ID NO: 33775 - DNA, 53 bp, Zea mays
acttaaaactaagctaaaaagtatgagaaatcctgcggctgaatttttttttt

SEQ ID NO: 33776 - DNA, 386 bp, Zea mays
tggaggacggatccatgacaccacgacgccgttggagcctggtgaagtaaccgtggtcggcttgcggttccagatcggcgtgcccaaagaatcgacgatctctgataccaaatgtaacagtaagcgtggagaaggggtacagaggaagaaggcagaataagataggaggcggccgggaatattatttaggtaggagtttgttcaccaaattcttcttacaagaacacagcgacggcacactatttatcttccaggcagcaactcacgctctccactctgggccacacaggcgaacattgggcctccggttgcgcttttcctttgtcgtgccaacctcagcttccagcacggcgtcctcagtttctaaatcaaaaactccctttgtc

SEQ ID NO: 33777 - DNA, 374 bp, Zea mays
taaagatttgcgatagcaaggaggacttttgttttatcaaaaatttattttacaaggcacggtatgaattcttcgaagcaacaaagagtcgttctaaggaacgcagagtaagtttgctgaagttacaaaaagccgttccaaaaggagcgcagtgtaagttttctgctccaaagtcgttccaaagggaatgcagagcttagagcgaaaaataaacgctgataccgcctaagtaaaaggcgaagcgcgaaaagtcaacgcgaataccgccgaaagtaaaaggcgaagaagctcctaagggaggcttacagcgaaaaataaacgctgattccgctgaagtaaaaggcgaagaagctcctaagggaggcttacaacga

SEQ ID NO: 33778 - DNA, 381 bp, Zea mays
taagggaagtactacaattctcctataattgtctatgactgattctcattttaacttagccaaacaatccaattttcgaaacctgtacataatttggacagattcagaaactggactttgaaaaatcataactcctaaactactaaacctatggtcatgaaatttttacacaaccaagataaagatgttatctacaacttttctatagtatatttctacagaaaatgcactttagttcgtcaaacaaataacacggcagaaactgtacatgcagtctaaaactgtgagtatgcaattttagctcctaattaggctctatagtatcatataactagcatggagtatccaaagtattcgaaacagcagatcagtccaagtaat

SEQ ID NO: 33779 - DNA, 381 bp, Zea mays
tgcggactgtccgtgcgcaacttctcttctttgttcgcgcacaatcaacgaaagtgacctttttggcgaaaggagagcgagaaaagagatgcaatgagcagaaatgacaagtttgctgcctctgcccggctttactgcctgtcacggacggtccgcgcaagatggcggacggtccgcgccctgatgcattcaaactgtctgcacttctgatcagactgtccagttcctgatactgcggacggtccgcggaccatgggcggacggtccacggcctgatactcagttttacaaattctgtccactttctgattttgaatttcaaatctgaattgatgctcatatatggacatttcgaccaatccaacggttagtatgcatgca

SEQ ID NO: 33780 - DNA, 379 bp, Zea mays
tgccgaagctacaaaaagtcgttctaatggactcttagtaagcttgccgaagctacaagaagtcgttcctaagggagcgcagcgtaggttttctgctccaaagtcgttcctaagggaatgcagagctaaataccgccaaaagtaaaaggcgaagaagttccaaagacgttcctaagggaatgcagaacttacagcgaaaagtcaacgctgataccgccgaaagtaaaaggcgaagaagttccaaagacgttcctaaggggatgcagaacttacagcgaaaaataaacgctgattccactgaagtaaaaggcgaagaagctcctaagggaggcttataatgaaaaagtcagtattgatacaaaagattgtgctctattgc

SEQ ID NO: 33781 - DNA, 357 bp, Zea mays
agcttggatccggtcggactcatgtcctgcccggggtcttcgtgcaagaaattctccagccgagcatctcaacggatcaaatagaagagtgcattatcatagatcaacccgagtcagactctgatgactggaggcaaccgattattaaatatataaagaatgaagaagagccagatgacaagaactcggcagagcgcattgccagacaatcagctcactatacactcattggggaggtattatacaggaggggcgcgtcaggcgtcctcatgaagtgcgtactcccgtccaccgggaagcaacttctggaggaggtccatgcagggcagtgtggagtacacgcagcatccagaacat

SEQ ID NO: 33782 - DNA, 363 bp, Zea mays
tttgtaggatgtgtgttggcaacttgcttcccagcttgacatgcactacaaggcttgtccttttcaaatataacatcctttaatcctctaaccatgtccttctttaatactttcttgagtgtactcattccaataagtgcaagcctcctatgccaaagccatccaagtgatgctttggtaaagaggcaagttcttaagtccgcatcttcagaggtgaaatccactaagtagagattgttgtatctaaatcctttgaacaccattgattcatcatccatttttgatacaataacctctgttggaatgaataagcattgaagtccaagatcacaaagttgacccatagataataagttgaagctc

SEQ ID NO: 33783 - DNA, 357 bp, Zea mays
agctttcaacatgtcttcaagaatttggttggttctatctgtttgaccatctgtctgcgagtgaaaagctgaactgaacttcaagtgtgtgcccaaagcctcatgtagctgctgccaaaaatgagaagtgaactaggcgcctctgtttgatactatcttctttggaacgccatgcaagcacacaatccgagacatgtataattctgccaacactgcactgttataggtgctcttgactagtatgaaatgggacgcctttgttaaacggtccactactacctagatggagtcgtaaccagcacgagtgcgaggcagaccaacaataaagtccatcccaatctcatcctattttcacta

SEQ ID NO: 33784 - DNA, 349 bp, Zea mays
ttctaaggcgctctatggacttaagcaagccccaagagcatggtataaatgccttagagatttcttaattgctaatgctttcaaggttgggaaagccgatcccactctttttaccaagacttgtgatggtgatctctttgtgtgccaaatttatgtcgatgacataatatttggttctactaaccaaaagtcttgtgaggagtttagcagggtgatgatgcagaaattcgaaatgtcgatgatgggcgagttaacatactttcttggattccaagtgaagcaactcaaggacggtaccttcatctcccaaatgaagtacactcaagatcttctcaagaggtttgggatg

SEQ ID NO: 33785 - DNA, 340 bp, Zea mays
agcttgtcaacaatataagcacaaaagagagaaggctgcttcggcagatcagccgaagcctatgctcttatgtgaagacatagcagatcaaagggtattgctggggtcccagctatctgatgagcaagaaaaaaatttgataagatttttgttcaacaacaaagatgtcttcgcttggacaaccaatgatctttgtggtgtcaatagagatgtcatcgagcattcacttaatgtggatccatccttcaggccaaggaagcaaagacttcagaagatgtctgatgataaagccgaaggtgctcggaacgaagtaaagagacttctcagtgctaatgttatc

SEQ ID NO: 33786 - DNA, 372 bp, Zea mays
tgaccctaagataattccaggcttatatctaaacgatggagccgagaagtttgatacttcgacggcgcaatctgctctggcatcgctactgcctaccgtcttcgcgccagacccgtgcatcgagtttgccgttaagcttctcaaggacgaaacgccactggcagcatacgttccgcaggctgacgagatcattggcaaaatggtgtgccgtcagaagagcacagctgttgggacgtcaaagtctgctcagggcaggaaggagaagaaggactgaaagaacagatggcatccgctcgatcgacggaacctgatatgaggtgacgattttgtatctgcggatcagtgtaatcgtttgtcagtaaagcacaactg

SEQ ID NO: 33787 - DNA, 361 bp, Zea mays
tgcagcatcgcacctgaacaacctgagagggctatccattgtgagatgtctcacggcggcgtcccgacagatttggggggaatttgaaattcgcgagctacggtggtcaatcgggagcgaggaatggtcactatcttcgaaacaagatggcggagcagacaggggccacaatttatagagatcgaccatcggcgctaccaatttgaacaatgttgggcttaccgcggtgacagggtgagtcactctagtaccggtatcgtggcattcactggacaaaggcataccactatcactgtttaacctccatggctccaagcgacgtggttaaaccgcctaacgcgtggcgtgaccaacggaacca

SEQ ID NO: 33788 - DNA, 376 bp, Zea mays
tataaaactcaacttaaacataattgttccttcttcacaacctctgaatgatattatgaggaaccgagaagctactggaaggattggaaaatgggctgcagaactcaatgaattttgtattgaatatgttcatagatcttcgattcagtcccaggcgttagcagacttcattgctgactggacgccaggggctcaggaggaaggaacaaataaagacaccgaagcatggacagtgttttgcgatgggtcctgtggaaccttcggagcgggagcggctgctgtgttggtttcaccttccaaagttaaaacttgttatgcggcaaagcttgattttagttgcacaaacaacattgccgagtacgaagccctgcttctg

SEQ ID NO: 33789 - DNA, 294 bp, Zea mays
tttttatctgaagaggccccagcgcctatcggaatccatatgcgttccgagaatgtgaagacaagtaaacggcgaccaatcttgacgcggacagaggctgtgaagagggaccctgaagactggaatattgattaccaacctaccgcggataggaaggggtggaagtgttcacttcacgtgccaaaaccttgatttatcgattcgctttccctctctaatcgtttgaactttccttgtgcccttttacatcttgctggaccttgtggggtatactctctattatgcgtttccccg

SEQ ID NO: 33790 - DNA, 376 bp, Zea mays
ttgtgtggaacttgggagaggatttgatctctttttgtgtctaaaattgaatgcctagctcttgtaagtggttggaagtatgaaaacttggatgcaatgaatggtgggtggttgggggtatttatagccccaaccaccaaactaaccgtttggtggggctgactgtcgtatggtgcaccggacatgtccggtgcgccagccatgtcaccaaagccgttgggttccgaacgttggagctctgtcttctaggcccgcctggatgtccggtggcgcaccggacatgtactgtaaagtgttcagtgcgccagcatgggcgtgcctgacttctacgtgcgctggcgcgtatttaatgcgctgcacgtaaccgttggcgccg

SEQ ID NO: 33791 - DNA, 363 bp, Zea mays
  unsure (1)..(363): unsure at all n locations
agctnctccttgacgacataaacctcgacataaaaccactctgaactccaacctgctgcccactatcttcttactctgcttcagcgaatgcttgctctgcttgacttgcatcatcatgagggatcttttctgaaaacactaaacccaaacgatgcatggctttggagatgggaaaagactccaaagctacagtttcctccctctcgcactcaaccctgtgggtacagcggactctggccattcaattatgaacttgtgaaactttaaaattttcttactcccaagcatggtttaaaactggagcttcgttcgttttataaccaagcaacctctgccaatggtaaaaatttcggcaaggaaaca

SEQ ID NO: 33792 - DNA, 386 bp, Zea mays
ctcgctatggtgaaaaattatggccgcgaaactttgtttatagcaatgaatgctgtggtaacttcacacccacctgtttgtctatatagtgctgcaggtaggaaggcgaaacggtggaactgttacaccaggcgcgcagtaactcatacccgctgtgcagtggaccgcaaagaccaaacagtaactctacaaagtgggcttggcacgcgctcggaagtcggatcgattctccgcaacgagctcagggaaggtgttatttggaccttcggcttcccgaagctgaagaggttttttttcacgggccaagctcgttactaagaacgatctatcaccgcgaaaggcgctactgttggggtcgtgcttcggtacgccgaaagtctcacacc

SEQ ID NO: 33793 - DNA, 295 bp, Zea mays
agcttggatccggtcggactctttttctgcccgggggcttcaagcaggaaaggcttcatccgagtgtctccccgggtcaaaaacaagagcgcattattttagatctatcggaggcacagtctgatgactggaggccaccgattattggatatattaagaatgaacaacagcctgctgacaagaactcggctgaggcccttgccggacaatgagctcactctacacttaatggggaggtattatacaggatgggcgatccccggggactgaactgagggtacatgcgttccctgcg

SEQ ID NO: 33794 - DNA, 327 bp, Zea mays
ttggacagtgttcgacccccaaagccccaacaataactctctaggtgagattcgccgacctctaccaaagaactgcctcggaaaaccctagtatccctggggtccccccaacgaaagctgcattcaagatacaaccttatgcatgtctattatcacagcatatcgatagcatcccatgaacaatctcgtatatgcatgggtatgtatagaaaacccagaagcccgtgttcacgacaaagaaactacaccaccaactgaaacttcacctgccgggaactggtattattccgagatctggggaacagatcccgaatcaactacaacaca

SEQ ID NO: 33795 - DNA, 392 bp, Zea mays
aactcaagctcgacgggggccatcaacggctaccctgtatgttatggagctcggactgctggcccacacagcaaaccccgaatggcacgggctagcgctgtggtcgacgagctgggtctagcgccacaaagtcccatagtaggccgacgtaaggggcgacgcatgtcttggcactgcccttgaaaaccaaccgatgagagtggtggccccccatagcgagtaagccatctctgacgtgacgaggttgacgaacgcgtagcccttgctggcctcccttctgaaacccattgacggataaagggaggcatagtgcgacttcccctatctggcccaatcgttctaggaagaagggccaacgacgggcctgtgacgggaagcacatgtttcacccc

SEQ ID NO: 33796 - DNA, 370 bp, Zea mays
tgagaaggggacaaccgtagcatgcactttatctcttcaaaagaataccacgctttccaagaagggcatgagcaaaatccatggtgagaaaattaatgctcatatgatttgctctaacaatgtacctatgtgcttcaacaaagaaagatcaaagagaagcgataggagatgctatggatgcaaggagaagggccatgaaattgattcatgcccccacatgaagaatcaagaccttgcacgatcaagaaagatgaccatcaaaaaggatgaaagcaaaaggcaaaagcattgcaaggacaagcatcacatttgctacaattgccgtgaaaaaggtcatctattcaaggtttgccaaagggtaaaactccta

SEQ ID NO: 33797 - DNA, 392 bp, Zea mays
tataaaactcaagcttggcataaggatacactagtagtaagctttttctgtaaaagagtctttgaaatttgataagctttaccttgattcctaataaaccagcatacccttgagagtcttttctttagtcgggtaaatcttgctgagtaattgcgtactcagggttttattccttgttgcttttcaagttataaatttgttctgttgtggatgctgctaagtgccggtgggctcggccttcttatataagtatatcccatctttaacttctttattgaggattgtcacttaagctagcatatattttaaaacttataaatgttttatacatataaacatgaatctttctgaaacattttcttttgtaatcactccgatgatgtataataaaa

SEQ ID NO: 33798 - DNA, 332 bp, Zea mays
caccaatgtcagcgcacggcgacatcacaagaagcctaggtaacatattaagcatgacacttatctttggtcgccgggatccacgaggcactccaaagagaatctgccgctcctcctacatgaacttgcttcaagtcgaagaaacgctaaggcacttacctttctcggcagagggtcggactctaaggcctcaaccgccctcaccagctagaggatttgacacaaaatcgggttaatggccttggagaagaggcaaggatacaatgccgggtatggaaaaggggcgccaacatttgaaacctgaccctctaagttctatttcaagcccggtc

SEQ ID NO: 33799 - DNA, 373 bp, Zea mays
tctaaaacgagaacacattttgggactaacaattgttcattttgagaaagacagggtttgtagcgcatgtcaagtacgaaagcaagttggctcccatcatcctcacaagaacatcatgacgaccgacaagccgcttgagctactccacatggatttattcgtcccgatcgcttacataagcatcggcgggagtaagtattgccttgtaattgtggatgattattctcgcttcatttgggtattctttttacaggaaaaatctcaaacccaagagactttgaagggattcttgagacgggctcataatgagttcggatgagaatcaaaaagataagaagcgacaatgggacgaaattcaagaactcacaaatag

SEQ ID NO: 33800 - DNA, 357 bp, Zea mays
agcttattgctgccttggaaaattctcatgttttacagtgtttacatgattattacatcgcaacaaggtttaagaaccaatttacagtgacaaggttctccattcaccaagtgcccggaacacgtttttacttctgcaatgtcaagtatatgtattgctatgaaccgcactgcactttttaattctttctaggccacagtggagcacacagaggaaacctatgtcggcagttaaacccagtcacgaccatatatggagattcaaatttactggatcatgagataaagtttgagtgctcagaagacatccaaatagaacaagtgttaatctcatttttgtaacagatgaatctgacat

SEQ ID NO: 33801 - DNA, 363 bp, Zea mays
  unsure (1)..(363): unsure at all n locations
ttctcaaaatctagctttaaaaagatcgctgtttcatttttcctcttagnttcatgcataacctcatggagtgtcataattccactcatgatgctccgaccttttaaaaaagcagtctgatggtcatttataagtttctgggcaaaaggttccattctattagtgagcaccttagtgataagtttgtataggcagttcacgaagcatataggtctgaattgttgaatctttgcagcatctttgatttttggaatgagagttataattccataatttagacggctcacattcagttttccttcatgaaggtcctgaaacatctgcataacatcttcttttatagtatcccaacagctttgatag

SEQ ID NO: 33802 - DNA, 361 bp, Zea mays
agcttctccttgtcctcatcaaccttgacatagaaccattctgatttccagcctgccggccatttgcttcggtagctaattacaggaaattttgcggttttccggtaggcaaaattgtagcaaccgaagttttcatgaagcccatcttttctggcctttgtttgataatgcaattcatgaactcgacagaaactgtcagcaaaaggctccactgcttggcttcggagggcccaaatataaacgctaagcctaacaatagccgtaagagttaactggtgaaggtagatgccaaaccttttcaatatctccgcaacaatcttcgtgacagggaatcttaacccagcctttaaaaagcttttga

SEQ ID NO: 33803 - DNA, 370 bp, Zea mays
tcaaacagctagcctacagcatccagttcgataattcaataacaactgtaaaataacaagagtaagattacctatttgaatttttttctccatcatttcataaagaaaatagaaatgaactacaactagagtgtaatttgtataaacaatcacaactacagataggagagctaatttttgtgtatgttgcttcctttttgtatgcatggcgtgtaaatggatgtcctgattattagttaacagaaggagcaggccatgtaaagataggaaaggtgtacttcttgtagtatggtgcttctctatcaagtcgagcaagtgttcctgccaaaattgaaacctgcatccagtaaacaccagtaagaaaacattg

SEQ ID NO: 33804 - DNA, 309 bp, Zea mays
agcttagagcacaccgtaccttatctgcctcttttcaaggattccctcagccaccacaattgctaccggcacttattagcttgtctctcattttattgctatatatatattattgtctagtgtgaagtttagggtttgtcggttgcataacagatgatctggtgtgaagtttgttgcatcttccttttttctctctaaaatgtgttgttgaattcccggacaaattaaatatagggaaaggaacataggatatctcatatggtgcaacttttcaacgaatcaagctgcgtttaaactttaagcttaatg

SEQ ID NO: 33805 - DNA, 225 bp, Zea mays
caccggcctaaagtaatctacttcttcgccacgacccgatgtgctagattctagagcgggggtgcctaccatcggatgcaccaacccattcccccccatggtgttcaaaatccgaacgcttaacggctacgtctgcgcctgccatggacagcctcaccaatagtgtcatgatgatgcctccgctgatgcatgaaaccgggatggtcatccccaactccccgatgg

SEQ ID NO: 33806 - DNA, 383 bp, Zea mays
ttggcacatcaccgcccctattctcatggttctctatgggtaagtgccatgccaccctgatcgcatcttgcgatcagggtggtgttgttcttatttgttaaatctttgtgctttctcgttgaaagttgcctatatgggggggtgaataggcaagttaaaacgttttcaacaaaaactagaagcaaactgggtaaaactgaattgatctcgaaattcacctagttaactttggaaatgagatgttctaaatgatccacagggttcaaattagtagacttgagaagggaacttctcaaaatccacacaccaaaaatatataaacaaatctttcacggaatggtgagagaacgaataacacaaacaaacacaatgagcaagaacac

SEQ ID NO: 33807 - DNA, 210 bp, Zea mays
acaggacctctgaaccaccaaacacatcatccgttacagaacaaccctccgacccgcgcacgcacaaaacactcatttaagaacctatacaagcagcacccacacaacagaatatctaaaagatctaaaatgcccaagtcaagcacctaataatgcaatgaaccacaaataggaccacgacaaaaaaacgcagataaaccgcgctgctta

SEQ ID NO: 33808 - DNA, 383 bp, Zea mays
tgacatcaaccagtgcaacgaccaggaaaaggtcttgttcgcctcgggaagactcgagggttccgcgtccgactggtgggatgccttcatagcagcacaccccaacgcggatacaataacttggcaggagttccaagcgaactttcgtgctcaccatattcccttgggaattatgaagctgaagaagaaggaattcctttcccttactcaagggaatatgactatcagcgagtattgtgatcgcttcacttagctttcactctttgcccctgaagaagtggatacagatgagaagcaccaagagcgtttcttggaaggattgattggacctctgaactatcaacttcagagtcatactttccccaatttccagacactgctga

SEQ ID NO: 33809 - DNA, 384 bp, Zea mays
tgaagccatggtaagtagcatacgcaagtaaaatgcgaattaattctagcctaactacgggtgcataggtttcacccaagaccaaaccttcgacttgtgaatatcccttggccacaagtcgggctttgatccttgtcaccacaccatgctcatcttgtttgttgcggaagacccacttggtccctacaacattttgattaggacgccgaactaaatgccatactgatagtcgcctagaggggggggtgaatagggcgaaactgaaattcacaaaaataatcacacactacaagccggggttagcgttagtaataataaatgagtccacgagagagggcgcaaaacaaatcgcaagcgaataagtaagtgagacacgctgatttg

SEQ ID NO: 33810 - DNA, 382 bp, Zea mays
tcgacatgcaagcactgcaaactcgatattacatgttggatgcttatattttgtaagccttagggacataacccacccctatatatatgtgtcgaagtataaaacagcccatatcactcaacttttgttccctatattttaaagcaattcgatctttatttataaaacactctctttgttaaaaccagctatatatgaccattggtcaccgcaccattatcttctcaaattgtgcaaaaacttagacctaagaagtaggtcaaacccaccctttaatcacagacttcaaaaggaaaactgggcgaatggaaaaagaaacaaaggtcacctagccgggactaccaaactccttttaaactgccccctgtaaattgtgggggga

SEQ ID NO: 33811 - DNA, 258 bp, Zea mays
ctcaacaaatatagcctgggtgtgtgtgtcaccctgtacacatgtgggggagaacaaccttcacagactgtgatggggagttcacgacatttgagtagctagtgttcgacctcttcagaaccaacctttatctgatcgtaaggcgaggaaaccatggggtagatcttgttgcagacttaatgcgattaccacgtgaggaccctttgaggtgttacatttggacctcttgggacctcgagcctatcttatcgtaagatg

SEQ ID NO: 33812 - DNA, 392 bp, Zea mays
ctatacacaacccaagctccgtactcagcactgatatttgtgcctttgatataagccttgctgcgcaccaagctctaactttggagggtgcgaccaacacagcggttgctcctgccccgaaggttccccaagaaccgtcgcacaatactgtccaaacttcggcatctttactcgcttcttctttctgagcccctggcgtctagtcagcaatgaagtctgctaacgcttgggactgaatccaagatctatgcacataatcaatgcacaactcattgagttccgcagcccattttccaacccttccagcagcttcactatttctcataatatctttcaatggttgtgaagaagggacaattatattgcatgcttgaaaatagtgccgaagcttc

SEQ ID NO: 33813 - DNA, 371 bp, Zea mays
tgagcacattagcctgcacactactgaatttatcaaatgttcttaccatgatgattgcttgtcttggtattcagaatgatatccataaaggatatgatgaatctgtgatagattcgaaaaaattcagatcattaatgaccatcaacaatgaattgtcatttccaactggttatggttggagtcaggaattttgcacgctcctgacttgcgattaactgcatgtactgcatgtacaagttcccctatggtttttagtacgtgggaatccaagaatgatttcccatgcgtacattgggtatgttcccaatctcaccaccgcagcgtacatatatgggcaccacagaaactggggatctatgtgagaatttatt

SEQ ID NO: 33814 - DNA, 376 bp, Zea mays
tcaaaaggagttctactttctagagcttttgttgttgatccattcaatacatacactgtagttctggctgcctcaccccaaaaaatcatgggaaccttcattgctttcactaaacacctggacatcttaaccacagactgatttttcctcttcactactccattctgctgaggggagtaaggaatggtactgtagagctttatgccattttggttacagaaaactgtgaaaaggtttgatgtgaactcaccccctctgtctgtccttagccctttcaacccgttaccagactcagtttctgctctcagctttatgtttttgaaaaaaatcaagtgtctgatcttttgtccgaagcaatttcacccacatatatctg

SEQ ID NO: 33815 - DNA, 369 bp, Zea mays
tgttatcgaaaaacgattaaaatattccgagtgtcggccggtccaccgccttgttagtgtaaacggtctggcggttcgccttcttcccctgcagcactatataagcagacaggttcgtgaggagttaccacagcattcattgccaccgcactgttgtgctgttaaaaattctaaccaaagccgaagctttctggattgcacttttccaaacaagctcttcatcattcgaaactagcttcggcttaaggaaccaaaatacttgaaatggcccaagtaagatctactgctagggtgtcccgcgagggaaatgaggctgaagtgaccgaaacaacacccatatcgaaggttatgagacgatctggtctaatt

SEQ ID NO: 33816 - DNA, 350 bp, Zea mays
agcttcttctgcaaaactataatttgttttttgctaaagcctctccctgactcctatttatccagcatacccttgagagacttttccttagtcgggtaaaaattgctgagtattccatactcagggtttatccctttgttgtttttaagggaggaagcgacaaatttttgttgcttttgctccaaggcggtaccaaacgaggaaaaacaagactgaagtgcgggaggactcggtccttcacttaagatcttttgcttttagcttgtccggaggagtttgtgcctcccttggattgtataatattacttctctggactcacttttaatctggtctgtaaaaaataaactaa

SEQ ID NO: 33817 - DNA, 378 bp, Zea mays
tcagcaaaatgacagcccatggccttcattcttatataggccaaaatgtgctaacatatgttgatgacatcatagtaaaagcacgaagccagacaatcatatcactgatctgcaagaaacatttgctaatttcaggcaagctggcctaaaattaaaccctgaaaaatgtgtctttggagtaaagaagggtaagttccttggttgcctaaattcaacgaaggggatcgaagctaatccaagcaagatcgaagccctacttcgaatggaaccaccaagtacgaagaagggggcccaacggttggcaggaagattggcttcattaaacagatttatatctagatcagcataaagaaatttgccattctttgaaatactaaa

SEQ ID NO: 33818 - DNA, 360 bp, Zea mays
agcttctaaagggagagcacattttatgattaaccaatgttcattttgagaaagacagggtttgtagcgcatgccaagcaggaaagcaagttggtgtccatcatccacacaagaacatcatgacgactgacaagccacatggatctattcggcccgatcgcttacataagcatcgacgggagtaagtattgtctagtaattgtggatgattattctcgcttcacttgggtgttctttttgcgggaaaaatctcatacccaagatacattaaagggattcttgagacgggctcaaaatgagtttggattgaggatcaagacaattataagcgacaatgggacgaagttcaagaactctcaa

SEQ ID NO: 33819 - DNA, 350 bp, Zea mays
ttagggtaaaagtcataatatgaccctaagaataaacttgaatcacttttatacccttgggataccagaaaccctaattagaaccctggcaaaccctgaaaccaaaccctaggggcttatgtgcaaaattggtccacttttgggctaaagtgcaaaaaccaagccaaataagtagtttaagtcctttggattacaagtatgtggacttgaaagccaaaccctaagttttggacttaaatgcaaaatggacctcaattgagttctataccaagtctgaaattcagtgttattggttcaactttggagccctgtatcttttaaaatatagggaatttgcccaaagtgaccac

SEQ ID NO: 33820 - DNA, 270 bp, Zea mays
agcttctaaagggagaacacattttatgattaacaaatgttcattttgagaaagacaggatttgtagcgcatgccaggcagggaagcaagttggagctcatcatccacacaaaaacatcatgacgaccgacaggccactggagcttctacacatggatctattcggcccgattgcttacataagcatcggcgggagtaagtactgtctagttattgtggatgattattctcgcttcacttgggtattctttttacaggaagaatcttcaa

SEQ ID NO: 33821 - DNA, 374 bp, Zea mays
tataacagatagtgctcgtgacattcaattattcgcatgataagcttgtaactgatggtgcaattgcagcaaagactgagttgaacagtaagaattttcttatgcaaaaactgacccagtggaagacacatcgttaccctctggaactttatctgcacatgtaccacaatagaatatttagaccacggtcttcacaaattctataatcattatacatggttaaaaactgggtagaatctcatgagataaccagggtgaggagtcaaggacaaatggacaaggagattttaccagggagaatttcagatgcaacctggttttcttggggtgcatttccgttgttccttgcaaggtccacaggctcaataataccc

SEQ ID NO: 33822 - DNA, 325 bp, Zea mays
cgctcaggcttgcgttagaaacttttttttttttttgacacaagattatgcttcaagcgggatgggacgtttccaaaaataaaacttgatggtgggttcatcttggccaccatgggttcaacatcggaaaagatgtacctctgtcaggtaccaaactttgggttgatatgataaacctgacaccgggcggaagactttgcatgacaaaagagtatcgtggtaatgtcttctgctaagtcaattaaggaccttgtcaatgtatgcctgctgaccgaagaccctttaactgggcacatgccttataatgggtaaactctgccttcgg

SEQ ID NO: 33823 - DNA, 385 bp, Zea mays
tgtctttaccatggttaattctagacaatgtttgatttttgccctccataacgcacgctagacaaagggagcccacaaccacctctggcaaaacacatgcgtgaagaaaccgcaagcctgccactagccgccttggcatttgtgcatcctggcaagccccacctacaccctctgccctgagacagccttatcatgcacgccgagctgctatattatagtgttgtgctgcagaccttgaagtgatgtcttagtgcacaaatccactccagcaagacctcgtgcacctgcgtgagcacatgccagccacttgtcacaatcacaactaaatgaaatgcccaccatgagctaagttaccctgccaacctcaggatgttacgactgcaac

SEQ ID NO: 33824 - DNA, 404 bp, Zea mays
ctatacacaactcaagcttgtgaagattcttcatcccaacatgggctagtctgcgatgccagatccatcccatattagtcttagcaattaagcaagtatcgagttcatctctattaaaatcaactaagtatagctgaccctctaatactcccttaaatgctaccgaatcatcacttcttctaaagacagtaacacctatatccgtaaaaagacagttgtaacccattttgcataattgagaaactgaaagcaaattgtaatctaaagaatctacaagaaaaatattggaaatggaatggctaggcgatatagaaattttaccaagtcttttgaccaaaccttgatttccatccccgaatgtgatagctctttggggatcatcatttttctcgtaggaggagaac

SEQ ID NO: 33825 - DNA, 382 bp, Zea mays
tgcacacatagctcttttgaatacctttgattatatctcttttatatgctatgactaatgtgttttcaagtttatttcaaaccaagtcataggtatattgaaagggaattggagtcttcggcgaagacaaaggctttcactccgtaactcatacttcgccaccactccgagcaactctctcttctttgggggagaaatgagcatcaaggaaaaggacttcatccttgggggagagagtaaaagctcaaacgcaaaaggacttcgtctttggtataatcttaactcacttatttatgaccaaaggggaagattgcacttcaagggctctaatgattccgtttttggcgattcatgccaaaaagggggagaaatgagcccaaag

SEQ ID NO: 33826 - DNA, 310 bp, Zea mays
cgcctgcaagctttttctgcagaactataatttttatttttgctaaagccctttcttgactcctatttgtccagcatacccttgagagtccttttcttagtcgggggagacttgctgagtagtccatactcaggggttatacctttgttgttctaggtgaggaatcgacaaattttcggggcttttgctccaaggggcgtccgcacgaggagataccggactgtagggcgggaggacttcggcctccccttaggatcttttgcttttcgctcgtcagaaggagcttgcgcctcccctgggtaggctaata

SEQ ID NO: 33827 - DNA, 365 bp, Zea mays
  unsure (1)..(365): unsure at all n locations
ccngctatggtcaaaagtagggcagcatatctttgcaataaccatgaatgctgtggcaagcttacacctacccgcctgtttatatagcgccccgggcgggaaagtaaatcgccaagtcttccgcaccggacaaacagccgcccgcacccactgaacggtgggccacagagcctgagaaggtgaatcgccaggacgcgcgtaactgctgcatggtggggtcacctaccgctcggattattttaatcgtttctcggtaacgagctcacggaacgtgtttttcggatcttcggcatccccaagcctatgagactttttcacggatcaagctcgttacgaaaaacgatctaataccacaaacgggctac

SEQ ID NO: 33828 - DNA, 379 bp, Zea mays
tgtacagagcccgcttgaactaatcttcggagaaacccgaccccagtgccgcatgacaccagacggtccaacccaaacggcgttggctgaattcagaattattgcggagcacattggcactagggatttggtgcaagaatttctggctttcaaagtatttcccaccatgaaggaatgggctatgccgaagcttaaaggagagaagaaagagggggagcttatccgactgccctatcattataaattcaagaaatatttcaaggcaccctgccaagaatggctcgaaacaatcgaactaatgagtactaaaattcttggaaattactctaaaaaaagaggaccaattgatgacagcagccttcggcacccggccgaaacg

SEQ ID NO: 33829 - DNA, 313 bp, Zea mays
agcttatcaacagaaatttctactttttttggtgtcagctatgctgttatcgtttttagtgagtacaactttgtttctaatacgtgatggcatactatgaagtgatgaaaaggatatccttttaaaattatggaattctataattgccgcactgcacttccatgcctgcagattttatctatcctttattgaatttggaacctgctatgtttttcttctcccctgaatctgatcgttcttataaattttcatttcggcttcgatatgttctttccactgccacctttttggctattgataaattcctggtttt

SEQ ID NO: 33830 - DNA, 366 bp, Zea mays
tagcaaaagaaatttctagaatcaagaatattgagctcatgcctaagtctggcaaaagattgttcatcaagtggcttggcaaagatatcggctaattgttctttattattaatgtaagaaatctcgatatcccccttttgttggtgatccctaagaaaatgataccgaatggctatgtgcttagtgcggctatgctcgacgggattgtcggccattttaattgcactctcattatcacatagcaaagggactttggttaatttgtaaccgtagtcccgcacggtttgcctcatccaaagcaattgcgcgcaacaatgtcctgcggcaatgtactccgcttccgcggtggaaagagcgaccgaattt

SEQ ID NO: 33831 - DNA, 360 bp, Zea mays
ggcaaccagggagacagccggacacaatttctgcccgggggcttcgagcaagaaaagctacacccgaccatccaaacgcgacagagagaagagtgcatcatcacagatcaaccgcaaggacactctggtgactggaggcaaccgattattcaatccataaagaatgaagaacacccacatgacaagaactcggccaagcgcattgccagacaatcgggtcactatacactcattggggaagtattatacaagatgggcgcgtcaagccgccccaggaagagcgcactcccgcccaccgagaagcaacgtctggaggaggtccatgcatggcagagaggaaaacacaccacatccagaaca

SEQ ID NO: 33832 - DNA, 371 bp, Zea mays
  unsure (1)..(371): unsure at all n locations
tgaagcttcctggaaaccgtccctcctctaccggttngctcaaccacgtcagcttccacatcggtcagtgtcttggactttctctgccactcccagaccttggtatcttttttatgggtgctcattatgtcattcaccacacctgtcttgttgctcaccgctcctactaccacaggtccaaagcaagaaaaaacgaacggaggacgataatggctctggtcgggcaaatggcgatggtggcgcatctggtgggcgtggatgcgtttagcctcttcattcttggtatctttgtgtttgtacccattgctgtatgttttccttggttgtgcctgacatttgtttgtagatatcaccccacgggagggaacatt

SEQ ID NO: 33833 - DNA, 317 bp, Zea mays
atcctccagagtgcacgcgcgcgcatgcttgacttatgaaagggcataaaacttgccggggacatggaccaaaaacagaagatgtctatagggagccgacctgcctactatgtcaagagcaagacccctatcctatgacacacggcaccctatgcacagtatgagctaaagcgaccccacacagcgacccaagaatgcgctatagagatctgagtccaaatgggtattatgtgaaatgcgcatatttacggggagaaactatatcatgggatacaaaatgttatgtagccaatcttatgtaagcgataaatgagttg

SEQ ID NO: 33834 - DNA, 369 bp, Zea mays
  unsure (1)..(369): unsure at all n locations
tctcgcttttgatgggctatggctaccaatcttgcgtaacaaatatctcggttcaaaacctctgtctcaagtggagtgaaaaactggcgattgacactttcggtcttgtctaatgaaggtcaaacgagagttctttcgttttggtgtttttgttgtgaaacatggatcccaagtgcgttnctgggaggacatctggttaggtggctcaaccttaaagggccagtacccttgcttgtataacattgctagatcaaaatctataacaattgcagaagctcttaatgtgtcacttcctaatctcttgtggcgaagaagtctagttggtccatatctaatagcttggactgaattgtgccccgcttaaaaaca

SEQ ID NO: 33835 - DNA, 334 bp, Zea mays
agcttgctaggagacatgaggtttttacaaatcatgtactagctagtaccttttagggcttgtttggttagctctcaatccatgtggattgagtgagattggatgagtttgaatcccaaacaagtcaaacttcttaagaaatttttccaattccatccaatccatgtgtattatgaataaccgaacaaatccttaggtggccctgcagtgagtaaccctagccgtgcatagtgctagtgcacaaccatcgatggtgtacaactgtgcacagcagccttcgatttggctgcacagtgctgtgtgtttctttagtgcgcctgctgcctgagtgcgt

SEQ ID NO: 33836 - DNA, 373 bp, Zea mays
tgctacatgccttcttctttttcttcaaagcttgaactttactggaacactaccccacttaaaagaatgagggtagaactcttgaatcttggggatttgaactccttgaagtacctcataacaagggtgttacggggccttcttctgctgttgctgcttgagcaggctgcggagagatgactgacatacggttgattctgggagaactttcttctcatcttctcttcactatcttcttttcactgaccctttccttctatttgctcttcccactggaggattctatcaaagagtattaccatcatacagaagaggaaaccgaagatgttgaaccatgtacaacagtcttcaatccaagaatcaccaagcattg

SEQ ID NO: 33837 - DNA, 362 bp, Zea mays
agctatctttattttgaaaaggggagaaaacaaaaaggggaaatcataagaaaaacataagatgtagaaagttgatgagtgcatactatgtcatgagcatcacgtttattttatgacacactgcaccctatgaatagtatgatataagttgtctccacactttgacccaaatatgtgcttttggcatttgagtacaaaattggtattttctgaaatgcacatatttagggggagaaactatatcatgggattcaaaatcttatttatcaaatcttatgtaagctttaaatgtgttgtcatcaatcaccaaaaagggggagattgaaagtgcattcatcccttttgtgagttttggtgatttg

SEQ ID NO: 33838 - DNA, 386 bp, Zea mays
tctaaagggagaacacgtgataggtttaactaatgtgcaattcgaaaaagatagaccttgtgcagcttgtcaagcaggcaaataggtgggaagctctcatcacaccaaaaatgtgatgaccacatcaagacctttggagatgcttcacatggacctcttcggacccgtcgcctatctaagtataggaggaagtaagtatggtcttgttatagttgatgaattttcccgcttcacttgggtattctttttgcaggataaatctgaaacccaagggaccctcaagcgcttcctaaggagagctcaaaacgagtttgagctcaaggtgaaaaagataaggagcgacaatgggtccgagttcaagaaccttcaagtggaggagtaccttg

SEQ ID NO: 33839 - DNA, 368 bp, Zea mays
tcacctgatcttaagacacgcagctgcaagctcacaacacaagagacattctttgggatcggaacgaatatatatcacatatgcaaacataaagcataatatccggtctacttgcacaaagataaagcaaggaacctatcatagaccggtataccctttgatctacagacttgaggtacaaatgtatgtcagttcccataggcgccttaatacgctttgcatccttcatcccaaacttatctagtatatcctgtatgcactttggttgagagaggaatgtcccttcctctgagttgcctcacttgaaattccaggaagttagttaaccctcccatcatggacatctcgaaattctatgtaatcaccct

SEQ ID NO: 33840 - DNA, 383 bp, Zea mays
tagaacatagaataaaaaattgggtaaatgggttcctttgtactacaactcttaattagaggtggggtctgttctaagggtcatttttgttggcatttaacaataataataggcttctgtgtcaaaaaccacaggaggctaacgggtggctatttagttatgattttctaaagtttaatgccaaaaaggcactttctactacattgctatttgaaaaatgtcaaacaccagatttcatatttttcttaagctcttattagcaaaacattttccatcccaagggtgggggtgttctcacattggggttattcttgtagggtttttctaagtttcccttgctttattaaaataaaaggtatcctcttattttatactacaacagg

SEQ ID NO: 33841 - DNA, 383 bp, Zea mays
ttatgatattcggaaggaatggatccctgcctttttcaaatatgatttttgcggtgtcatggtttcaacatagcgtattgagagcatgaacaagctggtgaagagctcccatgtagatacaaacacaccactgtatgtttttgcgaaacaaatgatgaaggtgttgcgtagcacgaagatgaaggaatcgaaggaagcgttagtatgcaaggcatgtcaaaagaaaacttattttcatgtatgatatagtgaaatctaattgaactttatgaaatacagggaaataaagcaacagatacattctatatgtttgagatcagagttgcaagggcgtacactatggctatgatgaatagatctgaggaatcaatgaaatatgccac

SEQ ID NO: 33842 - DNA, 361 bp, Zea mays
agcttgtggtgcacttgaactattgaacttcccaagtttcttcacggacctgataccacaaaatttggatcgtacccatcgatctgaaaggatcgaccttgctgccctagaaggtatgaaatttggacccaatttgtaccatatcagtagaggatcatgattttgcaccatgtcaaattgttacaaggggccatcaagaataatccaatgcttgaaaatatttaaaataactcatatattgtgtatttgcgaactcgtttaccgaggcatgggcgcgccctagctggcgcatacctaccacatcaacatgttcctgttcaccttcctacccgacatgttggccattggtatctaattccca

SEQ ID NO: 33843 - DNA, 377 bp, Zea mays
tatgtacatgggttcagtttcatacaatacattttatatatttacttttcatattacattgcaataattctaccagctactgtattactttgccatgcatgcataagacagcactaccgaaaccttagtaaagaacaaaaagaagagcccgtcgtgccgaactgccgacgatcgacattaatctaaagcctactagctccctcccgtgtgttctgaaatctgaaaccagcacacagggtgacagggtgacagggatcgccggccctgtcacttactccgggccggccggccggcgtgtacgggatggcgcgcctagtggccgtcgccggggctcgggccggagttcttgatcccgccgagcatgtcgacgctcatca

SEQ ID NO: 33844 - DNA, 339 bp, Zea mays
agcttgtacacgcttgccccttttttggctaagcatgtttggatagccctctgataaattgctccaacgtttttgaggccaaaccacatggaggtatagcagaaggcccccaaaggcatgatgaatgcacccttttcatcttctttctttgctaaactgatttggtgatatccagagtagcaatctatgaaggagagcatatagcatccagcggttgagtcgactacctgatctattctatggagttctaagggatccttcatgcagtgtttgttgagatccgtatagtctacgcacatgcgccaatcaactatattttttttagtgcaagaacatgat

SEQ ID NO: 33845 - DNA, 371 bp, Zea mays
cgtaacacccaaaatcctatttatagtttcatatacttattctcccaagagattaagaatcaaaaattcataaatatgatttccttacctttcaaatatttttcctcctaaaataaataagttgtaatgttgatagttaaagaaaattttgagatctaaactttccaagtaaaattcaaactaaagcctagacaaatagaaggattcctttaaattattattgatggaaataatatctgttatgaattatgtgtttataacattaaatcatctattaacagatgttattccttataaattattttcttaaaatgaataataatgattagcttgtgtgtatgaattatatatctcaaaacatttgcctaaat

SEQ ID NO: 33846 - DNA, 324 bp, Zea mays
atactctacagtcgagctggcagcctgcaatcttattaaggagaagcttcttttacgactaacacatgctcatcttgagacagacaagatctgtagcgcatgccaagccagcatgcaagttggcccacattatccatacaagaacatgctgactaatgacaggccaatggagctcctacacatggacctattctgcccgatcgcttacataagcatacggcggagtcagtactgtctaaatatcgcggatgactatcctcactccactgaggatactttttgcaggatatatctcatacccaagaaaccttacagggattcttg

SEQ ID NO: 33847 - DNA, 370 bp, Zea mays
tcgccctgtacctccgctccgcgacgttctcttgcccattctcatccatgcctcggccgccgctgggcgggctgacgacgggcgccccgacctccgggaccgactgggagatcgcgatgagggactggcgcgcggcttccatctgcgtgaactctgccggtgctgctgcggctgtgggtgaggccatcgactgagtgctgtagttcatattcaaaatcgaagtggtagtgacgtgagagccgtagcttggatgtagggcacagctccagctcctgattctaagcgaggatctggaggagccgtgccaaacgggtatttttttaaactgattctcatgtggagccgaaagattgagagtcgttttgtgaag

SEQ ID NO: 33848 - DNA, 358 bp, Zea mays
agctattataaagggcatacttgtaatttctcacaggctgcgtcctgtgcctataaatagtgaacagtattccattactgctcacgaatacaagttattgcaattacgtcttctggaatccaaccttttgccaaggcaaaggtattattgtatttaatgacttaatatattaaataaatacaatgtaattcgtctgtgatgtatttatcccttatttacctctttatgttatcttataattctcactgaaatcttattacgaagacttaaactttcgaattatgctcttatcacccttcgtccaaagtccattatcctcaagggaataatgcttcatggaccaaggaaattgacattt

SEQ ID NO: 33849 - DNA, 377 bp, Zea mays
tattgcacatacctggccacttcagcgttggggactagacatcgtcggaccaatgcccatagctcaaggcaacctcaaattcacctccattgctgttgaatacttcaccaagtggatcgaggctagagtcgtatccataataacctccaagacaacgcaaaagtttttctggcagaacattgtgtgttggttcggagtcctattcgagctaatagtcgacaacggcaaacagttcgacaaccaagactttcgggaattctgcaactctatcggcacaaagacagtgtttgcctctgtctaccattctcaatccaacggagtagttgaatgcaccaacgacaagatttttagtgcaatcaaaaaaggctactcgatga

SEQ ID NO: 33850 - DNA, 355 bp, Zea mays
agcttgtgaagccaatctcaagtttgtagaagaatgacattaagttcaattggtcttctaagtgcagtgaagcctttgagcaaccgaagacactattgaccactgctccggtattggctcaaccggacatcactaaaccttttgacgtatattgtgatgcatctggcaaagggctcggctgtttactgatgcaagagggccgagtgattgtgtatgcttcaaggcagttgcgccgacatgatgagcactatccaactcatgatccggagctagctgctgtgggtcatgcccttaaacattggcgtcactatctgcttgggtatatgtagcacatatttacagatcataaaggtct

SEQ ID NO: 33851 - DNA, 401 bp, Zea mays
tgacactatacacaactgaagcttgtcatcagaaggctgttccttcctttcttgttcattagagaagatgcaaccatgggtgcctacaagtaaatatataccccgatcagaaaacatgttctgtcaatattaaagtcttattactaaaagtaaacttaccaaaaacattggctgctccaacaagagcactagcagcaacatcagatgtaatgcctgcgttacggaacaccgatgtagagtaatatacaacagcgtttataccagcaagctgctggaacaaaaacagtgctgtccccacactcacaactgcaaatgaaagatatatcagaaaacatgtcttgtagcgccttcatattagtatcaattctttgacgctttaagttggttgcaatcaacatatc

SEQ ID NO: 33852 - DNA, 361 bp, Zea mays
ggcaagcttatagatcttctgagacgacttgggcttcgaaagaagactccaccctaggcatgacagatcaatccacagctccggtcagaacaatgacaaaggaggccagtttcagaggccacaacacagttcgcaatcttcaggacagcggcaaagctccttcaggccaccaacttctatgggccgaggctgtatgggctttggaggaagatatggggatcagcccaagaaaatctactgcttattctatggtgaatacaacggcccacaccacaagaacgggtcagaataccatttccaaacaaaaagagattgtccgatcaaaagcccatctaaatcagcccgagcatgtcttcatact

SEQ ID NO: 33853 - DNA, 367 bp, Zea mays
cttctgggggagaacacgtgctaggctcttttttacgttcacttctaacataatagaccttgtgcagcttgtcatgcaggtaaacaggtgggaggaacgcatcaaaccaagaatgcgatgaccacatcaagacccttggagctagctccatatggacctactgggacccatcgcctatctgagcatacgaagaagtatccttgggctagttattgttgatgactcctcccgcttcacttgggtgttctttttgaacgacaagtctgaaacttaatggaccctgaacgcttccttatgagagctcacactgagattgacctcaacgtgaacaagataaggagcgacagaccggtccgaattctagaac

SEQ ID NO: 33854 - DNA, 330 bp, Zea mays
agctttcgcccaacagcagagtttctttcggccgccagcgccaaagagcagaggcgccaggggcttcgggggaaagtttggagaccaacccagaaaaatatattgcttattctgtggcgaagacaagggccatactaccaggatgtgccatgttaccatccagaagcagaaggaaatagcggaagcagcagcgcaacggagtcagccgaagcaagtcatgcataccgcttcgtatcactcaccttatattccaaaatatgtaggccaccaccctgcagcttctgttgcttcgacgaagtcattccaagcattctggcagcaaccttcacc

SEQ ID NO: 33855 - DNA, 337 bp, Zea mays
tttgactaacgcgccattccaacaagatagaccttgtgcagcttgttaagcaggtaatacaagtgggaggagcacatcacagccagaatgtgatgaccacttcaagacctctggagttgctgcatatggacctcttcggacccatcggctatctgagcataggaggaagtaagtatggtctacttattgctgatgacttttcccgcttcacttgggtgttctttttgccggataagcctgaaaccccagggaccctcaagcgcttcctaaggagagctcacaatgagcttgagctcaaggcaaagaagataagaaacgacaatgggtctgagttcaa

SEQ ID NO: 33856 - DNA, 358 bp, Zea mays
agcttcggcttagcggtggaaaattgaaccgacttaaaggggaaaaggttgtctagtcctcgatagattatctctaagccaatagtagatgtcaagggcgtgaatgtaattctacataggctacgtcttgtgcctataaatagatgaacaatgacactgtactgttcacgctgacttgtattcactcgcacgtcacgcttggatttttaccttctgtcaagccaaatgtattaatgtaattcaatactatcaatatttattcatgacaagataataaaaatgttctgatgatgtcatatgattattcatgttattttctatgtttcatatgtttctactttcattattacatactgag

SEQ ID NO: 33857 - DNA, 375 bp, Zea mays
tcactgaaaaagaaaaaggaaaagattaaactgtgctgggccggtttcagcccaggcgggccaggtccacgcagaaacgcgcgcgcgcccgcgctggatactttgcagaaaagccctcgttgttctggctaactaagaacgtgttctttcactattttcttgagtcactgacgtttttcagataacccctcggacttctaattctttaccgaccgaagcccacgacgtcgcacggcggggcttgcacgccggcgaaggtagactgaccggacggagcaacgactggtgcccccaagcggctgacaccgaattgaaccttccccggcccatttccccaacttaatttgaagaatggagatctaaattgttctggcc

SEQ ID NO: 33858 - DNA, 342 bp, Zea mays
agcttgccgatatacatactttttcatgtacagcagaaattttagagagatgcttcactaatttctcagaaacctgcaaaataaagatgcttatcatgcaactacatcaatggaatatacaggaataagaaaggtcaagtctcggaagaaacaacagtaaatgtcaaattattcctgtgatttgatcatttgagcacccatcagctattcagctgtagtaagaaaagaatggttcaaggctgtggagagaactaaatggaactcagaattacctgaaagaaaacattgtttgttagcacatgatctgtattgtttacaagaaattttatagcaacaagtgtg

SEQ ID NO: 33859 - DNA, 366 bp, Zea mays
tctcctgtacaagtgctgctcttaccgctgagtgcgaagctgccacatataataacaaaggagcccctggtgttggtggagttaatgttgttagatccatcaaatattgcttcagttcctcgaaagctttttgttggcttggtccccattgaaagacttcggctgatttcagcacttcgaagaatggtaaatttctctctgctgatctggatatgaatctattgagagatgccagcctccccgtcaatctttgggccccttttttgtatttggtggctccattcgaagtatagcttcaattttacttggattagcttcaattccctttgttgaaaccaagcatccaagaaatttccccttctttac

SEQ ID NO: 33860 - DNA, 460 bp, Zea mays
agcttatgaagaatcttcatctcaacatggtctattctgcggtgctagagccaacccatgttagtcttagcaattaagcatgtgtcgagttcagctctatcaaaatctactaagtatagctgaccctctaacacacccttaaatgctattgaatcatcacttcttctaaagacagtgacacctatatcagtaaagagacagttgtagcccattttgcataattgagatacggaaagcaaattgtaatctaatgaatcaacaagaaaaacattggaaatggaatggtcaggggatatagctattttacccaaacctttgatcaaaccttgatttccatccccgaatgtgatagctcgttggggatctttggttttctcgtaagaagagaacattttcttctccccagtcatgtgggttgagcacccgctatcgatgatccaacttgagcccccggatgcat

SEQ ID NO: 33861 - DNA, 360 bp, Zea mays
  unsure (1)..(360): unsure at all n locations
tgtcttgaccacgatgtcatcgacgtaggcctcgactgtgcgaccgatgtgttcgccgaacacatggttcatgcaccgctggtacgtcgcgcctgcattcctcaggccgaacggcatggtgatgtagcagtacatgccgaacggcatgatgaaagaagtcgcgagctggtcggactctttcatccggatctggtgataccccgagtaggcatcgaggaaggacagggtttcgcacccagcagtggaatccacgaattggtcgatgcgaggcagagggtagggaaccttcggacatgctttgttgagaccagtgtagtctacacacatncgccagttcccccctttcttcctcacaagcac

SEQ ID NO: 33862 - DNA, 450 bp, Zea mays
agctttaaatgtgttgtcatcaatcaccatatttttgtatattaaaagtgcattcatcccttgtgtgggttttggtgatttggataacaacacatttaaaatactaacaagtttgctaagtgttcaacatgaaaatcagtatgatgaacatacttgaatagtgtataataaccagtgagacaatgcaaatggatataatatggtctctaaattggtttgaatatatggacaagacctaagaaatcactatgcataaatatgatcagaatagaggttgaagtgattaagaggattggtcaagccaaagtgaataatgtatgaggaatcgtgaattgtgaaagggaaatatgcctttgggacatttctataattgttctggtgattaaatgcccaacacactgtgtttagttcttatgtgctaaatgagtgagaagtactaatcgaagaaaa

SEQ ID NO: 33863 - DNA, 284 bp, Zea mays
  unsure (1)..(284): unsure at all n locations
accaaccgctgcctctgcaaaagaaccgccgccaccactgacgagccgttgccgctgacgcaaggtggctccgctgccgcccaagcggcttctagtgacctcccgccctgccccgatgcccagcccgccaagcacgagcccgtggccgcctncgggaccatcccaacgccaccagagccaccccgacgtagcccgcgcccgcccgagcctctgcccctggtcctgacgccaccggcgcccaccccgaccgcgaccccaccggcgctcacttcaccggctcatcg

SEQ ID NO: 33864 - DNA, 281 bp, Zea mays
  unsure (1)..(281): unsure at all n locations
agcttctagcaacttcatcttgagntttcttattgatatgcaagagctgtcctttaagttctacagataggcaacaaaagtaaaaatgatatttaattcatctccacatcaccattattccaaaaaaaactgcactgaggctcctttagaatgtacttttgatgagctactcaaatcacactggttttattcattccttgtggcatctatggatgcacttacgaataattaagtacatgccaatttagggcttgttcgtttaagagtggattggaggggat

SEQ ID NO: 33865 - DNA, 422 bp, Zea mays
  unsure (1)..(422): unsure at all n locations
gaaactaagcttgggaggttcttcatccncacatgtgctaagcggcgatgccacacctttcttgctagtcttagctattaagcatgcatctagaccggcctcttcttttgcaaaatcaactaaataaagtttgccgtctaacacacccttaaaagctagtgaaccatcacttcttctaaagacagacacatctacatttgtaaatagacagttataccccatattgcataattgactaacagatagcaagttatatccaagagactctactaaaaacacattagaaatagagtgctcatttgaaattgcaattttacctaacccttttaccttgccttgattcccatcaccgaatataattgaatcttgggaatctttattcttgacgtaggaggtgaacatcttcttctcccccgtcatat

SEQ ID NO: 33866 - DNA, 371 bp, Zea mays
  unsure (1)..(371): unsure at all n locations
ctcgcataagggatgagtacagtacaccgcgcagcacgagcttttgttcttctacagactggatangtgcgccgtctgtagggtggacctgatgccgcctgccaaccgaatggacaggacgcaataaatgccgtgggggcacatcacctgtcataagggtggacaggcggcatgttccctccgcaataaatgtggaggctgcgcggctcagaacccttatgtcatgctccgcccgctggcctgtcacagacaatcagccatgagaccttcatccgagcggggagcggaggcgctctggatagagcctggacacgcgtcaacaccggacctatgcctatgttacgacaatttttcttccgggaccttgttat

SEQ ID NO: 33867 - DNA, 400 bp, Zea mays
tacaccttcctattcatctttcaccgcgtccggatatagcataccttttcctctacgtcgacgacatcgacctcacggcctcctcccctgacctcctacagcacatcatctcctccctctaccaggagttcgcgacgaaagacctatgtgagctacaccacttcctggggatcaccggcgagcgccgaccctagacctattcctccaccaacgacagtacaccgtcgacatcctcgagcgcgctggcatggctgattgtaagccctgcacgactccagtggacactcatggcaaagtctccttccacgatggccctctattggttgatccgaccagctatcagagttctatcggggccctacagatcctcgtcttcacccgccccgacatctgcaacatt

SEQ ID NO: 33868 - DNA, 392 bp, Zea mays
  unsure (1)..(392): unsure at all n locations
ctatgcatatttactttatttgttcccttgcatggggnactcgttgtttcctaatttgaatggatgaatgtatgcatgcttgcaatcgcatagagaacgatccggttgaagagcccgatgaactcgcatgagaagcccctgagcaccantcggttggtggaggcaagtgtcccttgacctatctctgtcctattcattctttaattcaccacccgctttacacatttatgcctaaggattgactagcttttgttatccatgtccttgcttacctatttgggttggactattattgttagctttatgctattgctcacactctaatcaatgaacatgatgagattatctatgatacactatgttcccctctcttattatgatgtattacttgt

SEQ ID NO: 33869 - DNA, 454 bp, Zea mays
agctgtccaagcagttgagatggtttgttttgtccaacagagacttccagagtcacttgtgcatagtgaaattctaaggcacaatagcaatgggaataaaggcaggggtaggccgaagttgacatggaaagaggcagtaaaaaaagacttgaagaaatgaaatataaccaaagatttagccttgaataggagtacatgaaaaataactatccatgtggttgaaccttgacttatggtttctgttgggtttcaactctagactagcccaacttgttgggacaaaaaggttttgttgttgttgaatatctcgaatccttatcctaaaaatgtttctgcaaccaacagatatactttctaataggttaagaaaactaatgtgtgtcattttaagatcacagtagtaaaagcattatcccattaaatcatgtgatcggtgactctagttgaaccatag

SEQ ID NO: 33870 - DNA, 379 bp, Zea mays
  unsure (1)..(379): unsure at all n locations
ctaagctgcagcccatcggcacggctctctcctactgaaatcngtttacgctgcacacactccatctcatggcgcccagatgttattgggagcgggaaaatgttgaggagaaaaaaaaaagaacgcaaataccgatacatcgtgtttcaggttacaaaccgagaacacggcgccagaaacttttcttctcgacgacgacgagctctgttcccaagttccgcttcaggttcggcgtcaaatttaccagctaggaacagaggggtccagcgatgagcgccttcacagcttcagttccaggtcgacgccgtcagaggcgtcgtcggccttgatcccgatccggggtctgtcgatgcgaaccggaccagccggcatgaagctg

SEQ ID NO: 33871 - DNA, 339 bp, Zea mays
  unsure (1)..(339): unsure at all n locations
cccacaggaaggcgggagngggctggccacaatggcccaagctccggcggccatggccggcggaactgagctcgccggaactaacaaaaagtggccggccggagagggtgagtgcggggcgaagaggggcgcgctcggggaagctttataggcacggcgcggtgcacgggcggtcgaggaccggagagcgcgcgcgggcgagcactgggaggcgcggagcgcgaacgggcgcgaaccaggggagtcagccgcggacgaacacgagttcccgcagcttccgccccagcacaagcgccgaaagagagcaaatcctcgcgaatctgggcaagatcgccgcga

SEQ ID NO: 33872 - DNA, 467 bp, Zea mays
  unsure (1)..(467): unsure at all n locations
gacacacgaatagaacatcgtcatatcactgggcttcaaaatanttatggnataccgagattctctggtagtcatcatccagataaacaatgaatgggattgttcaagtgattcaatgggaaaatactgcgctgccgtccgaaagctggaagataaattcgagggtctggaatttcatcatatagaaagagatcggaacacggcagccgatgtactgtccaagctcggatccagtcgaactcatgtcccacccggggtcttcgtgcaagaaattcttcagccgagtatctcaatggatcaaacagaagagtgcaacatcatatatcaacccgagttagactctgatgactggagacagccgattattaagtatataaagaatgaagaagaaccaaatgacaagaactcggcagagcgcattgccaggcagtcagctcactatacgctcattggtgaggtattgtaca

SEQ ID NO: 33873 - DNA, 457 bp, Zea mays
  unsure (1)..(457): unsure at all n locations
gtcaccgcaggctgcagcttgactgaaaagagatgttattcttttctgaccttgaaagagatcagcatgactaanaggtgatggaaactgacacaagtgggatggatgatgaggccaaacagtatttcaagttactgaaacaggagattttanctcgacgttttgggagtccacaaccatagatgtcttttggttatgctctgtttactggtttagtttggttttctttatatactgctgtcagtatgcattttagttcaataatagtgtctgaaacatgtgacctgaaagatgttagtatgctgttagtatgcattttcgtttctgaaggtaacaaaggtgcaaggatacatatgtgctactgaaattaaagcaaacatatgtgctcatagactataaaatgacttattgttgctgcttcatgtgtccaaaaagctacacaagatgctcaaacata

SEQ ID NO: 33874 - DNA, 373 bp, Zea mays
  unsure (1)..(373): unsure at all n locations
gtatagaaagtcatcttcatcgatgccattgtacactaaggcccccttncggtacttcaattcccgagcgtagtatttggcttctgcaatctcctcttcagacaaccttttacccgaagcatgtcgaataataaagtcaagtccttcagaaggtgcctcgggagtaggagattcaatcttcttgggcgtgtcctctttctccggaataagaccgacgtctgagggtccttgttcaacactccgcccagtcccaacaggctctgtttcaaatggcattgagggtccagcttcnggttcagcacgagctgtagcagcttcggcagtctcctttgcaggagaaggagttgatgcccttatcgactncatgacagcg

SEQ ID NO: 33875 - DNA, 361 bp, Zea mays
gcagcacaggcgcactgtgtgacaaaggactggacaagcgcacccgctgcaagatggtcctggcgcctcctgcctgcggagaggacaggacgccacaaaagctgagggggcacttcgcctgccagcaaggaggacaggcggcgcgccctctcctcaataaatgcagagaccgcgcggcctacaagcctcacgtcaagctccgcacgctggcttatgtcatgggcaacaagccacgcggcagcatccggtctccgcctgaacggggagcgcaagcgcacaggataagggctgcacacgtgtcaacatcggaccctcgcttatgccaagggcgcccctagtaagggacctcgtcgcgcccgga

SEQ ID NO: 33876 - DNA, 438 bp, Zea mays
tgcaagcttacccaagacgaggcattttatcatttcttagagccttaattatggagaggatgtctatacagggctctatctagctcaaacgagacacactacccgagcttgttctcgtgcacgtcacccggcaggtcttggatttatcacttaaaatcccccaatgtgtgacctagcctaggtcacatttaggtgatgttgaacccatggtggccatgatggagccaccatcaagtattatgtgtggaagcataacattccatctgaagcattgtcttttgaaaaaccgaaacattgttgttgtctatagcgagactatgcattagataacgttttaaccaaacaggtaattcaggaacggtagatagtctccagagaagggaaatgcatctattaggctgagcacccaacttctatcaccgtatgcatcattcaagt

SEQ ID NO: 33877 - DNA, 412 bp, Zea mays
  unsure (1)..(412): unsure at all n locations
aatatatgatcatttatattcgctttagtattctttatatttcatttctcgntattatttaatgaatgtatgaaggtatgtccttcataaccttcgtccatgaatcattacatcccaagggaaataatgcttccggggggacgaaagactttaacgattaacattctccatgttgccttgttcttaactcatagcacttgagaacaagtctccaacactcgccatcggggttcttaagaccagatcaggttcacgccaaccgagagcacggatacaccaccgaccagcctcttgccacagagggtacacgctactctcgccatctctacactcccattgcgtggtatcttattctggtattagtctgcccgaggcaaagcttacccatgacgaggcatgtgactagttaaag

SEQ ID NO: 33878 - DNA, 384 bp, Zea mays
  unsure (1)..(384): unsure at all n locations
tgcctctgcatgcttctccctctggagatcaatgagtggcaccagcatgcctacggggtgccatttatgtcatcagaccacgaacaagaagaagaagcctattttgatgatcgcgagcagttagtcccacctccctattacggggatccgggtcaatcattctctcaccctttcccccaggatccttctggcagggctcctcccccggatcagtctggggaagaacactntgcctntcacctggcccaccacttctttgctcctcatcagcctcctcctaactggtgatctgtggattggtggctctctctctttttggctctcgttgccacaaagggggacaaagtttctctacctaccacgaccttctatctatagaacgaa

SEQ ID NO: 33879 - DNA, 460 bp, Zea mays
  unsure (1)..(460): unsure at all n locations
agcttttaagttntcttcattagagttaagttttgcccctttgagccttatttagggtcaggttccctatccagggtcctatttgcaaaacactaaaaacaatacacttgtttgaaatttttacctagtgaatgcactctaggtgtgtcaaacatatgcaatgccaatgtttatgatgccatgctcaagttttagttacagtaacaccaggggtgttacatccttccccccataaaagaatctcgtctcgagattaaaagtcctagggtgagtaatggaaaaggaaatgtgtcacatttttattcccttatttctggtacaaggcaggggtggtgtgggggttcactactttattacagtagctatacacactctacaaattacatgaggctagaaagcctgngaaattcttattcaaaaagtcttgagtttcccatgtagcctcttcttcagaatgttg

SEQ ID NO: 33880 - DNA, 425 bp, Zea mays
  unsure (1)..(425): unsure at all n locations
tagaacttcggagacanagtatactgggggttgggtttttngaattatccttctaatttctnctgcacaagcgccgcactcactacagagtgcgaaactggcacatataataataacggagcccctggtgcaggtggaagtaattgtgttagatcaatcaggtattacttcagctcttcgaaggctttcttgtgagttgggccccactgaaagacttcngctgactttagtatttcaaagaatggcaagtttctttctactgatctagatataaacctgttcaatgaagccaatcttcctgccaaccgttgggcccccttcttcgtacttggcgggtccattcgaagtatggcttcgatctttgttggattggcttcgatccccttcgttgaaactaggcaaccaaggaacttacccttctttac

SEQ ID NO: 33881 - DNA, 462 bp, Zea mays
  unsure (1)..(462): unsure at all n locations
agcttatctaaaggtctagccttagtcttatttgtagctcatgcaatatatgctttagagcggaccccctgacatcacacgacccatataaaaacaccaagcctaatgatagcatttggatttaactgatgcatgtatacctcaaatttcttaagaaccttcgcaatcatcctatacatcggcaaccaaagactagcccaatagcagcttatgaaaaccacaacttctttgttcttcggcttttcggggtcatctcatcatcagcaagacgaactttaaccttattgccaaaatacccaagctccttcataactttcaaatctttagccttcaaaatagatcaacccattttaatgtaacctggctttgttggccgactttcatattcttcctctacaatntcggaagccttccccgttgtatcattcagatcattcttggaccttaacgctgcagaagccc

SEQ ID NO: 33882 - DNA, 494 bp, Zea mays
  unsure (1)..(494): unsure at all n locations
actaagctgacacggttggcctttggcgtcctcataccgagaggtttctccacatatactagttcacaaatcttaccatntagaaaagcactcttcacatccattnggtagagttttatgttgtgggcacaagcataagcgagaagaatctagattgcctccaatcttgccacgggagcaaatatctcaccaaaattcaatccttctatttgtgtatatccatgtgccagtagtcttgccttattccttactaccaatccatcttcattgtgcttgttgtgaaacactcatttggtaccaataacattgtggttcttaggtctctcaacaagctcccacacttcattacgggtgaagttatttaattcttctttcattgcattcaccaaatcaacaccaagtagtgcttcatctacatggttagggttaatacaagatataaaagagaaatgttcacaaaatgaagcaatacgagagcgagtttgaacaccctt

SEQ ID NO: 33883 - DNA, 450 bp, Zea mays
  unsure (1)..(450): unsure at all n locations
agcttatatgataactgtagaaagaggttgtttttcatattctagaaaaataacatatttcattagtaagattccaattcctcaaaatgaaagaaaacaaacgagaacttagggtttgttcaattatttttaatccatatatattcgaaatgattgatatggattgtgagacattttaatttactagtgattgaaaccccctcaatccgtatggattggggtagaaccgaacattggccttaaggcttgttcagtttaggagtgattgaatgagatttgaggagattaaagggctctttggtttgctgcctaacctgtcacactctgcctaaatttttgactaagtttagttattcaattcgaatgactaatcttaaacaaagtgagacacgaactanaccgactctaaatatcttcctagttaaagttaaaactgaatacgagggaatt

SEQ ID NO: 33884 - DNA, 417 bp, Zea mays
ctaagcttatgggctacctcagtctatattgtctgacacggaccccatttttatcttcatattatggcaagaactcttccggttggctggcactcaattgtgcatgagcaacgcctatcatcctcagtcggacggtcagaccgagcgtgtgaaccaagcataccttcgctgtttcgtccattcatgccctcgacagtggtattcctggttaccgctggctgaattctggtataacacatgttaccatacagcagtgggtaaatccccctttgaggtgttatatggtcatgctccattgcagctgggtttggagtctgttgatcagtgttcagtgcctgacctgagtacttggttgcacagccatcagcagatgttacaacaagtcaagtttcatctccaacgtgcacaagaccgtat

SEQ ID NO: 33885 - DNA, 449 bp, Zea mays
  unsure (1)..(449): unsure at all n locations
agcttctcacaatnttctttgaggtcattgttatatgtctagagctcctcaaaagacacttggaggtttttatacaattccttcaaggtcttaaatttttctttttctttgtgcatgtagtcatcggcctcacctaacattctaacaagatcatcatatgaatagccatcatcatcaacatcatcgatatcatcatcatcttttatatcatttaaatcggtgatgatttttaccttagcatctccctttgccatgagacaatgggcggatgagaagagtgagggagcttccttgatggcaattccggcattaagcttggatgaggtgtcatcatcatcatcgtccgagctatcatccgagtcccattcaactaagtaggctttgccatctttcttctagtataagatttctttttcttcttggtactatcatctttgcccttcttcttc

SEQ ID NO: 33886 - DNA, 447 bp, Zea mays
  unsure (1)..(447): unsure at all n locations
cctaatttcctagcaactatctttctattctttctacaaatagcaaacgaagcatttaaagcatgataaattgtagagggaccattcataacttttttaggaacatgaacaatattcttcctaggcacatgatgaatatttttcctaggcatatctctaccatgcatataggaagaactggaagcatacatagcataagagtcataggcatgtgaatcaaaagtattgcaactcctatgagactgtcttttatcattgtacataaaagcatggttctttttagtactacttgccataggggccttccctttctccttggcggagatgggagccttatggcttgttaagttcttggcttccctcttgaagccaagcccatccttaattgangggtgtctaccaatcgtgtaggcatccctagcannatttagtttatcaaaatcactt

SEQ ID NO: 33887 - DNA, 375 bp, Zea mays
atcgtacgggatttacccaatgaccataaaaagctagtgcgtgcgctcgataactctactatttgcacacgaggctgaactgatggaatacacacgtaattcatcagctacaggttgccacgatcagtcacaaaccctctaagggataccatagacatgtacctagggcaacaacagctcttcctaccacatcggtgataaatttgccaaatagcacgtgtccggaccatcctacaagagcgcggaacggcgggccacggcggctgattccatctaagaagagaataaccaagcgtgtcccaagccccacataccgtcaaaccctaataactcattggacggccgattatggcccagacagcctaatatacacca

SEQ ID NO: 33888 - DNA, 259 bp, Zea mays
atttggcgctcaccatccacacaagaacattatgaccaccgatatgccactctagctacttcacatggatttattcagcccgattgcttacataagcatctgcgaaagtatgtactatcttggtattggggataattattctcgcttcacttgggtgttctttttgcacgaaaaatcacaaaccccagagaccttaaaaggattcttaacacgggctgcaaaccagttcagattgagaatgaaaaagataagatttgat

SEQ ID NO: 33889 - DNA, 353 bp, Zea mays
acgctcccatgggtgaggataactaaggtgacattatataccttgcccgttatcccgaacactagattgagataattcattatgggaagtctcactctggctctcatcatgcgcctatgcaatgtatataagcatctacttctaagcaattcactcatagcccattgcgcgaaacagaaaactcctattacatcaaatgagcctattaattcattaaacaatggtgatgcttcatatgttgtaactaacaaatcatgcttagcatgttgcctaatacgttggggccaaacacaaaggctcaaagacttgtgtttgggtacccaacgcgtctgtttctaatgtgaaaggaccca

SEQ ID NO: 33890 - DNA, 325 bp, Zea mays
cagcgaaggccctcacacatccgcataacaacataatgacgaccgacaggccactgtgactcctaaacaaggatgtattacgcccgatcgcctacagcagcatcggcaggaggaagcaccggctagacattgggggagatcagtatcgcaaaaattgggtattctctttacacgagaaatcacatactcctgagaccttaaacggattcttgagacaggctcagaacgacctccgtctaacgatccggatccatacaaacgacggcataactgttgttcagaatggctacaatgcacgcttccttgacgaggagggcatcgaaca

SEQ ID NO: 33891 - DNA, 455 bp, Zea mays
  unsure (1)..(455): unsure at all n locations
gcttcagcttcgcaatacanacaatatgtttatgactgaaatgaagtatgcaagaattgattaacacgggaaacatagataataccctcaattgattttgtagcacatgtgtataagactgagggtatgattgtaattttcataaagttgtatcttgccactataaataggtgtacaataccatgcataggggataccttttttgggtgatgatatgatttgctcagtctacaaagctgtctcttcttcactcatactcccttctctacttacataaggtatatttgtaattgtgtagtgaaagagaagtaataaaaatgacaacaattaactctntttaaatgtttcattntgcctgaaaaccttttatcttcataagcttcttcctttaatatatttcatgagtaaattaaaggaacgaagtttttctgtcntaactgtgtaccttgtttgat

SEQ ID NO: 33892 - DNA, 322 bp, Zea mays
  unsure (1)..(322): unsure at all n locations
ttctagaaaaactttgatggcctgattagaattatacctatcagtgagaaacttttcataagagatcttaatgggcctatatgtatagcaagtgcaggttttgaggcgggccatggagattttgggtatagtagtaggaagcaagaaggagagaaagtcatggactttgcggtagcttttgacctagccatcattttctttagtaagtgagaaacccatttggtgactntagtgaccaatactatagtcaagttgactntgtcctcacaagagaggataaacaagcaagatttttacttggggagtgtgttctcttaacata

SEQ ID NO: 33893 - DNA, 385 bp, Zea mays
actaaatctgtggacacatcttcatcagattttgagtttatgacacgcatgggtgatctttctttggagcgcctgtcagtgtacaaaacagctgttacaactgaggaaaagaagttggattcaatgaacagaaatgagaggcagaaattgcttcttgaaaagaagaagttgaacctatagaaattaaggcttgaaaggcagaaactaaaggaggacaaggaagaggagataatgatcttaagcatggatttgagcaaatgtaaccctctactccgccagtactatgaagccaagcaacaagagatactggcaagggttactgggtctacttcatctggccagtgaaggttccttacttaatatgtttgtttgtcatttatgaatg

SEQ ID NO: 33894 - DNA, 416 bp, Zea mays
  unsure (1)..(416): unsure at all n locations
gagtgtaaccactctaagtgatgtctggagatcatgcctagaaggagatcatgaccggcggtgacaagtctacaagccaccggaaggctccatctggggagtccggcaacaaaatgaacggatccccttcgcataccaagtcgcatcggagcggcgactagaaatagaagatgaagaaggtggtctaccacgagaccgattcctcgtcgccatgcacctctggctccgacactctgtccgtcacttctaagcgccatgagcgcaagaagtttagtaagatgtccttacgctatccccacatcttcaaacgcactcctttactttctgtctcattatgcaaaccacctggtttgacggtcaagactattgtatgtggagtgatanaatgaggcatcatctaaccacactccacgcta

SEQ ID NO: 33895 - DNA, 400 bp, Zea mays
  unsure (1)..(400): unsure at all n locations
ggacgagtgaaagtacgcgtaagcggcgaggcctaccggaccgagggattcccatgcctctgggatacggatacctcactcgtcccttccgcgagaagcaactctcgctcgcacaaacatccctattatcgacagaaagtccagatgctcgaaacaagaggaaaaaagacacagcttcccaagcacggcgagggtgtgttntctggcctcggcggccgcagaaggcacacgctacaagacgatctgatcctgcaggctcgggtcttcacgctgaatggagccgtagcaccctcggcatcgacggcgtctgcagcaaagtccaacccatcctcagacggcgacgcggtccatggactcctccgagaatccggcccgagcaggcggctcggtcggttacccc

SEQ ID NO: 33896 - DNA, 433 bp, Zea mays
aaaaaaacaatgccaagaaaacatattggtggaatttagacacgggtctctctccaatgtacctgttggcctattgagacaataactagcagttacgacctcatttctaatagtgcctatcacaaggaaacataataatgtcaagagtgactgttagttcatacaaatgtaagtattacatgctgggtcctgcaaaaaaatcatctgaataactcaatttgatatgaccagtgcctattcataaaagggcataatttaagacacagcttacagccatcttcaatattcaaagaagctgtcatgtcaagtggcaactgatattaatgcacctacacaactgatgccaataacagtaaaagggcccgctggttttgatatcttggactgtatgttcatcgacctatgatacaaccatacaatgagctgacatatt

SEQ ID NO: 33897 - DNA, 379 bp, Zea mays
  unsure (1)..(379): unsure at all n locations
gctgcaacctactcgaagaagtttctcactccactgcgtactaaatcttctagtagagaaagaatttaagttttaaaggaataagttttattcgcctattcaccccccctctatgcgacatccagatcctgtttccgggtcaaagggaactttcacaactctttttatgtctccaccagagtgtttgacttacagataagaaattgaggttgatttgcaaaaacaaaccaagtggtggcaaagtatgatccatatatgccaaatttgaatcaaaacaattttgagttttcatttgcattgatattgcactagttctatttgctttttgttgtgtggcntacatcacccaccagggggagatngaaagggaaatgtgccc

SEQ ID NO: 33898 - DNA, 394 bp, Zea mays
gttagctaaccctgtgctaattaacaaaaagggacggaaatggaagatgtgtgtggatcacattggtctaaataaggcatgtccaaaggttccctaccttgtgcctcgaaccgatcaaatcggggattccactgcacgatgcgaaccccaggcttttcttgacgcttactccggttaccatcaaattatgatgatatagtgcgactagctcgtgacttcttttatcacaccatacaacatatattgctacactatcatgccctcaccctgcaggtatataactacattttatttgaagatgctcgcgtcctatgttttacacaaccaagattcactgtcatcaccgaagcaatgcatccaaatcgaaatcccgacctactttgtcacacctaga

SEQ ID NO: 33899 - DNA, 368 bp, Zea mays
  unsure (1)..(368): unsure at all n locations
tttgggatcaacccaagaaaatatattgactattctgaggagacgaccaaggccacaccaccaggatgtgccatgttaccatgcagaagctaaagcagatagcagaagctgccgctcaacagagtcagccgaagatagtcatgcatactgcttcgtaccatgcgccttacattccagagtatgtaggcaaccaccctgcagcttctgttgcattggctagccaacctcaggcatattggcaacagnctccaccttcaccaccaacgcaacgaagccagcagccagaagggagtgcaggcactcaccttcaatgggactgcagagaagagtaccgagctcgcacagacaataatactgtgccagagtcg

SEQ ID NO: 33900 - DNA, 398 bp, Zea mays
atcaaagttagtcgacagagatctaagaacccaaatgtcctttgtgttagcactaggtaaactcattacctttctagcacaagtagcaattttgggttgcctagttacatgagaattaaatgacaagctaggagtggaatagttaccaatggggcaatacttgcattgatgtcccttctttaagcatatgtagcaaaggcgatcttcaagacttgaaaaattcttctttccttgtttctttcttgctacatggttagagaatattgtctttctaacattatgcccttttgttcaaatggggacaagatttaataaagtgtcccttctttgaacatctaaaacaaagtttatcatccttgttaataatcaagtcattcttgatatacggacatgatcta

SEQ ID NO: 33901 - DNA, 391 bp, Zea mays
cgtacccgagtgaaccgagcgaaccgctagaatttgtgcgcatgagtacgtaccctcctgtcaataacgtgggttgtaggactcacgtgtagaattattccccttcactcacacacgcacacccattcatttttttttagcacgaaatctactctctggatcgtgtacgtatcgtcctgtggtgggaggaaatttcgtggccggcactcatgcatatccaccatatataggtcaggtgcgtgcagtgccgtaacgaaacgcggcttcccgatcccacttgccgccggacatgcagcgccgccttcgctgttcctcctccactcgtcttcgtaaacccggtaaacagaacgttggtaattcgtttttatttctattttttaaaaatagaact

SEQ ID NO: 33902 - DNA, 462 bp, Zea mays
agctggccattgtgatgatagctaatggtacactactcacattggtccaaaatccttgagatgcctcttcaggatgattagccgggcatttgtcctcaccccaaaacagcctcatataaaatagcttctttgagctgtcatgagagagcggatgtagctcgtaaacctcctcactggaagctacttgtcggttgcgagtggttgtgattactctgctctgcttattcttttgatcaaaagctaattttattgtatcccaagattttgtatcccaaacgtcgtcgataacgatcaagtacctaccatgcgtaaagacaacactcaaattaaataatagaacatgatatattaactctagcacatggagtattaaaacattatttaaaataatactttaggggccgtctggacctcgttcatttagaagaaataagaataatctacttagtatagtagactatg

SEQ ID NO: 33903 - DNA, 412 bp, Zea mays
  unsure (1)..(412): unsure at all n locations
acacatgccagcacagcaacttctgtatctccagtgaactggcctttcgcatgctggggaatggatatgattggacctttcaagaaagctcaagggggatacactcatgtattggtggcgatcgacaaattcactaaatggatagagttcaagcccattgcttcttcaacctctgctaaggccgtggaattcatacaagacataatattcaaattcgggataccaaacagcatcataactgacttaggatccaacttcacaagttcagaattcttcgacttctgtgagcaaaagagcattcagatcaagtatgcatctgtagcacatccatgagccaacgggcaggttgagcgagccaacgggatgatactggaggcactcangaaaaaggtcttcgacaagaatgaaaaat

SEQ ID NO: 33904 - DNA, 431 bp, Zea mays
  unsure (1)..(431): unsure at all n locations
agtctcatctgcgtttgagaatgagagcccgcctccacaagggagggatcattcccacaaccctgttcttccttttggcccttctaatgaacacttgtagcatgtctgccataatattgaaccagaagggagataaaggatcccccttgtccgagtccttttttntgtctgagaagaaatctctccatattcgtcatataacaattcacccgctaacacttcttcttctccgaaatagaagagtgcttatatcccaagatatctcatgttggaccagagaaacctcttcttctgagagatttatatataaaaaaggctccctcaccttatcataggctgtctcaaagtcaagcttaaggattacaccactgagttttttccgatggagttcgtgtattgtttcatgaagaattaccaccccttccaggata

SEQ ID NO: 33905 - DNA, 362 bp, Zea mays
gaactgaggaagcgaacaacgatggtgatattcgtcttccagatgaggtgtgtgtgccatatactggtaatgaccgcgaccttgatagactgatagatgacatttaccccaatctaaatgaaaatatgtctaacacaagctacatcacttcaagagcaatattgtctacacggaatgactgggtggatatgataaatatgaggatgatcgatcgtttccaaggggagcagatgatgtaccatagttttgacaccgcggtggatgatcctaataactattacccatcagagtttctaaacacgctgactcctaatggactacccccgcacgttctaaagctcaaagttggatgcccaatcatg

SEQ ID NO: 33906 - DNA, 432 bp, Zea mays
agcttgtactctagtccagtgtagtgctgatcatattattggtgggagctgtgttacaacttgtgtgctcatgtgaagaaaggaggtcctatcctcttatatagttatatctcaagagtgggactttacagttagggacttgtattcctcctcacatcggccatgttgcgcgtaagtggtgtagtcctcctcacatcgtatatagggtcgtgcgctgccgtaatcctggtatggcgtaccacctcatccgtctagcatatgggtccctatagcaagttcgatgttgatgtatcggcacttggcaggtctcgcagggtatacttatggtggggtttaaggatgcctttggtacaactttgtctttcgtcatgaacctggcgtcaccttcccgcatgcgtaagtatacccttggtgtgggatatcgtcacgtcc

SEQ ID NO: 33907 - DNA, 468 bp, Zea mays
  unsure (1)..(468): unsure at all n locations
ctatgaagattcttcatcccaacatgtgctagtcggcgatgccttatctctcccatgttagtcttagcaattaagcatgtgtcgagttcagctctatcaaaatctaccaagtatagctgaccctctagcacacccttaaatgctattgaatcatcacttcttctaaagacagtgacacctacatcagtaaagagacagttgtagcccattttgcataattgagatacggaaagcaaattgtaatctaatgaatcaacaagaaaaacattggaaatggaatggtcaggagatatagctattttacccaaacctttgaccaaaccttgatttccatcctcgaatgtgatagctcgttggggatcctggtttttctcgtaggaggagaacatcttcttctnccctgtcatatgggttgtgcacccgctgtcgagtatccaacttgagcccccggatgcataaacctacaaa

SEQ ID NO: 33908 - DNA, 450 bp, Zea mays
  unsure (1)..(450): unsure at all n locations
agctntaagttcgactagcagtccagctattgtgttctctaagctgtgcaagtgtaaattcaagggtaaacacacgagggctataaaacaccaacaccatcatgattttttaagaggtttcacttgctaaactcaaagttgtttggattggggtctttttatgaatagaacagacaacatnttttttgtaaaaagggttgaacaattacaataccacctagatagcaagacaagataaacacataacacgacctaacaagacttactaatctgaaacgaggtaaggcatttctaacatagcagtacatcacattattcacaagttcttattattggaataagggtgagggaagcatgttggtgcacaagagacaatgaaaatgcgacaatcatgatgcatgctcattctagtcgtcttctcagacctaactaatttttcaggtgcttcta

SEQ ID NO: 33909 - DNA, 459 bp, Zea mays
  unsure (1)..(459): unsure at all n locations
ggagacaacaactgcacaactngcaagaaaatcatcggtacgtcaacaataccctggcagttttacagatgcatcattcagaanatggccaaatgtaaggaagatcaataaaagaattgtcagcatgagcacaaatacaaaacgtctgagtacagaaacacaagggattttttaaacaagaaaatccattctgctttttaaagaanaatatataaagtggtttaaaacaacaacaaatctgcgctgctggatcaaccttaaggagtaaggaccacgaggtaactagaacacctccaacatcgaacttgtgcatagtgtatgaattagtatagcaatatgtgagaataattttagcatacaaaatgcataagaacagaacctagtttatggacgtggtaatgatgccataggataatacatggtttatgcagacatcagttntcataagcaagagaaatg

SEQ ID NO: 33910 - DNA, 292 bp, Zea mays
atacagaataggagaaggcgttatatgctgttttgatggcatacacgaagcttcgacattactttcaagcatacaatattggtgttccttcttcacaaccgttgaaggacattatgagaaatagagaagctactggactgaatggaaaatgggctgcagagctcaatgacatttgcattgattatgtgcatagatcttctatccaatctcaagcgttggcagagttcattgctgaatggacgctcagggctcaggatgaagaaacaaatgaagatgacgaagtgtggacagt

SEQ ID NO: 33911 - DNA, 308 bp, Zea mays
cttcaggtccccttcgggtgactgatccccgaggtcccgttcagtctgggccaccttgccgtcgtccacctttttttgccagtcaccaacaaggtggggagccgtctttggaagactgctcgcgccgctcactaacacgcttcgcaaggtcaatgatctccccacactcctataacctgtggcaactgttggggtgcacagggcataagctctgttcccttttgtcggggggatattggtcgggccccacgcctcggtcggggtgcacaacacagcggggacccgactttgggttccgggcctctctt

SEQ ID NO: 33912 - DNA, 358 bp, Zea mays
gggaagcaagttggagtccatcatccacacaagaacgtggtgacgaccgacaggccgcttgagctactccacatggatctattctgcccgattgcttacttaagcatctgcgggagtgagtattgtcttgtaataatggatgattattcttgcttcacttgggtattctgtctacaggaaaaatctcaaacccaagagaccttaaagggattcttgagacaggctcaaaatgagttcggcttaaggatcaagaaaataataagcgacaacgggacggagttcaagaactcacacattgaaggcttccttgacgaggagggcatcaagcatgagttctcctcttcctacacgccacaac

SEQ ID NO: 33913 - DNA, 481 bp, Zea mays
gatcttaagtcacctgcggcatgcaagcttcggaaaaccaacactcttcgatagtatgctgataatctttgccccggtgcggtctcgaatacatcctaaagcttctacattaattccaccaaagagcacggctcctggctggtagctacaggatgcagcatactcctgcagctcctccttctcggccttggataattcttgaccagctagattctgaaagctgaagcctttttcttccaaagagtcttcggcaatttctttccctttctcaagcactacggccatgacttcttctgtagccacatcagtctcctctgcggctatatccaagagcactttatcaatagcagataacgtactctacagattggtaccttcgacggtcgtagcttcgatagaagcaactgctttggcagctagtgtcatctttgatgctgagacaggcggtggcgtttcctcaatggcttgcataacagtgata

SEQ ID NO: 33914 - DNA, 386 bp, Zea mays
  unsure (1)..(386): unsure at all n locations
cagcttgtcaagcaggtaaacaagtgagaggagcgcatcacagcaagaatgtgatgaccacatcaagacccctggagctgctacatatggacctcttcggacccgtcgcctatctaagcataggaggaagtaagtatggtttagttattgttgatgacttttcccgcttcacttgggtattctttttgcaggataaatctgaaacccaagggaccctcaggcgctttctaaggagagctcaaaacgagtttgagctcaaggtgaaaaagataaggagcgacaatgggtccgagttcaagaaccttcaagtagaggagtaccttgaggangaagggatcaagcacgagttcttcgtccctacacaccacaactaatggtgtggagag

SEQ ID NO: 33915 - DNA, 441 bp, Zea mays
  unsure (1)..(441): unsure at all n locations
agctttcccgctcacatcttcagcgctgtatataccttcgtatgaatttggtcttctcctgctgtgacaccgactcgagtccgaagatacctgttcacacattatactccagaaatactgttaaattttgtttttgaggaccttcgtaagccgaaagtccccaacacatgtgaatcaaccttagcatttaaactagcattttcatgtctaaggttgtcaatcatctcatggcaagtgcttagctcactagatagtttttgacagttttctatttcaagagcataagcatttttaaccttaacatgnttcttggtttccttaataaggaggtcctcttgggaatccagaaagtcatccttttcatgaatagcactaaccaattcatttaattnttccttttgtgctatgttaaagttggcaaaaagagtacgcaagttatct

SEQ ID NO: 33916 - DNA, 446 bp, Zea mays
  unsure (1)..(446): unsure at all n locations
gcttagagtcatctgacacataaccatttttatcaacttctctctcttcttctcatcggccttgaaataaaaccattcactcttccagccggtcagccacttggcacgatagctgaggaccggagccttcatatctttgtgatacgcaaaattatagcaaccaaaattttcatgtagcccatcttctctggccttcgtttggtaatgcagctcatgcactcggcaaaaagctttagcatttgggtccatcccttggcttcgaagggcccagatgaagatgctaagcctaatgatggcgttaggggtcagctgatgaagaaaaatctcaaaattatccaaaacttccccaatcatctcgttcaaaggaaaccgcaatcctgctctaaaaaagctnttgaaaaccactactttgtcatccttcggctntggagtggtttcttctccgg

SEQ ID NO: 33917 - DNA, 373 bp, Zea mays
tatactactgagtactgactaaggcctgtctttctcttatttatacccttatgatttagaagaacaatggacaccactttgattcttgagaaaaatgcagtctgatgctgtcttttagctacctcaaataatttgacctacattacatggaatataatatattattttatttaatatatatggacatttgcttaaaatgggggcatgtgccgtcacataacccgcacaagcctaaggacgcccgccccgggttcctaaaatggtattggttgaaatggtttattaaaaaatggttctaagatactccgaaactttttcaactgttggatgttcattgatgctactaagttgacacttggtgcctaaacaaaaa

SEQ ID NO: 33918 - DNA, 436 bp, Zea mays
  unsure (1)..(436): unsure at all n locations
agcttcttcgcaaccttgtctctttttatgngtgcagctctacttgagcagatcaagcatattctaaatcggctatacgtcttgtgtcagcttctttttctttttcaagcttcgaatttttttgatctgtctcaaagaatttagtcaaattagcttgactcatctttagcttctcgaataaagaaagaagaatcttgtatttctcaagggcttcattctgaagagttataacttctgagcacagatttccgaaggctatttgagtgctttcatcttcgcattccttctgcgccttcaaagctttgcgcaaaataagtccataatggcagcaaaaagaaaacaagtaaataatttatctaaaatagttatcaaaagctagaagaaaaaagtaaacacaaacctttaagctattgtatgccaagcaatctgatagatg

SEQ ID NO: 33919 - DNA, 411 bp, Zea mays
ctggaggaagctttatcacaatgactgccaagggtctccactctcaaattggtacgaatgtggtgacatatgtcgatgacctcatcgtaaaaagcacatagcacgaaaatcatgttgccgatttgcaagagacatttgccaattttagacaagctggtctcaagttaaatccacaaaaatgtgtctttagagtgaagaaggacaagtctcttggttgcctgggatcaagaaaaggcctcgaagctaaccccagcaaaatcgaagctattcttcggatggagccaccaaattcaaagaagggggctcaactgttggcaagaaagctggcatccttaaacagattcatttcaagatcagtagagaggatgttacctcttctttgaaatactgatatcagccgaaagcttcaat

SEQ ID NO: 33920 - DNA, 446 bp, Zea mays
  unsure (1)..(446): unsure at all n locations
agcctgcttctgccatggttcaacggtctattatagcgccatagcgtgcgtatcttggcaaagtcactgtgtacggtcgcttctctgctccaaatcctaccttttcgctgtgagttccaagtcgagatatggtcggggtagggagatagagaggggagaagtttgctgtgtcagctaagcccgaaccgagacaaaaggggtgtcaagtcgtatctagcgccctagggtaggtgtcatctctttccagggtgttctagggttaatttggcgccattttgtcaattgggtcgaagggttttgaaaaggggattaaggtgaacatgtggagtctttgtgcaagggttagtttttgtacttaggcaaaaactgaattctcccttgtgctgaatcttangtgaactgtttaaggctnttctgaaaaccttttgggggtacttccttactat

SEQ ID NO: 33921 - DNA, 429 bp, Zea mays
taaggctcatgtgcactctacgtcgagtgggtaccagcagccttcttattttatggccagatcgaaataaatccaggatgtgtagcgtactatgcgctatgcgtcaacaaatcgtgctctccttgtggccagccgcaccagcgacactccgggctcacgcactggccgagcacgcaagtggaacgccctatgtcgttgtctgcttgaccatatatatgtacgcatgcatacatgatgagggcgttggtgtggtcaaattccgattgggatggtaacgacgggcatatccggcccagtacagtgggatcggagttttattcccttccgttcgaacattccttttttttttaaaaaatatatagagatgagtacatgcatatgtgttttttttcaagaaaaatccacattcctagaactgaaatatcagct

SEQ ID NO: 33922 - DNA, 449 bp, Zea mays
  unsure (1)..(449): unsure at all n locations
agctntaactctcgcgagaccttttctcatttctttctaaccatggtaaactcattattgtatgtgatatcttatgcatgtctaatctactgattctcttgtatggagtaatgttggtttcctaatttcaatggatggatgtatgtatgcttgcaatcgcttagagaacgatccggttggagagcccgaagaactcgcaggagaagcccctgagcaaccgtctgttggtggaggcaagtgtcctttgacctatctctgtcctattcattctttaattcacctcccgcattacacatttatacttaaggattgactagctttgttatccatgtccttgtttacctatttgggtcggattattattacttanctctatgttattgctcaaactctaatcaatgaacatgatgagatngtatatgatacgctgttttcccttctcttattat

SEQ ID NO: 33923 - DNA, 309 bp, Zea mays
ctatgttgagcaacctcccagctgtgaagatagtgagtaccctcaccatgtgtataaactctcaaaggcgctttatgggctcaagcaagccccaagagcatggtatgaatgcctgcgagatttccttatcagtaatggcttctaagtcggaaaaaacgatcctactctctttactagaaccattgcaaaagacttgtttgtgtggccaaattatgttgatgatatcatatgtgcgtctactaacaaatctacttgtgaagagattagcacgatcatggttcaaagattccagatgtctatgatggggga

SEQ ID NO: 33924 - DNA, 421 bp, Zea mays
  unsure (1)..(421): unsure at all n locations
agcttncatgatcattcttgattacttgatgtttgtttctacacattccgcggaagatataggaattactttattatgggtaacgcttcaatgttgttctcatctttattgttacacaaatgcggcaagaccattatgtacctatactatccagttagttatttatattatctatcttgatatgtgatcctgggtagtaattcatgctacaaaagctagtgtttcgccaacccactaaagaaagtagtgcaagtctagagagattattgttatggcatcattctctctttaattaaatctatatctggtgagttcttaagcagataacaaattaaagaattcaagcactatagtcaaacatgatgatcatgacttgacatgttgcanggatggatgcaaaagtgtttatgcattttattct

SEQ ID NO: 33925 - DNA, 477 bp, Zea mays
  unsure (1)..(477): unsure at all n locations
tcacaaaatgttcccaatgatgaacttgaatcttatttatactcctgngatactaaaaaccctaattggaaccctggaaaaccctgaaaccaaaccctatggacctatgtgcaaaattgatgcacatttggactaaagtgcaaaaaccaagtcaataaggtatcttaagtcacttggttcacctaagtctgaattttagattggtgggcacaactttggagccttgtaacttttaaaatataagatctttgccctaggtcaccacaccaaatttgtagagcaaccaaaggagaacaactttgcttaagagtgtgagcacagctgtttagaaaatattggagataattaagcctatagtttggctgtcaggccgattccactctgaaattcagatgttcagtgtaatagagccaactctgagtatggattcaaccttgatctaatgctcaaatgagttcaagccctatagtcgaatta

SEQ ID NO: 33926 - DNA, 452 bp, Zea mays
  unsure (1)..(452): unsure at all n locations
agctntggcggaaggaggtacgagaatcagtcttttaaattgttctgcctgttctgtggcaaggacaagggacacacaacgaggacgtgccaagtcacgatccaaaagcagaaagaaattgctgaagccgaagtagggtagaatcagccaaagcaggtcttgcgtactgctttgtgctactctccgtatgtcccggagtacgtaggcaatcagtagcctacggcttctgctgcttcagcaagtcactctcaagcttcccgggcttagttaccacccccaccactggcgcctgccccaagtcatgatcagcagccataagtgcatcttcggcctcagcaacaacgtgacctttgggagcagtccgaagctcgcacagttaacagtattgtgcccgagtcaaggcttatctactgaagatggcacaatgttttggccaaaattgagctctaatt

SEQ ID NO: 33927 - DNA, 499 bp, Zea mays
  unsure (1)..(499): unsure at all n locations
ctcagcttaagccatgggtagtagcataggcatgtaatatatgaattgtcttaatcctatctacgggtgcataggtttcatcaaaatccaaaccttcgacttgtgaataacctttggctacaagtcgggctttgttccttgtcaccacaccatactcatcttgcttgttgcggaatacccacttggtacctacaacattttaattaggacgtggaactaaatgccatacctcatttcttgtgaagttgttgagctcctcttgcattgccaccacctaatccggatctcttaatgcatcctctatcctgtatggctcaatagaagacacaaaagagtaatgttcacaaaaatgtgcaactcgagatctagtggttacccncttatgaatgtcaccaagaatggagttgatggggtgatctctttgaatngcttggtggaccctcgngcgtggaggtctttgatccctaatntcttgatcatcttccttgtcttcattatc

SEQ ID NO: 33928 - DNA, 386 bp, Zea mays
  unsure (1)..(386): unsure at all n locations
atctacttcaaccgacaagccgaaggaatggatagcccggattaaactacaaacaccggaacacgacatcgacgatcaaccttcttacgtacgcgtataccatatacaatagctagttaattgcgtttttttcccgtttgacccatcaaaatgtgtctacaattatatatattcaacatataaagtgtttatatatacggagagtcaaaagaggctggctttcgctcagtacctgaaatctgagacacagccgcgggcgtggcggctggggccgccatgctggcgtgggaggccaatcgccccggtgcagcaagccgcagtgccgtggcctgcgcaatgccgtggagtacaacatccatctctagacagangagtgcgtgcgtggc

SEQ ID NO: 33929 - DNA, 436 bp, Zea mays
  unsure (1)..(436): unsure at all n locations
tcaagctntataactatactactttgaccaaagtgaaagctttatttatattcaagatatgtttgttgaccttcaataaacattgtagaacctgtgtgtcggggaccataattaggggtaccctcaagacgcctaattctcagctggtaacccccatcagcataaagctgcaaaggcctgatgggtacgattaggtcatggatcagtccacacgagtgactcgatcacgcttcacccaagcctagcctcggccaagggcagccgacctcgagagacttccgtctcgcccgaggcccccctttttacggcggacacatcaccggctcgcccgaggccttggcttcgctcagaaacaaccctgactaaatcgccacaccgactgaccaagtngcaggggcatttaacacaaaagtggcctgacacacttatcctgaca

SEQ ID NO: 33930 - DNA, 436 bp, Zea mays
gcttattattactgtgagatgccttttttttaacccttaagacagaaccaacccctaattaagagatgtagtgcaaagtggcccattttacaccacttttgttatttttgtctaaagcataacctttttattttaaacctcaaattccgagaactggctattatgaccaatggcccgccactgtaatctttacagaatttttggaaaaagttaaaccactgttgtagttcaaacctactctagaaaccataaatagaaaataaagaaaagggaaaaatgaataagaagaattagtgtcatgctaaaaccctttataactaaaatatataaaggcaataccaattcactatgcctatccctagcaaaatctaaacctagaagtgataagcataaaccattaaaagccacgtatgacccacaaaccctaaactgttca

SEQ ID NO: 33931 - DNA, 471 bp, Zea mays
  unsure (1)..(471): unsure at all n locations
agtgtgactctcttaagactaaatgtgttctatctactcattcatgatatcaagcaatttagcaatcaacatcttttgccaaatcatcacatttccactcgttactcaatgcagtacaatggatcaagcagtctcattagctgcgagaagcagacgattcgaatcgagtttttatcctgcaaggtaaacctaaacacacgacgtggcgaggcactccgtccccagacacatcaaccgtccccatcgattccctggcaacagatcagggctcaccgccttggcgtacaatgcctcactgactccgactgccgtcgtgcagtgaccgcacttgtacccaccataaccggaatgggagaccatgtctcaggtcgcgtgaggggatatgtctgctancaggttcaatcaggtactaggcttaccgatttaccatatttctcggcatgtgcttagtacattcaaacgcttgacact

SEQ ID NO: 33932 - DNA, 374 bp, Zea mays
acagcggttgttcttggacagctatgtgcatggaggtgcataagcgatcgggcggcattgggccgagcgcgttggagctgtctgactacaatggatgggcggcagtcgatcatcggctggcgcaaggtggtggccggcggtcggccgatcacgtggtggcggacgagcgcgtggggactgcgttggtggcactctggctaggactggcggtgactgtcttctgtgtcacggtgggaaagtgaaaggataatgaatgagaataataggctgacggtcttgataattaacttctttgtcgagtgcccgctatcttgcattcggtatagattattttatataaataaaaaatatactttgtcgagtgcctttgatct

SEQ ID NO: 33933 - DNA, 440 bp, Zea mays
  unsure (1)..(440): unsure at all n locations
atcttggcgtgctgccgcatttcggcttatggaagtatctgtattactgctgtcctgggatggccggagggcaacatcaattggtcggaggtgccagcttaaagatgcgtcgggggcggaagactgagtatctcgagataccccttaaagacagcattaaaggttggcgtctggagtggtttataatggataattatggaaattctctcccttcccgctcgggaagacaggcagacgttcgtactccgagttggactgaatctcccacggaccaagaagtagccgaagcgggcgtgttgcttactgaagttggattactgaaagagagaggtctgactgccgaagccgnggtcacagattttgttttcaagaacatacagccgctgaaggacagggcctatccggcatatctttaccgagggctggccgactcaacccga

SEQ ID NO: 33934 - DNA, 401 bp, Zea mays
  unsure (1)..(401): unsure at all n locations
aactcgtcttggctgccgtgctagatagagaagctggattgcatctgtgttgtcaacaacctcgtcctaaatactgcttaatggaattccggggcaattgttcttccatggaagggccttgaggcaaggagaccccctttcgcctttgctctttgtcttagaaatggagccatagccaaaaaatactcagtctagcgagtaagctgaaatgttgtctctatttntccaataacacatagtgcggcttcgaacctcaatgcaccagataacacaatcgccttcataaagcccatcaaaagtgagttagatgccatggactacatgctacagcgctttgggctggcatcttatctatgtatgaacattcaaaaatcatcattcctagccattgattgtacaat

SEQ ID NO: 33935 - DNA, 303 bp, Zea mays
gttggcatctatgcttcttgcataagcaagctgtccagctaaagctctaagtctgaagatgattctagaggaaccaaaaccacctgttgcaatcagcaaccagatgcccctcacatgccacaatgttgccgaagttccatctccttctagaggctgccaagtgactatatgtgtctgaagtaaagctatacccataacccttctaaaccgaatctcgaggacgagattccttttaagtggggtagatgtgtagcatcccagaaattcagatgctgaaactttctcaaacttgctctaaattca

SEQ ID NO: 33936 - DNA, 427 bp, Zea mays
tacgtgatatgtttgtttaatgtgcatttcgaaaaagatagaccttgtgcagcttgtcaagcaagtaaacaagtgggaggagcgcatcacagcaagaatgtgatgaccacttcaagacccatggagttactacatatggacctcttcggacccgtcgcctatctaagcataggaggaagtaagtatggtctagttattgttgatgacttttcccgcttcacttgggtattttttttgcaggataaatctgaaacccaagggaccctcaagcgcttcctaaggagagctcaaaatgagtttgagctcaaggtgaagaagataaggagcgacaacgggtccgagttcaagaaccttcaagtggaggagttccttgaggaggaaaggatcaagcacgagttctccgctccctacacacctcagcaaaatg

SEQ ID NO: 33937 - DNA, 421 bp, Zea mays
  unsure (1)..(421): unsure at all n locations
tgtcgtcgtgacaactccattctaccccgacatcctcttcattggttgtagagtggaatcngcccccatctccgacgacgaaccaaccgtgcctggggaagaacctcctcagcgggaagctcgccgacgaaggaactgacgccgtaatgcccggcgacatcatgaagccggagaacgagacccggcgcagcctgtatcacaagatgagatctcggaggtgggagaaactccagatgaacgagtcttcatggaaagaaggaactaccgccgacgtgatcgtcggcaagctcaagagcaagccgagtatgaggcgagacagcgtcgagagaaccgtctcttcggacgaaacctgaaccccgacttcgcccgagccatgaacacaccgagcgaggtctgtggagtgttggcccggatagccgat

SEQ ID NO: 33938 - DNA, 450 bp, Zea mays
  unsure (1)..(450): unsure at all n locations
agctntatcaaatggacgtgattagtttcttcctcaatggaccaatcaaggaagaggtctatgttgagcaacctcccggctttgaagacagtgagtatcctaaccatgtctataagctctctaaggcactttatgggctcaagcaagccccaagagcatggtatgaatgccttagagattttcttattgctaatggcttcaaagtcggaaaggccgatcctacgctctttaccaaaacacttgaaaatgatttgtttgtatgacaaatttatgttgatgatattatatttgggtctactaacgaatctacatgtgaagagtttagtaggatcatgacacagaagttcgagatgtctatgatgggggagttgaagtattttctaagatttcaagtgaagcaactccaagagggcaccttcattagccaaacaaagtatactcaagacattc

SEQ ID NO: 33939 - DNA, 313 bp, Zea mays
gctcaattccgagaagtgtgtcttctgggtgccccgaggcatgctcttggggttcatcgtctccgagcggggcattgaagcccacccggagaagatcgcaggcatcaccggcatggggcccatcaaggacttgaaaggcgttcagagggtcatgggatgtctcgcggctctgagccgcttcatctcacgcctcggcgaaagaggtctgcctctgtaccgcctcttagggaaggccgagcgcttcacttggacccctgaggccgaggaagctctcgggaacctgaaggcgcttctcacaaaggcgcctatcttg

SEQ ID NO: 33940 - DNA, 389 bp, Zea mays
tttttagcagcgatgccacagccagcccatgctagtattagcaattaagcatgcatctagaccgacctcctcttttgcaaaatcaactaaataaagtttgccgtctagtacacccttaaaagctaatgaaccatcacttcttctaaagacagacacatctatatttgtaaatagacaattatatcccatattacataattgactaacagatagtaaattatatccaagagactcaactaaaaacacattagagatagagtgctcatttgatattgcaatcttgcctaaacctttcaccttaccttggttcccatcaccgaatatgattgaatcttgcgaatccttattcttgacgtaggaggtgaacatcttcttctccccgtcatatg

SEQ ID NO: 33941 - DNA, 429 bp, Zea mays
ttatggattggacgaattccactgccttagctgaagttagagaagcaatgggtttgaactttattcatttagtgaatttgtcgatatcaaccagtacatgagtgtatcctccttgagctttcttaaagggtccaatcatatccagtccccagcacgcgaacggccatgttacaggtatggtttgcagttgctgtgctggtagatgctgctgttttgataagtaatgacaggcttcgcacctctggactaactcggctgcatcactcttcgccgttggccagtagaaaccagacctgaagaccttcccaaccaaagtccttgatactgcgtgtatcccgcattgcccagcatggacctcttctagaagttgcttccctgtagttgaaagaatgcatttcatgaggactcctgatgcgccccttctgtata

SEQ ID NO: 33942 - DNA, 250 bp, Zea mays
tgcaagacgggcgaaacgctcctgggaaggcaaggaaagataccgaactcggcaagagacttaagaacatctacaggaggccagatgtctgctggacaaggacaacaaggggtgggcccaatcacccgagaggcaccgtcacaatgcatatacatgcatacactaactcgtaagagcctagatacacaaatggaatacaaaacctcatggagaggcacaccttcgatccacgccatatggtcctcactat

SEQ ID NO: 33943 - DNA, 469 bp, Zea mays
  unsure (1)..(469): unsure at all n locations
aactaagcttaaagctaggacatcaaaaccttaaattatgtagcttttaacttgttgttaaatgtgtagaattctattggaaaatacttgaaaaaactcatactttgaaggattttaataatatactatagaagaaactaatggtcaaatatatgcatggaagactgtgcaagtcaaataccacaatatgnttggttggagggagtacaagaaaaatagaacaggatagcagcatggcaaaagtaaatgttatagtatgcaaacctgagtgagtagacatcacggagggatccattgtcatcaactataggaattgagcttactctatctggagaagaatgaatagacataatagttcaattcagcaaccattactttataaaaatgacagctcggaagcagcacatgccanaaaggacaggctgacagcacatgccannaaataatcctcactagagtagtagataac

SEQ ID NO: 33944 - DNA, 393 bp, Zea mays
actcaagcctagctacgggtgcatatgttttaccgaaatccaaaccttcgacttgtgaataacccttggccacaaatcgggctttgttccttgtcaccacaccatgctcatcttgcttgttgcggaagacccatttggttcctacaacattttggttaggacgtggaactaaatgccatacctcattccttgtgaagttgttgagttactcttgcatcgccaccacccaatccgaatctttaagtgcttcctctacgttgtgtggctcaatagaggagacaaaagagtaatgttcacaaaaatgagcaacatgagatcgagtacgtacccccttttgaatgtcgccgaagatggtgttcacggagtgatctcgcttgattgctaggtggactc

SEQ ID NO: 33945 - DNA, 408 bp, Zea mays
  unsure (1)..(408): unsure at all n locations
aagcaggtaaacaagtgggaggagcacatcacancaagaatgtaatgaccacatcaaggcccctggagctgctgcatatggacctcttcggacccgtcgcctatctgagtataggaggaagtaagtatggtctatttattgttgatgacttttcccgcttcacttgggtgttctttttgcaggataagtctgaaacccaagggaccctcaagcgcttcctcaggagagctcaaaatgagtttgagctcaaggtgaagaagataaggagcgacaacgggtccgagttcaagaaccttcaagtggaggagttccttgtagaggaagggatcaagcacgagttctccgctccctacacaccacaacaaaatggtgtggtagagaggaagaatatgacgctcatcgacatgg

SEQ ID NO: 33946 - DNA, 379 bp, Zea mays
  unsure (1)..(379): unsure at all n locations
cctacggtagtctcatactctgctagcatggtaagttntggcatcttgagaaacataattgtccttgagcattatgcctcccattactgctgtttttttacatatacaagaattgtgttatgcactttctcaatccatgaatacaaagtgattcttgagtaactagagtttattatctgaatgtgtttgtgtactgatggcacacaggaataccccctccattccttctggaaaaaaacatgtggtgccattgcgtaactgtggttttgaagaatatacgtagcttgatacctcangaattgagggcttctctctgcggcctcttggcattggtaagcaacctgagcacaaagacagggcacgatgtgggtctgtattt

SEQ ID NO: 33947 - DNA, 402 bp, Zea mays
tataaaatggatctagtaaaaatcatccaaaatcaatatgaacacagaattggtcgagtcgttgcaatagtaggaatctgttattttctagattatgaatcctatgaacacctccatctcctttacacgtaatctttacgatactcagattctcccaccgccagattcttaccacaaccagattttcagaaaaaatggtcataaaaaagttaaaccaaatagtccctatgtctcacaaactccgcagattgaggaattgcatgactcttgctctcgtgatttcctcggtgattacttctctacaagagggtgatggtaagtaaatgttctttgttcaaaattgaccggtcacgacttaatgtggattctatcttactggttgacgacctccggcgcttgaaa

SEQ ID NO: 33948 - DNA, 348 bp, Zea mays
  unsure (1)..(348): unsure at all n locations
aattttttattgtccgggccctngcggcggactgtccgcgacaccaaagggaccctcggacaggaaccctgcataaacgcaagtctacactacggacctgccgatggaaaagcaagcaccgtccgataccgagcgcggaccgtccggcctcaagcgcgaggctgttcagtcggcgcagaacccaaaatcccgaacgtgacgagtctggtaaaatgaattatagcatcctcgcggaccgtccggggtgcacgaccggaccgtccacgattgcttttatctgacatctgacgacgcattaaatgctatatagccattgatataatcgtactgctgaccgttcgacttcag

SEQ ID NO: 33949 - DNA, 315 bp, Zea mays
agacctggttcaggagtttttggctttcaaagtttttcctaatttaaaagaatgggaaatgccgaagctagagggggagaaaaaagaatgagaacttgtgcggttaccttactattacaagtttaaaaaatacttcaaaacaccttgccaagagtggttggaaacaattgaaataatgtgcaatgaaatacttggcaattactccaaaaaagaagatcaagtgatgactgcggccttctgcacccgtccgaagcgaagactgaatcgagtgctggacgcctcgtgttttgaataccctgactatgaaaatctgaa

SEQ ID NO: 33950 - DNA, 455 bp, Zea mays
  unsure (1)..(455): unsure at all n locations
acccggatccttaagtcacctgggctgcaactaaactaggagcggtcaatactgttggcaganagctttttgagcaggtgaaacagatggcaagagagcgtgccaaataacttggggtgagcccttatttatacgcccaatatgtcaaaaactggagggtcccgcttgtcaatgactgttgctattctagcaaaaggaaggtgttttttcggaccttcggcccatagccttcgtccatatcacaatataaacttgtctttacagcaaattaatattgcgaggggctactgttgggggccttcggcttccgaaggtcctcaaaaacgtaatttgactatgttttccaagagaaatatgtgaacaggtaccttcgaagtcagattgcgagtatacaagaacatggttaagacgaagcttgactgggactgcgatcactacgaaggataagactatca

SEQ ID NO: 33951 - DNA, 476 bp, Zea mays
  unsure (1)..(476): unsure at all n locations
ataaaactcagctttaagggaaaccatttaggataacaaatgttatttttataaaacggattgtagcgcatgtcagcanggaagcaagtggagtcatcatcccacaagacatcatgacgaccgacaggccgcttgaactactccacatggatctattcggcccgatcgcttacataagcatcggcgggagtaagtattgtcttgtaatagtggatgattattctcgcttcacttgggtattctttntacaggaaaaatctcaaacccaagagactntaaagggattcttgagacgggctcaaaatgagttcagcttaaggatcaagaaaataagaagcgacaatgggacggagttcaagaactcacaaatcgaagacttccttgaggaggagggcatcaagcatgagttctcttctccctacactccacaacanaatggtgtagtggagaggaagaatcgaactctattggacatg

SEQ ID NO: 33952 - DNA, 258 bp, Zea mays
gaaaaaaaccaaggtgggaagaaatgctaaagcttgcgctccaggcatggtagaagcagggataaaagtcggcctgaagcagaaccccagggtaacaatagtgaacaagcaaggctgaataaggcaccatctgaagcacctgaccgacgaaagatagaacaccgcattattggaatcagaccccacagagtcaggcaatggggccaaaaattcttcaagaagcagacaagcaagcgcctattatcagagaaaatccga

SEQ ID NO: 33953 - DNA, 233 bp, Zea mays
  unsure (1)..(233): unsure at all n locations
atctgttgttacctgctcaatcacatgctctgagaactggcgccatccggaacaactgtgctgatattggcacctctacttctcgaggaggaaactacacacgcgccgccgatggtgtcacgccacaaaaaaaaagagcacgccacntatgactccgttgcatgctcttttggtagtagaagattgtgtggacactacctcctccacgaggttgaacaaacgtcgctggtgac

SEQ ID NO: 33954 - DNA, 428 bp, Zea mays
agagcacaaactctacttatgaatttctattttatatcttaaaagagattgtattagtaacacaagcaatagtttcctatttagcaacctctagtatatgaatgacaagaagggtacttaaacaaggaaacctcatgatatgaactaaattacccttacaagcatcatgcataacatcaattgtgaaaaagatgaaagtagcatgattatttaattaagtttacatggcaagtttaattcatagcatggtgagtgattaatggagaagactcaaaaccaatttaaacaagaatgaatacatcacatagtattggttcgatcttctttgaatgttgaatggcacactccatttgggaaacacattctcatgttgtgagactacataaacacttagatagaaacattagtctcacaactctagtcatata

SEQ ID NO: 33955 - DNA, 399 bp, Zea mays
  unsure (1)..(399): unsure at all n locations
ttttatccctcgacgacaaaatgagcatgcggatttgttagctaagtcagcagcacatgggctgtctttaccttcggatgtattcttcgaaacaataaaagcaccttcggcggaacttcttgaaagggcagtcctcagaatatctcttgtgtatagcgaagaatggagaactgagatcatctcttattttcaaggaaaattcctttcagatgacgaagcttataacaggaggatagaggcaagagctcgtccatatgtcatgacacaaagggagtcgtaccagcatggagtnagtgctccgctactcaagtgttgatccagaaccgaaagtgtatagtttatgaaagatatacttccngcctgtgagatctcacaatggtccaagccgtacttggaaaa

SEQ ID NO: 33956 - DNA, 448 bp, Zea mays
  unsure (1)..(448): unsure at all n locations
agcttgaagccatggtaagtagcataggctctttatatacgaattgactcaagcctagctacgggtgcataggtttcaccaaaatccaaaccttcaacttgtgaatatcccttggccacgagtcgagctttgttccttgtcaccacaccatgctcgtcttgtttgttgcggaagacccacttggttcctacaacattttggttaggacgtggaactaaatgccatacctcgttcctcgtgaaattgttgagctcctcttgcatcaccattacccaatccgaatcttgaagtgcttcctctaccctgtgtggctcaatggaggaaacaaaagagtaatgctcacagaaatgtgcaacacgagatcgagtggttacccccttatgaatgtcgccgaggatggtgtcgacagggtgatctcnntgtattgctagatggactcttgggtgtg

SEQ ID NO: 33957 - DNA, 430 bp, Zea mays
  unsure (1)..(430): unsure at all n locations
catcgtcggtgtgatcgcctactgctgccagcagctgggtcgaatatgtcgtcggcttctcgctgtccatgctcaccaactccctggtggtcggtgtgcccatggctacgacgagtgggcgcaacagctctccatcttccaggccatcgtcttgctggtcgatgggtttccgtcccactcgacgatgggtagcacggggaggtcattcatcagcttggcgcgcttggcatcctcggtaatgattgttagaacacaaagtatgtatattgtgacagttntgtatatgtaaacgtgtacaccaaagatagaagaggccaggagatatggtagttagtgtagtaaaggaaagagataagttgttactattttatctccttaattatctcctggccattcatctaggtgctacacctcccctatatgtaagctg

SEQ ID NO: 33958 - DNA, 386 bp, Zea mays
tggaaggctagtatgtgcttttgataaatctaccatcgcaaattttcctttgcatgagattgaattgggggaaaatatgcgtgattcatcgactacaggttgtcacgaccaggcacaacccctttatgggatgccgatagatacataccctgtgcaaccacagcctcctacgtaaatcggcgataaattcgtcgatctgcgcatgtccggaccgtccacacgtgagcgcggaccgttcgggccagcggctagtaccatttttaaaaatgaattaccgaaacatgcacctgagccgccacgtactgcgcaaaccctaaacttcccagtcggactatccgcgtacagcgacggacattccacatacaacaacgaacggtccgaccata

SEQ ID NO: 33959 - DNA, 415 bp, Zea mays
  unsure (1)..(415): unsure at all n locations
atggtagtcttagccattaagcaagtatcgagttcagctttattaaaatcaactaaatatagctgaccctctaatactcccttaaatgctactggatcatcacttcttctaaagacaagaacacctatatccgtaaaaagacaattgtagcccattntacataattgataaactgaaagcaagttataatctagagaatctacaagaaaacattggaaattgaatggtcaggtgatatnagcaatttaccaagtcctttgaccaaaccttgatttccatcctcgaatgtgatagctctttggggatcgtggtttttctcataggaggagaacatncttttctcctcagtcatgtgggttgtgcacccgctatcaattattcaacttggatccccagatgcatatnacctacaaac

SEQ ID NO: 33960 - DNA, 418 bp, Zea mays
ccaccctaatcacctctgctgctgcttgcatctgaaagaatctgtcttttagttttatatgatctcactatttcaatcctcgctataaacaggagatatgttgacgactgctctatcaagaagttctaccgaacgagtcttttattgcgtcaaagaatacatccgaaggtaaaggcaccccctgtgctgctgacttacctagcaaaacaccaagttcattgtcgtcctctatggatatttttgacacaaaacccttcgaaggaagcttcaactcttcgaaccatatccagatatttttcaagcttcggatccttagccttgtcactcttgacaacatgacccgaaacattctgggaatcagttttaagcatggcccttcttattcccattgcttttaactttcgaagacctagaagca

SEQ ID NO: 33961 - DNA, 376 bp, Zea mays
agcgcatgtcaagcaggaaagcaggttggagtccatcatccacacaagaacattatgatgactgacaggccgctcgagctactccacatggacctattccgcctgatcgcttatattagcatcgacgggagtaagtactggctagttattgtggatgattattctcgcttcacttgggtattctttttgcaggaaaaatctcaaacccaagagactttaaagagattcttaacacgagctcaaaatgagttcggattgagaatcaaaaagataaaaagcaacaatgggacagagttcaagaattcacaaattgaaggatttcttgaggaggagggcatcaagcatgagttctcttctccctacacacctcaacaaa

SEQ ID NO: 33962 - DNA, 412 bp, Zea mays
tttttccacaatccacgggagtactagcgctgacttatctagcgttaacgcgtgtgcggacatcacggctacaacaatatagctaggccttccataaaacgcaacaggcacaattatggctcagacattgcggtacatgatacatctacgcaacatgcgcaattgtggctcgcggcagacatataatgcctacagggcatgcaaaaaatacacgacttatcgatggcggtctgactcaacaggagcgatccgattaatggagagggcgacataacaatcacatgacgcagccaagtctgaacgacacaaatattgcatcatgttgcctatgcgcagtcaatattcaactaatgccataactcagccgattaccaacacagcctgatcgacgtgtctgagtactcactataca

SEQ ID NO: 33963 - DNA, 260 bp, Zea mays
  unsure (1)..(260): unsure at all n locations
tagtctatttgatgaatgacaagcagtgtttattgtctctgcccaataagaatccgatatattgtattccgctaacatagacctagccatatcaatgagagtcctattctttctttcaacaataccattttgttccggggtatatttggaagagaattcatgtttaataccattgtcggcacaatattcatcaataattgcatttttgaantccgacccggtatcacttctcactttcttgatatcagaatcaaattgat

SEQ ID NO: 33964 - DNA, 230 bp, Zea mays
  unsure (1)..(230): unsure at all n locations
aactaagctgcggcctgacgtcactctaaagagacacggtaccggtctttcttctttcttgngagtcctatacaattcatggtcgtcgtaaacaacgacctactgggaaacccaagcgtacccaacgaatcgccttgggcaatcacctttcccgctagcgtataacgaaatgccccaccgattctcttcacaacagggcgcactgaacggaaatggccctgagcagagtc

SEQ ID NO: 33965 - DNA, 276 bp, Zea mays
gcagaagagaaggtttgtacatgcccaacagagacccccagaggcacgcgtgcataaggaaagacgaacgcacaacaccaaagggaataaaggcagggaggggccgaactcgacagggaaagaggcgcccaaaaaagacttgaagaaatgaaagataaccagacaaccacgcctcgaagaggagtacatgaaaaacaactagccatgtggtcgaacccggactcaaggataccggagggtagcaactctagactagcccaacaagtcgagacaaaa

SEQ ID NO: 33966 - DNA, 413 bp, Zea mays
gatattctcccttatatccgacggctgctagcggccgtcgaatataagcttatgtccgacggtctcctaggcagtcgtcggacataagggagccgtcggacttgtatcgttttactgtagtgaaaagtctaaatatggtgtttctatggtgtgacaatataagtgaaaaatgtttgttttttcaattctgcgtgtcatggcattactaaacatatataggtcgtgtattatttctttgtgagagagagggctataaagaagcttcttaagattgattctgtacccattgaagattaggttgcagatagcttaatcaaagctctttcgatgagtctactataaagcaccttagatgtcgctcgctatctgtgcacagaggaagcaacttgtctactcgcgttttgcctcgactc

SEQ ID NO: 33967 - DNA, 416 bp, Zea mays
  unsure (1)..(416): unsure at all n locations
gcgtaccgacttcaattacctgaaacattgtctgctgtgcataatgtgttccacgtgtcacaattgaagaagtgtcttctggttcccgattgaaccgctgaagtgactgatgttgtcctggaaccagatttaacatactcggagcatcctattcgagttctggatcaaaaggacaggatcacccgacgaaagactctcaagttctacaagatactgtggaaccagcattctgaagatgaagctacttgggaaactcaagacttcttgaataagaatntcccaggcttcctagcctcatgtaaattgtaaagcctgtatagcttgttgaataaagaagtaacccccacatcacccctgccttgcaccaaaacttaggaaataaaaatgtgatgtgtttcctttaccattatctaccc

SEQ ID NO: 33968 - DNA, 441 bp, Zea mays
  unsure (1)..(441): unsure at all n locations
agctntaagaggcacatggattcctatatgtaagaactccgtaaagaggcagcaactatctgagcccttgaccccttgcgtacaacaaggagtacttgtctgaaatcacccccgaacacaacagtcctcccaccaaagggcagcccaggccgtcccattatatcacgcatgctattgtctagcgcctcaattgcttgtctcttagtcattgatgcctcgtcccagataatgagcgatgctttttgtagcaactttgctgtcccgctttgtttcgtgaagctacatacagcaccatcatcaatagtaagtggtatcttgaagcgtgaatgggcagtcctccccccaggcaatatggaagccgcaacaccagatgtagctgttgcaactgcaatcttgtcctgactgcgtagtggccgaagcaatgccttatacagataggtc

SEQ ID NO: 33969 - DNA, 326 bp, Zea mays
ttatatgaaacaaagtcttgttgcatataacaggaccataacaactttggctgctacagcttcggctctcggtccggggcaagctgtcccgtaccaacctttccgaagagatggcccggggattggatgacagaatggctttatgtgaagaatgacttatccgcacgagaagacatcaaaggtataattatgcgtcctatttggcaaaacttcggccttctgaggccgaaagttgaaatgaacgaagccgccgaagagtgccaaagagccctcggcgttgtctgctcttttattggaacaagggacttggtacaagagcatattgg

SEQ ID NO: 33970 - DNA, 447 bp, Zea mays
  unsure (1)..(447): unsure at all n locations
agccncatctttatgagagtacgtgttctaatcttactctgagccaaagtcaagaaggctgtgcgttgcacttccacctgacctgaggatttcatatatcgtctaaagagatggacattgtcctggccttcagccttcatggtcttagaactgaaccagcatggacagagcaatgaaccacactaccagacgttgaacactaatgtaatttcttgcagtgagtataagttccagcaagtcatgcttattagtttcatgtttgccactactggttggtagtgttaaagtactgagcacgcactactggttttgattgccactgatgcaacacgaaatgtaaggcagtgattgaaggatcatgaagatagttgcatatgttcttccttaatcttaatgatgatagcatgagcaagattactgatgcactactggctgtatctttccctc

SEQ ID NO: 33971 - DNA, 456 bp, Zea mays
  unsure (1)..(456): unsure at all n locations
aagcaagccccaatatacttcgtcttctaatttcttagtnnatcaaagaaaaactatacagaattggagaaggtgttgtatgctattttgatggcttccacgaagcttccacattagtttcaagcataccatataattgttacttcttcacagcctttgaaggatatcatgagaaataaagaaactactggaaggattggaaagtgggttgtggaactcaatgagttctgcattgattatgtgcatagatcttcgattcagtcccacgcgttagcagacttcattgctgactagacgccacgggctcaggaagaagaagcaagtaaagatgccgaagcttggacagtattctgcgataggtcttggtgaaccttcngtgcatgtgcagctgccgtcttaattgcaccttccaaagtcagaacatgctacgcagtgaaactttgatttagttgtaca

SEQ ID NO: 33972 - DNA, 318 bp, Zea mays
  unsure (1)..(318): unsure at all n locations
gagcaacccgcccgccttgaagaaagagagtaccctcaccatggctataaacactctaaagcgcgctatgggcgcaagcaagccccaagagcatggtatgaaagcctaagagatattcttatcaccaatggcgtcaaagacaaaaaagccgaccctactctntactaaaacacatgctaatgatttgtttgtatgccaaatctatgctgatgatatacatattgggtctactaatgaatctacatgtgaagaggctagtaggatcatgactcataaaatcgagatgactatgatggcggaggtgaagtacttcttatg

SEQ ID NO: 33973 - DNA, 453 bp, Zea mays
  unsure (1)..(453): unsure at all n locations
actnagcttggtgcatagcagatcctttctagcagctctgaatgattgtatgtgtgagcaaccagngcatactgtgggggcccattgagtccttctgtgaagagctctttctttctttcatcatctgccacctcatcaggagcatatctggacagctggatgaacttgtcacgggactcactgactgacatgttgccttgctctaatgacagaaactccttcttgatcttcatcaatccacctggaatgtgatagtttctgaactgtgtactgaattccgcccaagtaatagtgtcagcagcatcatgggcagcaacataagaattccaccagtcagcagcaggacccgtcagacgaccagaagcataaagaaccttcttccggttagagcattgggcgatgttgaacatcttctcaatagatttcagccaatcatcagcatctattggatct

SEQ ID NO: 33974 - DNA, 445 bp, Zea mays
acttgcacaatcgagcttgcattgtgatcacttggcacgttctatttgaaagtgcctatagataattaccaagaaactttattacatatatatgaattaacttgcaactttctttgattttgaataactgaaaatagtcctaactattcaatggaaacaacaaaaaatgttgacttatgtgagtaacaaaaagaagactcaactgccgtagggctctaccactggttcttaatctgtattcctagaaacaagctagaccacataatagatcttcaaaatattatgttgactctgcaagccttccactgaaccaagtaaaacaacattattgtgagcaaatattatttgtttataataacaaaatagggtttacttcgaaacacaagttaaagagttacttgcaaagttctttgacaaagtttcacagaggttcatcatcaatgga

SEQ ID NO: 33975 - DNA, 489 bp, Zea mays
  unsure (1)..(489): unsure at all n locations
actcagcttcattagatcttcgnacttaatatgctccatttgatcactntcaatggctatggtcgncaatccattgagtctttcttgtgttattgtagaacgcanataggttttgacctacttgaatttagaaaaactccttccacagatgcaacagttacaagaactgttaacaaaattcggtatgcaataacaatattgggaaaacacattaaatgtttcacatgcttcanaatgtcaagagggcccatagattccttaattaaatctcggataagttttaactccacaaacaattattttccatcaatatctgaatgttctccacttttgagtgcagcctcaagattcatagaacaagaaaataatctcttatcatccaaagagcgcaacttatctgaagtaaacaagaaaccaaaagtcttttcatacccctggtattgttcanatcttctagtcagtacgcgatcgcttgatcaacaatatcaa

SEQ ID NO: 33976 - DNA, 394 bp, Zea mays
ctgattttggaccaagcagcaggcctcgcacgtttgtcttatctgatcactactttcaatgggataaaacattagaccagaatgccaaggtttttaagctctatatgttgttctgggtatataacctagctctgtcatgtgagcttgctcgttggctctgcaccctctgctggcttgtcgatggtgccccttcctctccgtgtcaaaccaagactgtggcttggagtttaacggtcgtttcaattactacgactactttggctactctatggtagattgagtgcagcattatttttcacatattcatgtgtgacaaatatttatgggtgctcttatagaacccaataatttgaatagctgctaatatcgtgagctcaccagggcgtgcgtcaac

SEQ ID NO: 33977 - DNA, 346 bp, Zea mays
gagcttccgatgtggtggcatcatcaagttcgttgatcttcctcgatccttcgatcatgccttcaaaactcacaaaattcccgataacttcctcgggggtcattttggtatatctaggattaccacggattaattgaacttgtgtagggttaaggaaaataagtgatcttaaaataaccttaaccacctcgtggtcatcccactttacgctcccgaggttgcgcgcttggttcaccaacgtcttgagccgaatgtacatgtgttgtggctcctcccctttgcgaagccggaaccgacccgagctcccctcaatcgtgttccgcttggtgatcttggtgagctcatc

SEQ ID NO: 33978 - DNA, 377 bp, Zea mays
agcttgccctccaccaactccatcttggtgagcaatgtgacgtcgttcccctcatgtgaaatcttgagggtgtcccagatctgcttggcgttatccaagccgctcactttgtggtattcatccctacacaatgaagctagaagaacagtagtagcttgtgcattcttatgaatttgctcattaatgaacatgggactatccgaactatcaaagtgcattccactctctacaatctcccatatactaggatggagagagaacaagtgactacgcattttgtgactccaaaatccgtagtcctctccatcaaaatgaggaggtctaccaagtggaatatattataaatgagcattcgcactttgacgaatacgccaatt

SEQ ID NO: 33979 - DNA, 478 bp, Zea mays
  unsure (1)..(478): unsure at all n locations
actcagcttgcctncgcttgcactgggctgcttgactgctctagttattttctggggcaggaagatgatgtgcctgctgattctgcctctgaaactgacttcctcatgtctgactgttctggcgattctgctgctgatgatgagggtactgcctctgaaattgctgctgaggcaggcgctaattctgcttgaattgctaacgtgggttgcctaagaaacggnggcgattgctgctcccaggctgaggtccaccaatcttgcgcttgcgatcctccatctccttgattttcttctctgtcatgattgctctgtcgatcgggtgttgaaatgtgagaaaggtatggttcatcagctggtagtgcangggatcgactaagcgtctcaagaaacgatattgcctcttggcatctatgttgacatcttcaagagcatagcgggacagctgcagaaacctgtctcggtactcactgactgacat

SEQ ID NO: 33980 - DNA, 330 bp, Zea mays
  unsure (1)..(330): unsure at all n locations
cacgctagcaaactagcnacactcatgagtaatgacaacttttttgtcaactaggcactgtcccatgcatgtatccaacaattatctaagcaaagaaactgttgactctatatgatatcccgccgtgatataaagtcagaacgtttctttaattatgatgatagccatcaacatccaactgagtgctttaaaattgagtctgcgcggcctcatcacggtgcgcgcgttgaatctnntccnacacctcctgtaaaagctagcctgcggtgatcttactgcatgcgtctttatatccaccattactgcgtacatatattcaggcggaatcac

SEQ ID NO: 33981 - DNA, 189 bp, Zea mays
gacccccacaccggctttgaaacaacgggcaaccgaggacagacccaaaacaccgacaagccccagggcgggactccgcacggccgatgcgcccgaaaagcacccacaacacaacacctcgggctcggccaaaacacaacccactggagggcataagacaaaaaccacaagcaataaaacccacccacc

SEQ ID NO: 33982 - DNA, 480 bp, Zea mays
ccgggatccttaagtcacctgaggctgaagcttatacaagagaatagaggcgagagctctccatatgttataatagaaggggagctgtacaagcatggagtctgttctccactactcaaatgtttatccagagccgaaggtatagaattgatgaaggaaatacacgcaggcctgtgtggatctcacattggatctaagcctttgctgggaaaagtttttcgtcaaggattttattggccaaaggcagcatcggatgcagcggaattagtccaaaagtgcgaaggctgtcagaaatgtgcaagagaacaaaaacaaccttcgtctttaacccagttaatacaacccacttggccattgcaaaagtggggccttgatttgttaagtccgctaccaccagcacaaaggaacttaagatatgttgtagtggcagtggaatatttttctaaatggatcgaggcaaagcctttagccacaataact

SEQ ID NO: 33983 - DNA, 337 bp, Zea mays
  unsure (1)..(337): unsure at all n locations
tagactcatgagttctcaagaagctgctgcatctacaagggaatctattcttggtagagggaattcatctttcagacatgccttattgagatctgtgaaatcaatgcacattctccatttcccattggcttttttcaccatgacagtgttagccaaccactctagatatgttacttctctgataacgctggcactgagaagcctctttacttcattccgtgcaccttcngctttatcatcggacattttctgaaaccttcgctctcttggtctgaaggacgggttcacattgagccagtgctcaataacatctctattgacaccatagagatcattg

SEQ ID NO: 33984 - DNA, 463 bp, Zea mays
  unsure (1)..(463): unsure at all n locations
tcactgaggcgtgcaacctccacacgtcagaactctgtgacgaatctctgctatgcatntgtcagctcgtgggcatgggcctatattcatgtcagcgtctttctggctgagcttctttgctgaaagttcaaactgtggagcgagcacaactgaacggagaggcagtatttggaatcactaagatgctgctaaaccataacaaattatgttgtgatgcgcatcgttatattaaacgttgcacatgcctgtattttttgttttttagccatctttatgacaaataattacatttagaccctgaagaacttaattcctgatttggacccgaacctcggcgtcatagcctatgacgttgaggcaacacagctcggcaccataagctatggccccgagctctgacgtggcgatagcgcctccctaaggctggtgtgacaccgacgctacctcctagctcggcgccaca

SEQ ID NO: 33985 - DNA, 375 bp, Zea mays
ccaggatcggaaacggtgtttcctatccggaaaacgaaaccgggattaacggaatgactggaaactatttatacgatctgaaacacatcgaaaatgagtgaaaactggtaactaaaatgcgaaacaccgacagatgcaaccattattatatagctaattggtcaacaagtcggcattaaagttaagcatgcatcaggtgagtagataaataatacaacagacgtgttatggcagcattacaccaaacataaagcaacattttcaggcgaagttgccatagaacaatataggtatgaagtttctaacttaataggtgcgagcgtgaacattacagccacaagtaaatatgttctggtggccggatagagataatat

SEQ ID NO: 33986 - DNA, 435 bp, Zea mays
agcttcgtcatctgataagcaattttcttttatgaaagatataatctcagtcctccaatcttcacaatgaacaggagatatagtgagcactgctctttcaagaagttccaccgaaagtgctcttattgtttcaaagaatacttccgaaggtaggggcagcccctgtgctgctgacttggatagcagatcagcgtgctcgttttctcctcgtggaatattcttgacagaaaacccttctaaagaagcttcaagccttctaactgtgtccaggtatttctcaagcttcgggtctcttgcccagcaactcttgtcaacatgaccagaaataacatgggaatcggttttaaggaccgcccttcttattcccattgcttttaacttacgaagccccaaaagcagagcttcgtattcagcaatattacttgtgcagctgaa

SEQ ID NO: 33987 - DNA, 57 bp, Zea mays
atccttaagtcacctgcggcatgcaagcttgatttatatttgcaactgtctttccga

SEQ ID NO: 33988 - DNA, 96 bp, Zea mays
aggtccttgtagaataaaggatcaatcacgagttctccgctccctacacaccacagcaaaatggcgtgctgagagatagaacggacgctcatcgac

SEQ ID NO: 33989 - DNA, 467 bp, Zea mays
  unsure (1)..(467): unsure at all n locations
acctgcagcatgcaagctcgngcacgtaaactgaaatatctcgttctttctatatctggctactgaagctgattcttcattaaatgtggtactacagccttgctacgactttattatgctcacgtgttagggaggagaaccatctttgtttggagaaaacaacaaagcactaaaagctgtcgcacccgaaataaatacataactgcagcacgagcatgttaaagagggcatatctatcaacttccaaagttgtttaaaacaaacaaccacttgctggaaaggactcttcgtctactttctattggatcaataatcaataagagatcaaacactaagcgttcagaaactgcttagtgaactcctgctctacccaaatcaatctcataactgcagcatgcaccagattatatggagcataactatccactcccaacgttgtttagtgctcataactacttgctggaaag

SEQ ID NO: 33990 - DNA, 329 bp, Zea mays
ccaaaccacatgtgataatacgtcacaaggggtactgaaggaaaaccctaagtaacattaggggtgttatagccctcccccttataagaatctcgtctcgagattcgagccgagatcctcctaaggtgagaaagggagcatagctcgcttgcctaatactagttaacccttaaaagtttatgagaaattctgctcttcgaatgttatcctctttgcaacttcaaagagaagccctttttgattaatttcatttcttaatacggttgtacttacgagtatatctcctatgtctggagatcaatggcacaggggggtggatacgtaacaac

SEQ ID NO: 33991 - DNA, 432 bp, Zea mays
agcttatcaacatgcttagaaacaatattttttctataaaggttatcttttgttttgttagaagtattctctaaaagatctaaactaaatacatatgtttctataagagtcttttaaattggcgtccttagttttgttattgtgcttacctataccttactcgtgtttttttctcagctgcggccttctgttcaataaacattatgattttgacgtggataaaatttattgccttaatgaaattgtatgaagggatccttaattaatggtgttaattatatatcatttgtaacacctgaaaatcctatgacgagcttttagtaaaattctccataaattttgagttagaatatctttttaaagatcttctttaccattgaagttaatcctcctaaataaaataaatatagcttctaatattgcttttaaaaa

SEQ ID NO: 33992 - DNA, 445 bp, Zea mays
  unsure (1)..(445): unsure at all n locations
tcatgaatgttgccttcngcgtcacgtacgagcagcttcagttttatctgtgactntctgcaggaccttcggcgacgaagcatggtcccaacagtggccccttcgcggtgctagatcgtttttcgtaacgagcttgatccgtgaaaaaagtctcttatgcttcaggaagccgaaggtccgaaaaacaccttccctgagctcgttgtcgagaaacgatacagctttcgagcgtgtagtggtcccaccatgcaggttcactgctctgattcttgcggcccaccgttcagcgggtgcgagcaactgtttgcctggtgtaaaaatcctgacgattcaccttcttacctgcagcattatataaacagacgggtaggtgtgaagttaccacagcattcattgctattgcactcatttgctgccaaaatttctaaccatagccgaaacttga

SEQ ID NO: 33993 - DNA, 400 bp, Zea mays
gtgatagtttttattaccaggcgatagtaaaagaagaagccttgtgaattttgcgatgcgatgtaaacatggtgtagtacgcctccacacaatagtgtgaaggatcggttaaacacgttgggatgggtatatgatgagtttctccaacgtttttgatgtttaacgagatggagagataactgaaagcactatattgaggaggaacgccgctttttcctcgtgttttttggtcaaagtaatcttgaggtatccggaatagttatccaagaatgacggcggagatcattcaagggtggagttcaccagctgatctatacttgggagcccgaagggatccttctgacaatgtttgttgagagaaatatagtggagggacatgcgctaatccactttatccccc

SEQ ID NO: 33994 - DNA, 395 bp, Zea mays
tcaccgaaattcaaacctttgacttgtgaatatcctttggccacaagtcgggctttgttccttgtcaccacaccatgctcgtcttgtttgttgccgaagatccactcggttcctaaaacattttgattaggacgtggaactaaatgccatacctcgctcctagtgaagttggtgagctcctcttgcatcgccaccacccaatccggatcttgaagtgcttcctctatcctgtgtggctcaatagaggaaacaaaagagtaatgttcacaaaaatgagcaacacgagatcgagtagttaccccttttgaatatcgccgacgatggtgttcaccgcgtgatctcgttggattagctggtggactcttgggtgtggcgggcttggaacttgttcatct

SEQ ID NO: 33995 - DNA, 250 bp, Zea mays
  unsure (1)..(250): unsure at all n locations
tcatatgaactcctcaccggtaaaaagcccaatgtttcatattttagagtctttggcagcaaatgttttattcttgtgtaaagaggttgaaaatctagatttgctcctaaagttgtagaacgcttgagacnnggncatgactcatacacaaaggcatatatagtcttcaacatatccactggattaattgatgtttcttgtgacattgggtttgatgatacttatggctctctattatagaaagttgatc

SEQ ID NO: 33996 - DNA, 327 bp, Zea mays
tgtgtagctcttccttttttgttgcggtgcctagaatgcaacgggttgcacctctggtgtggacgtggcgccttgctccaaattgacaacgtatttggagtttttgatcataagtttaaagctcacaaacttgccaacaacctcctcgggagacatctgcttatatctaagatcttcacgaattaattgtacttgagtgagattactaaagataagagatcttacaataaccttgaccattttatggtcatcccacttggtacttccgaggttgtgtacttggttgaccatcgttttgagccggttgtacattgctagatgctcttt

SEQ ID NO: 33997 - DNA, 376 bp, Zea mays
  unsure (1)..(376): unsure at all n locations
acccatgctnttatgcgaagatattgcagagcagaaggtgctgctgggatctcaattgtctgaggaacaagagaaaaccctgataaggtttctcttcaacaaaaaagatgtctttgcatggtcggctaacgatctttgtggcgtcaacagggatgttattgaacactcgctcaatgttgatccatccttccgacccagaaagcagaggcttcggaagatgtctgatgacaaggccgaaggtgctcgaaatgaagtaaaaagactcctcagcgccggagtcattagagaagtgaagtatccagaatggctggctaacactgttatggtaaaaaaggccaatggcaaatggaggatgtgtattaattntactcatctc

SEQ ID NO: 33998 - DNA, 441 bp, Zea mays
  unsure (1)..(441): unsure at all n locations
cattgagcaaagatgatcaatctatttgttgtatgtaacttcatcaagagcgcatccactgctcttcatctcctcaaacaatcgaatgccaagatgaggatctcctaccttgcaaagggcatttatcaaaatattgaaagtatagacatctggagaaagtcccttcacagttagctcacgtgcaaggtccaatgcttcctcaagtcgattctgtgagcacagagcaacaatgagagtgttgaacgttgtggtgtcaggcaaacaacccctatccaccatctgatttacaattcccttggcctcatcaagctctccattcttactgaagcagttgataacagtattgtaggtgaaaacatcaagatcatggccctcctgaagcatcagatccatgactntcaaagcatggctgacatgtccgttttggcacaaacaatgaac

SEQ ID NO: 33999 - DNA, 493 bp, Zea mays
  unsure (1)..(493): unsure at all n locations
ctcaagcttgggtgctcctggtatctagatgaaaccgaccccgcgcatccttctcttattataatgccaccttgtcctcatctcgagattcgtaggcaaccgtcgaccccttccagaacagcggtgcccgcacaaacctctccgtcccctcgagccatacctctgcttcccccacacgttggccgttcgttctctctccatggaaacagccaccatcgcacctacccgcgccctatcgcggcaacgcagcagcccctgcgcgcccggccagccccggcggcgatgcgcggcaacgcggtgctgtagccggccagccgaccagcgaggtcacgctcgcccctgccccagaagctgaggtatcggcgaacacgccctcgcagtcgcttcgtcgacccccgtgcatgcgcagcacgtccgtgtggtaagcgtctacccncttcccgcatactntctcttcttcgtctacccctccctatgcccatccccacagcga

SEQ ID NO: 34000 - DNA, 321 bp, Zea mays
tgttcatacactagctacatgcactgatgggacttcttgacaaacatcaaatgaccgtgacattagtgcatgcccttactgtagctttttgacctatacaccatatgtggtatgcactctgttaaacaagcaatacaaagtgattcatgaatggtgtaatgtataatctgacttgccatgtgtactgatggcacgctggatttcttcacacattccatctggcagggaacatgagtggccatttcgtcacctccgtgttcaacaatctacgtaaggtgatgcgtcaagaaccgatggtgtcctacatacgccacgaggcac

SEQ ID NO: 34001 - DNA, 446 bp, Zea mays
  unsure (1)..(446): unsure at all n locations
agcttcttgcttcacaagccatctgtgccttatatatcaagagagaggggggcttcctcctcactccatccattgtgagctccgctaganacaaccatctagtctcatgtcctatggacaacaacgctctcacaatgctaacgcttgttcttatctgtccgggtgatgacctctactctctcttctatgacgacatggaagctgctgagcacaacatgcttgaagaggagtcccaaaggccgattcgtaagcgtcgaggctccattcccggtcgcgtcgtagtcaacagggaccaagccactggccactagtgtatcatggccgattactttgctctgaatcttgtgtatattgtggattgtggaacccacacatggccatattacctaatatgggatctaggcttacattaagccagcaagaaaccaagactttatcttcttcaa

SEQ ID NO: 34002 - DNA, 490 bp, Zea mays
  unsure (1)..(490): unsure at all n locations
ctaagctactctcctagaaggcccttcatatcgccaaatttgaagccttgtatatacaagctggccaacgatcaaggcgaggtctacaacaacgcttggaacatccaacagctacgtcgcttttacccttaaaatgtttcaagttgttcatgtatctcgctttctttacacgcataaataaagtctaaccatcaaggaaggatcaaccttgcctcggcaaagcccgaccctccctcangggctagaaggggggaaccccctctgcgtcaaaattttcctcggaaaagtcttttgccagaacgtctttcgtgcttttcgactgcgtcgataacagaatcctaaagacgagcgagagagaccttgaacggtaaggctgactgagccgagggactcctacgcctncgggatacagatacctcactcaccaccttccatganaagtaactcacgctcngataagcgattctgctaccgaacaagtcctaacact

SEQ ID NO: 34003 - DNA, 447 bp, Zea mays
ttaatcacctgctgcatgcaagcttcaacaagctagctaccattttatctttgttgctatcaattcttgtcacatgtgtgtcgcatgcatgatgctgcattcctccctctggtgactgatgatgtaacaacgacttgcttatgtatggttctggtataggttggtgactgacataccagaaggagctggtgccaatcatggtaagtgatctgatgaagaacttacatatatagagagagagacacagacacagaacaaagtacgagctgtacatgtgtttgaatatgaaaactgccaaccagctattcactcaagaaataacagcagctagccgacgaatactagatatatatagtcatgcattcataaatctccagagaacgaggtggtggcgtacgagagcccccggccatcggcggcgatccaccgattcgtgttcatcgtgtt

SEQ ID NO: 34004 - DNA, 485 bp, Zea mays
  unsure (1)..(485): unsure at all n locations
aactgagcttctanagggagagcacattntaggactaacaaatgtttatgttgataaagacagggtttgtagggcatgccaagtatgaaagcaagttggctctcatcatccacacaaaaacataatgacaactgacaggccgctcgagctactccacatggatctatttggcccaatcgcttacataagcatcggcgggagtaagtactgtctagttatagtggatgattattctcgcttccttgagtattctttttgcaggaaaaatcacaaacccaagagaccttaaaaggattcttgagacgggctcaaaatgagttcggattaaggatcaaaaagataagaagcgataatgggacggagttcaagaactcataaatcaaaggctttcttgaggatgagggcatcaagcatgagttctcttctccctacacacctcaacaaaatggtgtagtggagaggaagaatagaactctaatagacat

SEQ ID NO: 34005 - DNA, 439 bp, Zea mays
atgcaagcttctaagggagaacacgtgatatgtttatttaacgtgcaattcgaaaaagatagaccttgtgcagcgtgtcaagcacgtaaacaggtgggaggagcacatcacagcaagaatgtgatgaccacatcaagacccctggaactgcttcatatggacctcttcggacccgtcgcctatctaagtataggaggaagtaagtatggtctcgttatagttgatgattcttcccgcttcacttgggtattctttttgcaggataaatctgaaacccaggggaccctcaagcgcttcatcatgagagctcaaaatgagtttgagctcaaggtgaagaagataaggagtgacaacgggtccgagttcaagaaccttcaagtggaagagttccttgaggaggaagggattcagtctgctccctacacaccacaacaaaatg

SEQ ID NO: 34006 - DNA, 341 bp, Zea mays
ggggtttatatttttcttaagtaggtcacattatttagagtctgacaaaattggtttgaccaaatttggatgaattaaacagaagttatgaatttttaaagtttctgttcaatttaaaaacaggtttaataaaggttttctggaaaaacagtttacaccgaggtccctgggtttaaactaaatcaacattcgcaaatctacccttgcgccactattcccctgtgtctctgacatttcacaaaaccccctgaccttctctccctctcacccgcagtccttccccttatgcaaacagtaaccgcgggaaagaaaagggtggcgcggcttaccggcagcgaggg

SEQ ID NO: 34007 - DNA, 297 bp, Zea mays
aatttcatgcatcgtaaagaattgaactatcaatagattatatattacattcaaagttacaatgtattacacatgctacattccaaatatttttacaataacatctaatcctccttaagaactatttctacagcttcgttcagcagctgatcgacatccttgtccatgatggcttcggccatttttctaatttcatcgtcccccttcggatgggggcccggagatgcctcagcaggttctgagggaggagaagatacgactatattactattacaaactgcgaacaaagtctggaat

SEQ ID NO: 34008 - DNA, 400 bp, Zea mays
  unsure (1)..(400): unsure at all n locations
taattctaattttgactgatttttttaattggacattgagtaccaaaaggagcgggttcacattgtggatgacgccatactagccgttgaactaagcatagttctctctaaggaggtaacgacttaacacacttcctcagttgcccatctggtgacattgangtattaaattggtatgccatacatgcagatgtatgatctagataaaagcagcttttatatggtgcagctgcagtatggtgataaatagacagggtcttaagcangtgctgaagattgagtggcctgaatgacttattaccaactacttttcccaattacctcaattntattattgaatattgtggttgagaaatgaccttttgaaatatctcatgaacaggggatnggagtctgcatg

SEQ ID NO: 34009 - DNA, 376 bp, Zea mays
  unsure (1)..(376): unsure at all n locations
tcgtgctcgtgcatggctttatcgagcaacaagccgccgagcatagggtgccgtcgagcagccgagccaccgtccgagctgccctgctgccgccgagcaccgagtcttctctggtaaattaaagtcgcttggataaattagtgtttcaatttaaagttttggacagattgcttgtagggatttgaaaagattacttgctgaaattttagtgggcgggcgggtaatggatatccgttggataatggatacccggcgggtacgggtacggatacagatccgtacccacgagcgtaaatgggtatgggtatggntttatctcgtgggtatggatacgcgaacaatatatccgcattccacccacccgattgccatccct

SEQ ID NO: 34010 - DNA, 288 bp, Zea mays
  unsure (1)..(288): unsure at all n locations
atcaactaaatgggggatgattcccacaacttgcccgtccaatnttgcccgactaatgaaaactttcagcatgtccaccataatattaaataggaggggggacaaaggatccccttgacggagtcccctttcttgtttgaaagtagtggcctggatatcatcattaacaattacagctacactgccgcctgaaatgaaagtctcaatccaaaaaatccatttggacaagaagcctttcatccggagtgttttgaaaaggaacggccaccgtactttgtcgtatgcttt

SEQ ID NO: 34011 - DNA, 402 bp, Zea mays
agcttcttcataagatggatgagtacatcctgtttgacaacgatgttctctaaagaagggaggaggcctactggttttctgagatgaccaggggcttccgaggaagacttcaccccaggcatgtccgatcaatccacaactccaacaccaatgatgacagggccagtaatgctcaacatagccatcatagttctcagactgcaagcatgcaacagactttctttagaccaccagctccgagaggtagaggaggaagaagttcttgtggcggaaggtttggcaatcaaccccaaaagttgtactgcctcttttgtggcgaggacaagggccacacaacaaggacatgccatgttaccattcagaagcagaaggaaattggttaagctgaagcgcgatatagtc

SEQ ID NO: 34012 - DNA, 415 bp, Zea mays
  unsure (1)..(415): unsure at all n locations
aaggggtctaagcttacgatgcagcagccgtagcaactggaacagcctgagtctgtgcacttggaggtgccctgtggaagacagggacaatcacctaagaaaagtcttcacgtcaccacaaaagatgaaaggggaaagatggctcacgtttcagctgtggcaacaggagcttgtgtaagtgttcttacaactgatgtggcangggcagcacgttgggcctattgcaaagttaataacagatcaaattatcagaaaacagttggtaacaataatgctaaaacaaaatagaagatattatttcatcataagtattatacagctcgttattttgtatgtaaaaacagcttanactgattgtgtacatacatggtaatgttcacacactattttccaacagggatttaattcaaccatt

SEQ ID NO: 34013 - DNA, 385 bp, Zea mays
agcttctcaccatcatacctctaagtacttgttttttttgtggtcaactaacaattgaagggtcatcgtcttcaacgacatctacaactgcttgcatgtggcttgggcaagtggaataaattatgctatactacttgaaataggcaaggagagctttcgtaacaagcccaatgaaaccaagtttaagatagagcacacacgacacgctcttcgccattagcccaagtggtgcacgaggcacggtgacgatgactccggtgatagaagcaaaagatcttgtctcaacttagacgacgattataactctatgtataagaaagtgccgacgcaccatgctctattggacacgatagaacaagaaatcaacataatgggaatggactaa

SEQ ID NO: 34014 - DNA, 416 bp, Zea mays
  unsure (1)..(416): unsure at all n locations
gtacctgcaaaacttattaagtacattttggtatcttttctcatgaagggtccatcaaggttagccaataatgacttatgcacccaaacagccttggtcctagaatgtggtgaactcgtcacctttctagcacaagagtcaaatttgggtctcctaagcatatttgaatgtattgacaagttaggcttacgagttntaccatttggacaaaccttgaatagatgacctttttacggcaatggtagcaaatgccgtgcttgtccttgcaatgcanttgcctcttgctttcatctttcttgatgatcatctttcttgatagtgcaaggtcttggttcttcatgtgggggcatgaaccaatttcatgacccttttccttgcatccatagcaccctctatcgcttctctttgaactttct

SEQ ID NO: 34015 - DNA, 397 bp, Zea mays
agcttcagcagaatgacagcgaaggttctttattctatataggcagaaatgtgctaacttatgttgatgatatcattgtaaaaagcacgaagcaagataatcacattgctgatctacaggagaccttcgctaattttagacaggctggtttaaagttgaacccagaaaaatgtgtcttctgagtgaagaaagggaaatttcttggctgtctagtctcaacaaaagggattgaagctaatccaaataaaatcgaagccatccttcgaatggagccaccaagtacaaaaaagggagctcatagattgacaggaagactggcatctctcaacagatttatatctagatcaggagagagaaatttaccattttgtgaagaactgaagtcagctgaagtttt

SEQ ID NO: 34016 - DNA, 456 bp, Zea mays
  unsure (1)..(456): unsure at all n locations
tatatggatccggaattatagtcatatctgttctgaggccgccgtaatcattggtttcttaccgagacatttcctgccttttctgcccatggtgccgcgtcaccctattttggcccaatgggtcgtgtatcaagttaagtccattatggacgcatcctatggttgcagcacgaccccaatacccttgtggtcgtcctcccatgtttataaaccccctagccgccaccaagaacagcgggttttgtttagatcaagtttagctctcgctacttgcttgcaagcgcgcgtgctagttcagccgcccgtcttcttgtcttcggaaccccaccatatagtagtttgatctttaaacctacatttagatctggtaattcagtacttgttctacttgttcttgctagttcttcgattgcttgcangacgagtgccctattggccagggtgtcacgctccaca

SEQ ID NO: 34017 - DNA, 398 bp, Zea mays
agctagtgaagattcttcatgccaacatggtgctttctatgatgccagagccaacccatattagtcttaacaattaagcaagtatcgagttcagctttgttaaaatcaactaagtatagctgaccctcttatactcccttaaatgcgactgaatcattacttcttctcaagacagtaacacctacatctgtaaatagacagttgtagcccattttgcacaattgagatacataaagcaagttataatctaaagaatctacaagaaaacattgggaatagaatggtcaggtgatatagcaattttaccaagtcctttgaccaaaccttgatatccatccctgaatgtgatagctctttggggatctttctttttctcgaagaggagaacatcattttct

SEQ ID NO: 34018 - DNA, 409 bp, Zea mays
  unsure (1)..(409): unsure at all n locations
cggcgagagcacgtccatatgtaataatctatatgtgagttatacaagcatggagtctgctctccattactcaaatgtttatccacaactgaaggtatagagttgatgaaagaaatacatgccggcatgtgtggatctcacatcggatccagtcctctgttgggtaaagtttttcgtcaaggattctattggccgaaagcagcttctgatgcaacagaattagtccaaaaatgcgaaggttgtcaaaaatgtgcaagagatcaaaaacaaccttcgtctctaactcaattaatacagcccacttggccattgcaaagatagngcctctgattgctaagcccactcccaccagcgcaagggaatttgaaatatgttgtattggcagtggaatatgtttctaaatggattg

SEQ ID NO: 34019 - DNA, 367 bp, Zea mays
cacaacaaagaggtataaggggaacacaaatctcaaggagaaagtaaacaataggtacaagtgcatcaccgccctcagaaggcttcgagcaacaacaccagctaagactagcccaccctccgaacaaaaaggcgagatgaaactatttccaatgctaccggaaaagccgggaatgacatttaaatccgccggcgagaaactgaagtccgacctatacacgaacttcccatgcgggcaaccagtctacatgaaagcaacacctgtgccgcgagaagctagcacggcacacaagtcaccgtgctcagctataactaagtcaagcgcatcaactacaccctcaatatggtcaaacgagccaggcaggcct

SEQ ID NO: 34020 - DNA, 308 bp, Zea mays
  unsure (1)..(308): unsure at all n locations
tgcccgaaataataaaacagagcgcaaaagattctcatgatgcaaataaagcgacgaacgcagctgacaaagctgcggaacttgaaaggcggatagagaattgttaatttcttttgactctgtgtgttatttctgtgacttcaaacttatttatgttntgtatcacagctgaactatctcctccacaggagcctttccaggcatcgaccgatccagaagccagagagaggaagaaatcactaaaatggtcgaagctattntggatgaagctggttctctacttgttaaccagcttcgggagccgttta

SEQ ID NO: 34021 - DNA, 167 bp, Zea mays
tttttttacatggcatacgctcgtgtgaaatgttatcgtcacatcccacacatctaccgaacataagtgtaacctgggtgcctagagtgactactacattatggttgcctcctgccgtttcagtcggaacctgccgccactgattaatgaatcgcaaccaacccttg

SEQ ID NO: 34022 - DNA, 386 bp, Zea mays
  unsure (1)..(386): unsure at all n locations
agcttaaccccaaagaaggatngtttgattttctattnnaaaaataacttcttagtacaaacttgaaaacagcttagatcctgttttttgtccaagttcgataccttaataaaaatataaccaaataaaataaaatggattaaaataattaagtgtcatactaaatgaaataaaaatattttttccaataaaaaataaatagaatcgtaaaatttatttaagatatgacaaacatagggtaaaatagaatcaaaattagttaacggttagaataaatgaagtaaaaatacatttttaataaaaaaaatatagcagctaagaccgtctgcagcacaacaatctattcatagtttatccaaaatacagttttgatattattctgaact

SEQ ID NO: 34023 - DNA, 437 bp, Zea mays
  unsure (1)..(437): unsure at all n locations
ataccntttcatcagatgcactctgctttttttgtatactcaatgtgcattgtataatcaataaagagaccttgggttctctgctgatgcattccattttttagctgttgaacttcgtttaactaaatatacaatccacaaacttattttgtcctgtgctccaaggttaccaatctgcttgtttaatagaatttatgtaatttaatatgtctctgcctctattctcatctactgggagactcagtctttccattgaagtatgtatcatgcaatttgtggacttgtgtttgacttgtcacatattatgcaaatcattatgcttctacctttgcgatattatagtgtagttcaaaagtattgaattattgttaatgtagctctagcgttgcatttacatgatgatgaattaccaatgacaagcccgtattgatgcaagt

SEQ ID NO: 34024 - DNA, 330 bp, Zea mays
ggaacgcgccaacggaaaaactttcacagctgcgaaaaacatgatcctcgaccaaaaaagggcacgtgggccgaatcgttacccgaggcgggctgggcgccaaacacgaccgagagcagggtgaccgggctcacccctaaccgccttctatatggagcggaggccacgaccccccaagaaataaaacatggaggcccgcgaccagaatcatcaaatggcctcgaccgggacgaaccccactttgaaggatctcaatcgaggggaccgagtcctcgctcaacaggctctaagaaaaaaccaagcccagacaaaagcatggcccgaccccac

SEQ ID NO: 34025 - DNA, 504 bp, Zea mays
tgtaagtgccgaggatggcccttcagctattgaatcttctcttgccctggcaaccgcagctagtgcacattcagttaaagagtttgttcacagaaaacagcagaacatccaaaggcgctgagccctccaactgtatcaaggctggctaatctatcgactactacaacagcgactccgaagaacataatgatggcttgcgttttatatgttgttttagaatccatgaaatcgccatctcccgcttctaccgaagtgtatcaccataaacttcaatcctgtgataatgaggaaaattctccaagggttttaatttaatacacctctgcttgagaatattcattatttcgaagttgctgctctcaatatttacataatgttcttactaaaataaaatatacctaatttatctaacatacgctcggagtgaaatataaaactatcattaagctttactaatattaactaccaataaatatagtcccttaatatcttgaatcggactat

SEQ ID NO: 34026 - DNA, 397 bp, Zea mays
agcttcggcaccaaaggcttcgattttctctttgggagtttcgacaattctctttggagtagtgcttgaagactttattgtctccaatacatccagtacattaaccatccttttccttttggggtcaatgctggacccttttggctttttggtacttcaacttttgttgaaggacttaaaatttcagatgtccttgtttctttagtctttagttcttctattttctctatctccggcattatgaccgactcttcaacattcggcaggggagtcggctccctggcttcgggggccgaaaaggattcaccgacaaactcgggtactgtggccgattcaatatagcgtggccggtgcgtaagaacctttatcttcttcctctttggcactggctcactaa

SEQ ID NO: 34027 - DNA, 496 bp, Zea mays
  unsure (1)..(496): unsure at all n locations
agggagaagcacatttaggattaacaaatgttcattttgagaaagacaggatttgtagcgcatgccaggcagggaagcaagttggagtccatcacccacacaagaacatcatgacgaccgacaggccgcttgagctactccacatggatctattcggcccgattgcttacataagcatcggcgggagtaagtattgtcttgttattgtggatgattattctcgcttcacttgggtattctttttacaggaaaaatctcaaacccaagagaccttaaagggattcttgagacgagctcaaaatgagttcggcttaaggatcaagaaaataagaagcgacaacgggacggagttcaagaactctcaaattgaaggcttccttgaggaggagggcatcaagcatgagttctcctctccctacacgccacaacaaaatggtgtagtggagaggaagaatcgaactctattggacatggcangaaccatgcttgatgagta

SEQ ID NO: 34028 - DNA, 355 bp, Zea mays
gatgccacagccagcccatgctatttttaatatataagcatgcatctagaccggactccttttttgcaaaaacaactaaataaagtttgccgtctaatacacccttaaaagcttatgaaccatcacttcttctaaagacagacacatttacgtttgtgaataaacagatatattccatagtacacagtaggctcaaagacaacaaggtatatccatgcgactcaacctagaacacattagaaatagagtgctcggatgaaatagcaatttttcctaaccctttcacctcgccttggttcccatcaccgaatatgaatgaatcttgtggatcctttgtcttgacgtaggaagagaa

SEQ ID NO: 34029 - DNA, 270 bp, Zea mays
  unsure (1)..(270): unsure at all n locations
ttctgaaatgaccagcggcttccgtgggaggttntacccgacgcatgttacatcaattcattactctacacaaagtgatgataatgggagcccacagcaaaggccacaatattcctcacaggcttcggggcaacagcaagctcccttccgaccaccagctccaataggcagaggtgccaggggcttccgaggaagatttggcgatcaacagagaagaatctttcgcttattctgtggtgagaacaagggccatactaccacgatgtgtca

SEQ ID NO: 34030 - DNA, 389 bp, Zea mays
agcttatatcctacaattggtatctattattctttatgtgccaaagctcggattatggattatctgctgttggggaccttcttcctccgaaggtcctcaaaaacgtaatttaacaatgtcttccaagcacgggttatgaacaagtaccttcggactcaaaataaaagcatatacgatgagaagagcatgatcgtgacgaaggttgacgttgctccgaagctacacgcaaggaggcttcggctcaatcgcagaaaaaggatccgacttaaaggggaaaaggctatctattcctcatagatttgtctataagtcaataataaatgtaaagggcatgaatgtaatttctcataggctctgtcctatgcctataaatagatgaacagtacccc

SEQ ID NO: 34031 - DNA, 448 bp, Zea mays
agtttttcaccgacatctgggaaaatggtggtcaggagatggctcaagaaattataaggaaaagtgaaaaaggtatccacgacgctagaaatatagcagaggccgctgagaaaagtgcggatctcgagaggcgaataggtattgactactaagttttgactttatattggaattatatgatttcagacttatttacactttgtaacacagccgcactatcttctcccccagagcccgtcgagccattggcggaccccaacgcaaagggggatgacgaaattagaaaaatggccaaagctattatggataaggttgttgatcaactactaaacgaagttgcggaagtagtcttaagagaagattagctgctattgaaagacattgagaatgtatatattgctggacaaagtgtgtaatatctttataaccttgaatgaatatataagct

SEQ ID NO: 34032 - DNA, 405 bp, Zea mays
  unsure (1)..(405): unsure at all n locations
cagctngagaaagttagtcaccagagtactgtgtctcactgttctggcaccttgccgccactatcagcaagagacggttctagtgcccacgcttgtggtacaaatgttcagagtcacctgcttccatcatcatttgcaatccatgatggattgtcaaccatcangagtggtggtgttggcagtggaactgatgcgataaccatagcttcgttgagatatagtgatgcgaatttgctacctgaaaactccataacaacttccagttgtttgggtgaatcangaaccttcaattctcttgacgatgtttgtggtgtaaacccatcacaaggtggaacctttgtgagggatgtgttcatacttacgctgtatatttctttcaattcatcaaagggcatgtgaagttgc

SEQ ID NO: 34033 - DNA, 398 bp, Zea mays
  unsure (1)..(398): unsure at all n locations
gtgtgtggtgatccttgcagagtcttattgatcccatttgatcaaagagaagcctcgacccatctgtgtgaccgattgagatatgaaaagggttgaaatagactcggcctttgtggcctcctcaacggggactaggttctttggaaccgaaccttggtaaacaaatcaccgtgttcacttgttgatcttcacttgatatatttcncctcttttctctctctaaaaagtcccttgctaatattcgttgagtntgctcccaaacgttatccgcattgattgagcaactctagcanagagaactatcttccgcactccaatataattttaacactaaccccggccttagtgcgggttaaaggttaataaatttaaggttttggcctattacctccctctag

SEQ ID NO: 34034 - DNA, 403 bp, Zea mays
  unsure (1)..(403): unsure at all n locations
tagcttctgngcgaaagatacagaaagcttattttgtttatttanctatgattntctaaagattaatgccaaaaaggcactttctactgtcttgttatttgaaaaatgtcaaacaacagatttcatatttttcctaagctcttaataacaaaacattaactatcccaagggttggggtgtttccaccttaaggttatttttgtaggcgttttctaagttttccttgttttcttaaaaaaaatagtatcctatctattttttacttaactacggtttctcttaaattttctagtaattcacctgaatagaaccctaccaaaaataggagtgcctctctggtcattatataaatcaccttttctatttatcttaaccttaagcatattgtaaaataaatggcaaa

SEQ ID NO: 34035 - DNA, 330 bp, Zea mays
  unsure (1)..(330): unsure at all n locations
actgcttttctctgaccctggcgtcattttttatganaactgctagcgcctgggactgaatctaagatctatgcacataatcaatgttgaactcattgagttccgcaatccacttttcaatccttccagtagctctctatatctcataatatccttcaaggctgtgaggaaggaacaaatatatggtatgcttgaaaataaagtcaaaccttcctggaggcacttaaaacagcatacaccaccttctccaattatgtatagtttttctttgtaaactgaaaacttcggaaaaaagtttactaaagcctgctttttaattacccttcaagc

SEQ ID NO: 34036 - DNA, 554 bp, Zea mays
gactactcgctgatactcttgtgtttgtcttttatctagacctgaaaactttcccaaccagagttctggattctgcatgtattccacactgtccggcgtggatctcatctaataattgcttcccattagtcgaggaaatgcacttcatgaggactcttgtcgcaccccttctgtataatatgccccctatgagggagtactgggccaactgtcttgctatgcgttctgccgcagctttatcatctgattcttcttcattctttatagtcctgatgataggctctctctagtcattatggtccgattctggttggctcaaagtgttgcattcttccacctgatctgacggaatactaggacgtgatactttctagaagaaaacttctgattggacatgggccctaatggatcctaacttcaacaaaccgtctgctgctgcattgcggtctcttttcacatgatggaattcacacccttcatactgtattctaatatccggacgaatattcacagcttgcacatataatcattctatcaatcctattctttattat

SEQ ID NO: 34037 - DNA, 395 bp, Zea mays
  unsure (1)..(395): unsure at all n locations
agctntattccagtgtacccaggaccacttataataccttcaggcgtatgtccgaaggtttctgcgtctgagggcacaggcgccaacagtgccaaatgaaattgtcattgaggccatgattaagggacttcgaccgggaccttcagcgcaatactttgccaggaagccaccacaaactttggagaagctgctccagaagatggatgagtgtatccgagctgacaataacttccgccaaagaagggaggaggcattcaggttctctgaaatgaccaggggcttcggaggaagatttcatccgaggcacgtcaggtcaattcataactccactcaaagtgatgatagagggagccaacagcaaaggccacaatactcttcgcaagcttcagggcaac

SEQ ID NO: 34038 - DNA, 394 bp, Zea mays
agcttctaaatatgtcgaggtgacaaatgatgtttgttaattggtagttacgaaggtcgcagctaagcaacttcgtcggttgcccatcattcctcggctttctgagagcacctagagggggggtgaataggtgatcctgtaaaacttctaaacttaagccacaaaaacttgttaagtgttagcacaattatggccaagtggctagagaagagtcaaaacacaataaccacaagaaatcaatcacagagatgacaccgtggttatcccgtggttcggccaagtacaaaacttgcctactccacgttgtggcgttccgatggacgagagttgcactcaactcctctcaagtgatccaatgatcaacttgaataccacggtgttcttgctttctttt

SEQ ID NO: 34039 - DNA, 425 bp, Zea mays
  unsure (1)..(425): unsure at all n locations
ggacgtgacaagagccttcctcaaaggaccattcaatgttttgtctctgcngagcaacctcccaactttgaagatagtgagtaccctaatcatgattacaaactctctaaggcgctttatgggcttaagcaatccccaagagcatggtatgaatgcctaagagattttcttatcactaatggcttcaaagttgggaaagtcgatcctactctctttactaaaactattgcaaatgatttatttgcatgccaaatttatgttgatgatatcatattggggtctactaacaaatctacttgtaaagagtatagtacgattatgattcaaaaattccagatgtctatgatgggggagttaaatgacttcctaggaatttaagcgaagcaacttcaagatggcacctctatcagctcaacaaagtacac

SEQ ID NO: 34040 - DNA, 207 bp, Zea mays
tgctaagacaaagggtgttctctttaaatgaaatgacttaaagacccatgatatttgtgtcattaagaattcatgggcaggattaattgatttttcgcccttaacggcctattcttgtaacaaacctggaacaaaaacgcttcattatcaccttgggcattggtttgctcaccggatttttattacctaaccaaggcattgaactgt

SEQ ID NO: 34041 - DNA, 350 bp, Zea mays
ctcataaaagcatttaaaaacaaccctcattaaactcaccccacaaacaaaaaacagaaatatacgcggtcctcgccagccttgcttcttggacaatgatacaataaagggcgtccgatatttctttaggttcaactcttggaaacgaatggaatccttttgtttgctaacattactgctctctgcataatggggaccaaacctaaagaagtaatcccactgatttcataaaaatgaattacatataaacatgcgttcaatgttaaagaaataaagatacccaaagggaagattgctaacatatatcatattcagtcaatctaagacaaagggaagtgctaacctttata

SEQ ID NO: 34042 - DNA, 413 bp, Zea mays
  unsure (1)..(413): unsure at all n locations
tgtgaaggaagttattcatattttcacagttggttatgcacacttacacagttggttactcacagtcactacaattttatttctagttccgaagctcgacggagacatgctatgcagatggacctaagatcgatcgccaatctgaggcaagtttatgatgtattatatacattgtttatgattatttatggaacaaatagaatatgaaggtggacatggattcttattaattcttgctgaacaaccagccggagtgcaggaccaatatttttgatgcaccgcgccctgcccccatgcctcggccaacttntaacatcaaacttccatctatcatagagatgatgtcaagtaagatcaacgatctcccacatcgtcatcgatctaaattcacagatattcttgctgcatatgac

SEQ ID NO: 34043 - DNA, 405 bp, Zea mays
  unsure (1)..(405): unsure at all n locations
acctgctgcatgctatctttacaagggtcttggaccacatttattcttctcttgtatngccagggagacctcaagttagatagtagttgttccacaccagatggacctcaggtaatgttctgtggttgaaaaatgtatgctaaaatttaattataagagccttgttctgcgtgtctaagcgacaaactcccaggccaccattctctttcctctgagtgaccgaatttcaagcaatcaaaggtggcctcttggagttgatgtcatttcctcttcacagacagtgctttttnnnnacattcatttccttaatgatggttttatgaatcttgagcgtgcacatgaagaacattggtaaggctgacaagacagaaatttcccatttccatgcgcccagcctgcgacaaa

SEQ ID NO: 34044 - DNA, 516 bp, Zea mays
  unsure (1)..(516): unsure at all n locations
gtggaaaacaaaatccttggatctttgttttcttactgctngacgtagacaactgctagctcggacggtactccgaatcggccaacattgctttgtcagaagaatttctgggcagtctttgatgttattgtagaaacatccctcgcttccatccatttggtgaagtattcgacggctactaatgcgaacttaaggtttccctgagcggtgggcaggggcccgacaattccaggccccaacgctggagaggccatgtatgggcaatcagctttgtatactgcgaggggttgcctgaccgatgagaaaacttctggctggcttcgcaggaccttgtgacccgatttgcggcgcagatcattgcgggccacgtaaaccctttgcggatcaccttggcagctatggccctagtgactgcgtgctagccgcactgccactgtggcttcactatgatctgctgcctcggtttagtgaccacttaacattggctgctgccccttcttgatagtggcctcatca

SEQ ID NO: 34045 - DNA, 390 bp, Zea mays
agctactaaagggagaacacatgttatgattaactattggtcatctcgagaaagacagggtttgttacgcatgccacgccggaaagtaagttggagtccatcattcacacaagaacatcatgacgaccgacaggccgcttgagctactccacatggatctattccgcccgattgcttacataagcattggcgggagtaagtatagtcttgtaaatgtggatgattattctcgcttcacttgggtattctttttacaggaaaaatctcaaaccctagagaccttaaagggattcttgagacgggctcaagatgagttcggcttatggatcaagaaaataagaagcgacaacggaacggagttcaagaactctcaaattgaatgctttcttg

SEQ ID NO: 34046 - DNA, 448 bp, Zea mays
gtctgatagtgttcgcccgaagcgtctctttttagccactcaaccaacttctcctgctgagggaagaaacagataaaagagacgtcttcgccgagtgtcatgcttggatcaagatgttggtccttcttctcctgctgctgatgaagtgccaataccaacttttactgaagctgaccccaatgggtgtggcttagatgatactgatcccaatgggtgggatccggccaacgctgatcccaatgggtgtaactttgctgaagctgaccccaatgggtgtaccgtccgcattgttgatgatgatgaggaagaggaggatgaaatccctctagatcgaaagaacagccgacgctacatagccagcggcgaaagcagttgtgttccttctctaactttatctgccctattggtctgcatgaattgtctctggccaactttgattagactcttg

SEQ ID NO: 34047 - DNA, 400 bp, Zea mays
agcttgacaatgaggagatggcgctcgttattaagagcttccgccaaatcctcaaacaaaggaggggaaaagactacaagtcccgctccaagaaggtgtgctacaaatgtggtaagcccggtcattttattgctaaatgtcctatatctaatgacagtgaccgaggcgacgacaagaaggggagaagaaaggagaagaagagatactacaagaagaaaggcggcgatgcccatgtttgtcgggagtgggactccgatgaaagctcaagcgactcctccgatgacgaggacgccgccaacatcgccgtcaccaagggacttctcttccccaacgtcggccacaagtgcctcatggcaaaggacggcaaacggaagaagttaaatctaactcctccactaaa

SEQ ID NO: 34048 - DNA, 445 bp, Zea mays
  unsure (1)..(445): unsure at all n locations
gagaaccacgtgatagggtttgactaatcgtgcatattctaaaaagatagaccttgtgcagcttgtcaagcaggtaaacaagtgggaggagcacatcacagcaagaatgtgatgaccacttcaagacctctggagctgctacatatggacctcttcggatccgtcgcctatctaagcataggaggaagtaagtatggtctagttattgttgatgacttttcccgcttcacttgggtattctttttgcaggataagactgaaacccaagggaccctcaagcgcttcctaaggagagctcaaaatgagtttgagctcaaagtgaaaaagataagaagcgacaacgggtccgaattcaagaaccttcaagtggaggagtttcttgaggtggaagggatcaagcacgagttctncgctccctacacaccacaacaaaatggtgtggtag

SEQ ID NO: 34049 - DNA, 364 bp, Zea mays
tttgttaccggcttaagatgacttcgagcttcatcaccagctatgcttcgtccaccctttgtccataccaattttataaatctatttgctatgcttcagacaagcactacaagacatgtgaccttctatgacatttatattacgtcacaaacaatggtatttttgtcatagcataaatgcttgtgacaactttatgacaaaaacattgtcgtcacacaagggccgtgttaaagcaacttctgtgacgaatggagaagaaacatcacagatttaatgacgaccaccattgtcatcattaaatctgtgatgctccaaatcgccataattaagagaaaaacgtcatcaagtataacataggatcggt

SEQ ID NO: 34050 - DNA, 455 bp, Zea mays
ttgtgcgttgaggaagccttcttcacaagaggtggggctggtgatccctgggctggtatctcacgcgttggagcaaatgcagtgttctgaaactgagtggcatcatcctcggagaggtaactctcatattgtgccataacttggttccagtcggtacccatgctgacaagaaggactcgcacaaaaatataacatatgtaactaaataagtgtactacatttcaggcaaccatatgaaatgaatacgaaccatgacactgttatcagtctcatgcacaacaaagtcagttgtggcgacgactacatatattgcaaagttcataacattaagcattactcaaagataggtatggacaaacataaccaacatatgaactaaagcaggtcttgtggccacatcagttgtgtcacatccaaagactagtcgacatacataaactaccacgtcacctaat

SEQ ID NO: 34051 - DNA, 388 bp, Zea mays
  unsure (1)..(388): unsure at all n locations
agcttgactgaaatggaagactatcatgttgtacgangatacgatcacgaagctatgtgcagaggagcttcggcatgacaacagaaaggggaaatcgaattaaagatgaaaagccaagtcagccctcgaagaattactatagacttattgataaaagtaaagggcattaatgtaattttatacgggctgggtaccgtgcctataaatagatgaacagtattcctgtactgttcacactgacttggcattggcatcacgattgtacccttaccttccttcaagccgaatgtacatttgtaatttgtcatcatttatataagacaaacgaatagaaataaattaatagttatatttaaaggtctgaagttattttccatattttatacat

SEQ ID NO: 34052 - DNA, 426 bp, Zea mays
  unsure (1)..(426): unsure at all n locations
gtgaacagtcaagttcatgagggaaaatgcagcttcttctgatcagccgaagcccatgctgctgcgtgaggatatatcanagcagaaggtgctattgggcttccaattatctgaagatcaagagaaaaccttgataaggtctttattcaacaataaagatgtctttgcatggtcagccaatgatctttgtggagtgaatcgggatgatattgaacattctctcaatgttgacccattcttcagaccccgcaagcagaggcttcggaaaatgtctgatgacaaggccgaaggggctcgcaacgaattataaagactcctaagtgcaggagttatcatagaagtgaagtatccagaatggctagctaacactgttatggtaaatattgccattggaagtggataatgtgtattgatttcacagatctc

SEQ ID NO: 34053 - DNA, 401 bp, Zea mays
  unsure (1)..(401): unsure at all n locations
agcttgcattgcatgttaaaattcttgtattgtatctatggcttgnctaacctagttgagataaccgccaacaaagcgagtgaaaaagcttaactcgggtcaaacttgacaagtcctagttttaagcttttagcacttaaattcttacttcttatgcaattgttggttcttgaaatatgcatgaggtactgcacttagggggagtattcaaaactcaaatcactcatgaaaacccctagtgcaagccaaaatgcaaatttcaccatttgcctattttctctaaaaattatctagcctatggaaaaatattttgaaaaatatatgagggtaccaatacctgtcccaacaagtgttattttgtgtgattataagatgggatttggtttggttggaagttagat

SEQ ID NO: 34054 - DNA, 432 bp, Zea mays
  unsure (1)..(432): unsure at all n locations
gcaacatctacttgttcacctaccatacgaagctaaggtaggaggtcctgtgcaatatatatggatgtatcacatcaaaagacactaaagaagctacgtgcaatggttggtaataagaagacgagtttgaacggtgcatcgctgaagaattcaaatacaaagagataacatcattcactggcctgtactntgtagaggaacacaatgtcaatgcctctacgttgcgatatcatgtcgacgagccccctataagtgatattgaaatttttcaatggaggggcaaaactgcaggacccaacacaacatactggttcaccaatgacgaacggaagatttctttactctacatgtataacaacatggaagagatgagtcagtttctcctataagtgtaacttactttagccattgcactacaattcgttgtatact

SEQ ID NO: 34055 - DNA, 411 bp, Zea mays
ccgttccaagggagcgcagtgtaagttttctgctccaagtcgttccatagggaatgcagagcttacagcgaaaagtcaacgctgataccgcctaaatgaaaaagcgaagcgcgaaaagccaacgcgaataccgctgaaagtaaaaggcgaagaagctcctaagggaggcttacagcgaaaaataaacgctgattccgctgaagtcaaaggcgaagaagctcctaatggaggcttatatctaatagtcaacgctgattcaaaaagattatgtgttctatcgcacggatgtgcgtgtgtcttcggaataaataccatcttacatatcataacatcattacatcatttcgcatagcataagcatcatacatcatgctgcatatcgcacaagaaagtgacacaatattgatcttc

SEQ ID NO: 34056 - DNA, 196 bp, Zea mays
ttttgtattaaaagagcactccttatatattatcatatgcctatagccgatatgttaattaataatgcatcaggagacatagttattagctttcttgatggtcatgtcggatataatcatatattcttgtccgaagaagaacgtctaaaccaccttaatttgtccggctccattggtttatttaattggggggcat

SEQ ID NO: 34057 - DNA, 379 bp, Zea mays
agcttaccacatttgaagcatgagcgcttcccctttgtcttggtcttgcttggctgccccttgcaaccttttagcaccgtcttgaatctcttgatgatgagagccatctcttcatcattaagtctggccgcctcaatttgtgccaccttgctaggtagcgtctccttgcttcttgttgccttgagagcaagaggttgaggctcattgattggaccattcaatgcgtcgtccacgtatcttgcttccttgatcatcattcgcccgctcacgaactttccaagtatctcctcgggcgtcatcttggtgtacctaggattctcacgaatattgtttacaagatgaggatcaaggacagtaaaagaccttagcattaggtgga

SEQ ID NO: 34058 - DNA, 415 bp, Zea mays
acacgttcgtgcatgtgtccatggaggaaagcgttgtatacgtctaactgatgtgcttgccaattgtgggtagcaacaagtgtaagcacgtgcggatcgttgccggcttgaccaccgttgagaaggtttctcgccaaagttgatgtcgggtcgttgattgtatccgcagacaacccatcgagccttgtattgtgtgagggatccgtcgggatgcattttgtgcttgaagacccactttctagagataatgtgagcccttggagggtgtggaacaagagtctacgtatggttggcagtttggcacgtagcgcatcaaattcggacggcatggccccaaaccaatgaggatctttgagggcggcgcggacactctgtggaattggtgagatctactcagactacgttagagcgtact

SEQ ID NO: 34059 - DNA, 346 bp, Zea mays
agctgaccgcaatagaagcaggagcgctttcttttggtcttacacctgcacggctgaccattgcgaccctttagcaccgtcttgaatctcttgatgataacggccatttcttcatcattaaaaccggctgcctcaatttgcgccaccttgcaggggagagcctactatgtccctgtggccacaaaaactaaaagttgcggttccgagatcggtccattcaaagcgtcgcccacataccctgccaacttgaacatcatacgcccgctgacgaattctcctaggacttcttcaagcaacaaactggtgtacctgggattcccactaatattagtcaccaaatgaagat

SEQ ID NO: 34060 - DNA, 415 bp, Zea mays
gcttacaaagaagctaactgatggtctggatctatacggaggaggacgggagaggggctggccacggtgcttgctctcaggcggcactggcgggtcgcggggaggtcgccggagctaatggctggctcgggtaagccaggcgaggtacggaggaggtaacggcgaacgcaaccatgcactggggtgggcttcataaccggggcgcgggcgcggtcatctggcagctgctggcgcgcggaggttcgcgcacgggcgtgctctgagcgcgcccccggatgccagcttgcgtcgaacacgtggaagctttcttctgccatggttcaaccgccgattagagcgccataacgtgccgttcttggcaatagtcactgtaacggacgcttctctgctccaaatactatcttctcctatgagt

SEQ ID NO: 34061 - DNA, 288 bp, Zea mays
gataaccgccaacatagcgagtgacaaagctttactcgggtcctagttgacaagttctagctttaagctgctatctctgaagaacttactcatgatgcgcttgtgggttctaggaatatgcatgatgttctggactgtagcggcagaggtgaaacattcttccctccataaaacaattacggccagccataaagcagatcttcggcttggcctgtaatatgtaacgagtatttaccctatggacatatattttgaacaatgcatgaggggaccagggcctagtccaac

SEQ ID NO: 34062 - DNA, 503 bp, Zea mays
  unsure (1)..(503): unsure at all n locations
atggacatagactgttcttctgctttcctcagngcgcaagtatgaaagtgatggttctctcccaacccacttctcataagggggtttctcttctttgcccataggaattctattcagaacatgacatgaagtcaggactgccacccccaccatgccttagataaaccacatgtgtctaacatggcattcactagatcagtcaacgtacggtttttcctttagcaatcccgtttgattcgggtgaatagggaggcatcctctcatgaataatgccatgttctgcacagaaatcatcaaagactttgggaaataattcgccaccatgatctgatataagacatttgatctttctctctagttggtgttcaacgacagccttatagatttatagtagtctacaacctcatctttagttnttagcaagatacatagccaaatctagatgcatcatctatcaatgtcatgaagtatctcttgccaccatttgttaacacaccattcat

SEQ ID NO: 34063 - DNA, 353 bp, Zea mays
  unsure (1)..(353): unsure at all n locations
ctgcaactgcgcgacttatattgcatgtttttggaacgacaagtttgccatagctttcatatttgcatgcaaatgagaagtccgcttacattgccagattcctgctggntgtcgtaatgccttccgttaacgtaccttacctggtgggtcggtctgcaacgagtcgtgggcaccattgaggaacaagaacgttagtcgccgaaatccgagttggtgcaaaaccccgagtccccagtggcagaactccgaggtgcggtggccggtggtagtacatagtgccgtggccggtatggagtggatcaacgcccgtggaccgatccaatatggagtggatggctggcgcctggcgctgt

SEQ ID NO: 34064 - DNA, 485 bp, Zea mays
  unsure (1)..(485): unsure at all n locations
acacgcgacgcacagccgggaagcggcggtcaccggttatgttaatctgctcagccgcanagagggagagagggccacgggggtcaccggagtgatcgccagctcaccgacggcgaagatcttttaccgtgtgcccttatccgcccatcccgagcacaagtcgggccggcaacggcacgaatcacggcggaattggtcgtcggcggtgggtttgctggcgtcctgatctgtttcagttgaacactgtaccatggtgaacaccaattcagagcgactgacagagcacattggagcttcattttctcccagtttcatgtgacaacaggtccaagtctctgcatcaaagttgtagtgctacataccagctacaactttgctacatggtgttgtcacataaagtcactgaatctggtttgaaattgggctngaagttcagggcatgaatctgttagtctgatatttagacagaaccagactgacagtca

SEQ ID NO: 34065 - DNA, 353 bp, Zea mays
agcttggcggagggacagctgtcagtgctttttattccttgctgacggcctcttgctttcgtaagggggatgagagcccccgtcctcatatagcgtgtggggcgccatcattgcttgtctggcggagcgagcctaatgggacgccggtcttgtttcccgttacctgagtcagcttgtggtagggaaatgatggcgccccctgtgacgtggtcggtccttgccctacgttgggctatgtggatgctcctccgaggtctaggtcgagtctgtcttttgatgcctaggtcgagatcgaacccctgggtctggcgaagccgatactctttgctgatgccatggcttaatcccagccc

SEQ ID NO: 34066 - DNA, 538 bp, Zea mays
gtcctcgggaccccttgcattcttcttggttcatcgtctctgagcgaggcatcgaagccaacccggagaagattgcggccatcaccagcatgggacccatcaaggacttaaaaggggtacagagggtcatgggatgcctcacggccctgagccgtttcatctcacgcctcggcgaaagaggtctgcctctgtaccgcctcttaaggaaggccgaatgtttcgtttggacccctgaggccgaggaagccctcggtaacctgaaggcgctccttacaaaggcgccagtcttggtgccgccagcggacggcgaaaccctcttggtttacgtcgccgcgaccactcaggtgtgtagcgccgcgattgtgtgccaaatgcaggatgaagggcttacattgttccgtcagatgctggtctacttcatcagcgaagtgctgttcgagactaagatccgctcccacaagttcaaagctgctgatgctgtgacctgacatgcggaactacacactacttgagtccatccgtactgtgggcatcttcc

SEQ ID NO: 34067 - DNA, 380 bp, Zea mays
agcttcttcaaaagatggatgaatacttctttgcttttaatgaataccgccagaaaaggaaagaagcctacaggttttctaaaatgaccaggggcctctaacgaataatccaccccaagcatgttagatcaattcattactttagcccatgagatgacagaaggagccctcctcaaagataccaactcaactcccaatctttatggcaacaacaaagctttttcacgccactatccccaaagggcataggccgcttgcgcttcaaagggatgtaccgggattatcccagacagtttattgcttattctgtggataagacaatggccatactacaagaacatgcccagttatatttatacgctaaatgagatcgtccaatc

SEQ ID NO: 34068 - DNA, 378 bp, Zea mays
tctgctaagcttattccgtgcgtttttatctcaagcgctcacagtgcccaatgaaatcatcattgatgccatgatcaaacggcttcggccaagacctatagctcaatattttgccaggaaaccccttagaccctggagaagctacttcagaagatggatgagtacattcgaggcgataatgattttcgccagagaatggaagaagcttataggttttctgagatgactaggggcttcagaggacgaatccaccctatgcatgtcagatcaatccacaacttctttcaaagtgatgattgaggaagccagtttcagaggccacagcacagctcacagtcttcaggacagcggcaaagctccttcatgccaccaactcca

SEQ ID NO: 34069 - DNA, 395 bp, Zea mays
agcttgaaggaagaggtaggcataatgtattattttgttaccggcttaagatgacttcgagcttcatcaccagctttgcttcgtccaccctttgtccataccaattttataaatctatttgctatgcttcagacaagcactacaagacatgtgaccttctatgacatttatattacgtcacaaacaatggtatttttgtcataacataaatgcttgtgacaactttatgacaaaaacattgtcgtcacagaagggccgtgttaaagcaacttctgtgacgaatggagaagaaacatcacagatttaatgacgaccaccattttcatcattaaatctgtgatgctccaaatcgtcataattaagagaaaaacgtcatcaagtataacattggatcg

SEQ ID NO: 34070 - DNA, 501 bp, Zea mays
  unsure (1)..(501): unsure at all n locations
accctcatatcctcttcagacgtgaaatttgctattcttgtgcgttgaggagccttcttcacaggaggtggtgctggtgatccctgngctggtatctcaggcgtaggagcaaatgcagtgttctgaaactgagtggcatcatcctcggagaggtaacttccatattgtgccataacttggttccagtcggtacccatgctgtacaatgaaggtactcgcacaaaaatagaacatatttaactaaataagtgtactacatttcaggcaaccatatgaaatgaatacaaaccatgacactgttatcagtctcatgcacaacaaagtcagtagtggcgaggactacatatattgcaaagttcataacattaagcattacccaagataggtatggacaaacataaccagcatatgaactaacgcagggtcttgtggcacacatcagttgtgtcacatacaaaagactagtacgacatacattaacctagcacgtacacctaatct

SEQ ID NO: 34071 - DNA, 402 bp, Zea mays
  unsure (1)..(402): unsure at all n locations
tatgactattaccctaaagtatttatgttctcttaactggggtaaagttttacccctataatccccatttagggttaagttccttaaccaaggttctagttgcaaaacactaaaacaacacaacttgtttgaaattcttgcctagtgaatgcactataggtgtgtcaaacatatgcaatgtcaatgctcatgatgccatgctcaagctttagttatagtaacaccaggagtgttacatccttccccccataaaagaatctcgtcccgagattaaaaatcctaaggtaagtaatggttaagggaacgcatcancattttatttccttaattttggaacaaggcaagggtgatgtgggggttaccttcttattacaacagctatacaggccttacaatttacat

SEQ ID NO: 34072 - DNA, 223 bp, Zea mays
  unsure (1)..(223): unsure at all n locations
agcttaacaccaacaggagttatgcatgtattttctatatgagcacaaatcctcggagctgtgagataataatgctgctcggggacgcctacaaacgtccaactagtcctatanataacgatattctaacacaatgttctatggcagtcactgttatatacaacaaagaactctttggatctcagcacttcaaccatatagccctcagaattaaccattatct

SEQ ID NO: 34073 - DNA, 418 bp, Zea mays
  unsure (1)..(418): unsure at all n locations
tcccaggtttatcttctccatctcttgacataaagtgttgtcagaggtcttcattgtaagacaatgacaagaaaccttacggcttaatgcatctgccacaacattggctttgcctgggtgataaaggatttccagttcatagtccttaataagctcaagccatcgtctctgcctcatatntaattctgactgggtgaagatgtacttcaaactcttatgatctatatagatatgacagacatttcccagcagatagtgacgccaaattttcagggcatgaacaacagcagctagctccagatcatgagttgggtaatgctcctcatgtccgcgtaactgccgtgaagcatacgcaattactcggccctcttgcattaatacatagccgagtccactggcagatgcatcacaatataca

SEQ ID NO: 34074 - DNA, 257 bp, Zea mays
gataagagatctaccatgtttgaccttaagccttatgggctcacagcccagagcatggatgaatgcctaaatttttatcctaatggcttaatagaaagcactatctttactaaacctgcaatgattgtgatgccaatagtgtaatatattgggctctacaattctgtagagttatcgacatgactcaaatcaaatttatggggaggaacgaatggcctggcatttatattgggaaatgtcacacaaggttggtaaca

SEQ ID NO: 34075 - DNA, 394 bp, Zea mays
  unsure (1)..(394): unsure at all n locations
agctnncgggcaccaacaaagccatcttcttcctttncttttagggcagaggcactacgggcttttgaggatagtttggggatcaacctangaagatttattgcttattctgtggggaggacaagggccatactacaagaatgtgccatgtcatcattcataaacagaatgaaatagcataagctgcaactcaacagagccaaccgaagcaagctatgcatactgcttcatattattcaccgtacgttccagagtatgtaagtaaccatcctgcatcttctgtgattcggcaagccaacctcatgctttctggcagcagcttccacctccaccaccaatgctacaaggctcacagccagaatggagccaccacactcaccaacaatgagacttt

SEQ ID NO: 34076 - DNA, 437 bp, Zea mays
  unsure (1)..(437): unsure at all n locations
cttccccgtcgagttgaacatgagactttgttattgttgaccttattaaggactatgaactgganattcattatcacccaggcaaggccaatgtagtggtagatgcacttatccgtaatgttttcctttcactgtcttacggtgaagacctttgacaatacattatgtcacgagatggagaagcttaacctgggaatggtccaacaaggaaccctaagtcagctaaagcttgagtcagtcctcttgcaaaggataattgatgcttaaagggataacgagggtatgaaacacattcgtgagaagataatggctggaaaagccaaatcgtttccagaaaatgatcaaagcattgtatggtgtaataaccgcatagtggtgcccaagaatgaaaaggtcttcatgcatatcttgttgaacacatcttatccgctattcta

SEQ ID NO: 34077 - DNA, 381 bp, Zea mays
agcttgcatatattattgggatgaatggattctttattactcggcggttgcttcatataaatgtcttcatcaagaaattcatgttggtggttgcttcattttaaatgtcaatctattaaagtgaccatccccgagaagccatcaaggataataaaaggcatatggtggacggcttcacaactggactaaaggtgacatcttaattaatccatattgttgcttaaaacctgcgataaacgtgccttgccgcaatcaatggatcattatgacttgtgtttgagtttgaaaatccatttggactcattgatatttacaccaacacgagggagaagatggcatgtcttgtttctaatgagggcatcaaattctttgtgcattgca

SEQ ID NO: 34078 - DNA, 140 bp, Zea mays
catgtgatggttaactaacgtgcatttcttatatgatagaccttggacagcatgtcaagcaggttaacaagtgggaggagcacatcacagcaagaatgtgatgaccacatcaagacccctggagctgctacatatggacc

SEQ ID NO: 34079 - DNA, 404 bp, Zea mays
ctgcaagcttccctgcgatacggtgagtcaccgtggttcgcaccctcggacttcacccgtgcgcacacacgctcgacttccgcaccagacaccaccctcgctctccagttctctctcaccagcggcgagcagaagattcatgggtggcggccctctcttgccctggcgatggcgacggactggttttttttttctcactgtgctaatggcggctcgacggattcccctttggatggctcagaggggcacgactttaaacctcagaccgagtccaggcaggtgggcacgccgtgggatcactgtcgattccgggtcagcgcgatccgatccccacgggaaagaagaagaccaccccagccaggtgggtcccgcacgcaagcgacaaattcaaccgcgcgtatagt

SEQ ID NO: 34080 - DNA, 480 bp, Zea mays
  unsure (1)..(480): unsure at all n locations
ttttgctaaagcctcttcttgactcctatntatccagcatacccttgagagtcttttccttagtcgggtaagacttgctgagtattccatactcacggtttatccctttgttgtttttaggtgaggaagcgacaaacttttgttgcttttgctccaaggtggtaccaaacgaggaaaaacaagactgaagtgcgggaggactcggtcctccacttaagatcttttgcttttagctctcgggaggagtttgtgcctccctggtttgtataatattactactctgcactcactatntagctctggtctgtaataacataactcaagcttgcttttgaaataaatgtaagtttatgtaattgcttccgcatgtctttatctccgatgttctgtaatgtctgcaagactggtgaaacgttcctggtgaggtaggaaagataccgagcttgtcgagtagttcaggggcacctacagggttgtctg

SEQ ID NO: 34081 - DNA, 399 bp, Zea mays
agcttggtcattttattgctaactgttcttataatgaaagtgaccaggaaaagggaaacaagagggaaaagaagaagcattataagaaggcaaagggcgaggcgcatctatgcaaggagtgggactcggattgctcctcgtccgactccgacaatgaaggactcgccgccaccgccttcaacaaatcaaccctcttccccaacgagcgtcacacatgccttatggcaagggagaagaaagtatgtactcgcaactctacctatgcttcttcaagtgaggacgaatctagtgatgaggatgaagtagattattcatgtttgttcaagggcttaaatagatctaagatagacaaaattaatgaattaattgatgccttgaatgaaaagaatatacttttta

SEQ ID NO: 34082 - DNA, 403 bp, Zea mays
  unsure (1)..(403): unsure at all n locations
cttctataattggacattaactgtattcaacttctctctgtgcgcaagtatgaaagtgatgattttttcccaacccacttctcataagggggtttttcttctttgctcataggaatcctattcagaacatggcacgaagtcaggactgcctcccccccaccatgccatagataaaccacatgtgtttaacatggcattcactaagttagtcaacgtacgagtntcctctcaatgaccccatttgatttggggaatagagaggtgcctctcatgcacaatgccatattctacatagaaatcatcaaagactctgggaaagtattcaccaccatgatctgatctaagacatttgatctttctctctagttgggtttaaacttaactttatagatttaaaatagtc

SEQ ID NO: 34083 - DNA, 369 bp, Zea mays
  unsure (1)..(369): unsure at all n locations
agctngacactgtctgcctgtggattcttttgccatccttaataccagggcgtctcccactataaagcatgcttctagcaaatttaaatttttcattttctaaggtatggtcatcaatcttagcactaaggtgagctatgtgatcattttgcttcttaattaaagctaggtgatcatgaatagcatcaacattaatgtctctacatctagtgcaaatagtaacatgctcaacggtagatgtatagagtttgcaagaatttaattcaacaatcttagcatgtaatatgacattttcatctctaagattggaaatggaaacattgcaaacatctaatttcttagccttagcaattagtttttcattctcat

SEQ ID NO: 34084 - DNA, 216 bp, Zea mays
  unsure (1)..(216): unsure at all n locations
ctccttcctccgctgccttttcttcaatttctgaggatttctctttgatgggctctgaaagcctantttcagcatcggcccggctcattgtagcttcggcctcggtcagacttgtctcggtttcaacttggagctttcgaagccttggcaattttctctggagtagagcttgagtttttatcgtctccacccattttacaccacggcccatccttt

SEQ ID NO: 34085 - DNA, 69 bp, Zea mays
acgcaaaaagaagccagagcacaacccccaaaaaccaacaccagccaaccccataggcccccccacagc

SEQ ID NO: 34086 - DNA, 416 bp, Zea mays
atggtaccgagagagacaaaagaatctcttctttattatagctcaacctgacgggtctgagttcagtgttgagaattgccctgtgttgggttaaccaattcatacctaaaaatacatctatatcctggccttgcagaacaatcatgttagcaggaaagtttcgtccggccattgttactggcacttcataagccacttttctagtaaaaatgtgtcctccaggtgaatgaattttaaatccctcttttgattcatggcatgcaatacgatgttgctccacaaatttcttgctaatgaacgtatgcgaagcaccagaatcaaaaagaataattgaagggtgactggccacgggaaacgtacccatcatcaccggctcttcttccggtgtaatggccacttgggtgttagatacaccc

SEQ ID NO: 34087 - DNA, 354 bp, Zea mays
ggatcttaagacacctgcagcatgccagcttaatgactagtgagagagatattcttgtgtttctttgagctcttgcgcctggaatgctttcttccttcctgaatccttatagccatcaaactcacttggtaatgaaggcagaaacaccaatcttgtgggggtccttgtaggaaccttgtgttcccagtgattgaaaaaagaaagctcactccgtcaacggacttgttgaaaaaaggaaacggttgaaagagacccgggctttgggaccacctcaccgtgagtaagtttgcaaaaccgaaccttcggaaacaaattcacgtgcacacctcttattgcttgcgattggtttgcccc

SEQ ID NO: 34088 - DNA, 501 bp, Zea mays
gctatgactaatgtgttttcaagtcgatttcaaaccaagtcataagtatattgaaaggaacatggagtcttcggcgaagacaaaggcttccactccgtaactcatgcttcgccatcactccgagcaactctctcgtctttgggggagaaatgagcatcaaggaaaaggacttcatccttgtgggagagagtaaaagctcaaacgcaaaaggacttcgtctttggtataatcttaactcacttatttatgaccaaaggggaagattgcacttcgagggctctaatgattccgtttttggcgattcatgccacatagggggagaaatgagcccaaagcataatgaccgcaccaccaccaccatcattcaaaacttagtgctttccaaaagtctttaatcattggtatcctactgtcgtcaacacggggagaaagcagtattcacaaatggtatatcaaaccctcttgacactaagagtggatctctttaggggagtttgttat

SEQ ID NO: 34089 - DNA, 382 bp, Zea mays
tcttcatcccctcatgttctaaacggcgatgccacagccagcccatgctagtcttagcaattaatcatgcatctagaccgggctcttttgcaaaatcaactaaataaagggtgtcgtctatttcacccttaaaagataatgaaccatcacttcttctaaagacaaacacatgtacatttgtgaataagcaattatatcccatgttacaaagttgactcacagacaacaagtgatatccaagcgactcaactaaaaacacattggaaatggagtgctcggatgaaataacaatttttcctaaccctttcaccttgccttgatttccgttaccgaatatgattgagtcttgtgaaactttgttctgacgtacgaggtgaacatc

SEQ ID NO: 34090 - DNA, 442 bp, Zea mays
  unsure (1)..(442): unsure at all n locations
gcctagctacgggtgcataggtttcaccaaaatccaacccttcgacttgtgaatatcccttggccacgagtcgagctntgttccttgtcaccacaccatgctcgtcttgtttgttgcggaagacccacttggttcctacaacatcttggttaggacgtggaactaaatgtcatacctcgttcctcgtgaagttgttgagctcctcttgcatcgccatcacccaatccgaatcttgtagtgctttctctaccctgtgtggctcaatagaggacacaaaagagtaatgctcacaaaaatgtgcaacccgagatcgagtggtcacccccttatgaatgtcgccgatgatggtgtcaacggtgtgatctcgtagtatcgcttggcggactcttgggtgtgcagcattggttgtcatcctcttggctcatatttgcatctcccttga

SEQ ID NO: 34091 - DNA, 384 bp, Zea mays
agctacggaaaattctgttattttattaaaggttatgtggcctctctaatgaagctacacttcttctcgatttatcttgtgccttaacacgattttctcttttccaaaatattctccgaagaacaacactgtatccccttcttgttccacatgcaatatgttgtatgatgcttatgttatgtagaatgatgtgatgatgttatgttatgcaaaatgatatttgcaccgcagatacatatccctgtaatagagcacacacactttctatatcagcgctgacttttcgctgtaagcctcccttaggagcttcttcgccttttactttcagcggaatcagcgtactattttcgctggaagcctcccttaagagcttcttcgcctttt

SEQ ID NO: 34092 - DNA, 356 bp, Zea mays
  unsure (1)..(356): unsure at all n locations
attgttggttcttgaaatatgcatgaagtactgtacttatggggagtattcaaaactcaaatcactcatgaaaacccctagtgcaaggccaaaatgcaaatttcaccatttgcctattttctctaaaaattatctagcccatggcaaaatattttgaanaatattaagaaaatttatgagggtgccaatccctgtccaaccaagggtaattttgggggatattaagtgggaattgggttgggttggaaattaaatagaaaattccaaaatttccaaatcttccctctggtctgggctcaccgaacattccgtggtgcaccggacactgcactgtgcaatgtccggtgcaccggcag

SEQ ID NO: 34093 - DNA, 431 bp, Zea mays
  unsure (1)..(431): unsure at all n locations
gctaatgaaacttatagaatgatgctgtttaatacgaaaatttggtcatcaaacagactgttcaccttcggaccagtcaggactaaagtaggtcggctgcctttctagtagatttgattaagtaggccttagaagcattcgaaactagacttcaagagctttccaaaaagtacttatgggccttcatagcttttggcaatcaaaagatatgactgtttcttctggacggttctgttgcgctggactgactcaaacatagctcttgctgattcgcccatgatatgttttgtccttcctctttggtgaaccctaataatatcaacatacacgacttaggtagtatanagttctcattagtgtttaattgaaaatcataaagtagcgcgtgcacctcttgctgtagactcttagctcggctacgtgtaattagt

SEQ ID NO: 34094 - DNA, 354 bp, Zea mays
aagacatatccaaattttcctttcacctagatcacttccctgaacgcagttattattaatggaggaacttttatctgggcctgtgaagaagatctatggtttagacgccaagtgccaagatgtttttgcagtattgcattaacatattgtatgaaaccaaggcctgtggtaaagaacaatatcataacaatttcggttgctatatccttcttgctcgctctggcgcaagctacccagtgccaacgtttcagaatatatggtcccgggcctggatggaagactggtattatgtgaaaatgatttttatgcgatagaatacattatagatatcatctttcgccccatttggtccct

SEQ ID NO: 34095 - DNA, 365 bp, Zea mays
cgcatgtcaagcacgaaagcatgttggcgctcaccatccgcacaagaatataatgacgactgacaggccgcttgagctactccacatggatttatttggcctgatcgcttacataagcctcggcgagagtaagtactgtctagtaattgtggatgattattctcgcttcacttgggtattctttttgcatgaaaaatctcatacccaagagatattaaagggattcttatgacgggctcaaaacgagttcggattaaggatcacaaagattagaagcaacaatgggaaggagttcataaactcacaaattgaacgcttccttgatgatgagggcatcaagcatgagtactcttctctctacacac

SEQ ID NO: 34096 - DNA, 363 bp, Zea mays
  unsure (1)..(363): unsure at all n locations
agcttcngcgatggctaaaaatcttggcatgtttacttgcaaatagcaatgaatgctgcgggaacttcacacctactcgtctgtttatatagtgttgcacgttagaaggcgaagcacctgagtttttacaccaggcgcacacccgcttgcgctcgctgcgcggtggaccgcaaggacaaacagttaactctgcaaagtgggaccgctgcgtgctgggaaattaaatcgtttctcggcaacgagctaagggaatgtgtttttggaccttcggctccccgaagcttaagagactttttttacggatcaagctcgttactaaaaacgatctatcaccgcgaaaggggctactgttgggtctatgct

SEQ ID NO: 34097 - DNA, 472 bp, Zea mays
  unsure (1)..(472): unsure at all n locations
atcgatcttgaaggatggttgatgtacgtctctatattatacgtcggngggaactgtcgttcgccccgaggctattttcgccagctcgtccacagtctctgtgtaccgtcgggcgatgtggttgagctccatcccgtagaattggttctccaagcgccggacttcgtcgcagtaggcttccatcctccggtcacggtagtgggagatcttcatgacttggtcaatgacaagctacgagtcgcctcgagcgtcgaggtgtcggacccctatttcgacgacgatgcgtagcccgttaaccattgcttcgtagtcggccatgttgtttgacgccggaaaatggaggcgaatgacatagcggacatgctctccaaggggtgaaacgaagacaagccatcgcctgctcctgtttcatgagtgacccatcgaagtcatgcgccacagctcgcgctggattggagttgtccgaaactgg

SEQ ID NO: 34098 - DNA, 396 bp, Zea mays
aaccaactcccttcaatgacagaagtcattttctgttctgacgtactcatccatctcctggaaaagcatctctaaaggttgtgggggcttcccggcaaaacattgtgctattggacctggacaaaaaccctgatcatggcttcaatgaccatcttatatggcaccgctggcgccagaactctgaaatgcagaaacctttggacgtatgcctacaaatacttctcgtggacctatgcgcactgaaataaaccatgaataatcactggcttcatcagaaagccctaaatactggtgactaacatatcctccaacttctaccctgacgagatgtgtcctaactgaacagaagactaccatgtttgaacaacacttccgactgtcatgacgaagaatatt

SEQ ID NO: 34099 - DNA, 424 bp, Zea mays
tatcgaccgccacaggggaattgaggctaatccggataaaattgaagctattatgaagatggaagctcctcgatcacaaaagaaggttcagcgacttactggatgtatggcatctctgagcagatttatatccacgctgggagaaaaaagtttgcccttgtacaagctactcaagaaggtggataagtttcaatggacttcacaagcacaagaagctctatatgcactgaaaaaattcttgacaacacctccggtactgaagccaccccaccgagctacgtcaactcaaccggctgaagatttgctactgtatatctcttgcacgactcacgtggttagcaccgcgttggtagtccagcgagattataacagacatgcctacccagtgcaacattctgtttactttatcaatgaagttctgggc

SEQ ID NO: 34100 - DNA, 230 bp, Zea mays
gctagtgtttatttattttcttcctcctgcagaatcatatgtgttgcatcatatggacttatgcttgcgctgctttgaattaattggcatctattgtgttccttctgatatagattgctcctaaagacaatagtgcatgtggttagataatcttgtggataattggcgctctaatattgtttacacaatagtgcatgtgggtagatagctatgtggataatggtgcatgt

SEQ ID NO: 34101 - DNA, 250 bp, Zea mays
tgttccattgaacactaatgctcgcttcggatattataattctctagcatagtgattagcttcatatatcacttctataaatagttatatccccgaagcatgccgtacaatgtaatcacctatgttgcaaagtgcttccggggcagcagtgacaatttcttcaaccgaaataggctctgacatttttattattttggcttccaatgctgacttcgaacatttgtttcttcggtttcaaaggatgttcctt

SEQ ID NO: 34102 - DNA, 279 bp, Zea mays
gcaactcatggaattcacgggtggcatttgcctaattatactatctaggcctcggtcaaaaatacatgtttctattaacaaaatcgccggtggaaattctaatatggacctcactgtacaaaacaagttaggaaaaatgaataccccaatttcttggtttgctgtcttgatggctgaaaatgaaatacctggttgggaagaggatgtccagtttgccatataactatgtgaacgcaaaagaattatttgttcaagtaaggctaagtaaaccttggtgta

SEQ ID NO: 34103 - DNA, 399 bp, Zea mays
  unsure (1)..(399): unsure at all n locations
ggcttatggatttcttgctttccaaatacttcaaaattgggaaggttgacactactctattcactaaaagaattggcaaagacttatttgtttgtcaaatctacgttgatgatattatttttggatctactaatgaattattttgtgaggagttcggaaaaatgatgtcaaaagaatttgaaatgtctatgataggagaattgagcttctttcttggccttcaaatcaaacaattgaaagatggaatttttataagtcaatcaaaatatttgaaggacatgctcaagaagtttggtttataaaatgctaagcctatcaagactccaatggccacaaatgtgcatctatacttatatgaaggaggtactatggttgatcanaaacttatcgtcaataatt

SEQ ID NO: 34104 - DNA, 389 bp, Zea mays
  unsure (1)..(389): unsure at all n locations
agctntatcaaatggacgggagaagtgttctttcttatcggaccaatcaaagaagagggctatgttgagcaacctcccgactttgaagatagtgagtaccctaactatgtatataaactctctaaggcgctttatgggctcaagcaagccccaaaagcatgggatgaatgcctaacagatttccttatcactaatggcttcaaagtcggaaaggctgatcctactttattaactaaaacacttgcaaatgatttgtttgtatgcccaattaatgttgatgatattatatttgggtctactaaccaatctacatgtgaggaatttaatacgatcatgacacaaaaatttcaaatgtctatgatgggggagttgaagtacttcttacgatt

SEQ ID NO: 34105 - DNA, 318 bp, Zea mays
gccgaaagaatgcatttatgaggactcctgttgcgccccttctgtacagagcatccccaatgatggtgtagtgggctgactgccttgcgatgcgctgtgccgtagctttgtcatccggttcctcttcattctttatatatctgatgatgggctccgtctagtcattagagtctgactctggctaactcaaaacgttgcactcttttgcttgatctgaagaaatgcttgggcgtggcacctcttggacgaaaactccacgtggaaacttgggtccgactggatcctaaatttgacacgcgtcttgcgcctattgcgatc

SEQ ID NO: 34106 - DNA, 396 bp, Zea mays
  unsure (1)..(396): unsure at all n locations
agcttgaggctgtgtatagattaccgccctcttaatgcggtaactatcaagaacaagtatcctttgcctcgtattgacgttctctttgaccagttggtcggggccaaggggttttccaagatagaccttcgctctggctaccatcagatcaaaatacgaacaagtgatattccgaaaacggcattctcaaccagatatgggctgtatgaatttttggtgatgtcattcgggctgacaaatgcaccagcatacttcatgtatctgatgaattctgttttcatgccagaattggacaagttccgggtggttttcatcgatgatattctggtgtactcgaagaacgaagaaaaacatgccacgcattngcatgtagtgcttcaacgtctgcgagagcac

SEQ ID NO: 34107 - DNA, 429 bp, Zea mays
ctttactggtgggaagaacgaagtattatgtttatcaattatgttagtgtcatgtgggtaaatagtttagcacatattctgttataattattgttttataatgtgatctgtcagcactcagcaccagtacatgttttaagcgggggcggggaaccccgcggggaaaaaatccccaagcggggacggcgatggggaaattcctcccccgtcgaagctaacggggacggggacggggattttcttaccccgcggggacgggtatgggaagataacccccgacggtgaaatccccattgccatctctagtcacatcacattactactcagaagcagccggctaatacactcagcgtaccaagccgttccttgcccacacccattggggggagacgcccaggaaatatcagtatatttttcataacagtcaca

SEQ ID NO: 34108 - DNA, 389 bp, Zea mays
  unsure (1)..(389): unsure at all n locations
agcttcttcgccagtctgagcagttctaactanaaaaacaagatcttaatgcgaaacttgaagccgaagctcaacaaaattcagaattgagaaaactactgacaggtctttaagaaaaatgcttggaatttagcaacaactgcattcaacgattaaaaaagattttttactcagttggagccagcagtgaaaaattcaccccctcagctgaagatctaccgaaaaccttcgaacatattgagggggagattgacgagctcgacgaagtcatagctgggcatggtgacttctgtgcctgggtggcttctcgaggcactgctgcggctttcctgaaggctggctgtgatcacgggaagattgtcaataggccaaatttcactttatcaccc

SEQ ID NO: 34109 - DNA, 438 bp, Zea mays
  unsure (1)..(438): unsure at all n locations
tcgantggaagtctacttggtgtagactccttctttctttcttccgctgctttgaatgcaacgggttgcaccttggttgtaaaggtggtgccttgctccaagttgataatatatttggattctttgatcataagttcaaatcacacaaacttgccaatcacctcctcgggagacatctgtttatatctaggatccncacgaattaattgaacttgagtaggattacgaaaaacgagggatctaagaataaccttgaccatttcatggtcatcccactttgtgctctcgaggttgcgcacttgattgaccatttgaaagggaattaggcttacacctatttcctatatgatattggtggttgaatcgcccaacacacataattggactaactagtttgctctagtgtttgagttgtacatgtgctaaaggttcacactt

SEQ ID NO: 34110 - DNA, 400 bp, Zea mays
  unsure (1)..(400): unsure at all n locations
catcaagcttatatggaagtgcaagactcctctatattgtgatcagacnggagaaagacagcnctttgggcctgaactgattcaagaagcacaagaacaagttcgtataattcgagaaaatttgagggtatctcaaactaggcaaaagagctatgctgattatagaaggaggccactggaatttgtagaaagagattatgtgtacctcaaggtgtcaccactttgtggaatgaggagattcaaagttaagggcaaattgtcccctcgctatattggaccattcctgatctttacgtgagttggggagatgacataccaactcgagctacctactagtctatctgatgtgcataatgtgttacacgtatctcaactgaagaagtgtctctgtgtccctgat

SEQ ID NO: 34111 - DNA, 380 bp, Zea mays
accggattccggagctggcgctttggttatcttgcgccggctggagctggatcctgcgggtggtgctgaccggatcgactggcaatgcggttgtttggcttggtcacagcttgactattcggcactcgccagccgccgccgtggactcggcccggccgctagccttttttgggggcgaatcggctgctttgggcattgtagaccacctacctcgacacattttctggacggtcgaacaacttaccaagctttggacgaagtggtgcctcttcaatgttcgtagctttcgtcaggattttccaggacagatcgtgactgaatggcatactaaccagtgcttctcaacgtgtactagaacaaccactactaaggtggactcc

SEQ ID NO: 34112 - DNA, 389 bp, Zea mays
agcttctaagggagagcacattttgggactattatatgtttattttgagaaagacagggtttgtagcgcatgtcaagcagggaagcaagttggtgttcatcatccacacaagaacatcatgacgaccgacaggccacttgaactactccacatggatttattcagcccgattgcttacataagcatcggtgggagtaagtactatctagttattgtggatgattattctcgcttcacttgggtgttctttttgcaggaaaaatcacaaactctagagaccttaaagggattcttgagacgggctcaaaatgagttcggcttaacgatcaaaaagattagaagcgaccatgggacggagttcaagaactctcaaattgaatgctttcttg

SEQ ID NO: 34113 - DNA, 469 bp, Zea mays
acacgtgataggtctaactaatgttactttctttttatattagacctgtgcagtttgtcaagcagggaaacaggtgggaagctctcatcatgccaaaaatgtgatgacaacatcaagacccctggagttacttcatatggacctcttcggacccgtcgcctatctaagcataggaggaagtaagtatggtcttgtaatagttgatgatatttcccgcttcacttgggtattctttttgcaggataaatctgaaacccaagggaccctcaaacgctttctaaggagagctcaaaacgagtttgagctcaaggtgaagaagataaggagcgacaatgggtccgagttcaagaaccttcaagtggaggagcatcttgaggatgaaggaatcaagcacgagttctccgctccctacacaccacagcaaaatggtgtggtagaaaggaagaacaggacgcttattacatggcga

SEQ ID NO: 34114 - DNA, 283 bp, Zea mays
cttaaatcacctgctgcatgcagcttgagcacggaagaattgtcgaggcgttttcactgtccacacctccctatgcacgtggtgacgttccacctacgtttccgcctatctaccgttgctgggtaaagagctaaacaccttagcttcttcaccaagcttctcacccactgaccctctctgtccccttggacctcacaggacctcaccgcaagctctctgtacgacacttttgctcgcagagatactcaatcgatacctcggtacgagctacacctaagagatt

SEQ ID NO: 34115 - DNA, 413 bp, Zea mays
  unsure (1)..(413): unsure at all n locations
tcacctgcacgcatgcaagctntaccaaatggacgtgaaaagggcctttcttttggaccaactccggaagaagtctatgttgagcaacctctccgctttgaagatagtgagtaccctaaccatgtttacaaactctcaaaggcgctttacgggctcaaggaaaccccaagagcatggtatgaatgcctaaaagatttccttatcactaatggcttcaaagtcggaaaagtcgatcctactctctttactaaaaccattgcaaaagattttgttggatgccaaatatatgttgatgatatcatatttgggtctactaacaaatctacttgtgaagagtttattttgatcacgattcaaaaatctagatgtctatgatgggggagttgaagtatttcctaaaatttcaagtcaag

SEQ ID NO: 34116 - DNA, 375 bp, Zea mays
cacaactgcacagcgaaatacacgatgaagctaacgctaggatatcgatctctgctcacgatatgtggtgccaattccgatcttgatatgaatccacttgcttctcccatagccaccactcctggttctatctcccatctagccctctctctctatctctctctatctccgctccacctgcgccgaccgtctccctcacatggcctctcttcccatggtgccttgtcgtgagctcccctgcgagcagctttcccggagagcacaacatccctcccacccatggcgtatgactttctttgtgtacagatctggccggaaggagtacgggctcttcaccaccatcaacttgttgtacaatcgcctcaagcttactta

SEQ ID NO: 34117 - DNA, 275 bp, Zea mays
aacgccgcagcagcacacgacgcacaggaacattctttccacagagcggaaacaccaacgcgaaactcacaccgaaacacaaaccgcccccgaaaaaaggcaagggggcgcgatgcacctgaagcagcggccaaaaacacaacagaggcaggggagcggggcacccctaccgaccacataaggacggaggcccgacccccaagaaaaaaacatgggcccccggacaggcccgcagccgtcccacgggaccaacccacacaaaagcccaccgagga

SEQ ID NO: 34118 - DNA, 340 bp, Zea mays
gcataagcctagcctttatatttcattcaaccaaacaatcaaaaacagcttgagctattactatccagtgggggggattaattcacaagttagaccacttgaaaaccatgaaatttagaatggccctaaacatatatgaaccttgatagatgtcccaatcagagataaactattgattcagttcttaaactcttttcattctcttctatatcataacttcatcatcactttatagtcttcaccgaaagtcatatttgtatcatcctgcatcaaaattaaccttatgtctacatcctaaaatactatacaagatatcttacataatagctatggctatgac

SEQ ID NO: 34119 - DNA, 406 bp, Zea mays
  unsure (1)..(406): unsure at all n locations
ggatcttaagacaccgcngcatgcactggctacaacggatctcttttctctgtagactttcctcaaaagtacctcatgctcttgctcattctgggaatatacgagaatattatcaatgaacactactaccaacttgtcgaggtagtccatgaacacactgttcatcaggtacatgaagtaagttggcgcgttcgtcaatccaaatgacataaccatgaactcatataacccatacttggtgatgaatgatgtcttcggtatatctgaaggtcggattctgagctattggtaacctgaccttagatctatctttcagaacacactggctcctctcaactgatcaaataagctctcgattagaggcaggggatacttgttcttgacagtgacttcatttaaagctctg

SEQ ID NO: 34120 - DNA, 174 bp, Zea mays
ctaaaccggctctacctacagcgctctttattatttcctcctatgaacatcctaccgggcattactaattaacccaacgtttcttactttcattgatgtgggagcaaaagctacattcctagtaataaaggagaaattccaatttgcccccaggatttatggttctttcaagtt

SEQ ID NO: 34121 - DNA, 393 bp, Zea mays
agccgcgaagagggtgcatcccaacattgtcttatcagcgatgccagagccaacgcatagtagtcttagcaagtaagcaagtatcgagtttcagctctattaaaaacaactaaagatagctgaccctccaatactcccttaaaaactactgaatgatcatttcttctaaagacagtaacacctgaatctgtaaaaagacaggtgtaacccattttacacaattgggaaactgaaagcaaattgtaacctaaagaatataccagacaaccattggaaatagaaaggtcaggtgaaatagccaatttaccgagtcctttgatcaaactatgatttccatccacgaatgcgatagctctttggggatcctcatttttctcatagaaggagaacatc

SEQ ID NO: 34122 - DNA, 518 bp, Zea mays
  unsure (1)..(518): unsure at all n locations
ccactagtgaagctgctgcttctttttcactcncngggcatcattagcatccattatggcatcatgattgatcgcgctctgagtgagatcagaaaacaggatgttgattcacaaaactgtatcaccgcataaaaaaatgttaggggtgagaaaaggatgcttacatgaatgccctgagcaccaaatagactcttcaaaatgctcgattcttcgtctgcttggtcagagttatcatccactttactgttaccaccattagatggttcagcttcactggtgcttgactaagccgaagcaatatgtacctgatcctgttgaccatcatttggaactccaacgttcacatctttggacaattggccgaacatattgacgtttcaaatgaaccattcccttcatcatctcgttgtgtgaaaaaatccttcatgtctctggctttaaagaatctcctctgttgaaggtattcatgactttgtctggaatgaaatgcctgtctatctgcgatgatagactttctc

SEQ ID NO: 34123 - DNA, 376 bp, Zea mays
  unsure (1)..(376): unsure at all n locations
agcttctccacaagaaggaagagagcatttcttccttatacgantttcgccaaagacaggaggaggccttcacgttttctgaaatgaccaacggcctcggtgggaggttttacccgaggcatgttagatcaattcataactctacacaaagtgatgattaggggagccaacaacaaaggccccaatattcctcacaggcattcgggcaacagcaagcttcctttcgaccaccagcttcaagaggcagaagcgccaggggcttcggacgaagatttcgcgatcaacagaaaagaaatctttcgcttattctgtggtgagaacaagggccatactaccaagatgtgtcatgttcccattcagaagcaaaaggaaatat

SEQ ID NO: 34124 - DNA, 399 bp, Zea mays
  unsure (1)..(399): unsure at all n locations
agcttattacatcaactgaaggttagaccttcttgtattatctttttaagagaaaatgttaaggaaaaagagtaaaaatacattggatcaaggcactctttggccgaaacgttgtgccacctttagtagatatgtctcgactcgggcacagtgctgttgactgtgcgagctttggactcttcccaaaggtcacgatgttgttgtgcctaatgatgcccttttggctgttgattatgaaccangccaggcgccagcggtggcaaatgagcccaggaagcttgggagtgtctcgccgaagcaacggaagccgtaggctgttgattgcccacatactccgggatatacggagagtaacacggagcagtatgtaagacctgctttggcgagttctgtcgtgct

SEQ ID NO: 34125 - DNA, 468 bp, Zea mays
aatttctctccttccttgacgaggttgatcttttcttctccattcttggtctcattgattcgaggttaatgtatatcagcacggttggggagtatggttaagatagacatggatgagatggagtacatgatgtacgccacaagtttgtttgatgttatgtagggatagactgattatgcaatccatcatgatcctattggttgggttagctcttggttcttattctagagtgggataaatatgctaattagggcaagatgaatccataaggataaggtagaatcttttgaggtcagttagatctattatgatgagatgaaatcttttcgagataagatgagtctactaaggtaatagagtatcttttatgataagatagatctattaaaataagagagaatcttttaagatgagatggatattgctaggctagatactttaatgaggaataatctagtttgtctaatt

SEQ ID NO: 34126 - DNA, 305 bp, Zea mays
cgcttcactgttttattgtgaaggacgaaagatctattggaactcatacatactgatgtatgcggaccaatgagttcgacagctaggggaggattccaatacttcataaccttcactgatgagtttattacatatgggtatgtttacttaatgaaacacaagtctgaatccttacaaaatttaaagagtttcagaatgaagttgaaaatcatcgtggcacgaaaaataaagcactgcgatcagatcgtggaggtgaatattttgagtcatgagtttagcaatcatctacagagctgtggaattgt

SEQ ID NO: 34127 - DNA, 396 bp, Zea mays
agcttgtcgccgtttactgcgagtttacttttattactgggattatacacctttaattcgtcttattaaaggatatcgttttttgaacactcaattataagactctgtttggcatgagggagtcaaaagcacttgaaaaaggagccacaaaatggcagctccttcttcaaatccaaaaatagcttcgactcctctaccatttactctaaatgggatcctcctcttaaagtgtttgatatggttcctctgcataagctactgccagagggagccggagccatgccaaagaatcactaatagattagatttctaggccccttgcgcttgcttgatctcttaggattatattgtgcctcccttagagaaactccaagagcatagttaaatctggatctc

SEQ ID NO: 34128 - DNA, 501 bp, Zea mays
  unsure (1)..(501): unsure at all n locations
agagatattagcataagttaatctagtctatttgtcagctctcgcgaacacanactatcacagagaggagcatcacatgagacacgtgatttttattccgtggttcggccaagtaacacttgcctacttccacgttgtggtgtcccaatggacgaaggttgcactcaacccctttcaagtgatccgatgatcaacttgaataccacggtttttcctttagatgattgttcccgtttgcgaggaatctccataattttgagcctctcgcccttacaatagatgtcacaaagaacacacagagtaaggttgggaagagcaacacacacaagactcatatacacagcacacccacgcacacaagtgaagactagagctcatatgacaacacaaggagtcctcgactccgatagagctcagatctctaacacaacgaagcatatgcgcgggagcagagtctggatgccttagaatactnantgaatgctcggatgactcctccat

SEQ ID NO: 34129 - DNA, 389 bp, Zea mays
  unsure (1)..(389): unsure at all n locations
agctnttaaaattgaaatattgaggaactattttatgtctacaatggctcaaaaaggttaaatggttagacgattttacatatagagaagttgttggatgagattgatcacaatggtgtgtgtatatatataggtgggtgcccgtgcgttgcaacggaaacatataataacataacaacttatatacaaaatgtgtcttatattgttataagaaaatgtttcataattcatttgtaatcctagccatacataaattttgttattttaatttagttgtttcactactacattgcaaccatcggtattatgcagtcttcgatatatgccacgatttgcatggtcttatcattgaagagcacgtgccacacactgcggtattaattccctcg

SEQ ID NO: 34130 - DNA, 364 bp, Zea mays
tatcatgggttggttgcctagagctagatgtctcacccttatacatataagcatgattagggccagagtgagacttcctagaatgaatctttctaattttgctctcaagatagccggcagggtacaaaatgtaaccctcgttatcctgaggcatgggagccttgcccttaacaaagttagataagttctttggaggagcattaagtttgacattgtctcccctttggaagccaatgccatccttgattgccagggcgtcttccattataaagcatgctacgagcagatttaaatttctcattctctaagtgtgctctggcatttagcatctatattgcttatgatcatttgattttattaaagc

SEQ ID NO: 34131 - DNA, 433 bp, Zea mays
ctgaccaaagaattatgctctctggcggaagcaaatgaggcagctgccaaggaattcaactacgagagagagaaaatcacgcttgactcggaggatctcaagatgaggctggatgaaatgctggccatcaacgatgtgacagagagcgagaatgactagctttgtgccgaggctttgatcgcatctgaaaagctaaacatgtctgaagcagagattgataggcttaagaaggaactgagtgggttgttggaggctaaagatgcggttgccaacgctttcgacgttcaataagctcaaatcaccaatgaattataggaactaccgaggaagctgaaggaaatcgtagctcataacgatttattggagggagaaaacagtaagcttcagtctgagattctcacagcacatgataatatatagacactctgaagct

SEQ ID NO: 34132 - DNA, 377 bp, Zea mays
tgcagcatgcaagctttaacccctgcgagaccgagtaccgttattttctatccataacgaaggcgatatcgaatgtcatacttgatgcatattcactttatttgctcccttgtatgatgtactgtatgtttcccaatatgaatggatgaatgtatgtatgcttgcaatcgcctagagaacgatccggtcgaaaagccccatgaactctcacgagaagcccctgagcaccatatcgtttggtggaagcaagtgtcctttgaccaaactctgtcctaatcattctttaattcacccaccgcattacacatttatacctaatgattgactaactttgttatccgtgatctcaatacctatttgggtggattataatacct

SEQ ID NO: 34133 - DNA, 448 bp, Zea mays
agaagtgcatagtttaatggccacattccgtactaccgtcagggttgagcgtgagggggacgataattatacttctgatactgtccctatctgtcaaaccatgctacgatccgggctagtgacttccgataaggttccttatgatgatgcggaacaagccattctctaagccaaaagacaagatgctgatgaaattgaccccgaagatgattattaccttgccacgccatacaaaaccagccaattggacttcggaaatcactgtttcaacgcttaactttcaaaatggcaagtcacgttatttaccgaaatctaaaaaatcttctcttctgggagaaatactaccctaactccgaaagataaaatgtttttcaaaacctcctaacgccgagttaattcccttctcggatttgccagatttgacaaattgtgatattttccactaccc

SEQ ID NO: 34134 - DNA, 377 bp, Zea mays
agcttgagccaagctcacggtctcaccagtattctatctggggcttgaatcgaacggaggggaactggagaggggttggccacggcggtggccctcgggcggcactggcgggtcgcggggaagtcgccggaggcaatggctggctcgggcgagtccggcgaggtactgaggaggtaacggggaaggcaaccgagcgctggggcgggttttataggcgcagacgcggccggggcgtcggttcgaccgtttggcgcgacaccggcacgctgggcgcgcgcgggcgtgccctggcgagctcaaagcgcgtcgaacacgtggcgcgttgcttctgcccgtgttcttcgctctgctgaccgccaagcgtaccaatcttgcct

SEQ ID NO: 34135 - DNA, 488 bp, Zea mays
  unsure (1)..(488): unsure at all n locations
agtgccttcctcaatggaccattcaaggtagaggtctatgttgagcaacctcccggctttgaagatagtgagtatcctaaccatgtgtataaactctctaaggcgctttatgggctcaagcaagcccaaagagcatggtatgaatgcctaagagattttctcataactaatggcttcaaagtcggaaaggccgatcctactttatttactaaaacacttgcaaatgattngcttgtatgccaaatttatgttgatgatattatatttgggtctactaacgaatctacatgtgaggaatttagtaggatcatgacacaaaaattcgagatgtctatgatgggggagttgaagtacttcttatgttttcaagtgaagcaactccaagaatggaccttcattagccaaacgaagtatattcaagacattctatacacagttgggatgaatgatgcctaacccatcaagacacccatgggaaccaatgggca

SEQ ID NO: 34136 - DNA, 397 bp, Zea mays
  unsure (1)..(397): unsure at all n locations
agcttatctataatgttggttgaaaaatattgttattatatttattatatattnactaaaaatatttaaatatagttatttacgaataacctaatctaaagaaaagaaaagagattgaatttttggaataaaaaaaaaaagaaaaacatttttttggaaaggaacggtcgctcatgtgctagccgatcagcccaacttccacaggcacctgcacggtctcctccctcccattttcatttctatgcatgtggacccatattcttttctcttcccttctctatgacatgtggggcccacatgtaagctctcttttcctccctaaatcaggaaacgcacgcacgcagccgtcgacgccgcgcagatgcacccaagcccgcgccaggatgccgctacgacg

SEQ ID NO: 34137 - DNA, 488 bp, Zea mays
  unsure (1)..(488): unsure at all n locations
tcgtcgaagcttatgagatcctggatgagaatttttnccccatgtnttgttgatgaagcaccaaaagaccaatcaaggaaggaatccatgtggaagttcgtaagagaaaggtttgcgtgttggcatcaatgcttactcaataagctagctgccaagcgaaagctgaagcctgaatatgatctttgagtagccagaatcagcatttgcaatcgacaaccagatgctcctcaaaggtcagattttgttgaagttccatctcctcgaagagtctgcaaagtgaagatatgtagctgaagtaaagctatacccataacccttctaagccgaatctcgaggacgagattccttttaagtggggtagatatgtagcatcccacaaattcaaatcttgaaatattctcacactcgctctatattcaaaacgaatntcaaatctcatttcacaatgtttgttgcaagcgatatatcaaataaaaatagtggctata

SEQ ID NO: 34138 - DNA, 369 bp, Zea mays
aagactttttatgaccaacccaagctcgggcgactaaagactggctgatttgaaatatgaccggcccaagcttggcccactgaaaaatggtagactgaaggttgtttggaacaaaaatactttctttcatttgcaatttttttcaaaaaatcgggtacacccaatgggtgcgcccaatgtgtatgtttcctatcatttccaaaaatagtgtcctgagtctatagggtgtcatgatgcacattactgaccttttgatgttgtgttcgccaatcgttccttggaaactaaaacgactccttgattactctgctaagatgatgacactacatatggacgggataccaaggggtgccctttcttctaaaaaaa

SEQ ID NO: 34139 - DNA, 365 bp, Zea mays
  unsure (1)..(365): unsure at all n locations
atctattccatggttgggagctccatgtgttttgttttcttccgttngaagcactacaaaatcttctgctgtataagaattccattctcgaagcatagtttgtatacatcttgagtgaagatgaagagacttattgctcatctggccgatctctattgggatattaattcatgcatcatggtcacggtacaatggttcgaccaagttgatgaagttggtgctccctttcccatgaattttgatgacagggagattttatcttctctgggccatctagttctcaatgtagaatgaattgatggcttggctgcagctctgagtgcccaccaagctgacaggtgatgatgccggaagaatggactttc

SEQ ID NO: 34140 - DNA, 392 bp, Zea mays
  unsure (1)..(392): unsure at all n locations
agcttgaagacttgaagttccaggcttctttccgtgcggtgcgcccgtgctcgtgcaggcgaccagcgagcagctcggcagcgaccatcaagccgacgagcacagggtagccgtcgtgctcgtgccgccgagcagccgagtagccgaggcagtcgccgccgagcatagggcgccgccgattagccgagccaccaccgagcgccgagtattctctagtaaattaaacatacttggtctcttggataaattagtgtttcaatttagagtnttggacagattgcttgtagggatttgaaaagattacttgtatggatgaatagattttgtttgtacagattgtgataaatttctgttagaatggaatgttgctgaaattttagtgggcgagcggg

SEQ ID NO: 34141 - DNA, 466 bp, Zea mays
ctcagctgcatcactctttgctgttggccaatagaaccctgacctgaagaccttcccgactaatgttctggatgctgcatgtattccacattgcccagtgtgaacctccttcagaagtcgcttcccagtagatgggggaatgcacttcatgaggacgcctgatgcaccccttctgtacaatgttttcccaatgagtgtgtaatgagccgactgtctggcaatacgctcggctgaattcttgtccgtccggttctcttccgtccttatatacttgatgattggcccttctccaatcatcaaagtctgactcgggttgatctataatattacactcttctgtttgatccattgagatgctcggctgtagtatttcttgcacaaagactgcaagtgggacctgagttcgactggatcctagctcggacaacacatcggctgctgtgttccgatctctttctacgtgatg

SEQ ID NO: 34142 - DNA, 391 bp, Zea mays
atgcttttcaccatattatcacggttatcttgataagggtgaacatgacactttcccttccaacgagttaagctccttcttagcattccaacttcttccttgagctctttattttcttgtgtgatagaaatataactaattcctgaaatttctagctcaatggaagattggcttgcttgataacaacaattgttagcacatggtaatatagtttcaatttcaacacatgtgcacatgtgaagttgatatgatttcaaattagttaacacaacctcatgagccatttctaacatgatatgtgaatccataaatttattatgagagcatacaagcatatcatgtttttcttgtaaagctatattttcaatgtttagcttttctaccgagttct

SEQ ID NO: 34143 - DNA, 404 bp, Zea mays
ataagaagagcagtcgtatatgtggtgtcatgtttataaaagcctcggcagataagagtagcagtcttttatgttttgttatgtaaggagaggcttctgttatagaggaacggctttttgcttcgtgcgtacaaaataatggaatgtgttttttcgccttcggctctaaaaactgatttcgtccacatcatagcacctcaaccgaagggtgagaatatactaccaggtatgtacatatgttcctctgaagaacagtttaattctatgtacaagagttgttacaaaattatcctgagttcttctaaagcacacttctgctagtcttcattaagcttcagctttgacgacaacttctgcgacatatcctaagcatcatcttcaccttcgtcatcctacatgagtca

SEQ ID NO: 34144 - DNA, 314 bp, Zea mays
  unsure (1)..(314): unsure at all n locations
ccacccggaccttaagtcacctgcggcatgcaagctttatacaatggacgtggaagagtgtctttcttcttggnccagactaagcagaggtctatgtttagcacccatccggcctttttaagcattagcctcctaaccatgattataggctattctttgcgcattatgggcacaagcacccccccccatcattgtaagaatgccgttacacgaataccctacccctaatgtcttcaaagattttaaggcctaccctgcactctgtactaaaacccttcaaagtgacttgtatgcatccccaacatctgttcttg

SEQ ID NO: 34145 - DNA, 383 bp, Zea mays
agcttgtagaggattgtactaactttccctataacggattctggggtgttacaaatcctaccccccttaaaaagaatctcgtcccgagatttgtaagaaatgggatatataaagtcaaaggcttaggttgcagtttatcttcgattttttttctaagtggctttaagcacaaaagttttcataataattttttttataaggaattgattacacatgggtatatttatgtatatccactttactatgtagggtaaaaaaaatgtctttaaagcatagataggtctgggtaaaaaaaagtggggtaaggaaagactccatccaagattgtggatcttgactctcttgaagatctggcttgaatcttatccttccttgatttgatg

SEQ ID NO: 34146 - DNA, 536 bp, Zea mays
  unsure (1)..(536): unsure at all n locations
aacattttgttctccaccacatgccacccttttattgatggccaaactgaagtggtgaatcgtacattgtcaatgctgctgcgaacaatggtaaagaagaacttgaaggattgggaggaatgtttgccacacgtggagtttgcttataacagggcagtacattctacaactaatttatgccccttcgaaattgtatatgggttcaaacctattgctccgatagatttgttgccccttccattgcaggaaggaactaatatggaagcttccaagcgtgctgcatacataaaaaagatacatgagaagaccaaggaagcaattgagctcatagcagtgcgcaaggcaacaagcatgaacaagcatangaagaaagtngttgttgaaccgggtgactatggttggattcacttgcgcaaagagcgtttttctgatatgcgcaatcaaatgatgcacgagggatggtcattcttgtcttccatatcatgatatgatacagaagatctccacagctttgcggagcagacttaatgtgtgac

SEQ ID NO: 34147 - DNA, 357 bp, Zea mays
ggaccctaagcactgcgcttcaccagagggtccaattttttatttttacccctttagtcccagtgagggctaagctcccttctcagggttctatttgcaaaatgctattacaaccccatgtgcttgaactttttgccttgtgaacgcagcctacgggagtcaaacacaagcgatgcccatgcttattaagttatgctcaaggtctataacagtaaccccaggggagttacatcctttcctatatagcaatctcggtccgagataaaaagtactatggccactaatggaataggaaatgtgtcacattcttatttccttaatataggttcaacacatgggtggctcgggaaacacttc

SEQ ID NO: 34148 - DNA, 166 bp, Zea mays
caatgcttcccagccgctctgaccgaaaggtacctcgctggataagccagaacaccttgccggactgtcttcacccaccggagtacgtggcccagggtatctacccgcccattcttcgattccttacgcacacacactgccggtcccccagtaaacctccctgtgc

SEQ ID NO: 34149 - DNA, 320 bp, Zea mays
aacttatgcgcttgcccgtttgtactgttccgcacaggggtaactggaacaccgtcgtgtcggttcatgaatgttgttgagggtagtgtccacgttcaccggccaacccgtaactccttcagactgaaaaggaaatgtgcccttgggccatttctaagtattttggtgaatgagtgccaacacaagtgctttaatgtgaattcatgattatggatggacaaagtgcataacaagagccaaagtatgtttctaaatcttaatacattggttttgtgtactaatatacttgtctcagttttagaaaccgaaagaagaagaaa

SEQ ID NO: 34150 - DNA, 491 bp, Zea mays
tatggatcttgatgtgtatttctcgtggtttgcttctgaataaacaaggtctttgctcctctaacttgtccaaaattaagataacttcactgcaattttctataagataagcaaggttggaagacttcctacactttttgaggtcgtaacagacatttttaaacttagccacaatcctcgatgaactagaagaggatcttactatcttgttccaagcattttggacctcattcatgaagcccagaagttcattccaataattttcaaagcgaaagcaactagctttaggaatggaagtgccaatatgtgccacacatgggatatgatcataagtagtcttggcgaggggaataacaaggtattggggtgagtggaggtctagttgatagaagtgaaacaccaatcaagctgaacaagaaaaggattcgactatatattgtccaagtgtagcttctacccttcacagggatttcaatgattccaatgctgct

SEQ ID NO: 34151 - DNA, 395 bp, Zea mays
  unsure (1)..(395): unsure at all n locations
agctgcttcagccgaggggtccttcgtattatctatagataaagtagctntggcttgggccaaagctatcacatgatcgcaacctgatttttccaaaatagccgcaattccccttgcacctgagaaggcgcaaatgtccccacggccatttaaaatctcctcaaaggcttcggcctcgccgctaatccactcaattggcccctcgggatcgccccgtatgaagttatcttcacttgaatatgcgccaacattggcgaagctagtttttatttttcccacacattctatggatttttcataacatttttctttcgaagatcgaagttctacaactggtttctcccaataattnttccagtaataactggtgtctcggtcagctttagcaatagcac

SEQ ID NO: 34152 - DNA, 338 bp, Zea mays
  unsure (1)..(338): unsure at all n locations
agtttcaagtttcataagatcacctattcaccccctccccctctaggggctctcagctagaaggggcgaaccccctctgcgtcaaaattttcctcggaaaaagtctttctgccagaacatctttcgtgcttttcgactacttcgaaagtgggatcctgaanacgacggagtacacgtaagcatgcaaggccgaccgagccgagggactcctacgcctccgggatacggatacctcactcatcaacttctgcgataagtaactcacaatcggataagcgatttcgctgaccgaacaagtctaatgcttgaaacccgttctgccgaacgatttttgtgcc

SEQ ID NO: 34153 - DNA, 393 bp, Zea mays
agcttgaaggctttggggatatcttcaatctttgggcattttcttcataactaaccccaaccgagttgaatattctttttaatcgatgcacacagcgggtggcgaaatccgagcacttattccgaaggtctttcagtgattcctacagcttcatattcttctcagcttcagcttcagattttgcgtgcaaatcttttctttcttgctcgaagcgctctgattcttcctttaaagttgttcgagcattgaaaagttccttgcttaatttaacatttttagctcgggctttcgcgagggaaccttgggctgcttgtaacacgaaatctttcttctctaaagaagctttcaaatctttaattttgttctccaaagctttcaacatttatttcattt

SEQ ID NO: 34154 - DNA, 381 bp, Zea mays
  unsure (1)..(381): unsure at all n locations
tctacgggaatatccagccagtcctttgtttcttctgacctgatgaatagtggtcgggggtttccactccaaaatgtccttgactatgctggggtctaccgcaatccctctggcagatagaacatgtcccagaaattgaatttccttcaaccaaaacacgcatttgctgaacttggcatacaactgatgttccctcaagcgcgttaacacgatccgtaaatgttgggcgtgctcctcttcattcttggaatatatcaaaatatcgtcaatgaagaccaccacanactggtctagctcgggcatgaacaccgagttcatcaaatatgtgaagtgggccggaccatttgttaacccgaaagacatttcagatattctaacacc

SEQ ID NO: 34155 - DNA, 376 bp, Zea mays
agcttctaaagggagaacacgtgataggttttatttatgtaactctcgaaaaagatagaccttgtgcagcttgtcaagcaagttaacaagtgggaagtgctcatcacatcaagaacgtgatgactacatcaagacccctggagctgctgcatatggacctcttcggacccgtcgtctacctaagcatcaggggaagtaagtatggtttagtaattgttgatgatttttctcgctacacttgggtattcttcttgcacgataaatctgatacccaagggaccttcaagcgcttcctaaggagagcttcaaatgattttgagctcaaggtgaaaaaaataatgaccgacaacagggtcttagttaaaaaccttcaagt

SEQ ID NO: 34156 - DNA, 179 bp, Zea mays
tcactcctctttcgtccttcctatacaggatgcggatagcgaatgaccctcccaagaaataaagcatgggtcttcgcgcacagctccgtcagccgcccctgacgtggatgagccaaccttcaaagatatcattgacggagaccgagtcttctccctgcaagcccttaacatataccaaa

SEQ ID NO: 34157 - DNA, 394 bp, Zea mays
ttaagcacctgcagctgcaacttcacattctggactaactcggctgtacattctatgccgtcggccagtttaaatcatacctgaagaccttcccaaccagagttctacatgttgtgtgtatctcgcactgtccgacgtgaatatcatctagcagttgcttcccagtaaccgaaggaatgcacttcatgaagactcctgttccaccccttctgacagtgcatctcctatgagggtgtattgggccgactgccttgcgatgcgttccgctacagctttatcatccggttcctcttcatttttatatacctgatgataggctctctccgccattatagtttgactctcgctggctcaaaacattgctttcttctgcttgatctgagaaatgcccgga

SEQ ID NO: 34158 - DNA, 431 bp, Zea mays
  unsure (1)..(431): unsure at all n locations
atacttgaacagtgtggtttattggcataccgacttcaactacctgagaccttgtctgctgtacataatgtgtgccacgtgtctcagctgaagaaaagtattcgggttccataccaaaccattgaagttacagatgttgtcctagaactagacttgacatattctgagcaccctattcgagtcttggatctgaaggacagaatttcccgaagaaaaactctcaagttctattagatacagtgaaacaaacattccgaagatgaggttacatgggaacatcaagacttcttagacaagaatttcccaggctttgggcctcatgtaatttgtaaagtgtgtatatatgttgtaataaaggagtaaattctcaaaccacccctgctttgtccacanataaggaaataaaagtatgacgtgttttccttttcatt

SEQ ID NO: 34159 - DNA, 388 bp, Zea mays
agcttcgtacctcgaggtactcttaaccgtttgaggaaacgatcatgtctactcaacaggaccatgtggatcctctcctcgaggaaatccccatcacatctttcggtgaggaagaggaccccaaggtccttgaccttgccatgaagattgccgagagaatgtttctctaaatgaaagaagaagatgctaataaaaaggcccaagaataagaatcatgaagaaaggccgaataaaataaaggtaagggaacatttgattacaatgacgatctagtggatcttttggtgtctaagggattgagaaaggttagtctcaacaccgaaggatcatctaccaaaagcaaaggtaacaaatttagcacagttcaattacattactctaagaatta

SEQ ID NO: 34160 - DNA, 416 bp, Zea mays
  unsure (1)..(416): unsure at all n locations
ttcttatcaaagcaacaacatttatctgtttctctactgcacaccatacccataacaaggccatttgcgtgctggggactaaacatgattggacccttcaagaaagcttatggaggctacactcacgtgttgggcgccattgacaaattcaccaaatggatagaatacaaacccattgcttctctaacttcagccatgcagtggaattcatacaagaaataatattcaggttcgggataccaaatagcatcataaccgacctgnggttcgatttcactagctctgaattctttgatttctgtgaacaacggagcatccagatcacatatgcgttagtatcacatccaagagccaatggtcaggtggaaagggctaatggaatgatactggaagcacttaagaagaaagtctttgac

SEQ ID NO: 34161 - DNA, 393 bp, Zea mays
tagcttccaccatgggcaagaacaactaattcttgcgtgagccgactcctccatcggaggagtttggtgactcggaatactcataggaggagttctcctctgagtccgaggggtcttccgctcccatccccctgcgtgagtcgtctgatgactcacacgactcccacgggcttgcggcggatgtctggacgtacatccgggcagtagagcgctccgggctcgagggctcggatgagtctgggttctcctcggacgaagaggactctgaccgcggcgaggactaatatgacgaccactacgacgacggcgatgaccacgacagtggcgaccgcgaccgtgatggcggcaactgcggcggacgcacccgcggcaatggtggcaccaaaggcggca

SEQ ID NO: 34162 - DNA, 404 bp, Zea mays
  unsure (1)..(404): unsure at all n locations
tgaccaagagatcaaactcttcgagttcaacaaggttaaagaccctgagcatctgtttggtgaaggcaagtgtcctctgacccattatgtcctatttactttataattcaccgtcccgcatactatgaacaacctaaggattgactagctttctatttacctggtccttgattaccttttgggctactatggttagattcatgctattgttttactttaatcaatgaacatgatgtaaatacttatgatacgatgttgttattatgattatgatgttggactgtgatactttaaggggctcgangcagttctcgagtgcctctccgtaaagacctgttcgttgagagaccacccgggataacagtgcaaccatgagggtgaaatgggatgcccttagctaatta

SEQ ID NO: 34163 - DNA, 397 bp, Zea mays
gctctaaccccacgacctaaacacgcagctcactcaaaggaaaccagtttttttccaacgcccatcgaaaaaaaagaccttgtgctacatgtccaacaagtcaacaggtgggaggagcacattacaacaagaatgtgaggaccacatcaaggctcctggagctgctacatatacgaccttttaggacccgcctcctatctaagcataggaggaagcaagtattgtttagctattgacgatgactaatcccgcttcactagggtgttctttctgcacgatacgcttaaaacccaaaggacctgtttgcgcttcctctagagagctcataatgagtttgaacacaacgtgaacaagatagggaccgaccacaggtccgactccaccaccctcaagcgga

SEQ ID NO: 34164 - DNA, 333 bp, Zea mays
  unsure (1)..(333): unsure at all n locations
gctttaaggaacaaagtcaggtgcatctcatacatgcgccaagaagacaacatatataataacagagtgtatacagataaatgttataaaacatcagagtatttattacatagcggaagacttattacaaaataaaagaataaacataaaacgaactaaggatcgtcggcgccaatgtcaactgagaaacgtcacctagatcagatcatactcctcgccttgtggctcctcctgaaccacctgttcttctcctgtggggggtgtgagacaacangggtgagctcacacatgatcatagctcaacaagttggttggaaccagtggacataaact

SEQ ID NO: 34165 - DNA, 386 bp, Zea mays
tctgaagatgccccctaacatttctggactaactcggctgtatctttctttgttgtcggacaacataaagcacacctgttgatcttctaaaccagagttctagatgccgtgtgtattctcgcactgtccaacgcgaatatcatttcctagttgcttacctttatccgaaggattgcacttcatgacgactcttgtccatccatctccgtacagtgcatttattatgagggtgtatcgggccgtttgccttgcaatgcgttgccctacatatttatcaatccggctcctcttcatttatatatacctgatgatatgctctctctacacattagaggttgactctggctgactccatgcattgcattcatctgcttgagctgtcgaaa

SEQ ID NO: 34166 - DNA, 395 bp, Zea mays
  unsure (1)..(395): unsure at all n locations
agctntgacacatagaagtctaaatcacaccacatggagaatataaactttgaagtaaagcattagcatcatctacttaggagtgttaaataagctatttgtcgtgcttaactaaacattttaagcggtgtaggtttgctcaaggatatgaattaaacaatgagcattcctaccatatgattgacctagtatgcatgtaactctaatcaaaagtaaataccacatgtaaaactaggaacgtaaggtaaaaactagacataagaaaatagatacgcatatctaaaaacaagaaaatgcaataaatctagttaccatagtcatgggtggggaatttgggtccaaagtattcactaacccacatgtcaatagacttgatatgttgagatgcatcccat

SEQ ID NO: 34167 - DNA, 462 bp, Zea mays
  unsure (1)..(462): unsure at all n locations
gtctttggctcatcagcctttttatcctatttttgatagcctgagtagcaatccaataagctcatgaggtccaaagtagctgttgcatccacaagggaatctattcttggtaatgataattcatccttcagacatgccttgttgagatctgtaaagtcaatacacattctccattttctgttagctntctttaccaagatggtgttagccagccactcttggtatgtaacttatctgataacaccggcacttagaagtcttttcacttcatttcgtgcaccttcgactttatcatctgacattttctgaagcctctgctttcttggtctcaaggatgggtccacatttagtgagttcattggctgtccaagccaaaacatctttgttggtaaacaaaaatcttagcaatgtcttttcttattcatgagataattgagatcccaatagtactttttgtcaact

SEQ ID NO: 34168 - DNA, 383 bp, Zea mays
agcttaagagaaacatggatctttgcgatagatgccacgtcgtcggtagggctgcttgatacgatcccaagtgaccggcgtgtattattgtacgtattgttaggacgatgtgtcctctaacacgtacatatggctctgtgataaccaatggaattgcaacatatgctatgcacgatgtatatataagtatttacgtatctctgctagcgcggagcggcgtataaatcaactctcgcttaattccttggagggtaatcactaatcatccagtgacgacggtggacgcgacacgtggtgggatgatacatatcgcgcgcgcgcgatgaggctgaggattcaatttcgctgtcaaccaagaatccgtgacgtatacgctctatgta

SEQ ID NO: 34169 - DNA, 446 bp, Zea mays
  unsure (1)..(446): unsure at all n locations
gcctagctacgggtgcataggttacatcaaaatccaaaccttcgacttgtgaataacctttggctacaagttgggctttgtttcttgtcaccacaccatgctcatcttgtttgttgtggaatacgcacttggtacctacaacattttggttaggacgtggaactaaatgccatacctcattcctcgtgaagttgttgagatcctcttgcatagccaccatccaatctggatctcttaatgcatcctctatcctgtatggcttaatagaagacacaaaagggtagtgttcacaataatgtgcaactcgagatctagttgttactcccttatgaatatcaccaagaatggagttgacggggtgatctctttgaattgcttagtgtactcttgggtgtagcaactcgatcggccctggtgcanatatggagtgcatcggacactgttcg

SEQ ID NO: 34170 - DNA, 388 bp, Zea mays
agcttgcatgtgcgcagccgtgcaagtattttaatgtgaatgacatttgaaccatggttatttgctttaaactcacatctatctagccaacatgacacacatttttttcttttttatattttatactcaagtataatatagacttttataaaaaaaaatagggaacaaattaaaacatgttccgaccaaccatgttactttttacgtgagtttgctacctcgatgctctgtataattttctttgcgtttaatatcaattataactatgataactaatttttagtcgttttgtaccgaaaatatagattggtcaagtcgtttagtaaaacaacatatcacacatacttgcaaattgttttcacatcataatgaattatatatccatatg

SEQ ID NO: 34171 - DNA, 482 bp, Zea mays
  unsure (1)..(482): unsure at all n locations
gcttgagcttatttgccatctaactcctccattgctcttgaattttcactacttctgtntactcatataatcatttagagtcatattcttacttcatttaaggacaaatttgcgatatgtgggaaggatattatgctgacgctcattgctagacgctccaggcattatgctggcaccaggttcacacttcgcaaactcttagctatttctactcctttctgtcaatttttggtgtgtttgggattgatatgctgcatttttcttttctgatattgccattcaggtatctaaagaggggtgtgaatgaggagggcagagtagcaaatgatgttgagactgagcaaattgtttatgaaaacatgcttggaccatggcaaataagctctgttgtgcagaacaggggttcaattccactattctggtcccaggagacatcaaagctgaatcttaagcctgatatcatatgtaagcatttaagttct

SEQ ID NO: 34172 - DNA, 400 bp, Zea mays
tcatataattagatgaaacgatattgtgattctctcaatggtggctccatgagcaaacaatcattcaccttgctcactataatatcagactgtagctcacataatgctttgagcattccttggtagtaatatatttcctttgtcgccaccaactttaaatactattaaaagaatttttcttaactcttacattttaattacgctgtcctttactgcgaaatagctacaacgcttccgatacaagggaaaccggcaaaagggataagagactaataaagggcattgtggcctctcacacacagccaattaacatccacatgcacatgacttggacttatctaaaacattcttccacaatacacttggatatatttattaaatataaatttatacttagtat

SEQ ID NO: 34173 - DNA, 440 bp, Zea mays
ttgcaatatattagttcattctcaacaagaagatcgtcatgatcaaatttaatttgagtatagtcttccttgatctttactactctatgttgcaactccctattagcttcatttaatttttcatatatttccttagcatcttttaaggagtttgtgagctcatttacacgtgatgacatacgtttattttcttcttttatttcatcactagcctttataactatgtcatacttggcatttaaagattcattttcatttttcaacctatcacatttagcttttgactttctaatgagttgagtatattctataagtaagtcagctaactcatcatatgaaggtgaagcaaattcttcatcactatcactatcactatcatcatcaatattaatatcatgttgtacctttcgttcaccctaacactactacaggtattctct

SEQ ID NO: 34174 - DNA, 455 bp, Zea mays
  unsure (1)..(455): unsure at all n locations
agcttaagcattttaaacaggtcagtaagtggatataaacttctccaaatntttctaaccctaatcaaatagtgcaactatttttatccctattatttagctnttggttaaaacaataattaaatcagaaccctaaagttttctgtagtacatgggggttttatatttttcctaagtagtttacattatttagagtctgacaaaattagtttgactaaatntggatgaataaaacagaagttatgaattattaaagttttgttcaaatttaaaatcagatttaataaaggttgtctggataagcagtttacaccgaggaccctgtgttatttccaaactaactctctcagttatacccccgcgctactattcatatgagtctctgacatttcacaaaacccnccagacttctttccttctcccccgcggtcctttcctatgtttaaacaataccc

SEQ ID NO: 34175 - DNA, 332 bp, Zea mays
  unsure (1)..(332): unsure at all n locations
tctctacatcagcagcttagaatgcaacgggttgcacctctggagtaaaggaggcgctcttgtcacacccgcgtttgtaatgcttaccgaatgcgaatcatgtacttgccacgatcagcaattcacgtacacagtggttacataatatggacatcatcgcacaattgctcattagaattaatatgggaaatagncgatttcatcatgtctgagacattctatatgtctttagtaaatagaagtgatattaccatcttaattaacgcgggcttacaggctatcactcgtggttgatctaacccaccctataatcgtcaagtcttggactctga

SEQ ID NO: 34176 - DNA, 427 bp, Zea mays
catgcaagcttcttggcaacagcctccgcctccaacttcgttgcaacatggcctttttccagaagggagccagtatgctccacaccagagggacttcatagaacagtccgaagctcgtacagtcaatagcactgtgccagagtcaaagcacatctattgacaaatatcctaccttaatagcaatctttttcattcagttttattttctgcagtaaaggacattgtttacggttcatgtaattagattcgttgattcctacaaggaaaatatattttcttcacaggcttatattgattaaagtttaaagacttgtgataacaaagaggaccttcgaactatcgaaaattcttcgaagcaacaaaaagtcgttctaatgaacgcagagtatgtttgccgaagtcacaatatagtcgttccaaagggagc

SEQ ID NO: 34177 - DNA, 456 bp, Zea mays
  unsure (1)..(456): unsure at all n locations
cccaggatacctganagcatgcatgcttaacaacagggttaacagcctcaagtgttttgcatgatattagagtcatcccattgccttcgacccttcttgcagcttcctgacttccatggatagcaatgggtccttgatccgatagtatcttcatgcctagatacgcaagatgaagtattgcttctaacgcattgacggtaccacgaccaataattgcattgtaagggtattccatgtcaacaatgtcaaacacaacttgctcagttctagtgttgttgatgaacccgaaggtcactgacatggtgatcttgcccagtgctacaatctgtcttcctccgaagccacagagaggatgtgtagcgtcatgaatcttatcttctgactcttgcattngtctgaaggccttagcaaatatgatgtcagctgcactgcctgtgtcaccacaacattgtggac

SEQ ID NO: 34178 - DNA, 464 bp, Zea mays
  unsure (1)..(464): unsure at all n locations
gctgatggccggcctcgtgggtactgcgctctgcggcggatgcaacagctagctaggttaggcgcgccggcagccgatagaggagaaatctcatacatttgcttgcttattgtggacaagccggctgacagttcgattaattctttgtgtttccacatcaattcccttgtgctattttgtacctaacgaatgaacgattcaacggctggctacaaaaacaaaaagccgtctcgcaccgcgatcaccagcaatacaaatcttgcaccacgattttggctgagttgttgcttcaaaaaaaaaaaaaactaacttaagctatatgagaatcttgtggattataaagttgtttagttcaaacaagtataatcccgatcttctgtctatattagatatatactcgtgcgttgctacgaaactaatataataaaaatatattgatantaaaaataataatggtattctat

SEQ ID NO: 34179 - DNA, 485 bp, Zea mays
gatcctctaagcacctgcagctgcagcttgaccgagaccctttcatcggattttcgcaatcgtgctcgccggagttcaaagactcgccggcgcacgtggaccgggtaagcctctgcaccatttcccaattcgttgcacgcatggcctctacatctgcccgtggagctcctcgtgcaccctaattgaactataccgtcgtgatttggccggaacatgagccgccgacgaccctcgccgcctgtgctcgtggccagggtagctccgaccaccttcgacgccgacccgcacaccaacgtgaccgtcgtggcctcccggacgtcaccgaccaccccgccggagctctactgccgccagtgagcctcgccgtcgtaatctatgccgtgtgtactatttcagtcagccagggagcgcgggttagatttcggttacgcccaaggggttttgtgcgatgtcaatgacccacgccaatagtataccggagacta

SEQ ID NO: 34180 - DNA, 463 bp, Zea mays
  unsure (1)..(463): unsure at all n locations
agctntgccaaataggacgcataattataccttngatatcttctcgnactgataggtcattcttcacataaaaccattctgtcatccaatccctgagccatctcttccgaaaggttggtacgggacagcttgccccggaccgagagacgaaactgtagcagccaaagttattatggtactgttctttgccccaaggctttgtttcatataataattcgtgtatattacagaagcttcttgcatcaggcttcagaccttggcttttcgcggcccacacgaagatatttagccttataattgcctcgggagtaagttgatgaagatagacttcgaagattttcaacacctccacgacgaagctactcaagggaaatcgtagcccagctttcagaaagcttcggtatattacgacttcantttcttcagggtgtggacaagtcttctctccttcatcggccctcac

SEQ ID NO: 34181 - DNA, 427 bp, Zea mays
  unsure (1)..(427): unsure at all n locations
agcttggacagtacatcagccgccgngttccgatctctttctatatgatgaaactccagaccttcgaatttatcttctagctttcggacggcggcgcagtattttcccattgaatcacttgaacaatcccattccttgtttatctgactgatgactaccagagaatctccgtacaccatcagtctcttgactcccagcgatatggcgatgtttaatccatgtatcaaagcttcatactcggctgcattgttagaggccgggaatagcaactggagagcatacttgagatgttcgcctccaggtgcagtgaagagaattcctgctcctgctccctgcaacttcagcgagccatcaaaatacattcgccatacttctgtggtttctggattatccggcacttgctgttctgtccactctgatacgaaat

SEQ ID NO: 34182 - DNA, 462 bp, Zea mays
agcttatgaagattcttcatccctacatgagctagtcgacggggccagagccaacccatgttagtcttagcaattaagcaagtgtcgagttcagctctatcaaaatctaccaagtatagctgaccctctaacactccctaaaatgctattgaatcatcacgtcttctaaagacagtgacacctacatcagtgaatagacagttgtagcccatttgacataattgggatacggaaagcaaattgtaatataaagaatcaacaagaaaaacattggaaatagtatggtcaggtgatatagcaattttacccaaacctttgaccaaaccttgatttccatccccgaatgtgatagctcgttggggatcttgtgttttctcatatgaggagaacatcttcttctccccagtcatgtggtttgtgacccgctatcgagtatccaacttgagccctcggatgcataaa

SEQ ID NO: 34183 - DNA, 381 bp, Zea mays
tatacgaattgactcaagcctagctacgggtgcataggtttcaccgaaatccacaccttcgacttgggaatatcctttggccacaagtcgagctttgttccttgtcaccacaccatgctcatcttgcttgttgcggaagacccatttggttcctacaacattttgattacgacgtggaactaaatgccatacctcattcctagtgaagttgttgagctcctcttgcatcgccaccacccaatccgaatcttgtagtgcttcctctaccctgtgtggctcaatagagaaaacaaaagagtaatgctcacaaaaatgtgcaacacgagatctagtggttaccccttatgtatgtcgccgaggatggtgtcgacaggatgatct

SEQ ID NO: 34184 - DNA, 425 bp, Zea mays
  unsure (1)..(425): unsure at all n locations
ctatagtacagttctatnntttgaggctgaatgcattgngtaaacaccatcttactggggcccagatgtgtatcgctcacggtcctacatctccaaacccccttgtactgtactgtgcaatgttttgcttgatacacaactgaagcctaaaatgtaaagtgtacgcgtttcgaagaagatagaggagctcttaagtaacaactgcttggtatgctgcagtttcaagacatggctcacaagtttcaggatgcaggaacacaagatgtacctactcgttcgttgtctttttgctaacattnttactagcatcagtacgttacttgggtcacgagaatttctacaggtgagctcgttttcttgattaagagaataaatctcggcgcggcccctcggcgtcaaccagaaggtgccgcccatcactcccc

SEQ ID NO: 34185 - DNA, 473 bp, Zea mays
  unsure (1)..(473): unsure at all n locations
agcttgagtttgagagccctatactgcatatgaccagtgtttctctcaattaaggactttgccacccagatntgtctaggtctactcttatttggtggacctaggaatgtaaccttaatctttccatttgcaacctttcttagaacatagtgagcattgaaagcaaatggtcttgagtgcttaagccagggagttggtggtttagctttgcagttgtgggcaaaatgaccttcatttccacactcaaagcatttgataggctcgtgagtctgctttggcttgtattgagtgatagctttcttttgcacaaaagcattgtatccaataccactcttgttatttttcataacagtgttcataagcagctcatgttggaggtattgacccttgttgaacttttgcacacttgttgcaagatgcttcatttcactctntagtttcttgacctcattcttaagcccttgattatccac

SEQ ID NO: 34186 - DNA, 464 bp, Zea mays
  unsure (1)..(464): unsure at all n locations
agcttatgctgaaattttntattttttggatgtatgcnaattgaagcaatagagacatacatatttccaaaatttactaaatgtacatatatctttgcatttagttgtagttntatgcagncatcaaattcgctagaaattgcactttgttatatcatatatccagctattttttaaataaatcataaatccatgcttgcagaattttgaaaatgatgcataccgttgcttctcatactgccgagaatagaatgactccatcagcagttgctgcatgtatggccccactcttgttgcgtccccttctttctggtgaatgcgagctggaagatgaatttgacatgagtgatgacagtgctgctcagcttattgctgctgcaaatgctgctaacagcgctcaaggcattgtaactactctattagaggaatacgagagtatattcaatgtgagtttcttgtgctat

SEQ ID NO: 34187 - DNA, 454 bp, Zea mays
  unsure (1)..(454): unsure at all n locations
agcttagcaaaagaaatttctagaatcaagaatattgagcttatgcctaagtctggtaaaagattgttcatcaagtggcttggtaaagatatcggctaattgatctttagtattaatgtaagaaatctcgatatcccccttttgttggtgatccctaagaaaatgataccgaatggctatgtgcttagtgcggctatgctcgacgggattgtcggccattttaattgcactctcattatcacatagcanagggactntggttaatttgtagccgtagtcccgcagggtttgcctcatccaaagcaattgcgcgcaacaatgtcctgcagcaatgtactcggcttcggcggtggaaagagcgaccgaattntgcttctttgaagcccaagacaccaaggatcttctcaagaactggcaagtccctgatgtgctctttctattaatattgcacccc

SEQ ID NO: 34188 - DNA, 384 bp, Zea mays
  unsure (1)..(384): unsure at all n locations
agcttagtgtctcttgctttgattacaagtcacttgaagaatgagaatgtaaaagaagaaagcacgattgcaaacaccaagtgacaagagcgacaaataacacacggatcactctctctctcaagtcactaatcactaatgatcacttgtctcaattgtggaacttggagagattggaagctttgtttgtgtcttggaatggattgctagctcttgtattgaatgttgaaggttggaatgctcggatgaagtgaatggaggtggttggggttgtatntatagccaccaaccacttcctagccgttgcttcaattctgccgaccgcggacggtccgcgcccctagttcggacggtccgcccctgtacatcaacagctgaaatcgc

SEQ ID NO: 34189 - DNA, 414 bp, Zea mays
  unsure (1)..(414): unsure at all n locations
atggacgtgtagagtgcctttctcaacggaccaatcaaggaagaggtctatgttgagcaacctcccggctatgaagacagtgtataccctaaccatgtttataggctctctaaggcgctttatgggctcaagcaagccccaagagcatggtatgaatgcctaagagatttccttatagctaatggcttcaaagtcggcaaggccgatcctactttatttactanaactcttgacaatgatttgtttgtatgccaaatttatgttgatgatattatatttggatccactaacaaatctatatgtgaagaaattagtacgatcatgacacaaaacattgagtgtctatgatgggggagttgaagtatttcttaagattttcagtgaagcatcttcaagagggcaccttcattagcc

SEQ ID NO: 34190 - DNA, 387 bp, Zea mays
  unsure (1)..(387): unsure at all n locations
agcttagcanaaacacagtgcacaagagcttattattgagtgagcgggagtggttggccagaaagcgtgcaaaatgagtttgcggtatggccgtatatatacgctcggtgcgttgaaaattgaaagaccccacttgtcattgaatgttgctattctagcaaagggaaggtgttttttcggaccttcggcgtaaaagccttcgtccttatcgcaatctaaatttattatttcaaacaaattaatattgcgaggggctactgttggggaccttcggagtccgaaggtcctcaaaaacaaggatttaacagtatttctgtagtgcaatgtgtgaacaggtaccctcggactaaagtcggcattgcagtagactggaataatatgaagctt

SEQ ID NO: 34191 - DNA, 446 bp, Zea mays
  unsure (1)..(446): unsure at all n locations
gcttctaagggagaacacgtgatangttttactcatgttactttcgaaaaagatagaccttgtgcagcttgtcaagcatgtaaacaagtgggaggagcgcatcacagcaagaatgtgatgaccacatcaagacccctggagctgctacatatggacctcttcggacccgtcgcctatctaagcaaaggggggagtaagtatggtctagttattgttgatgactttctccgcttcacttgggtgttctttttgcaggataagtctgaaacccaatggaccctctagcgcttcctaaggagagctcaaaatgagtttgagctcaaggtgacaaagataaggagcgacaactggtccgagttcaagaaccttcatgtggaggagtaccttgaggaggaagggatcaagcacgatttcttcgctccctacacaccacaatcataatggtg

SEQ ID NO: 34192 - DNA, 460 bp, Zea mays
  unsure (1)..(460): unsure at all n locations
agcttcaagtaccccatatttttcataatttatcggtagacagagatctctttattgtcttgcaaacaataaaggaaatcatcctcgtcattgccactatacaccaaggatcctcgggggtacttcaaatccttggcatattgttttgcttcggcaatctgctcctctgataattgcttccccgaagcatgtcacacaatgaactctagctcttcggtaggtgctccgggagtaagagacttagatttctcagggacagtctctttttccagggttagtggtgcaatttccgaaggtcctgctttggcagaaactgagggtccagcctcagaaacagtttgcgccatgccagcctcgtcaaaattctttgaaatatcaccttctgtgctaggcgcttcaacagaagcangagttcatgtcttcacagaattcataacaacgtctagcatgctagccattc

SEQ ID NO: 34193 - DNA, 446 bp, Zea mays
  unsure (1)..(446): unsure at all n locations
agctggacattgctttcctatnggtaaccatatgccatccttaatgccagggcgtctcccattatagaccttatgcgagcaaatttaaatttttcgttttcgagctcatgctcggcaattttagcagttaatttagctatgtgatcattttgttgtttaatcatggcaaggtgatcatccataacttttacattaacatctctacatctagtacaaatagaaacatgatcaatggtagatgtagagggtttgcatgcatttaattcttctatcttagcatttaatttaacattctcatctttaagacaggaaataaaatcattgcaaacatttaaatctttaaccttagagactaggctagcatcttcatctctaaggctagaaattgaatcatgacaaatgctaagctccttagataaattttcgcattattctacttcctgagc

SEQ ID NO: 34194 - DNA, 490 bp, Zea mays
  unsure (1)..(490): unsure at all n locations
gatccttaagtcacctgcggcatgcaagcttaaagctaagacttggtcaatttttaacatcgcgaagatgagctttcttaggatttgattgaaatctagcacacatacagacactaaacatgatatcgggcctaaatgcggtaagatacaataaactaccaatcatagaacgatagagagtttgatcaaccgggttacctccctcatctaggtcgagatgtcgatttgttggcataggtgtcttgattggtttgcacttctccatgttgaatcttttcaacaagtctttggtatacttctcttgtgaaatgaagttaccatctttcatttgcttgaattgaaagccaaggaagtacgtcagctcaccaatcatagacatcatgaactccttcgacatcaactcaccaaattccttacaatgaataatcattgtcgagccaaagattatgtcatcaatatatacttaacaaatganaatatcaccgttatg

SEQ ID NO: 34195 - DNA, 433 bp, Zea mays
  unsure (1)..(433): unsure at all n locations
agctntggctagcttgccgaaagccgtcttgttacttcctattaaccactgcagattgcctacctgaaaaggacatgtgcccaactatctgtcataggatagagctcctcagacaacgagagaaattcccccccacagcagctaaacgcagcaggaaactaacaaacctcgcggacgaagaaggatctcgtctcacatagtactgttcgagacatgtatttggttcttctgcagcttaaatttacagaggatcgagatcaaactttaaaggaaggagaaataaaaaaaagagctaacgacaactcagtttgagcagcctaataagcaagatggaagtaggctgatgagtaggctcctccctcttattgtcttcacacaggggagctgctctgctctcatcatatcaccagagcaacgccagcttctccatcga

SEQ ID NO: 34196 - DNA, 450 bp, Zea mays
  unsure (1)..(450): unsure at all n locations
aagcttcttatatntgcctatacaaaccccatcttcactgggtctaacaaggtgtgcttttgcatactgcaggagtctgtaatcatgcttttcacttccactgcatcagcaggtggcttaagactcgtcaagtgtgcccattaagtagctgcagttctgtgttgaatttatcctttaattcattcttttgggcattgcattactgacgatcaactttttatcttgcagataacagtgagtgggagttccagaaatatggccactagttcctgcgcaccctcatgtgatgttggggcttacttctagtgactgctaccactcgagtgtatttttttctgccaaacagctccatcttttactgctttggatgcttgcatgtatcacaggtcaattatcactagtagtacgtccacctgngaactgtattggattgttcgttgagaggatagt

SEQ ID NO: 34197 - DNA, 483 bp, Zea mays
acctgctgcatgcaagctttagggcatgtctgtctctgttactagctcgaatcttgtcgacataatcaaattctgacagttaaacacttctgtaaaaatcgaatcttcgtacggaaggaatccgttattttctaaactctaaaccatgcatacctcttcaactttctaagtctcgtgatatctaaattctcgtctacagcagaaaacttagtagctggtagcttccgaaatccaaattattcttgtgatatctaaattctcgttgacgcttcagaaatccaaattattcagaaatccagcagacaagctcttaataaaagctgtaccaaatatactcttagtagttggtagcacctcagtcctgacttagattaaaaaacttatctcgctggctatgttcctgacctgagtcgcttatagcgagatgcacagagctgcatgtatgtgttctgaagcgtcgggtggaatgacacagctatagta

SEQ ID NO: 34198 - DNA, 410 bp, Zea mays
  unsure (1)..(410): unsure at all n locations
agcttctaaaggagaacacatttgngacttaatatgttctttttgagaaagacagggtgagatacgcgtcgtcagcaagatcatatctgctcccatcatcttcacaagaacatcatgacgatcgacaggccgcttgagctactacacatggatctattcggcctgatcgcttacataaacatcgcggggagtaattattgccttgtaattgtggatgattattctcgcttcacttgggtattctttttgcagttaaaatctcaaacccaagagaccttaaagggattcttgagatgagctcaaaatgagttctgattaagaatcaagaagataagaagcgacaatgggacggagttcaagaactcttatattgtaggctttcttgaggatgagggcatcaagcatgaatt

SEQ ID NO: 34199 - DNA, 350 bp, Zea mays
aggaccaaacaaggaagaggtctatgttgagcaactccccggctctgaagatagtgagtttcctaaccatgtctataaactctttaaagcgctttatgggctcaagcaagccccaagagcatggtatgaatgccttatagatttctttatcggtcaaggtcttaatgtcggaaaagccgatcctactttatttactaagatcctgacaatgatttgctcgctgccaaatttatgtgatgatatatattcgggtccaccacgaatctcttgtgagatattataagtcatgacacataattcgaatgtcttgacggggagtgtaatattcttagattcaagtgagaactcca

SEQ ID NO: 34200 - DNA, 390 bp, Zea mays
  unsure (1)..(390): unsure at all n locations
agctngcattgcatgtataaatntcttgtattgcatctagggctngnctaacctagttgagataaccgccaacaaagcgagtgaaaaagcttaactcgggtcaaacttgacaagtcttagttttaagcttttagcacttaaattcttacttgttatgcaattgttggttcttgaaatatgcatgaggtactgcacttagggggagtattcaaaactcaaatcactcatgaaaacccctagtgcaagccaaaatgcaaatttcaccatttgcctattttctctaaaaactatctagcctatggcaaaatattttgaaaagtatatgagggtgccaatacctgtcccaacaagtgttattntgtgtgattataagttgggatttggtttggt

SEQ ID NO: 34201 - DNA, 430 bp, Zea mays
  unsure (1)..(430): unsure at all n locations
agcttgctaaatagtttcttatttactggtttggtnaatatatcggctaagtggttgtgggtgcttacataagcaatttctatatccccttttgttggtgatctcttagaaagtgataccggatgtctatgtgtttagtgcggttgtgttcaacgggattatccgccatacggattgcactctcattatcacataggagagggactttgctcaatttgtagccatagtccctaagggtttgcctcatccaaagtaattgtgcacaacagtgtcctgcagcaatgtactcagtttctgcggtcgaaagagctacagagttttgtttctttgaagcccatgacatcagggatattcccagaaactgaccagtccctgatgtgctctttctatctattttacatctggcataatcggaatacctatatagatc

SEQ ID NO: 34202 - DNA, 453 bp, Zea mays
  unsure (1)..(453): unsure at all n locations
agcttcggatctcgtgccttgctactcttatccacatggccagcaataactngagaatcagtctttaggatgacccttcttattcccattgcccttagtttccgaagccccaatagaagtgcttcgcactcagcaatattatttgtgcaactgaaatccagtttgactgcataacatgttttgacttttgaaggcgccactaggaccgcatctgctcctgcaccgaaggttccccaagaaccatagcaaaacactgtccaagcttcagcatctttgcttgtcccctcttcgtgagcccctagcgtccaatcagcgatgaaatctgctagcgcttgagattgaattgaagatctgtgcacgtagtcaatagtgaattcattaagctccgcggcccattttccaatccttccagtagcttctctattcctcatgatatccttcaggggttgtgat

SEQ ID NO: 34203 - DNA, 431 bp, Zea mays
  unsure (1)..(431): unsure at all n locations
agcttcggattcccgacaatgattactgtctctcggtgctatcaaaagatgaattagccgacagcatagcatataatagcttaaaggtacgagaataaactttttgtactttaaaaacaaaagattttcttatttgcttatacttaataccgcactctttccacagggcctaattcttagcaacgccctcagggcgcanaaaagtgccgaagatgaaggatgcactatagctttgaacaaccttcatttcgaggtaattgaactaagaaacgaaggtcttgaaaaagataaaattttgaactcattggtgaacaagataaaagaggacgaagctacttcaaaagctcaagccgaagcccagaaatgcaaaattgaagatcttcggaaacagctggcagaagcaaaattaatatgtgcaattgccgaagctg

SEQ ID NO: 34204 - DNA, 443 bp, Zea mays
  unsure (1)..(443): unsure at all n locations
agcttcaatatttgtatgtgtatgttaggctcacgtctgttgcttgttagagtggtgtccattcatctcttggactntggagtggtgttcattcatctattgtttggagtggtgttcattcattatttggcatgagagggtgtcaaattgtcaatgacttccaatctgtcattgtcgtgcgtgcgttgtggttgccacttttttgcanaaaattctctttcgtcattgtccgtgcatgtgttgtgtttcactgcttccttggttgttattaggtttcttacaattctagcttatttgtatacaaacatatgtgagcctaaactacacatacaagaaatagatgttactgctggaatgctttanaagaatgttgcctatacagctgtcnggcatgtttattatgaactttcgagccacctcacgtttaatgaaatggtagttac

SEQ ID NO: 34205 - DNA, 444 bp, Zea mays
agcttgcagcaaagtcgcctgacggtttcttgggcaatcctcagctatgcatagagtcggcttgtgctgatcactccaacagtcaacctgctgggaaactacgctacagcaagacaagagttgttgtggcattgctagtgtctactcttgctgccatggttgctggtgcgtgtgctgcttactacattgtgaagaggtcacatcacttgtcagcaagtcgtgcctctgtccgtagcctggacacaacagaggaattgcctgaagacctgacctacgaagacatccttcgggcgacagacaactggagtgagaaatacgtcattggaagaggccggcatggtacggtctaccggacagaatgcaaacttggcaaagactgggcagtcaagacggtcgacctgtcccagtgcatattccccatcgaaatgaagattctgaacacag

SEQ ID NO: 34206 - DNA, 474 bp, Zea mays
  unsure (1)..(474): unsure at all n locations
agcttaacactcacatcacgaacatgctcgtctctctgggacatgctttntatcagaaagcaagcatgaacagaaagaaccgattctctaacatcagctccttcacctatgtcagatatgcgatcatcctggccaccaaaacaaaatatacatatatataatcaatttgcacagctacaggttactgtttatatagctataaaatggatctcaataaacgaatgcaatgcattggcgatgaatggatgatggagtatctcctagttaaacaagcaaaacacaatggaatttcattgtgtaaataaaatccagaacagactgcaattatggaacacacgatgcatgttgtcagtgcccaatttataaaacactttgttcatcgatgaggtatttacttgtgaggcatatttctttatttcagatcaacaaaagtaacaaattgaacatttacaatgtatcctttgctataacaca

SEQ ID NO: 34207 - DNA, 386 bp, Zea mays
ctcccatggttcaggataacgagggttacattttataccctaccggttatcccgaacaaaaaattaggagaatttactctatgaagtctcactctggcgctaatcatacttttatgtataagagtgaggcatctagttctaggcaatccactcatgttaaatagcctaagaagaaaactcctattgcatcaaatgaacctaatatttcatttaagacttttgatgcatcatatgttttaactaacaaatcaggcaaaatagttgccaaatatgttgggggcaaacacaaggggtcaaagacttgtgtttgggtacccaagttgcttgtttctaatgtcaaaggacccaagaccgttttggtacctaagaacaaggcctaaatgtgt

SEQ ID NO: 34208 - DNA, 468 bp, Zea mays
  unsure (1)..(468): unsure at all n locations
agctngaaggacanattataaagcaagccccggtgtactttgtctccgaagttctcagtttatcaaagaaaaactatacaaaattggagaaggtgctatatgttgtcttaatggcctccaggaagcttcgtcattactttcaagcataccatataattgttccttcatcacagcctttgaaggatattatgaggaatagagaagctactggaagaattggaaaatgggctgcagaacccaacgaattcagcattgattatgtgcacagatcctcgattcagtcccaggcgttagcagacttcatcgctgactggacaccaggggctcaggaagaagaagcaagtaaagatgccaaagcctggacagtattctgcgacggttcctggggaaccttcggggcacgtgcagctactgttttagttccaccttccaaagttagaacatgctatgcagtgaaacttgatttca

SEQ ID NO: 34209 - DNA, 446 bp, Zea mays
  unsure (1)..(446): unsure at all n locations
agcttccacttaaccctgattcgtgatatttccttcattggtgaaactcttanatagacatagtctcctactagaaaatacaagggcatccgtcgtttgtctgcgtaactcttctgtcgagcttgagctttcttcaaattatgaactattcgtcgaactttttcttcggtctcctttaccatatctggcctgaagaaacttctttcacctagttcagaccagtttaacggagtacgacaccgtcagccatacaaagcttcgaagggtgccatctcaatgctttcttgatagctattattatataagaactccgctaatggtaaacaatcatcccatttctgtgggaattccagaacacatgctcgcaacatatcttcaagtatttgggttaccctctctagttgaccactggtttgaggatgataggccgaattgtggagcaactt

SEQ ID NO: 34210 - DNA, 441 bp, Zea mays
  unsure (1)..(441): unsure at all n locations
agcttgtgaagattcttcatcccaacatggttatgtctgcgatgccagagctagcccatattagtcttagcaattaggcaagtgtctagttcagctttgttgtcattaaaatcaactaaatatagctgaccatctaacactcccttaaatgctattgaatcatcacttcttctaaagacagtaacacctacattagtgaatagacagttgtagcccattttgcataattgagaaacacanagcaaattgtaatataaagaatctataagaaaaccattggaaatagaaaggtcaggagatatagctattttacccaaacctttgactgaaccttgatttccatccctgaatgtgatagctctttggggatcttcattnttctgatatgaggagaacatccttttctcccatgtcatggtggttgtgcacccactatcgata

SEQ ID NO: 34211 - DNA, 225 bp, Zea mays
ggatgttttgacactcatttgacaatttcatatggaatgactccccttataccataacatgtgtgttataaatagaaattaagatctgtatttgaatagcaaaaaccaaccgatttgctcgcaaagatgatccattaatgcccgattttgaatcaaacccaatttaggttgtaatggaagtgaatgttgcatttgtctacctgctttatagtgcggtggcataaa

SEQ ID NO: 34212 - DNA, 460 bp, Zea mays
  unsure (1)..(460): unsure at all n locations
agcttcacaaaactacctctagcttctcaatacaagggagaataagggagaatgacatctttttcgtcgatagtctaagttcgttctattggattggcttcaacttcttccttcgagttaagagggtccaatgctaatattctctaatgcgttaactctagttctcgttgagttgtttagacttcatcctgtatatgcttatggacaggcagaaatcaattgataccattctctagaggtagtagtttaattagcttaggtatcaatcctaacgcacgaaaaggaaaacaaaaagcatgagacttctatntctattacaataggaccgatatgtcttgaaggctatcttgtcgatatcgtctgggtgcatgcgcacttggtggtaacccctgcagagggtgagcttggtgaagaacatagcacctcgcacctcattcaacaactcgtcgatcaccaaaat

SEQ ID NO: 34213 - DNA, 134 bp, Zea mays
cagtcattacataaaaacatgttatatctttcaatccctacaagtttctatatttattacatttagagagcattcctattttacctttttgactacagaatcagataaaatgtgctatattaataccattttca

SEQ ID NO: 34214 - DNA, 434 bp, Zea mays
agcttgctctcagcctccccgatataaccaagtttcctcatcataaccatatcatcctccgttacagtagacttcccaaactcaatgtgacaggctttgttgggttcaggatgctgttatcttcttcactttcattgtcacttcgcctccagctacaatctgttcagcttcgatattggaggcaccttcagcagcaatttcctctaacacaaccagatccgaccgcttcatcacttctgaaattggtgttgtcttggaggtttcggtctcctttccttcatgagataccctagcagtggatctcaccctggccatttgtgttttcaagttctttgagccgaaactgatcataagtgataacttctcaccaacccgtctatttatatagtgctgcagggggagaaggcgaaccaccataccgctcacactggctg

SEQ ID NO: 34215 - DNA, 418 bp, Zea mays
  unsure (1)..(418): unsure at all n locations
agcttgtgaaggttcttcatccccacatgtgctaagcggcgatgccacagccagcccatgcaagtcttagctattaagcatgcatctagaccggcctcttcttttgcaaaatcaactaaataaagtttgccgtctaatacacccttaaaagctagtgaaccatcacttcttctaaaaacagacacatctacatttgtaaacagacagttatatcccatattgcacaattgactaacagatagtaaattatatcctagtgactctactaaaaacacattagagatagagtgctcattagaaattgcaattttacctaacccttttaccttgccttgattcccatcaccgaatacaattgaatcttgggaatccttattnttgacgtaggaggtgaacatcttcttctcccccgtcatat

SEQ ID NO: 34216 - DNA, 455 bp, Zea mays
  unsure (1)..(455): unsure at all n locations
agctntctcaccatgtatagcatgcttaatgaaccttcgtataatgatgcagtttaatacgaaaacttggtcatcaagtagactgttgaccttctaaccagtcagcactaaagttggtcggccgtcttgcttggagatccgattaagtcggccttagaagcactggaaactagacatcaagagctttccaaaaagtacttatgggccttcatagctnttgggaatcaaaatatatgactgtttcttctagacggttctatcgcgctggactaactcaaacatagctcttctctctaattcacccttaatatgttatgtccttcctctttggtgaacctaagcaatatcaaccgacacgacttaggtagcatanagttcttattattgtttaattggaattcatatagcgcgcgcacgtcttgttgtatcttttttgctcggcttcgagtgatacg

SEQ ID NO: 34217 - DNA, 426 bp, Zea mays
  unsure (1)..(426): unsure at all n locations
ctgcggcatgcaagcttgcctaaaattggcaaatgtctcttgccatcancattgtgtttccttgcttcgtgccttttactatgatatcatcaacataggtcagcacattcttgcctatttgagaatgaaggaccttggctgtcattctgctgaagcttccttcggcatttttaagcccctcaggcatccgaagatagcaatatgtgcctctctgataacaccagcactaatatgtgcctcacttcattccgagcaccttcatctttatcttcagacattttcctaagcctttgttttcttggccagaatgatggatccacattgagtgaatgttcaatgacatctctgttgacaccacagagatcattagctgaccaagcaaagacttctttgtgttgaataaaatcatacaaagtcttctttgct

SEQ ID NO: 34218 - DNA, 456 bp, Zea mays
  unsure (1)..(456): unsure at all n locations
agctngagtcagtcatcctgcgaagaataattgacgcacaaagaaatgatgagggaatgaaacacattcatgagaaaatagaggccggtaaagccaactgcttcaaaagagatgatcaaggtgttgtatggtttaacaaccgcatagttgtgcctaanaatgatgagacccgccagcaaattctagatgaagcacatcatagtcgctattctattcatcccggaagcactaagatgtatcatgatctaaagcagcattattggtggacaaagatgaagattgaaatcgcacgctatgtggcaagatgtgacacttgtagacgtgtcaaggccatacacatganagctgctagtccattacaatctctacctataccaacatggattgcccaggacagcaaaagggtatgattctatttgggttataattgatcggcttaacaagatagcccatttt

SEQ ID NO: 34219 - DNA, 446 bp, Zea mays
agttgtatagctctttaatatcttttattgtagatggtaatttctctatgtgaggcgattccaaattttggatgtcaaaatatgaggatttcatactgattttttgtagccatagattatttcactgaaaaaaaattaccaaccgcaaatgctttaggcttttttttacatgtatgattttagttttgctcatttctctatatgaagtcagttgggcaaactggaaattagaatgtcaacatgtgagaacatcaaccataatttcagtagtagaaaagggctctaagtgggtggtacacacaaatttttattgccgattttagttaccgcgcgtcagtgaaattaaacaggtgggaccggcttaagataccgccactcgaaatagctttaggaccgtcgatatagagcttatgtgtactagtgtctgtgaatttaaaagagaaaat

SEQ ID NO: 34220 - DNA, 464 bp, Zea mays
  unsure (1)..(464): unsure at all n locations
catcaagctgctaaggccttttcttttctctttatctgtaacttacaggaatactaccccacttaanaagaatgagggtagaacttttgaatcttggggatttgaactccttgaagtacctcataacaagggtgttacggngccttcttctgctgttgctgcttgagcaggctgcggagaaatgaccgacacagggttgattctgggagaaccttcttcttatcttctcttcactatcttcttttctcttctcacttttcacttttcactgcctctttctttctctttgctcttcccactggaggattctatcgatgagtattaccatcatatagaggaggaaaccaaagactatgaaccatgtacaacagtcttcaacccaagaatcaccaagcattgtgatcttangggcgagggagtggaaaatggagttgcttgcgaattggcagaagggatttatctgg

SEQ ID NO: 34221 - DNA, 462 bp, Zea mays
  unsure (1)..(462): unsure at all n locations
agcttggtcattatattgctttctgtccctacaatgatagtgaccaggaacacaggagcatgatggaatagaagaatcattacaagaaggccaatggcgaggcacatatcggaaaggagtgggattcagattgctcctcctctgactccgacaatgaaggactcgccgccactgccttcaacaagtcatccctcttccccaacgagcgtcacacatgccttatggcaagggagaagaatgtatgtaatcaaaacaacgtcacttatgattcttccagtgatgatgagtctagtgatgatgaaatagattactctagttctgtcaagggattggatagaactaaagtagataatattaatgaattgattgatgccttgaatgaaaaagatagactcttatataaacaagaggaccttttgtatgaagagcatgacacatntgtataggcacanaagtcttatg

SEQ ID NO: 34222 - DNA, 441 bp, Zea mays
catgcaagcttgtcgcacaagagctgtgtggctgctctacttgctatcaagaccttggagaacaattgtgttgttctgaaggatcagtgtgatagggccatggacaaagccattcgcgctgggcggatcctgatgaggagacccagagtcgtactgcccgacgatattgtcgctgatgttagggccacgcctgatgctgcaagtctgtcatcctcttatgttgcccctgtgaaggatgttgcatgcaaggacacttcgacgaagtgatttcctgtaaaacacttatttatcgagttcgcatcctttataagaaagatgttatgcgaattctgaatgtgtacaacagctatgttaggacttgattatttcatgggtagggtgctagatagctaccccagcactcgtaagcgatatattttctttttcgaagtttctcaattt

SEQ ID NO: 34223 - DNA, 385 bp, Zea mays
agcttctgacttgtgggcccgtctggatgtccggtgcacaccggacatgcgctgtttactgtccggtgtgccagtatgggcacgcctgacttctgcgcgcgctgcgcgcgcatttaatgcgtcgcaggtagccgttggcgccgaatagccgttgctccggagttgcaccggacagtccggtgcacaccggacatgtccggtgaattatagcggactagccgttggagtttcccgaagctggcgagttcctgaggccgacctcccttggagcaccggacactgtccggtgtacaccggacagtccggtgaattatagcggagtcgcctctggaaattcccgaaggtagcaagttcgcgttggagtcctctggtgcaccggacatgt

SEQ ID NO: 34224 - DNA, 419 bp, Zea mays
  unsure (1)..(419): unsure at all n locations
agctngaagccatggtaagtagcatatgctattaaaatgcgaattgattctagcctagctacgggtgcataggtttcaccaaaatccaaaccttcgacttgtgaatatcctttggccacaagtcgggctttgttccttgtcaccacaccatgctcatcttgcttgttgcggaagacccacttggttcctacaatattttgattaggacgtggaactaaataccatacctcgtttctagtgaagttgttgagctcctcttgcatcgccaccacccaatccgaatcctgtagtgcttcctctaccctgtgaggctcaatagaggaaacaaaagagtaatgttcacaaaaatgagcaacacgagatctagtagttacccccttttgaatatcgccgaggatggtgttcacggggtgatctcg

SEQ ID NO: 34225 - DNA, 317 bp, Zea mays
  unsure (1)..(317): unsure at all n locations
gatctgtagggacacggcttgtggtcttcttgcatcatccaccacacacgtcatgctcaacgggtatcctgcgcttcaaattcatcttagaatgcggcttatacaacgggatcccttgcacctatgcctgtcatattaggcatggatgttactggacacttatctatacatgcaaatgatgcatgttctattgcagctagctagcaccactgaagacaacttctcagagtttccatctatgcatatgattagtcctctctttcaccctacggtnatgaaatctcatcctcttgattcttcaccatttggactgccct

SEQ ID NO: 34226 - DNA, 410 bp, Zea mays
  unsure (1)..(410): unsure at all n locations
agcttaatgcccctaagaaattggctaatgtttgttacggtatagctcccatggcncaggataacgagggttacattttataccctaccggttatcccgaacaaaaaattaggagaatttactctaggaagtctcactctggcgctaatcatacttttatgtataagagtgaggcatctagttctaggcaatccactcatgttaaatagcctaagaagaaaactcctattgcatcaaatgaacctaatatttcatttaagacttttgatgcatcatatgttttaactaacaaatcaggcaaaatagttgccaaatatgttgggggcaaacacaaggggtcaaagacttgtgtttgggtacccaagttgcttgtttctaatgtcaaaggacccaagaccgttttggtacct

SEQ ID NO: 34227 - DNA, 436 bp, Zea mays
  unsure (1)..(436): unsure at all n locations
agcnttaccctgtagtctggactataagttgtttatggtatgtgtgccttatgcagcttgaccatttccagcatttgcgtaatgaggactctanggagaagcctcgtagtgagaccctggccattcacctcggaagtgaatacgggtctagctaacccactgcaaaaagggaatcgcgactcatgggttaagatgcgccacctctgcagagtgtaaaactgatatatcagccgtgctcacggatatgagcggcctggactcctcacatgataattgaacttgaagatggaaataaatcgagatccgatgatctgccaatgagttgcttaagtgcgttcacttaagtgtctttttgatatactcttatacctctcgtaatgggaatactcgggattcacacttattagtaagacaggtgttgttataaaatgttgac

SEQ ID NO: 34228 - DNA, 435 bp, Zea mays
  unsure (1)..(435): unsure at all n locations
agcttgccttcgcttatgtttatcatccgtattccaacggtgtcgtggaacgcgccaatgggaaaatcttcacagctgtcaagaagatgctccttgatgaacaaaatggcaaatggaccgatttgttacctgacgcagtattggcactaaacacgactgagtgcagagcgactgggtttactcccttccgccttctatacgaatcggaggccatgaccccgcaagagatatagcatgggtccccgcgaacagtttcgtcagccgttccctacttgtacgagccatactctaaggaccctattgactgagaccgagtcttcgccctacaggccctaaacaaataccaagcccagaccatagcatggcgcgaccacatagtcatcccgagggagtncagcgaaggggacctcatactcgtccagacagctcgaaccg

SEQ ID NO: 34229 - DNA, 385 bp, Zea mays
acctgcagcatgcaagctttggtagcggcgcagcatcagatctttacaactgctcttacaccacagatatgcattccgaagctgggtccatgctctctactgacgaagccctacagctgatccacaactcggctgattcctggtggcgattcatacggaacgatatgtgatatatcagatggcggtctacccgcgggtgcagatactgacagttcagcgaacatcgttgtggaccatgaacaagacaaaacatccgcttctggaatagagccggtgtgagtattaccacgtctccatgatcttagagctaataatatattctctcatttgacatttacctctagcacatcctgcggaatggtctctggccttggctgttgtctgt

SEQ ID NO: 34230 - DNA, 466 bp, Zea mays
  unsure (1)..(466): unsure at all n locations
agctngccgaagggggacgtatgggttcacttgatgtgggcgccaatgttggtccttgttcttggatgctatacaccaagaacaaagcaacacaattgttaatggttaaagaccttcgttcttcgaagcattatctcccttgggatataatgatcttcagacgaaggtcacgaaggacataccttcatcatttcaataagtaaagatgtgaataaagacatacgaaacacaaaaagaatataaacaaccatcccaaatcattagattatttatattcttattttataaacatgaataaatatcaataatacttatattacatttgtaccttcggcttgatagaaggtgaaagagagggagtgacgctagaatgattaccagtcagcgtgaatagtatggtgttactgttcatctatttataggcacaggacgcagcccggacaanattacatttgtgttcctaaca

SEQ ID NO: 34231 - DNA, 453 bp, Zea mays
  unsure (1)..(453): unsure at all n locations
agcttcaggataacaacactcttcgacagagtgctgantaatcttgctccagtctgatctcgaatacatcctaagccttcttcgttaattccgccgaagagcatcactcctggctggtagccacaggatatagcatactcctgcagctcctctttctcagccttggataattcttgaccaattatattttgaaaattgaagcctctgtcttctgaaatatcttcggtaacttccttccctttttcaggcattgtggccaggacttcttctatagaagtcgcagtctcctccgcagccaaatccaagagcactttatcgattttagataatgtacactccaggttggtagcttccgcagtagcagcttctgcagaagcagcaacttcggcagctggtgttattttgacgctacggcggctgtggcgctactcaatagcttgctaacagaataat

SEQ ID NO: 34232 - DNA, 392 bp, Zea mays
  unsure (1)..(392): unsure at all n locations
agctntacctngattcccaactaaccagcttatccttgagagtctcttatttaatcgagtcagtcttgctgattaattttatactcacgcgtttattcccattgttgctgcaagagagactattaacacctttaagttttgttaaactcacgatggaggcttttgtttatgtatattatgtgtgtgctgcgggaagatggcttctttcccggtgttgtaatatgttagcacttgaatctaccccgggcatgtaataataatacttactacttagcttgtatacttaaaggtctgctaatgtatattatcttattgtaaagtctttcgctcaactcctgcatttaaagtttatgtacttgttgggttatcgtaatacttgcaactatggtgat

SEQ ID NO: 34233 - DNA, 457 bp, Zea mays
  unsure (1)..(457): unsure at all n locations
agctntcatgtcaacatcaatgctcttgtgtctacttcatatggagntattcggacctacaaattatgtaagtgctggtggcaacctctactgtctggtgattgttgatgatatctcaagatacactcgggtgttctttctccatgacaaatctgaagttgcatctatattcaagaagttcgccaagaaagctcaaaatgaatttgattgcacgatcaagaagattataagtgataatggtaaagaatttgacaacaccaacattcatgagtactgtgatgaaattgggatcaagcatgaagtttctgcaacatatacacctcaacanaatggagttgttgaaaggaaaaacaagaccttgatcactcttgctagaacaatgattgatgagtatatcacaccggagaggtnttggccaaagctgtcaacactgcatgttatgcatcacacatgctat

SEQ ID NO: 34234 - DNA, 409 bp, Zea mays
  unsure (1)..(409): unsure at all n locations
agcttctagatactcaaagcgtgaccatagtactgctctgcgtcacagtgaaagtggcatggtagatcangtcagtagtttctcaccttcctatatcaataggtggtttgtgatgagcttggaacttcaccaacaagctactaaggctgctgtattccttacaggttctgttaacaacaaatgcggatggtctaagatttgtcaaggttaggatgcgatctgttcgcataccacaaattggcgacaagtttagcagcaggcatggacaaaaaggaactgttgggatgacttacactcaagaggatatgccatggacaatcgaaggcattacacctgatattattgtgaatccacatgctattccatcccgtatgactattgngcagctgattgagtgtatatgggtaaa

SEQ ID NO: 34235 - DNA, 455 bp, Zea mays
  unsure (1)..(455): unsure at all n locations
agcttctaaagggagaacacantttgngactaaccaatgttcattntgagaaagacagggtntgtagcgcatgtcaagcagggaagcaagttggtgcccatcatccacacaagaacatcatgacgaccgacaggtcgcttgagctactccacatggacttattcagctcgatcgcttacataagcatcgacgggagtaagtattgtcttgtaattgtggatgactattctcgcttcacttgggtgttctttttgcaggaaaaatcacaaacccaagaaactctaaagggattcttgagacgagctcaaaatgagttcggattgagaatcaagataattagaagcaacaacgagacgaagttcaacaactctcacatagaaggttttcttgaggaggagggcatcaagcatgagttctcttcttcctacacacctcagcaaaatggtgtagtggag

SEQ ID NO: 34236 - DNA, 459 bp, Zea mays
  unsure (1)..(459): unsure at all n locations
agcttctcagcttgatttgagttggacgcatgtactgtactgtactgtacatctgtaccaggagcagcactacgggcgctagacagctagaggctagagcataccacgacgacatttgtcgggtgttgatgatgatgtgatgatgtaggctgcaggcgtctggtgttgatgcaggattcgtcgcccaggtgtttatcgccaaaccctaatcgtcgtcgccatgggtttggatgctgcggactgcggagcctggaatgagtggactgcaaagtggcctatgaaatcggcatagaccagaaaaatgaccacttgagccttgggcttttgagttcggcttcaaagtggtcatgtaagtgatcagctgatatattttggcctctagctcggtcagcgcgtgagcagctagcaagctagctcgagctagctcattgacacaatgagcaaaaanacctgcttacc

SEQ ID NO: 34237 - DNA, 437 bp, Zea mays
tgcaagcttctaagggagaacacgtgatatgtttgtctaacgtgcttttctaaaaagatagaccttgtgcagcttgtcaagcaggtaaacaagtgggaggagcacatcatagcaagaatgtgatgaccacttcaagacctctggagctgttgcatatggacctcttcggacccgtcgcctatctgagcataggaggaagtaagtatggtctagttattgttgatgacttttcccgcttcacttgggtgttctttttgcaggataagtctgaaacccaagggaccctcaagcgcttcctcaggagagctcaaaatgagtttgagctcaaggtgaagaagataatgagcgacaacgggtccgaattcaagaatcttctagtggaggagtttcttgaggaggaggggatcaagcacgagttctccgctctctacacacct

SEQ ID NO: 34238 - DNA, 465 bp, Zea mays
  unsure (1)..(465): unsure at all n locations
agctnggacagttttctgcgatggctcctgttgaaccttctgcgcatgagcgactactgtcctagttgcgccttctaaagtcagcacatgttatgcggcaaagcttgacttcagctgtacaaataatattgctaaatacgaagcacttctattggggcttctaaagttaaaggcaatgggaataagaagggccatccttaaaactaactcttaagtcatttctggtcatgtagacaaaaatagtaaggcgagagattcgaagcttgaaaaatatctggatacagttcgaaggctggaggcttcttatgaagggttttccgccaagaatattccaagaggagaaaatgaacatgcagatctgttagccaaatcatgcggcccagggctccctctaccttcagacatattcttcgaaacaataaaagcactttcgggtgaacttatggagagagcagtgctcacaat

SEQ ID NO: 34239 - DNA, 233 bp, Zea mays
cgagcacacttatacattttcttgtttacctaaaactctcgcaaacttagagcaaaacagggtagggaaacattaaatcccgctatgactgcccaacattgcaatctttgcaaagataactcttgacttacaggaggcttccattgagatctacttaagactttaatggcgattttctattctgtgtaactaacaacagttaatggccaaaaacttttatataaaagcatgac

SEQ ID NO: 34240 - DNA, 434 bp, Zea mays
  unsure (1)..(434): unsure at all n locations
gcttaataatgcacgagtgtcttgttntatatgtttcttgctctaattgattgtgatataggagttccgtanntagtgatgcctatgtcgtattcaagcttacgttgtcttgagtggacttgtgtggtcggtgatgcttttgcgcgatcaatagaagaactaatgaaaagccgtagctaattaaataaatgctcatacttgtgatgtctcgtttgtgttggttaattataggtagtaattcgctgtccttccagtggtattgatgtggtgtgctcgatgaagtgtagatagctaatgctatcatatggttggtacggtgtcttaacattaagtgtctagctccctaccgcgtgtctttatatatctaatgataacttttattatattcatacatatgcatcttgcatctcatttaggaccgagagatgatgatc

SEQ ID NO: 34241 - DNA, 379 bp, Zea mays
  unsure (1)..(379): unsure at all n locations
agcttgtgaagattcttcatcccaacatggtctantttgcggngccagagccaacccatgttagtcttagcaattaagcaagtgtcgagttcagctctatcaaaatctaccaagtatagctgaccctccaacactcccttaaatgctatagaatcatcatttcttctaaagacagtgacaccaatatcagtaaaaagacagttgtagcccattttgcataattgagaaacggaaagcaaattgtaatctaatgaatctacaagaaaaacatttgaaatggaatggtcagaagatatagcaattttaccaagacctttgaccaaaccttgagttccatccccgaatgtgatagctcgttggggatcttggttttctcgta

SEQ ID NO: 34242 - DNA, 442 bp, Zea mays
  unsure (1)..(442): unsure at all n locations
tagcttgcacaacaatgccatctagctaggttctacttttataattgcagctctctagctgactgaacatacacagctcacacgagttacaaaataatgctatttctgacgataagcaactngcatggctattgactagaatgcatctagtggggccatccctctctcatataatacacaatgataacttggacctcgtgtagccccaattaacaagttcggcgtcctagatctacactttttacaagttaaagacctagacggctctgtcatgcaaatatagatatctcctctccactcttatcgaactgaggacatacatacacaatgttgtaggcttagggtattaaatcttaataaattcatctctgcctttattcttcatcatatgtctcaccaccgaaatccgatcctttgccgagtgctgacgtctttgtcgagt

SEQ ID NO: 34243 - DNA, 384 bp, Zea mays
agctttaccaaatggacgtgaagattgcctttctcactggaccaaacaaagaagaggtctatgtttgagcacacctcctggctttcgaagacagatgagtatccttaaaccatgcttatagagctctctaaggccgctttatgtggctcaaagcaagccccatagagccatggttatgaatggccttagaagatttccttatcactaattggattcaaagtcagaaaaagctgatcctactctattcactaaaactcttgacaatgatttgtttgtatgccaaaattatgatgatgacattatctttgggtctactaacgaatctacatgtaaagaatttagtagaatcatgacacacaaattcgagatgctatgatcggggag

SEQ ID NO: 34244 - DNA, 334 bp, Zea mays
  unsure (1)..(334): unsure at all n locations
gagagcatactngaggtgttccgctccaggagcatagaaaaataatcactgctccctgcatcttcagcgagccatcaaaatacattcgccatacttcggccgcttctggattgtctggaacttgctgtactgtccactctgaaaccaaatccaccagcgcttgagntttgatggcagcgcgaggacggaactcgatatcatgggatcccaactcgcaagcccacttggctattcggccaatggcttccttggtgtgaagaatgccccctattggaaaaccagcaactactatgaccttgtgatcgtctaaggagtgacgcagctcgccggcagt

SEQ ID NO: 34245 - DNA, 429 bp, Zea mays
catgcaagcttgtgaaggttcttcatcctcacatgttcttatcggcgatgccacagctagcccatgctagtcttagcaattaagcatgcatctagaccggcctcctcttttgcaaatcaaccaaataaagttttgccgtctagacacccttaaaagctagtgaaccatcacatcttctatatacagacacatctacatttgtaaatagacaattatatcccatattacataattgactaacagatagtaaattatatccaagagactcatctaaaaacacattagagatagagtggtcatttgatattgcaatcttgcctaagcctttcaccttgccttggttcccatcaccgaatatgagtgaatcttgggaatccttattctcgatgtaggaggtgaagcatcttctctcctcccgtcatatggtct

SEQ ID NO: 34246 - DNA, 359 bp, Zea mays
  unsure (1)..(359): unsure at all n locations
gatacagtgccgaaagtgtgagcatgaaagcttctgcgtaacagcaaagagtggaaccgacttaaagatgaaaaggctattcaaacctcgatagactactatagagatattatcaaatgtaaagggcatgaatgtaattttgtaagggctgtgtcccgtgtctataaataagtgaacagtatttccctactgttcacgctgacttggcattcgctctagcgtcacactctgattttcatcttccttttaagcccgaggtacattcataattcgatattggttctatttctctataatgatataataaagataaanggatattgttatatgattactcatgctatcttctatgtttcata

SEQ ID NO: 34247 - DNA, 443 bp, Zea mays
  unsure (1)..(443): unsure at all n locations
agcttgtcgtattcctggaccagacatatatctngtttcaaacatcaattttaaacacacactcactatgagacattttgcgtgcattaagagccaaactttacaaattttaactaataatttgcccaactatctttttaatctctactattattaaggctgcaagagtagtcggtcattccgtctgccatcattcctgttctgccattcccgttctgccactgttcccattcccatgtctatcattcccattctttattctgtctttctcattcccgtacaacccacgtctagctaaaattaaaaaaacacatgtcggggaccataattagcggtaccctcaagactcctaatctcagctggtaacccccatcagcacaaagctgtaaaggcctgatgggtgtgattaagtcaaggatcggtccactcaagggacacgatct

SEQ ID NO: 34248 - DNA, 453 bp, Zea mays
  unsure (1)..(453): unsure at all n locations
gcaagcttcgcacctctgaactaactcggctgcatcactncttgctgntggccaatagaatcctgacctgaagaccttcccgactagtgttctggaggctgcatgtattccacattgcccagcatggacctcctccagaagttgctccccaatagacgggagaatgcacttcatgaggacgcctgatgcaccccttctgtacaacgtctccccaatgagtgtgtagtgagccgactgtctggcaatgcgctcggccgagttcttgtcatctggttcttcttcattctttatatacttgatgattggccttctccagtcatcagagtctgactcgggttgatctataatgttgcactcttctgtttgatccattgagatactcggctgtagtatttcttgcacnaagactccgggtgggacctgagttcgactggatcctaacttggacagaca

SEQ ID NO: 34249 - DNA, 444 bp, Zea mays
tgcccctaataattgtctaacttttataaggatatactcccatggttcacgatagtgagggttatattttatatcctgcaaactatcccgaacataagattaggaagattcatgctagaaaacctcataatgtttctcaccatgcatttatgtacaaaaatgaagcttccagctctatgcataccacacatgttaaaatgcctagaaagaaaattcctgctgcatcaaatgagcataatatttcttctaagacttttgatgcttcttatgttttaactaacaaatcacgcaaagtagttgccaaatatgttgggggcaaacacaagagtccaaagacatgtgtttgggtacccaaggtgcttgtttctaacgtcaaaagacccaagactgtttgggtcctaagaacaaagcctaaacttatttttatgcttatgctttgcgggt

SEQ ID NO: 34250 - DNA, 437 bp, Zea mays
  unsure (1)..(437): unsure at all n locations
agctttatcttgttgtattcacaacaagtttagtgacgcttgagacttgtttagtggcaaagtccgacaagggttggctatgacatcgccggctagctcatgtcggtatgaggaatntggccaaacttcaaaaggataatcacatcattggactaacaaatgttgtatttgagaaagatagggtttgtggcgcacgccaagcatgaaagcaacatggagtcccacatcaatcaaggaatgtggtcacaacaaagaggccattggagcttcttcacatggacctcttcggacctgtggcttacattagcattggtggtaataagtatggtttagtcattgttgatgatttttctcgatttacctgtgttttgttcttgagtgatanaggtgacactcaagatatattgaagacatncatgagaagagctcacaatgag

SEQ ID NO: 34251 - DNA, 465 bp, Zea mays
  unsure (1)..(465): unsure at all n locations
agcttagtgggtaagccagtggtggtcgattatttaattattatcaaggaggaaccagttagagtcaaagtggattgtcgggatccctctcgaattaaaggtttcatagaagtcttctttaacaaagtgggatatgagctgaaggttgtggctgaaggagcttgcactcgatctccttacttgtcagggccgagtggatctgagaatcaagaggataaagaccaagataaagataggaacaaaccagggaggaattatgagaaaaaaggggggaaatttgagaggaaagggaaggagttagagaaaaatcaagaatctggttttggagagtctcangaggacatggaggaagatgctggggaggaggggtcactgcaatagatttgtgatgagatacccattgcggcgtttcaccccacacaaggattcttttcgcccggtctaataaaggctaaagatcacact

SEQ ID NO: 34252 - DNA, 441 bp, Zea mays
  unsure (1)..(441): unsure at all n locations
agaccggatcttgagcacctgagctgcagcttagaaatcacaatttttgatcctctttaactttctatggattttggcacagaggtttagtattactgttagatcccaacaaaaatgacccttacgaagaaactcaactctaatggtgaggtgtagtgtaaagtggcccattttacaccacccttgttattttngtctaaagcatatcctttatagtctaagcctcaaattcctaacaccagttatgatagccaatggcaacccactgcaattattacagaatttttggaaattattaacccactgtcacagttcaaacctacactaaataccctaagtagaaattaaagagaggaaaattaatactggtagttagtgtctcctaaaaccttataacatttcccattgaaatgtgggaggacaatgcaaatccactatgtt

SEQ ID NO: 34253 - DNA, 397 bp, Zea mays
gccgtcaaatagctcgccattgtcaactgtgagattccaccggactcctaaacggtcaacaatgttatgctagataaacatctgggcagtcttcgacgttatcgaggatacagccctcgccttgatccatatcgtaaaatactccacagcgaccaaagtgaacatgaagatcccctgtgccgtgggtagggggccgacaatgtccaagccccatctctgaagaggccacgtgtgggcgattttctttgtgaattgcgaagggctaccccagcgtggagaacatttctggcaggcttcgcaggaccttgtgacccaatttgcagcgcagatcatggcgggccagtataaaccttgacggaccacttcgggcgagggctctgtgcctgcgtgagaccgc

SEQ ID NO: 34254 - DNA, 402 bp, Zea mays
  unsure (1)..(402): unsure at all n locations
agctntgaaagcctagaaggatgctaaatactaaagcactcagatagctnttggaaacctgcgttcggaagtcataacgcttcagaatgaagccctcgagaaggacaaaatcctgctctccttagtcgagagattaaagtccagtgaggctaagctatctagcctttccgaagctgaacagaaaatgaaggaatttgaanataagaaagagaaagatgtgaaccgtattgctgatttaaaatatgcgctgtctatttaggtgggattgcacagatctgaagtgcatggattggagaagaagctcgatgaaatgactgaaaattttaatgtcgaacaaacaaaacacgagatatctgatacggaacggttaagagttcagaanaatgtcgaggagttttctca

SEQ ID NO: 34255 - DNA, 413 bp, Zea mays
  unsure (1)..(413): unsure at all n locations
agnctggatattcttcacgaagcatgaanatataggaaggtgtnttttctccagactcaaaaacggtacgtgtgtaaagtctcatgcatcgtaaagaattgagtagcacaaatagatatattacattcggggttacaaagtgttacattatattacatttccgaggttttctacaaaaatgtttagtcctctctcaaaacgacttctgcagcttcattcagaaaccgattgacgactntgtccataatatcttcggccatctttctaatttcgtcgtcccccttcggctgagggcccgaaggcgctttattatgatctgaagcaggacacgactacattactattacaaatcgcaaacagatcttaaaagcctaaagattacgacacgtgaaatactattatttagtacctaa

SEQ ID NO: 34256 - DNA, 441 bp, Zea mays
  unsure (1)..(441): unsure at all n locations
agcttgcatttcattcatcatgtttgccatctgttgcagcatctgcatctgagcggcaaccaatggatatgtcccagccggtggaggattcggaggattcatttctggttgtggttgtttaacaatccttgtgctgtggtggttggcangtaaatcgattccgcctcccttcctggtattgaccatctgggttagaaacatatggttagatagaattgtatataagacgagtaattacgagacatgatcttttgggggttntattagctcagtggattagtgtgtcacctactaatacattaccttatggtggacatgctagaatgtccttctatactatttcagncaatcaaagaggcaaatcaggcatttatcatctaaacaatcatccagacactctatatagagaatatatatatatattgtcttaggactcctatc

SEQ ID NO: 34257 - DNA, 389 bp, Zea mays
  unsure (1)..(389): unsure at all n locations
atcccattccactagatatgccttgtcatccttcttcttgtgatagaatttcttcttcttcttatcctcttcatccctggtctttctctccctacttcggcaattcattgcaatgtgaccggattcctcacatttaaagcactttctatcattcaaagcattccttcttgatgattgacctcttcnaaatgaccctttttcttcttcatgagcttgttgaacttcttcacaaagcgagccaattcttcatcactctcactttcatttccttcatcatcactttcttccttctctatcgccttagaggctntagccttgagagctattgattcacctttcactttcattgccaaactttcggccttggcttgagacttcttgaatatgtc

SEQ ID NO: 34258 - DNA, 446 bp, Zea mays
tcacatctctggactaactcggtagcatcactcttcgctgttggtcaatataaaccagatctgaaagccttcccgaccagagttctggatgctgcatgtactccgcactgcccggcatggatttcatctaacagctgcttcccaataaccgagtgaatgcatttcatgagaactcccgtcgcacctcttctgtacagtgtgccccctatgagggtgtagtgggctgactgccttgcgatgcgttctgctgcggccttgtcatccggttcttcttcatttttatgtacctgatgataggctctctccagtcattggggtttgactctggttggctcaaggtgttgcactcttccgtctgatctgagaggatactcggatgtgatatttcttggatgaagatcccgggtggagcctgagcctgactggatcctagcttcgacaatgcg

SEQ ID NO: 34259 - DNA, 437 bp, Zea mays
  unsure (1)..(437): unsure at all n locations
tacctgtcgaagcaacagcgcatgctatcacagcagctacagaccataccaataacttggcctttcgcatgctggggattggatatgattggacctttcaagaaagctcaaggaggttatacccacgtattggtggcaattgacaaattcactaaatggatagagttcaagcccattgcttctttaacctctgctaaggccgtggaattcatacaggatataatattcagattcgggataccaaacaacatcatcactgacttaggatccaacttcaccagctcagaattctttgacttctgcgagcaaaagagcattcagatcaaatacgcatctgtggcgcatccaagagccaacgggcaggttgaacgagccaacggaatgatattggaggcactcanganaagggtcttcgataaaaatggaaaaaattcgca

SEQ ID NO: 34260 - DNA, 476 bp, Zea mays
  unsure (1)..(476): unsure at all n locations
tctaagggagaacacattntaggattaacaaatgttcattttgataaagacagggtgtgtagcgcatgccacgcaggaaagcaagttggaacccaacatccacacaagaacatcataacgaccgacaggccgcttgagctactccacatggatctattcggcccgattgcttacataagcatcggcgggagtaagtattgtcttgttattgtggatgattattctcgcttcacttgggtattctttttacaggaaaaatctcaaacccaagagaccttaaagggattcttgagacgggctcaaaatgagttcggcttaaggatcaagaaaataagaagtgacaacgggacggagttcaagaactctcaaattgaaggctttcttgaggaggagggcatcaagcatgagttctcttctccctacacccctcaacaaaatggtgtaatagagaggaagaatcgaactctgttggacat

SEQ ID NO: 34261 - DNA, 376 bp, Zea mays
gcttcagtcttagcattaatctcggtcttagttagtcttatttagacagggtagtttgctatatcctgtgcatttatgtttgtcatgatgaactttgtttggtttggatctttgtaatgattgtcaccagagtgtgggtatcccctgcattttggttcacctattatggtaataaagttagttatatagttgggaaaccttttattccactttcctcttgatctgagaagttgtgtggtctgtgttggagatcaatgaagatgctcacctgttcagtgctgttgaggaattctcttctcttctcttatgctgcaagatttgccagatcagttctgatgtgtagttgcattctgcagatgtcacagaacaggcgtag

SEQ ID NO: 34262 - DNA, 467 bp, Zea mays
  unsure (1)..(467): unsure at all n locations
tctccttgtcgtcatcaaccttgacatagaaccactccgacttccagcctgctgcccatttgctccggtagctgattacaggaaactttgtggttttccgataagcaaaattatagcaaccaaaattgtcatgcaatccatcttttctagccttcgtctgatagtgcagttcgtgaactcgacaaaagctgtccgcaaacggctccaccgcttggcttcggagggcccagatataaacactaagcctaataatagcgttaggagtcaactgatgaaaatagataccaaatctcttcagtacctctgcaataatcccatgtagggggaatcttaatccagcctttagaaagctcttgaaaatgacaatttcatccttctccggctttggggtagtctcttctcccncgaagcgtaatagcttcttctgattntcattgaanaagcccgactttaccatcttggagaga

SEQ ID NO: 34263 - DNA, 256 bp, Zea mays
ccttcaggtgcctgaagctcgaaattcttcttttcaatagtagctgattgctcttttattttgctttctaaattttcaattataacctcgtgttttttggcttccagatcttggtgcattttcaaagctttgctcaatagcatactctgcacgtaaacaaccttcgttagacatgtcttcattattaaaaacacataaagtcaagggaaaagtagttcacctttgaaatggaataaaataaactaccaacgatatg

SEQ ID NO: 34264 - DNA, 474 bp, Zea mays
  unsure (1)..(474): unsure at all n locations
nganaggaggaacaagccccatgtattgagtttacaatatctagtctatcatataccctaaattactacagaagtacagataaaacaatttgactatcaaaactgcatgttagtacatgtaatggaaataataaagctaatcaatatcagattacaaagtctgctacctcatggcggttattctttccctattggttaattgcgctacgcccagctgtcttattgagttccatctccttcatggcccacctcatcctttctgcatctttcaacattccagcttcaaagtacatgttcgacatcaaaacatataatgtgacatcattggagcctgactggaagaggtccctggcaacgaattcagctagctcaagattaccatgaagcttacaacctgcaaggaatgcaccccacacacactngtctgggcacaacgacattcccctgatgatatcatatgcttcgataagtcta

SEQ ID NO: 34265 - DNA, 369 bp, Zea mays
gcttctcaagtgagggttcaatagggatttctgaaattcagaattctgaatttcagcccttgagccaaataccgagcatgttcaccttgatccctagctcaaatcctaatgaccccattgacaaaattgtgcctaactaacccctctacctcataccagaagatggcatcgggacgcgtgctctggacacgtcaaacccaggatcttctctctgtgcgtggcagtgagacaaacccgatttctcccctctctatctctcgatccagtcagcaaaacctgcaagcctccacatacaaatgacaaaggaatgttaggggaagagatctctcaacgggatcatggccataatctcaaagatttggagccaat

SEQ ID NO: 34266 - DNA, 428 bp, Zea mays
tgtctgtacgcatctgaggcatctgatgctgaggtgtggtctgctgctgctgctgctaaatggcggccagagtctgaccaatggcttgaactgcctgagtctgcatcagaaacatctactcgatggacatcgggggcggtggcggcaggtgctgctgctggggcacctcatcttgcggagctgcctgctcctgctgagcacaccttcctcctctgcgcctgtattctgacatctgcagaatgcaatcacacatcagaactgatcttgcaaatcttgcagcataagaagagagtatagaattctccacaacgctgaacagatgagcatcttcactgttctccagcacagaccaacacagcttctcagataaagaggaaagtggaataaaaggcttcccaactaaatagctaactccattaacatataac

SEQ ID NO: 34267 - DNA, 441 bp, Zea mays
  unsure (1)..(441): unsure at all n locations
agcttcnggtctcgtgctttacaactcttgtcaatatgaccagaaataacctgggaatcagatttaagaaccgcccttctaattcccattgcctttaacttccaaagacccaaaagcaaagcttcgtactcagcaatgttatttgtgcagctgaaatcaagtcttgctgcgtagcaagttctaactttagagggtgcgaccaacacagcagctgctcctgccccgaaggttccccaagaaccatcgcagaatactgtccaaacttcggcatctttactcgcttcttcttcctgagcccctggcgtccagtcagcaatgaagtctgctaacacttgagactggatcgaagatctatgcacataatcaatgcaaaactcattgagttccgcagcccattntccaacccttccagtagcttctctatttcttcaataagtatcc

SEQ ID NO: 34268 - DNA, 456 bp, Zea mays
cattacggacctataaatctcagcttgtcaaagcccgctggaattaatcttcggagaaacccgttctctctgcaatatgacacccgaaggtccaacacaacaagcaatgagtgaattcagaattattgcagagcatatcagcacaagggacctggttcaagagtttttagcattcaaagtttttcccagtttgagagaatgggaaatgccgaagctacagggggaaaagaaagaaggtgaactcgtacgtttaccttactatttcaagtttaaaaagtactttaaagcaccttgccaagagtggctagatacgattgaagcaatgtgtaatgaaatacttggcaattattccaaaaaagaagatcaattgatgaccgcagccttcggcactcgtccgaaacgaaggctaaatcgagtgttggacgctttgggtttcgaatacccagactacgaaaa

SEQ ID NO: 34269 - DNA, 409 bp, Zea mays
  unsure (1)..(409): unsure at all n locations
agcttcgtcttgaccatgcttctgtatacccgcaacctgatttctgattccgaagatacctgctcgcatacttagagagcattgtcaagtcacgtttttgaggaccttcggaagccgaaggcccccaacatctacgtttcttttccgcactttgatttattgtaaagactatgtggatgtctcagacatcatgatgtaatcgactattatttccctttntaatactatttgagcactgtgtgatgatgtccattttatgtaactgctgtgtacgtgaattgctgatcctggcacgtacatggttcgcattcggtttgccttctaaaaccgggtgtgacataggtggtatcaaagccgtgctgactgtangaccgctaacctagagtagaatggtcgttctaaggactat

SEQ ID NO: 34270 - DNA, 426 bp, Zea mays
  unsure (1)..(426): unsure at all n locations
tctncaagttagaggtggcttacatgcaaagtattgcatcgtgggtcctggccgtagccccttgatcatggcctcaatgacgatctcattgggcaatgtaggtgcttgagctcttagccgcaagaaccttcgaacatatgcctataaatactcctcctagtcttgcgtacactaaaaaagagcctatgcagtgaccgacttcatttggaaaccctaaaaactagccactaacatatcctttagcttctgccatgacgtaattgtccctggccaaagagaagagtaccaagtttgagctacgcttttgactgccatgacgatggatttcaccatgactgcagtatttcccccatatgaagatatggatgctttgtagctcatcaagaattgcatcgggtctgagtgcccatcatacatangaagctg

SEQ ID NO: 34271 - DNA, 437 bp, Zea mays
  unsure (1)..(437): unsure at all n locations
agctngngaagaatcttcataccaacatggtctattctgcggcgctagagccaacccatgttagtcatagatagtaagcaagtgacgagttcagctttattgaaatcaactaagtatagctgaccctctaacactcccttaaatgctactgaatcatcacttcttctaaagacaggaacacctatatctgtaagaagacagatgtaacccattttacataatggagaaacagaaagcaaattgtaatctaaggaatctacaagaaaaacattggaaatagaatggtcatgagatatagcaattttacccaatcctttgaccaaaccttgatctccatccgcgaatgtgatagctcggtggggatcttgatttttctcatatgacgagaacatcattttctcccttgtcatgtggtttgtgcacccgctattccatga

SEQ ID NO: 34272 - DNA, 353 bp, Zea mays
tggtgccaatggagaagcagaaatccttgaaatcttggctgtcctattgcttgccattgtcaactgtgagctcggacgggactccgaagcggcaaacaatgttttgccagaagaatttctgagccgtcttccatgttatcgtggatacagccctcgcctcgatccatttggtaaaatactcgacggcgacgaaggtgaacttgaggttcccctgagccatgggtaggggcccgacaatgtccaagccccagcgctgaagaggccacgtgtgggcgattagctctgtaaatcgcgaagggctccccaagcgtggagaaaacttctggctagcttcacaagaccttgtgacccga

SEQ ID NO: 34273 - DNA, 417 bp, Zea mays
  unsure (1)..(417): unsure at all n locations
agctgtgaaggttcttcatccncacatgtgctaagcggcgatgccacagccagcccatgctagtcttagctattaagcatgcatctagaccggcctcctcttttgcaaaatcaactaaataaagtttgccgtctaatacacccttaaaagctagtgaaccatcacttcttctaaagacagacacatctacatttgtaaatagacagttataccccatgttgcataattgactaacagatagcaaattatatcccaaggactcaactaaaaacacattagaaattgagtgctcatttgagattgcaattttacctaatccttttaccttgccttgattcccatcaccgaatataattgaatcttgggaatccttattcttgacgtaggaggtgaacatcttcttctccnccgtcatat

SEQ ID NO: 34274 - DNA, 110 bp, Zea mays
gtgtgtggagtcgggagaagatatgatctctctgatgtgtcttatattgaatgctatagctcttgtaaggtgtagaagtgtagaaacttggatgctattgaatgtggggt

SEQ ID NO: 34275 - DNA, 408 bp, Zea mays
  unsure (1)..(408): unsure at all n locations
agcttctgctgtttgggtcgcaccgaatggtcaatccccaagctgtgctcaattatggctcggctgactccgactagatcgagggcagaccaagcgaagacatctttattcttggccaggcagcagagaagtctctcttcttcaagtgaggtgaggtcttcgctgatagttactgtctgcttgggcgtggcctgatcgagggggacagtcttggtcccgtcttggcactgcaactgtgccttgttgtgctgcttgtcggttgggctggccggcgcanggacctcgcgctgggttgtgagacagtgtatgtttctctgaccgggcacgaagtcccgctcaatgttgcgcgccgtctgctggttgccgtaaactgtgatggcgcctagcgggcctggtatcttcatacat

SEQ ID NO: 34276 - DNA, 439 bp, Zea mays
tgagttaatttattacagaccagactaaaagtgagtgctgagtagtaatattatacaaaccagggaggcacaaactcctcccgagaagttataaacaaagatcctaagtggaggaccgagtcctcccgcacttcagtcttgtttttcttctttcggaaccaccttggcacagaagcagcaaaagtctgctacttcctcacctaaaaacaacgaagggataaaccctgagtatggaattactcagcaagtcttacccgactaaagaaaagactctcaagggtatgctggttatgtgggagtcaaggtaaggcttttcaatattcaaagactctgttttgcagaaatgcttactaaagtggatccttaaaaatccaattttatttgtcaagttaggtaaaattacctgcactagagttctttctaccctatttcaatcact

SEQ ID NO: 34277 - DNA, 419 bp, Zea mays
  unsure (1)..(419): unsure at all n locations
agcttacataagaattgataaataagattttgaatcctatgatatagntttctccccctaaatatgtgcatttcagaaaataacacttttgtactcaaatgccaaaagcacatatttgggtcaaagtatggagacaacttatatcatactattcatgggatgcagtgtgtcataaaataaacgtgatgctcatgacatagtatgcactcatcaattttctacatcttatgtttttcttatgacttccctttttgttaattatttctccccttttaaagtcttataacacttagttacataagactaaaggtaagctttaatgcaaaatttctcccnctttgtcataaatctccaaaaaagatacaaagaatataatgggtagaaattatgattaagcaagatgtgaacacactatcatg

SEQ ID NO: 34278 - DNA, 386 bp, Zea mays
ctatcatactcagctatcctggcaaacccaacctaaatatatattcatattctactaacaagccacgtataactaggaaaccctaagttactaactaacttaatttcctttcactcagcataatgtgtactaaatcctgcataatcatggcatacatattcttattcattgcattcgatagattgcaacctcgctgacggagagtacgtcctcgtgccagagcaaggagctgctcacgaggtagccccggatccagcaccagagcctgcaccagaggatctgcctgccccagctttggaaggcaagcctcggttttatgcataacctgtttattatgctattttactacacttaatgattgtaggattgaatgtgcacttaagtgt

SEQ ID NO: 34279 - DNA, 453 bp, Zea mays
  unsure (1)..(453): unsure at all n locations
atagatctatgataggatctctactgtatttatgtgcatctagaccagatatcatgcttagtgtgtgcatgtgtgcctgttttcaagctaacccgaaagagtgtcacctagtggctgttaagagaagtttgagatatctagttaacacccaaaacctaggtctctggtatcccaagggctcatttttcgatttatttggctactctgactcagactatgccagttgcaaagtagatagaanaagcacctcggggacttaccaattccttgggcggtccctggtgttttggagctccaagaagcaaaactgtgttgcactttccactgctgaggccaaatacatcgctgctagtgcttgttgtgctcagttgctatggatgaaggaaaccttgagagaatttggctgtgagtttaagagaattccactacttgtgttgacaatgagaaagcgcc

SEQ ID NO: 34280 - DNA, 437 bp, Zea mays
ggaagccatggtaagtagcataggctacataattgcgaattgactcatgcctagctacgggtgcataggtttcaccgaaatccaaaccttcgacttgggagtataccttggccacaagccaagctttgttccttgtcaccacaccatgctcatcttgtttgttgcggaagacccatttggttcctacaacattttgattaggacgtggaactaaatgccatacctcattcctagtgaagttgttgagctcctcttgcatcgccatcacccaatccgaatcttggagtgcttcctctaccctgtgtggctcaatagaggaaacaaaagagtaatgctcacaaaaatgtgcaacacgagatctagtagttacccccttatgaatgtcgccgaggatggtgtcgacggggtgatctcgttggattgcttggtggactctt

SEQ ID NO: 34281 - DNA, 379 bp, Zea mays
  unsure (1)..(379): unsure at all n locations
gcttgcagcaacgacagccaagttgtcgaggcccacaaaaggcaccggcttttcggaagccacagatgacagcggtaccacggccacaggtaacaacggcaccggacgttgcaccccgcacgacttcgccatgcactctgctccctctccgatagtcgccgaggttggaccggcagcaaatctcttggcgccagaggaggaccaaacgatatgtgtggatcgacgctggcagcttcttggcttcgtccgtgatgaagacgtttggnggaggaccgcatgggtaggcagatatgcgcagggggtcatggccttgcttttatccacgacgtgggtggaggatnggattaagcacttcgtgaggttgttacgaatgggatgc

SEQ ID NO: 34282 - DNA, 473 bp, Zea mays
  unsure (1)..(473): unsure at all n locations
tgcctaggctcaagttcgccgctaggaatccgctggtgcctcatagttgttggctcgtcgccggcgccagctaggctcggattgggggggatctgatgtccgccggtcctgcctgtggtgtgggagccgcgggcgtactgggaagacggttcggggcggacgaacctcgtcgtcgtcgtgaaggttcgccgaanagccgcgccgccgcgtggactgtggtactgcaaccccagattgaggtataaactcaccaaccagtttgcccttccctaagcatggcgcaacgttgatcgaatttggaatttgggacttgattcatggatatagtgcgctggccgtagttgccgccgtgggtccgtgcttgcgctgctgtggttgtgcctggtacgcctatggcgcaccanattgacgccaccacagtattcgccatgggctcctcatcgttntgcatctatcggtcgtgaagattgggt

SEQ ID NO: 34283 - DNA, 432 bp, Zea mays
  unsure (1)..(432): unsure at all n locations
agcttgccttcgcctcagtatatcacccgcagtctaactcagttgtggaacgcgccaatggaaaaattttcacagctgtcaaaaagatgctcctcgacgaanaaagggcaggtgagccgatttgttacccgaggcggtctgggcgctgaacacgactgagtgcaaggcgaccgggttcacccctttccgccttctatatggatcggaggccatgaccccacaagaaataaaacatgggtccccgcgaacagttccgtcagccgtccccgacgtggacgagcccacttcgaaggatctcatcgatggagaccgagtcttcgccctacaggctctaaataaataccaagcccagacaaaagcatggcgcgaccaggcagtcatcccgagggaattcagcgaaggggacctcgtactcgtccgaacagctcggac

SEQ ID NO: 34284 - DNA, 473 bp, Zea mays
  unsure (1)..(473): unsure at all n locations
ntagttgatntagagtcccttgttggatgatccccaggtttatcttctccatttcttggcacacagtgttctcggaggtcttcgccataagacagtggcaggaggtcttacgacttagtgcatctgccaccacattggccttgcctgggtgataatggatctccagttcatagtctttaatgagctcaagccatcgtctttgcctcatatttaactctgactgggtgaagatgtacttcaaacttttatgatctgtatatatgtgacaaatatttcccagcagataatgacgccaaatcttcagggcatgaaccacagcagctagctccagatcatgagttggataatgctcctcatgtcggcgcaactgccttgaagcatacgcaattactcggccctcttgcattagtacacagccgagcccactgccagatgcatcacaatatacatcagaaggtttagtgatgtccggt

SEQ ID NO: 34285 - DNA, 421 bp, Zea mays
atttatgttgaaggacatggcgttagatggatcatgacaacgatcgatgacttgaccgatatagttgacaaatttgagcgggctgggtggcttgaaccatccaatgggatgcaatcaacaggaatcccgtctggacgccgggttgatgacggctaacagttgttgttcgattgatggcattagggcaatcaatcaaacatgacgaattgatttgacacggtatagctgaaagacatcgcgagtgaagacgacggttttgactcgcggccagatctacggatggaactgcaacgatggtggcaaaatccatggtacacttcgcttctctatggatgtgggcatgtggcttgttcgaaggttacgtgaactgtattcgatcagcgatgcatgatcccggtggctcacaaattggtgtgcacac

SEQ ID NO: 34286 - DNA, 461 bp, Zea mays
  unsure (1)..(461): unsure at all n locations
ngaagccatggtaagtagcataggccaataatatacgaattgactcaagcctagctacgggtgcataggtttcaccaaaatccaaaccttcgacttatgaataccctttggccacgagtcgagctttgttccttgtcaccacaccatgctcatcttgcttgttgcgcaagacccacttggttcctacaacattttggttaggacgtggaactaaatgccatacctcattcctagtgaagttgttgagctcctcttgcattgccaccacccaatccgaatcttgaagtgcttcctctaccctgtgtggctcaatagaggaaacaaaagagtaattctcacaaaaatgtgcaacacgagatctagtggttacccccttatgaatgtcgccgaggatggtgtcgacggggtgatctcgttggattgcttggtggactcttgggtgtggcgggctttgttcttca

SEQ ID NO: 34287 - DNA, 389 bp, Zea mays
  unsure (1)..(389): unsure at all n locations
tgcagcttctgtctgatgtattattcctggtcaaatggaggagtaccatgtatgggccacacttcggactgccatgacatcgacgctgcctccatatgaggatgttattgcctcatagctcatcaagaattactttgggtctgagtgcccatcgtacatgggcaactggggtggcttgtangattgtggccatgggatagcctgtagctctgccaccaaaggagaagcatcatcaaaagtaaagttagcatgatgaaagttatcgtaccattcatctttgttgaatgaactctcttggcgaagctccctgtgctgaggccttcagtcatggtcatcttgagtaagatgacacatttcttcagcagctttgtcaatctttctctgaagat

SEQ ID NO: 34288 - DNA, 472 bp, Zea mays
  unsure (1)..(472): unsure at all n locations
ntagtgattagagagagtgatttgtcgtgttcatttgagctctttctctnggatcgcttcttttctttttctcattctttcttgcgatcatctcaattgtaatcaaggcaagagacaccaattgtgtggtggtccttgcgggaagtttggttcccatttgattgagaagagaagctcactcggtctgagggaccgtttgagagagggaaagggttgaaagagacccggtctttgtgaccacctcaacggggagtaggtttgcgagaaccgaacctcggtaaaacaaatccttgtgtgacactctttattcgctcacgatttgttttacgccctctctcggactcgttattatttctaatgctaacccggcttgtagttgtgattaagtntgtaaatttcagattccccctattcacccgccctctangcgactntcaattagtatcggagctaggcacttcatattgagtct

SEQ ID NO: 34289 - DNA, 426 bp, Zea mays
  unsure (1)..(426): unsure at all n locations
agctntgatacacggattaaacatcgttctattctgggtgtcaagagactgatggtgtatggggattctctggtagtcatcagtcagataaacaaggaatgggattgttcaagtgattcaatggggagatactgcgccactgtccgaaagctagaagataaattcgaaggtctggagtttcatcatatagaaagagatcggaacacggcggctgatatactgtccaagctcggatccggtcgaactcaagtcccgcccggcgtcttcgtgcaagagatccttcagccgagcatctcgatggatcaaatagaagagtgcaacatcatagaccaacccgagtcagactctgatgactggaggcaaccgattattaagtatataaagaatgaagaagagccagatgacaagaactcagcagagcgcatt

SEQ ID NO: 34290 - DNA, 411 bp, Zea mays
acttggattgctgatatccagtgtaccttcacagtacaggtgcttgttgaatacctgaggctctgggagtcagttgatggtgttaccttgcaaccttcagtttcagatcagcatgcgatgaaggacgattattgaagaggtggactggcaaggttaatgtaaaagaagaaggcagtactggttcagaagatagagagcggattgaaaatgtgggttgaaaatgtggtaaactgtgtcataggatgtgcatctactgggatatcatctattgtctatagacatgagctgcaactgcaaccatattaattatcagctgctagagggcaaactggcaagatagaacatataaacttaacacaatcatactaacagaaacatatagagctctctaagatctgtgactaccattga

SEQ ID NO: 34291 - DNA, 439 bp, Zea mays
agcttggctggattggttacggggagagactaaagaatctcttcttgattatagctcaacctgacggttctgagttcagtgttgagaattgccttgtgttgggttaaccaattcatacccaaaattacatctatatcctggcctttcagaacaatcatgttagcaggaaagttccgtccggccattgttactggcacttcataggccacttctctagtaaaaatatgtcccccaggtgaatgaattttaaatccctcttttgattcatggcatgcaatgtgatgttgctccacaaatttcttgctaatgaatgtatgcgaagcaccagaatcaaaaagaataattgcagggtgactggccacgggaaacgtacccatcatcaccggctctccttccggtgtagtggccacttgggtgtagtatacaccgcgcccgtctt

SEQ ID NO: 34292 - DNA, 436 bp, Zea mays
ctaagcttctaagggagaacacgtgataggtttaactaatgtgcaattcatataagatagacctgtgcagcttgtcaagcaggcaaacaggtgggaagctctcatcacaccaaaaatgtgatgaccacatcaagacctttggagatgcttcacatggacctctttggacccgtcacctatctaagtataggaggaagtaagtatggtcttgttatagttgatgacttttcccgcttcacttgggtattctttttgcaggataaatctcaaacccaagggaccctcaagcgcttcctaatgagagctcaaaacgagtttgagctcaaggtgaaaaagattaagagcgacaatgggtccgagttcaagaaccttcaagtggaggagtaccttgaggaggaagggatcaagcacgagttctccgcttcctacacaccac

SEQ ID NO: 34293 - DNA, 439 bp, Zea mays
agcttctaaagggagaacacattgtgggattaacaaatgttcatcttgagaaagataggatttgtagcgcatgccaagccgggaagcaagttggcactcatcatccatacaagaacatcatgacgactgacaggccactggagctcctacacatggatttattcggcccgatcgcttacataagcatcggtgggagtaagtactgtctagttattgtggatgattattctcgcttcacttgggtattctttatgcaggaaaaatctcaaacccaagagaccttaaagggattcttgagacaggctcaaaatgagttcggcttaaggatcaagaaaattagaagcgacaacgggacggagttcaagaactctcaaattgaaggcttccttgaagaggacggcatcaagcatgagttctcttctccctacacggccacaac

SEQ ID NO: 34294 - DNA, 453 bp, Zea mays
  unsure (1)..(453): unsure at all n locations
ngatgccttgaagctngaatcgggtagagaaaacatcatctttctaatcttgctacacctanggatgtgagatggagttcacatcacataactcttgtccgatagaagctaatgtgggacttaggtattgaggtgcttgaaatggttgataaggatatgtgtgatccttctctagctaaggggttgcttgagaaaatggagccttttgagtttgttttcattatgaagcttatgtaaaaattgtttgctatcacaaatgagcttttgcatattttgcaaagacaagatataaatatagttcatgctatagaactaacctaagatgtaaaagatcaactagccacattgggggatattgngtgggatcatgtgtttgatgaggctaagcaatattctgagcaaannaatggtgtcaaatatggtgaatgacatacctgaaaggatcacgatgcc

SEQ ID NO: 34295 - DNA, 422 bp, Zea mays
  unsure (1)..(422): unsure at all n locations
agctgactcaggtatccacacattaatccttatattcattttcccgtctcatggacaaggcatcctccctggatccaagtccatagactaacatatatcccattatcaagatgaatacaatcaattcctgacctcgcgcgagtgctagaaaaatcactcgacttctaccgagatcctgattagcaagcagctactcaacctagcatactagtattcatctcaaaaaggaatcctaagttcatgcaactagaggtttcaagcaactcctacacttaagtgcacattcaatcctacaagcattaagtgtagtaaagtagcatataataatacagttatgcataanaccggggctggccttcaattgctggggctgcggngagatcctcaatagcagcctctgaagcctgctcctggtcctcctc

SEQ ID NO: 34296 - DNA, 375 bp, Zea mays
  unsure (1)..(375): unsure at all n locations
tctaaagggagaacacgtgataggtttaactaacgtgcatttcgaanaagatagaccttgtgcagcttgtcaagcaggtaaacaagtgggaggagcacatcacagcaagaatgtgatgaccacttcaagacccctggagctgctgcatatggacctcttcggacccgtcgcctatctgagcataggagggagtaagtatggtttagttattgttgatgacttttcccgcttcacttgggtgttctttttgcaggataagtctgaaacccaagggaccctcaagcgcttcctcaggagagctcaaaatgagtttgagctcaaggtgaagaagataagaagcgacaacgggtccgagttcaagaaccttcaagtgga

SEQ ID NO: 34297 - DNA, 450 bp, Zea mays
  unsure (1)..(450): unsure at all n locations
agcttgacattgtctccctggtggaagccaatgccatcattaatgccagggtgtctcccactataaagcatactacaagcaaatttaattttttcattctctaattcatgctcggcaattntagcatctagtttagctatatgatcattttgttgtttattcagagcaaggtgatcatgaatagcatcaacattaatatctctacatctagtgcaaatagaaacatgatcaaccatagatgtagagggtttgcaatcatttaattcaacaatcctagcatttaaaatagcattctcatctctaagattggtaatagcatcattgcaaacatttaaatatttagccctagcaattaatttttcattctcaaacttaatgctagcaattaaactagcattatcatttctaagataacaattgaatcatcacaaacatttgatttcttcaacc

SEQ ID NO: 34298 - DNA, 381 bp, Zea mays
agagcccgccgctgcagacatgggcgacgatgatcagctgatcggagaagaacggccagcacgcactagactacagggctgcctccgacgtcctgttgcaatagatgggacgaacaaagcactagcccacctggctttgccaaccggctcgatacaccccttggagcggcgaccgggcgtctaccagcatgtccgatcggagccgtttcagcatgaactcggcgaactgctcgtaatagtaacagctagataacggcgagtatagcaacgccaagctcgcagccgattcgcatgaaagacaagcgctgcgacggacggacagatccgtcatacagagaacgtcacggtgaaagacgcgacaagcatagccggcaagattca

SEQ ID NO: 34299 - DNA, 481 bp, Zea mays
  unsure (1)..(481): unsure at all n locations
ttcaatactcagctatccttnggtcatttatgaacttaccctaaagtatttatgttttcttaacttgggtaaagttttacccctataatccccatttagggttaagttccttaaccagggtttcatttgcaaaacattaaaacaatacaacttgtttgaaatttttgcctagtgaatgcactctatgtgtatcaaacatatgcaatgccaatgctatgatgtcatgctcaagttttagttatagtaacaccaggggtgttacatccttccccccataaaagaatctcgtcccgagattaaaaatcctatggtaagtaatggtaaaggaaacacatcacatttttatttccttatttttggtacaagacaggggtgatgtgggggttacttctttattacaacagctatacaggctttacaatntacattaggctaaaaagcctgtgaaattcttatctaagaagtcttgggtttcctatgt

SEQ ID NO: 34300 - DNA, 404 bp, Zea mays
cttcattcgagcagggggtcattattttacaccataaccacaccccaacagcaaggctgcaacatgaagcatttcaggcagaggcggatctaaagggggggcaaagtgggccatcccctcccccccctcaattttgtacatccttttatgtctaatgattatttagtattaagtgtagaaaaaaacaaagttttagatagtataaagtcttgttctaaatctctaaaactaatagctagttgctaaaattaggtgagaggtttagaatggatcaactaattgttagctatacccctcaaataagtattagttgttagatgacccaacccagctaaaaccagttaacagttagctctagaggttagaacatggcctaaaacaaccatgttatgagcctgctcgtc

SEQ ID NO: 34301 - DNA, 435 bp, Zea mays
  unsure (1)..(435): unsure at all n locations
ctcagcttctnagggagaacacgtgataggtctaaccaatgtttatttctaaaaatatagaccttgtgcagcttgtcaagcagggaaacaggtgggaggctctcatcacaccaaaaatgtgatgacaacatcaagacccctggagctgctacatatggacctcttcggacctgtcgcctatctgagcataggaggaagtaagtatggtctagttatcgttgatgacttttcccgcttcacttgggtgttctttttgcaggataagtctgaaacccaagggaccctcaagcgcttcctcaggagagctcaaaatgagtttgagctcaaggtgaagaagataaggagcgacaacgggtccgaattcaagaaccttcaagtggaggagtttcttgaggaggaggggatcaagcacgagttctccgctccctacacacc

SEQ ID NO: 34302 - DNA, 455 bp, Zea mays
ctgatttagagtcccttggtgaatgattcccacgtttagcttttccatttcctgacacaaagtgttctcggaggtcttcgccataagacaatggcaggcaaccttacggctcaacgcatctgccaccacattggccttgcctgggtgataatggatctccagttcatagtctttgatgagctcaagccatcgtctttgtctcatattcaactctgactgggtaaagatgtacttcaaacttttatgatctgtatatatatgacagatatttcccagcagatagtgacgccaaatctttagggcatgaaccacagcagctagctccagatcatgagttggatagtgctcctcatgccggcgcaactgccttgaagcatacgcaatcactcggccctcttgatcatacacagccgacccactgccagatgcatcacaatatacggtcaaaagggttt

SEQ ID NO: 34303 - DNA, 477 bp, Zea mays
  unsure (1)..(477): unsure at all n locations
ggacttcagttgtacaaataatattgctaaatacgaatcacttctgttgggactntggaagttaaaggcaatgggaataaaaagggtcatccttaaaactgactctcaagtcatttctggtcatgtggacaaaactagtagggcaagaggtccgaagcttgaaaaatatctggatacagttcgaaggctggaggcttcttttgaaggttnttctgtcaagaatattccaagaggagagaacgagcatgcagatttgttagccaaatcagcggcacaggggctccctttaccttcggaagtgttttttgaaacaataaaagcaccttcggttgaacttatggagagggcagtgcttacaatttcccctgtacatagtgaagattggaggactgaaattatatctttcctccaaggcaattgtctttcggatgacgaagcttataataagagaatggaagcaaggacaagaccgtatgt

SEQ ID NO: 34304 - DNA, 407 bp, Zea mays
agctttcttcgtaggacagtgggctcaagcgttttatgagaggtcatatcggtctcgtcctctattaaagtatgtgtagagaagggtataatggtaggggaagaacagagacagccgccaggaagagcagaggtgagttttcttcagatacaagtttttgtttgttttcttgttaccctctctctccacactcgcattacatatacttggtaagcaagaagatacttagcgccattctggcccactaagccttacattagcccgtcgggcccgttcacttttacgtggcccaggtttctttggttctgtagtctttccaccatcttccttgtccgcaggagcctgacagcttgcttcctttgacatttgatcacccagtgtagtaatggtagtgctgacattccccc

SEQ ID NO: 34305 - DNA, 475 bp, Zea mays
  unsure (1)..(475): unsure at all n locations
taagaaactnntttcacggatcaagctcgttacgacaaacgatctatctccgcgaaaggggctactgttgggtctatgcttcgtcgccgaaggtcttatataaagaagtgatcctctgatgaagctgttcgtacaagatagccgatggtacctcttcatcaagcttcggcattacaaaccgacttagagatagaatgaccttccagtccataaaggtctgagtcaatgttgtaagttcttataaggggcatacttgtgattcctcacaggctgcgtcctgtgcctataaatagtgaacagtactccgttactgttcacgcattctgattattgcaatcgcatctctcggaatacaacctttgtcaaggcatangtatcattagatttaatgattcaatatattaagcgaatatgatataatacatcttgtgaattattcatacattnttatatcttttactttgcattatcttac

SEQ ID NO: 34306 - DNA, 419 bp, Zea mays
  unsure (1)..(419): unsure at all n locations
ctgcagcttggaaggtcttattcccactgtgcttagctgttatgccacagccagcccatgctagtcttagctattaagcatgcatttagaccggcctcttcttttgaaaaataactaaataaaggttgccgtctaatacacccttaaaagctagtgaaccatcacttcttttaaagacagacacatctacatttgtgaatagacagttataccccatgtagcataattgactaacagatagcaaattataaccaagagactctactaaaaacacattagagatagagtgctcattagaaattgcaattntacataacccttttaccttaccttgattcccatcaccgaatacaattgaatcttgggaatccttattcttgacgtaggaggtgaacatcttcttctcccccgtcatatgg

SEQ ID NO: 34307 - DNA, 466 bp, Zea mays
  unsure (1)..(466): unsure at all n locations
gcacgtcgaggatatggagatctcgggtgtcatgtctccataggaccgcctcagtggcagacattggaggttccaagagctacctttgttgtgtccctgggcccacatgtcggggctcagtacctttgtgcatgccccccttcagctataaaaggggaggcatgcggcgttactagggatcgaaccctaggctcccttagacactcacaagttcatacaagctctcaagcaatacatcacacagtggagtagggtattatgctccggcagcccgaaccactctaaaccctcgcgtgctctcgtgtgttcatccactaatctcgcaacaagcaaaacgcttaggcccctcctcttcttatgatttatggcgggtgcaatccgccacccggccggagagatttcctctccgacaaagcccataatatttagaanaaagaatagttaatatttttatagtagaaactct

SEQ ID NO: 34308 - DNA, 272 bp, Zea mays
ggagatcatgtttatcttaacgtatcacccaccaagggtgtccaaagattctggatcaagggcaagctaactcctcgctacattggaccctatgagatcaaagcatgttgtggacccgaggcctaccaattggaattgccacctcacatgtcagcagttcacaacgagttccatgtatctcagctgcggaaatgtgttcacctacccactgaagtgctgtcagaaccagaccttgagatagaaccagacttgtcctatcaagagtacaccgt

SEQ ID NO: 34309 - DNA, 402 bp, Zea mays
  unsure (1)..(402): unsure at all n locations
agctctacacctagtcagcgggcgacactgaatgaccctcatcttttttctttactttggtcaacttgattttctacgcctctttgtgtttcttagccaactcatccaccttcgacaaggaaaatataaggactcaatactagaagaataatgcaaaaataaatgaaaggtgaataaccaacttgttggggccttggtcttttaaaggtccttaaaaacacgtttaaccattggttgccaagtattataggagcttcggcactagaacaccttcgatgcaggacattagaggggcgacgaagctaactttgtcatagcgacacagggagacgatgcaaggaagagtcatcctgaatgctaaaagcanaagacaatgttgcccttgcattatttgtaaatcat

SEQ ID NO: 34310 - DNA, 417 bp, Zea mays
  unsure (1)..(417): unsure at all n locations
tgananagttgaggttgcctcgactgtatcttttggtgcttatgttgatcctagggcaatagatcttgccatgagaatcgccgaaaggatgttcctcaaaatgaaggaagatgaggcgaagaacaaagttgaagaagaaaatgatcgatggagaccaaacgacgaatccacctcttcacaaggttcgtctttcaaatccacttctcatatgtgctttattgctaatgggagtgacagtgaaagcgaaagtgaggatgaggaggagcaagaaagtgatagtgaagatgaggatgatcttcaacaattcttcgctcagctaagcaagaaacatcggatgagcttgctcaaactcatgaaaagagcggaagaacaaaaagaaatgcttcataagcaagaagacttcctcatcaganaaat

SEQ ID NO: 34311 - DNA, 415 bp, Zea mays
  unsure (1)..(415): unsure at all n locations
agctntccattgaccatgctctttgcaccatgtctttcatccatgcctctacctttgtgaagagttattataagggatggactccatgatgatattgattgaggtattccctgtgtgtcttcaatatcctcccatagttaggaaaatattgttttcctcccaaacatgcttgaataaaacccaattgttcttggagataagaaaacttgaccctgaaattaaaagtataacagtctgtcagttgactagacatgtaatgagctattcagagccattgagaacacatgaacacattgagttgatccaataaatcaaacaaaatcggtagcatatataccaatatctaaatcacatagcatggaaggaacaatatgaccatgtctttccaaanaatgaaatcaatgcacaagacact

SEQ ID NO: 34312 - DNA, 447 bp, Zea mays
  unsure (1)..(447): unsure at all n locations
tctaaagggagagcacattataggactaaccaatgttcattntgagaaagacagggattgtagcgcatgccangcaggaaagcaagttggagtccatcatccacacaagaacatcatgacgaccgacaggccgcttgagctactccacatggatctattcggtccgattgcttacataagcatcggcgggagtaagtattgtcttgtaatagtggatgattattctcgcttcacttgggtattctttttacaggaaaaatctcaaacccaagagaccttaaagggattcttgagacgggctcagaatgagttcggattaaggatcaagaaaataagaagcgacaacgggacggagttcaagaactctcaaatcgaaggcttccttgaggaggagggcatcaagcatgagttctcttctccctacacacctcaacaaaatggtgtagt

SEQ ID NO: 34313 - DNA, 221 bp, Zea mays
  unsure (1)..(221): unsure at all n locations
tctcataacacccaaaatgtgatgactacatcaagacccttggagatgcttcatatggacctcttcggacctgtcgcctatctaagtataggaggaagtaagtatgggcttgttatagttgatgatttttcccgcttcacttgggatattcttttgcaggataaatctgatacccaagggacccntcagcgcttnctcaggagagctcaaaatgagtttga

SEQ ID NO: 34314 - DNA, 470 bp, Zea mays
  unsure (1)..(470): unsure at all n locations
tacggacctataaaactcagcttatgcaactgcntgcaaaaatgagaggtgaactgagtgtcttgatctaatactatcttcttcgggatgccatgcaagcacacaatccgagacatgtatagtttggctaacactgcactgttgtaggtggtcttgactagtatgaaatgggccacctttgtcaaacggtccactactacccagatggagtcataaccagtacgagtgcgaggcaaaccgactataaagtccatcccgatctcatcccatttccactaaggaatctgcaatggctgcaaaaaacctagaggtctctgatgttctactttaatcctcggacaactgtcacatacagccacatactctgctatctcccttttcatactgtaccaccagaatcttttctttaggtcttggacatcttctcactaccagggtgtatagactatgttgtctcatgagcttctttg

SEQ ID NO: 34315 - DNA, 294 bp, Zea mays
tgagctgcagctatgggactttgaaagaagtcaaatcctcacatatcttagaatactcatataaaaatactggttggagtttatacttgcattgacttgtccaaagtgctaacttaattaccctagggtcattgggttcagggtcttttaagttgggacttagggtttggctataaaacataatggcacctatacattccatgctataatatatgttggctacttcatcaacctactaggtagtcctactaggtaccacctagcatatacactgtaaattacatgatgcttagg

SEQ ID NO: 34316 - DNA, 479 bp, Zea mays
tctcctgaacaagtgttgcacttaccgctgagtgcgaagctgcctcatattataacaaaggagcccctggcgtaggtggagttagtgttgacaaatctatcaaatactgtttcagctcttcaaaggccttatgctggattggtccccattgaaagacttcggctgacttcagcacttcgaagaatggtaagtttctttctgctgatctggatatgaatctattgagagatgccagccttcctgtcaatctttgagcccccttttttgtacttggtggctccattctaagtatagcttcgattttacttgggttggcctcaattccctttgttgaaactaagcaaccaagaaatttccccttctttactccgaacacacattgttctggattcagctgtagaccagcctgtctaaaattagcaaatgtctcttgtaaatcagcaatgtggttatcctgcttcgtgctctctacaatgata

SEQ ID NO: 34317 - DNA, 435 bp, Zea mays
  unsure (1)..(435): unsure at all n locations
gatctcgtanggttcaatgtaacgaggatctaacttgcccttgaccccaaatctctggacacccttggttggtgataccttaagataaacatgatctcctacctcaaactgtagaggcttcctcctcttatcatgatagctcttttgcctggcttgagcagcttctaagttcttcttgatgatcctgacctttgcctctgcttcaagtaccaaatctggcccaaaaatttccctctctcctgcttgagaccaattcagtggggtcctacaccttctcccatacaatgcctcanagggtgccatcttcagactggactgatagctgttattgtaagaaaactctgccaaggaaagacacttgtcccaatcctttccgtagtgtagtgcacatgcccgcaacatgtcttccaaaatctgattcacccttttcttgtc

SEQ ID NO: 34318 - DNA, 380 bp, Zea mays
  unsure (1)..(380): unsure at all n locations
tcgaggcagtagcaaagttcttttcggctgtcagcgccaatgggcatatgcgccaggggcttcnggggaaggtttggagatcagccaagaaaaatttactgcctattctttggtgcatacaagggccatagcaccaggatgtgccacgttaccatccagaagcagaaggagatagcagaagcagcagcacaacaaagtcagccgaagcaggtcatgcatacaacttcgtatcattcgccttatattccagaatatgtaggcaaccaccctgcagcttctgttgcttcggcaagccaacctcaagcatcttggcaacagcctccaccgccaccgccgacgcagcgaggacagcagccagaagggagtcagcacaatcacct

SEQ ID NO: 34319 - DNA, 189 bp, Zea mays
ctgcagcttaccctgagcctgaacagctacacattattttagttctttcgctcaatccaaaggaccgaccgtgagaattatacactgcccctgagtcaaagttatcattgtaagaggacacaaggagttattgccgttcacataggcatagattcttggaaccagagacctcatacatcagggtcatcg

SEQ ID NO: 34320 - DNA, 479 bp, Zea mays
ggactcaggtctccacacattaatcgctaattcgctaggtttgtcttatggtctaggcatcctccctggatccaagtccatagaccaacatagatcccgttatcaagatgaatacaatcaattgctgaccgcgcgcgagtgctagaaaaatcactcgacttctaccgagatcctgagtagcaagctgctactcgacctagcatactagtattcatctcataaaggaatcctaagttcatgcaactagaggtttcaagcaactcctacacttaagtgcacattacaatcctacaagcatgaaatgtagggaagtagcatataataatacggctatgcatataaaccggggcttgccttcaattgctggggctgcggggagatcctaaacagcagtctcggaagcttgctcctggtccttctcttggacagatccttgctctgggatgagcacgtactctccgacggcaagattacaatct

SEQ ID NO: 34321 - DNA, 471 bp, Zea mays
  unsure (1)..(471): unsure at all n locations
gctgtgaagattcttcattccaacatgtgctattctgcgatgccagagccagcccatgttggtcttagcaattaagcaagtgtcgagttcagctctatcaaaatctaccaagtatagctgaccctctaacactcccttaaatgctactgaatcatcacttcttctaaagacagtaacacctagattcgtaaaaagacagttgtaacccattttacataattgcgaaactaanagcaagttgtaatctaaagagtctacaagaaaaacattagaaatggaatggtcaggtgatatagctattntacccagtcctttgaccaaaccttgattcccatccncgaatgtgatagctcgttggggatcttggtttttctcataggaggagaacatcttcttctcccctgtcatgtggtttgtgcacccgctgtcgaatgaatccaacttgaagcccccggaatgcacataaaaacc

SEQ ID NO: 34322 - DNA, 429 bp, Zea mays
  unsure (1)..(429): unsure at all n locations
agtgataagtgagagtgatttgtgtgttcttttgagctcttgcgcttggattgctttcttctttctcattcttttcttgtgatcaaaactcaattgtaaccaaggcaagagacaccaattgtgtggtggtccttgcgggaaagttttgttcccggttgatttgagaagagaaagctcactcggtccgagggaccgtttgagagagggaaggggttgaaaaagacccggcctttgtggcctcctcaacggggagtaggtttgcgagaaccgaacctcggtaaaacaaatccttgtgtctcacttccttattcgcttgcgatttgtttttacgccctctctcggactcaattatatttctaacgctaacccggcttgtagttgtgattaactntataaatttcagtttcgccctattcacccnccctctct

SEQ ID NO: 34323 - DNA, 431 bp, Zea mays
agcttatgaagattcttcatcccaacatgggctattcggcggtgccagagccaacccatgttagtcttagcaattaagcaagtgtcgagttcagctctatcaaaatctaccaagtatagctgaccctctaacactctcttaaatgctactgaatcatcacttcttctaaagacagtgacaccaacatcagtaaatagacagttgtagcccatttgacataattgcgaaacagaaagcaaattgtaatctagagaatctacaagaaaaacattggaaatggaatggtcaggagatatagcaattttacccaatcctttgaccaaaccttggtttccatccccgaatgtgatagctcgttggggatcctggttttctcataggaggagaacatcttcttctccccagtcatgtggtttggtgcacccgctatc

SEQ ID NO: 34324 - DNA, 438 bp, Zea mays
  unsure (1)..(438): unsure at all n locations
taggaatgaactcaatatcctagattctcggaactttgattgaaatcttgcacacattgctcatttatatacctttgatcatgtctctttcatttggtacaaatacatatttcttattcttcttatgccaaagctaagactaatgtgcttccaagtgtatttctatccttagtcttagattgaaagggaaatggagtaataggcaaaggcaaggcatccactacgactctgttagtatcatatttcatttgccctactaatgtatttacattcatatcttgtacaaggcctctggttttcttcgtttttggcgcttaatgccaaaggaggagaaataaataggccaaagaaaaaggaccgcaccaccaccctattttctaaaaactttntcaaaaacaggagaaattaataggcatttgcaaaaaccctcatgacagc

SEQ ID NO: 34325 - DNA, 451 bp, Zea mays
  unsure (1)..(451): unsure at all n locations
gcttctaaagagagagcacatgttgggactatccaatgttcattntgagaaagacagggtttgtagcgcatgtcaagcanggaagcaagtttgtgttcatcatccacacaagaacatcatgacgaccgacaggccgctcgagctactccacatggacctattcggcccgattgcttacataagcatcgacgggagtaagtattgtcttgtaattgtggatgattattctcgcttcacttgggtgttctttttgcaggaaaaattacaaacccaatagactttaaggggattcttgagacaggctcaaaatgagttcggattaaggatcaaaaagattagaagcgacaacggaacggagttcaagaactctcaaatagaaggcttccttgaggaggagggcatcaagcatgagttctcttctccctaaacacgctcacaacaaaatgggtgt

SEQ ID NO: 34326 - DNA, 426 bp, Zea mays
  unsure (1)..(426): unsure at all n locations
agcttgatgactacatgaagtcctttgatgatctccatggttagacgtttaactgcaactggcaatgttttcttgggacaattaaattttctttgccgttttgctttcttatgggtgttatggaattttactggataggtagttgggtctgttggtatatcctcctaaactttctgtcattactgttagttttggcactagatttgttctcaattgctatttatgaaagttattggataaagggttatttggcactaggtttgttcccaattgctaatattttatcgaataatttgtgtgtcatcacaattcacaatcatatatgtttacagtgatattttgccacatantttntgaatatcatagcgatgtttgtccttcagtatctatattttacactaattttaactcatatggcaacgcacg

SEQ ID NO: 34327 - DNA, 271 bp, Zea mays
aattatattaacatagaggttggtcttcacttctcaagtgtttatcaagaacttaaggggttgaattaatgaaagagatacatgccggcctgtgtggatatcatattgggtctaggccattggtgggaaagtgttaaacaaagattctacttgccgaaggtagctttcgatgcagtagagttagttcaaaaatgttgaaattgtcaaaaatgtgcaaaataccataaacaaccttcatctctcactcagtttatacaggccacctaaccca

SEQ ID NO: 34328 - DNA, 397 bp, Zea mays
acatgtgcttagcggcgatgccacagccagcccatgctagtcttagctattaagcatgcatctagaccggcctcctcttttgcaaaatcaactaaataaagtttgccgtctaatacacccttaaaagctagtgaaccatcacttcttctaaagacagacacatctacatttgtaaatagacagttataccccatgttgcataattgactaacagatagcaaattatatcccaaggactcaactaaaaacacattagaaattgagtgctcatttgagattgcaattttacctaatccttttaccttgccttgattcccatcaccgaatataattgaatcttgggaatcattattcttgacgtaggaggtgaacatcttctttctccccgtcatatggg

SEQ ID NO: 34329 - DNA, 439 bp, Zea mays
  unsure (1)..(439): unsure at all n locations
taccctgtcccatgttcagggcatgtggccagntattatatttcttgttcacacaggcctacatacgcatctaatcataaattaaccttagtggagcatcatctgttcctagcccaagcgtcgagttaagtacttccatctttaggattgttttgtgttcctaaggatgaaaagagcattatagggaactttgcagtaagatcccaccatgctcccaatgaaaatattcttgcatgtagaagccatccttcctcaggatatataacccctgagctacgcatttgtcggggaccataattaggggtaccctcaaggctcctaattctcagctggtaacccccatcagcacaaagctgcaaaggcctgatgggtgcgactaagtcanggatcggtccattcgagggactcgatcacgcctcgcccgagctcagcctctgac

SEQ ID NO: 34330 - DNA, 414 bp, Zea mays
  unsure (1)..(414): unsure at all n locations
agcttcgacgaggctttctgtggagagggatgaatgatgtgaatggtggccattgtctgctgacttggcccanagtcactagacccaaggacctgtggggtctgggtattagtgatcttcggatcatgagctgggcactgcgggctaggtggccttggctacaaaaatctgataggactaagccatggtcggacttccagattcaaacttgcgacattgtgcaaagcttgttggctgcggctgttatcactcatttgggagatgggtctgatactctattttggaaggatcgttggctgaatggcaaatgtattaaggaggtggcacctgctgtcttcggtatggtgcccaagcgtattgcttctagacgcttggtcaaagatgccttgcctgatctcaatnggttggctgatc

SEQ ID NO: 34331 - DNA, 416 bp, Zea mays
  unsure (1)..(416): unsure at all n locations
ngagagtngagagtctgagtagaacgttgcatgcctcctcttntatagctaagggggcatgcacaagggtactgagccccgacatgtgggcccaggaacataacggatgtagtacttggagctactaatgtttgctattggagcaatctccttgcgccctgacatccgagatctgtgtagtatcgacgtgcaggggaagcttctcgtacaagggatgatggacacagtgtgccgcgcagcacgggcgcactatttgacaatggactggacaggtgcgccgtttgcaggatggccctggcgccgcctgccagcggagtggacaggacgcattaaatgctgaggggggcacatcgcctgtcaacaaggtggacaggcggcgcgttctctccgcaattaatgcagagatcgtgcgggct

SEQ ID NO: 34332 - DNA, 312 bp, Zea mays
gagctcttatcctctccagcacaactagaacactatccattctttgtctcatggggggcgctgctagacctttatgtgtcttcggcaccttcactcctgcccaaaggcttagaacatctaatggtttccgcccttcgattctcgggtcttcaattttgtcagccttcggcattggagccgactcttcaatgctatgcataagaaccggtcctttggcttcaataactgaagaagtcctaccgtcgaattcacgcactattgccggttccatgtatcgccgaccgtgaataaagaccttcaactgtttcctct

SEQ ID NO: 34333 - DNA, 425 bp, Zea mays
tgcccgctacttatgccattatatgggcatttattctgattaccacacagatgcctacttcattaaaggatctgtacttttgtatactatagtatcttccaaggaaggcaaaatgtttatgtcaaagtacttgtagcggggacagatcacaaactgcgcaaccttgtgactcgacttcacactgaaatgcttacaggagtgtatattcatgatccaacaacggctattgctgctgtgaatccatcgatgctgacttacacagaacgtgttgtgagggtacagacggttggaatcacaaagggccttactgtttttgataacaccaagaatatgttagcgcactctcttcatccctcacaacaccacatcgctgaaacagtagcagtgtatcttgaaataatgtgagctccccataagcctgtata

SEQ ID NO: 34334 - DNA, 434 bp, Zea mays
  unsure (1)..(434): unsure at all n locations
agctntccattgtccatgctctntgcaccatgctntgcatccatgcctctacctttgtgaagagttattataatggatggactccatgatgatattgattgaggtattccctgtatgtcttcaatatcctcccatagttagtaaaattttgttttcctcccaaacatgcttgaataaaacccaattgttcttggagataagaaaacttgaccctgaaattaaaagtataacagtctgtcagttgactagacatgtagtgagctattcagagccattgagaacacatgaacacattgagttgatccaataaatcaaacaaaatcaatagcatatatacaaatatttaaatcacatagcatggaaggaacaatatgaccatgtctttccaaaaaatgaaatcaatgcacaagacactgctggcttacattcttcag

SEQ ID NO: 34335 - DNA, 323 bp, Zea mays
gagaaagacaggatttgtagcgcatgccacgcacgaaagcaagttggagtccatcatccacacaagaacatcatgacgaccgacaggccgcttgagctactccacatggatctattcggtccgattgcttacataagcatcggcgggagtaagtattgtcttgtaatagtggatgattattctcgcttcacttgggtattctttttacaggaaaaatctcaaacccaagagaccttaaagggattcttgagacgggctcagaatgagttcggattaaggatcaagaaaataagaagcgacaacgggacggagttcaagaactc

SEQ ID NO: 34336 - DNA, 334 bp, Zea mays
  unsure (1)..(334): unsure at all n locations
agcttcggcatagcccactccttcataagtggatatatnttgaagccagaaattcctgcactaaatctctagtgccaatgtgctctgcgataatcctaaattcagccaacgcaatttgggttggaccttctggtgtcatattgcattggggtctggtttctccgaagatcaattcaagcggactctggaccagcttctccttgtcatcatcaactttgacgtagaaccatccgaattccagcctgtcggccacttgcttcggtagctgatcacnaggaaatttgtagttttccgataggcaaaattgtaacaaccaaaattttcatgtagccca

SEQ ID NO: 34337 - DNA, 388 bp, Zea mays
  unsure (1)..(388): unsure at all n locations
tcgtcgnttgaaagaaaatcaccctggaggaaagagattatctcacctctccaatcttcactataaacaggggatatattaacgattgctctttcaagaagctcgaccgaaggtgcttttattgtttcaaaaaatactttctaaggtataggcagcccctgcgctgctgacttatccaatagatcagcgtattcattttctccacgaggaatattattgacagagaaaccttcgaaggaagcctcaatccttcggactgtatctagatacttttcaagctttgggtctcttgctttgtagctcttgtcaatatgaccagagataacttgagaatcagctttaagaatggcccttatgaatcaagtcttgccgcataacaagttttaac

SEQ ID NO: 34338 - DNA, 401 bp, Zea mays
gcaagcgtcaaactccatgagaaagaagttcctagagccataagtgaagccatccacatgaacaagaaaaagggtccgattccattagacatgttggtcgcaccgatcatctctctatgtcattcaagagcaaaaagggaagaggaaaaatgagatgtttcaagtgcaaggaattaggccacttcgttgcgtcttgtccacacaaagacaaggatgaagggatgaggagacgttttggatgtaatggtaaggaccatatgatcacttcatgtccgctcatgaagaatcaaagacgtgcaccctccaagatgaccctcactaagacaaaagacgaacaacaagcgtcatgtcaggttgagcgacgcttctgctacatgtgtggtgagcaaggtcatctacgt

SEQ ID NO: 34339 - DNA, 261 bp, Zea mays
atccaactaagctacaggttctccgaatatggccagggcttcggagggagatatctatctattcatgtcaaatcaattcattccactcagaatgacgacaagtgaagtcatcactagatgccgcaatattactccatgcttcagggcagcaacagagctatcctctgcccccaactccaaagggcagatgcaccaacggtttctgaggaaagtttgtggatcattccacaaaaaatagattgcctattctgaggtgaggac

SEQ ID NO: 34340 - DNA, 401 bp, Zea mays
  unsure (1)..(401): unsure at all n locations
atgatcacgaagctatgtgcagaaaagcttccgtatgacggcagaaaagaagaactgccttaaagatgaaaagcccaattagaccttcaagaattatcatagagttattgataaatgtaaagggcattaatgtaattctacatgggctgcgtnccgcgcctataaatagatgaacagtactcccgtactgtttacgctgacttgacattcgctttttgcatcacgcctgtacctttacttttcatgagtctgaaggtacatttataatttgttttcatgaatntaaaagtaaaaataagttgatgataatatctgtattggtattcatatatgggttcttcttcatcatctatcgaacttacgaaggtcttttcccttgtaaccttcgtctagaaattcat

SEQ ID NO: 34341 - DNA, 436 bp, Zea mays
  unsure (1)..(436): unsure at all n locations
ntatcaaatggacgtganaagtgccttcctcaatggaccaatcattgaagaggtctatgttgagcaacctcccagctttgaagacagtgagtaccctaaccatgtctataggctctctaaggcgctttatgggctcaagcaagccccaagagcatggtatgaatgcctaagagatttccttattgctaatggcttcaaagtcggcaaggccgatcctactttgttcactaaaactcttgacaatgatttgttcgtatgccaaatttatgttgatgatattatatttgggtctactaacgaatctacatgtaaagaatttagtaggatcatgacaaagaaattcgagatgtctatgatgggggagttgaagtattttctatgattccaagtcaagcaacttcaagagggcactttcattagccaaacgaagtatact

SEQ ID NO: 34342 - DNA, 399 bp, Zea mays
  unsure (1)..(399): unsure at all n locations
cacaatttcatggggcgcgtggatgggagcgganaaacgtgaggctgggcccgtcactgatgcagcacgcacggggaaggctgcatggtgaaacacagacggaagccgaggaacacaagatgatgaaggtggaggaagaaacactgtcagagcctgttgtcaaagcaattcttagtgatgccaagcatcgactccaaatgagggggccatactattttcgtatcatggaaatttggttttctaatgcctgcgggatttcaccaaagatacgagaaagcatatatgaccatctgtattgacataccggtaccatgtacacaatgcttggccgaaatgctgtttgattgcctacanaatgttggagaatagctggtactccaatgtagccagtaagaacta

SEQ ID NO: 34343 - DNA, 409 bp, Zea mays
  unsure (1)..(409): unsure at all n locations
tcagaagaaaaatgtttntagttcccaagagattcagaattaaatggctagagtgcactctaccgctggagttgagcgtgagggaggcgaagccgaaggagcagagactgttcctatctccgaagcgatgcaacgatccggactggtgacctcggaaggaatccgtactgccgagacagagcaaactgttgccgagacagaacaagttgctgccgaagcggaagaaggaaatattgaggaagctgatcctgatgacgattaccatattgtcgtgccaagcaagcccaaccacttggacttcggagagtcgactgtctccaaggctgatctctccaagatggtgaagtcgggttattntattgagaatgagaagaagctacttcgcttctggggggaagaaactaccccg

SEQ ID NO: 34344 - DNA, 423 bp, Zea mays
  unsure (1)..(423): unsure at all n locations
agcttgagcaaganataccgattctggtatgcctacttgaaaacatagttccaccaagtttcttgaatgcgatgcaacatctacttgatcacctaccatactaagctaaggtaggatgtcatgtgcaatatagatggatgtatcacatcgcaaggacacataaagaagctacgcgctatgtgtgcgcataacagacgagatgaatggtgcatcgctgaagaattcgaatacgaagagataacatcgttcacgggcctgtactttgcagacgaacacaatgtcaatgcccatacgttgcggtatcatgtcgacgagccccctattagtgatattgaaacttttcaatggaggggcanaactgtacgacccaccgcaacatactgtttcaccaacgacgaatggaagactgctttactctacatg

SEQ ID NO: 34345 - DNA, 465 bp, Zea mays
  unsure (1)..(465): unsure at all n locations
ggcgaggatgctggattacaacatgtgctagtcggcgatgctacatccagcccatgtatgtcgtagcaattaagcaagtgttgagcgcagctctatcacaatctaccaagtataaactgaccctctaacactcccttaaatgctatagaatcatcacttcttctaaagacagtgacacctatatcacgaaaaagacagtcgtaccccattatacataatcgcgagactgaaagcaggtgataatctcgagaatctacactaaaaacattggacatggagtggacacgagaaatagcaactctacccaatacttggaccgaaccttgatttccatccccaaatgtgatagctcgatggggatcttgggcgaacttataggaggagaatatcttcttctctcctgtcatatggtntgtgcacccgctaccgatgatccagctngagcccncggatgcataaaccgac

SEQ ID NO: 34346 - DNA, 446 bp, Zea mays
  unsure (1)..(446): unsure at all n locations
agcttctaaagggagaacacgtgatatgggtgacttctctcaattcgaaaaagatagaccttgtgcagcttgtcaagcaggtaaacaagtgggaggagcacatcacagcaagaatgtgatgaccacttcaagacccctggagctgctgcatatggacctcttcggacccgtcgcctatctgagcataagagggagtaagtatggtttagttattggtgatgacttttcccgcttcacttgggtgttctttttgcaggataagtctgaaacccaagggaccctcaagcgcttcctcaggagagctcaaaatgagtttgagctcaaggtgaagaagataagaagcgacaacgggtccgagttcaagaaccttcaagtggaggagttccttgaggaggaagggatcaagcatgagttctncgctccctacanncaccacagcaaaaatg

SEQ ID NO: 34347 - DNA, 474 bp, Zea mays
  unsure (1)..(474): unsure at all n locations
tctcctgtacaagcgccgcacttactgcagagtgcgaagctgcttcatacaatagaagaggagcccctggcgtgggtggaattagcgttgttagatctatcaggtattgcttcagctcttcgaaggctttctgctgagctgatccccattgaaagacttcagccgacttcagcacttcaaagaatggtaaatttctctctggtgatctagatatgaatcgattcaaagatgccagtcttcctgttagccgttgagcccccttctttgtgcttggcggctccatccgaagaatagcttcgattttgtttggattagcttcgatccctttcgttgaaactagacacccaaggaattttcccttctttactccaaagacacatttttctagatttaattntaggccagcttgcctaaaattagcaaatgtttcctgtagatcagcaatgtgattttcctgcttcgtgctctttacta

SEQ ID NO: 34348 - DNA, 475 bp, Zea mays
tgtgaagattcttcatcccaacatgggctactcggttgtgtcttagccaacccatgttagtcttagcaattaagcaagtgtcgagttcagctctatcaaaatctaccaagtatagctgaccctctaacactcccttaaatgctattgaatcatcacttcttctaaagacagtgacacctacatcagtgaatagacagttgtagcccatttgacataattgagatacagaaagcaaattgtaatataatgaatctacaagaaaaacattggaaatggaatggtcgggggatatagctattttacccaaacctttgaccaaactctggtttccatccccgaatgtgatagctcgttggggagtcctggttttctcataggaggagaacatctttttctcccctgtcatgtggtttgtgcacccgctgtcgataatccaacttgagcccccggatgcataaacctacaaaacatgttt

SEQ ID NO: 34349 - DNA, 444 bp, Zea mays
aagtcacctgcggcatgcaagcttattggctttctacggtgaattcattttctttcaatgagactactacatataatagacttgaaaacaggtattagttttaaagacttagattatagagtaacaacctccccctataagtatgcatacaagttttgaatacttgtgggagacatgcactttgattttgatatcaaaaaggggctgattatttataattcgagctttggcacatataagttaaatgataccaattgaagtattataccacttgtagtatatcaattgtagtatatgtcatatgaaaataccaattgatgtgtcattttcttaggaatgttaaataagctatgtgtcatgcttaaataaacattttaaaccatgtaggcttactcaagaatatgaattgaaagcgagcatgtctaccatatgattgacctagta

SEQ ID NO: 34350 - DNA, 351 bp, Zea mays
  unsure (1)..(351): unsure at all n locations
cccttaaattagctttagagacatctgtatgtatccactctaaaggtctcttatgtcactatgatcatgtttttcttcatgcgtaataaaagaaagataacgatgcatgaccctatgcaaactaggaacttgacttcatcacctgtaaactttcatttagtgtttagtaaccccaacaatagttntcttgtttatttctccctgcccaacacctttgatctcttcgaaggtggaaggagggagaggattactttaattatgttgtcctattatgatttcttgtaagagcttcaataagtctgtaacatttggtacccaccttcggtgaactcactgaccacaaccaccatg

SEQ ID NO: 34351 - DNA, 341 bp, Zea mays
  unsure (1)..(341): unsure at all n locations
tggagttgatnatcttggaatctagcggaactgatgtgatactccgaatatgattatttaacccagtatgatggagtgatatcttgtgctaagaggatggctacattgacaagttcgcaaggagagaaagctcaggtcaatgttagcatgctcgcagaagtagaagccatagtaaatcaattggaagagaaatctttggaacaatcaaaatggtatgtgagtatcccgacgtgttcttggaggaattaccaggtatcccacttgatcgtcatgtagaattctgtattgaattattacctagaactgcacctatatcagaagaccctatagaatgaatgtct

SEQ ID NO: 34352 - DNA, 409 bp, Zea mays
tacactgcacaatctacaagaattctcatgtctcacaagcctgtcattggtcttcaattgattcgccattgactttcatttggtatctttgagactacattcagtatcatatacatgtcttctccaatatttgattagactatattatgtatcttatacttcccatgtttctataaatgcatatattgctgactcatattctgtcacttatgcataagggaaattaatctattcaaatcatgtcttgcacctctattttctcacatgctttttcctaagtataaggtctctgtcagggggagtatttcttcgtctctaaaggggagaaaattctttctaaaggagaacactcatttaggggagtaacaatttagttcttcaactagtattaatttacaaatgctttatg

SEQ ID NO: 34353 - DNA, 376 bp, Zea mays
agcttctaaagggagaacacattttaggactatccaatgttcattgtgagaaagacaggatttgtagcgcatgccagacaggaaagcaagttggtgcccatcattcacacaagaacatcatgacgaccgacaggccgcttgagctactccacatggatctattcggcccgattgcttacataagcatcggcgggagtaagtattgtcttgtaatagtggatgattatactcgcttcacttgagtattctttgtgcaggagaaatctcaaacccaagataccttatagggattcttgagacgggctcaaaacgagttcggcttaaggatcaagaaaattagaagcgacaacgggacggagttcaagaactctcaaat

SEQ ID NO: 34354 - DNA, 438 bp, Zea mays
tctaaagggagaagcacatttgcgactaacaaatgttcattttgataaagacagggtttgtagcgcatgtcaaacagggaagcaagttggtacccaccatccacataaaaacatcatgacaacagacaggccactggagttactccacatagatctattcagcccgatagctggtataagcatcgacgggagtaagtactgtctagtaattgaggatgattattgtcgcttcacttgggtattctttttgcaggaaaatcacaaacccaagagactttaaaaggattcttgagacgggctcaaaatgagtttggattaaggatcaagacaataagaagcgacaatgggacagagttcaagaactctcaaattgaaggctatcttgaggatgagggcatgaaacatgagttctcttcttcctacacacctcaacaaaat

SEQ ID NO: 34355 - DNA, 432 bp, Zea mays
  unsure (1)..(432): unsure at all n locations
agctngacaatgaggagatggcgctcgtcatcaagagcttccgccaaatcctcaaacaaaggagggggaaggattacaagtcccgctccaagaaggtttgctacaagtgtggtaagcccggtcattttattgctaaatgtcctatatctagtgacagtgaccgaggcgacgataagaaggggagaagaaaggagaagaagagatactacaagaagaagggcagcgatgcccatgtttgtcgggaatgggattccgacgagagctcaagcgactcctccgacgacgaggacgccgccaacatcgccgtcaccaaaggactcctcttccccaacgtcggccacaagtgcctcatggcaaaggacggcaaaaagaaggttaaatctaactcctncactanatatgagtcttctagtgatgataatgctaagtgat

SEQ ID NO: 34356 - DNA, 367 bp, Zea mays
  unsure (1)..(367): unsure at all n locations
gtgtgacttatttnggatttgagcagcacggtcataacatttctggtnagagatctctgggtcttgactgaaatggcagtcattattgtctgcgtaatagaatatgtgtgcattattttcatagccacacgagaactctttaattcttcatgctcttacgaatctatttcattcatatgtccagtgaatcttttctctagcaaggtaactatgttcttaatcttcattatatttaaaatatgttgctactctaaatagatgtttctctcttttaccaaaataatgtcatgcttgagcttctgtttgcagatgccaagaaagatgatcctctatgtttacaacatcttgcactgtgtcatgcgcgtta

SEQ ID NO: 34357 - DNA, 472 bp, Zea mays
tctagagggagaacacattctaggattaacttatgttcattttgagaaagacagggtttgtagcgcatgccaggcaggaaagcaagttggagttcatcatccacacaagaacatcatgacgaccgacatgccgcttgagctactccacatggatctattcggcccgattgcttacataagcatcggcgggagtaagtattgtcttgtaatagtggatgattattctcgcttcacttgggtattctttttacaggaaaaatctcaaacccaagagaccttaaagggattcttgagacgggctcaaaatgagttcggcttaaggatcaagaaaataagaagcgacaacgggacggagttcaagaactctcaaatcgaaggcttccttgaggaggagggcatcaagcatgagttctcttctccctacacgcctcaacaaaatggtgtagtggagaggaagaatcgaactctattg

SEQ ID NO: 34358 - DNA, 370 bp, Zea mays
tatggggaccaacccaggaagatctactgcttattttgtggtgaagacaagggccacaatacaagaacgtgtcaaatcaccatccaaaagcagaaaaagatcgcagaagccgaagcccgacaaagtgaaccaaagcatgtcctgcacactgcttcgtgtcactcaccctacataccagaatatgtgggtaatcatcctgcagcttctgttgcttcggctagtcagtcgcaagtttcttggccacagcttccacctccaccaccactacaacctgcctattcatgaggtcaacagccagaagggagccaacagacccatcagcagcgagatttcagagagggatccgaagcttcgcacaagttaacagtac

SEQ ID NO: 34359 - DNA, 397 bp, Zea mays
  unsure (1)..(397): unsure at all n locations
tgtccgtgcggggcctgttacaatgggccaaatcccacgtgggcctccatgtcgggtgaggacgtgaggtggagagacttcatcatangccttcgtcttgcagtgaagaggaacgaaggtgggccgctccagtcatcttgcctccgttggtgcagcgagttgacgaaggcctggagcaaagggtagcgtctccgccttcgccccaaccgcggcattgcggcgaaccaagcgggagcaggcacgatgaagggacagcgatgagcccagatatgggacgaggcagatccacaactcgggagaccttgtccttgatgacggtgacctcggtaatggctacgactttgcggaacaaggcaagcaggtcgacctcagtcacgagcttgggcacctagcccat

SEQ ID NO: 34360 - DNA, 465 bp, Zea mays
  unsure (1)..(465): unsure at all n locations
ggatccttaatcaccgcngctgcagctngacgggtcctctgttcagtggagtgtgaagacatatttccaaatgtccttcttcaaagtgctgcctctgaaggctccgaccattgccccctgctgcttggcattagagataataagatgggtaaaagacgtttctgttttgaagctttttggttcaaattggaaggattccaggatgtcatccaggaggtttgggattctgtggcagctgtaaactgccctttcatgactctgaatttgaaactaanagccacaactaggaagctgcaatcttggagtgggaagcatgtgggacatgtgaggactcagttggctttggcaaaggaaattctgcatagactagaaatagcgcaggactacagagctntatccttggctgaaatctggttaagtaatttgctgaanaagcattccctgtttttatcttcacttttcaac

SEQ ID NO: 34361 - DNA, 472 bp, Zea mays
  unsure (1)..(472): unsure at all n locations
ntacttagaatgtccctatntgttatgaaggttaatctattaactgatcatagaaactntgattattcaaaaagatgaagggccaaactctaacctttaggttattgtaagctaggcagtctgcaagttggtccttcgatatagcagacaacccacacctagtttaggatagctcattttatccatcattttgcggcatactttatgttctctattgtctgggagacaatagagatagtcatcctcatcattgccaccataaacaagtgagcccgatgggtatttaagatcttcagcaaaatcttgcacttcagcaatttgctctacagtcaatcttcctccataggtgtgtcggctgatatattcgcgtggcttagatggtccgtctttaatgaccacgacagtctctactttagagaacttctattgatccttttctttctccttgagcgcgtcagtatggtgtagatca

SEQ ID NO: 34362 - DNA, 450 bp, Zea mays
  unsure (1)..(450): unsure at all n locations
agcttacatccaaagggtttgtggctcagagcccgggcaccaactatggcaaatgaaatggtcattgaagcaatgatcgaggggcttcggccaggtccaatggtacaatattttgctaggaaaccccctcagactctagaaaagcttctccaaaagatagatgagtatatcaggaccgataatgatttcggaaagaagagatgaagcttatagatactctgagaagacaaggggcttcgggggaagatttcatccaagacatgttagaacaatccacaacccaggctaaagtgaagacaagaacaaccataatcaagggtagcagagtaacccccaatcaatagggacacaccagaattcctttagaccaccagccccaagaggcagaggaggacgaagcttcngaggaagatacaactctcaaccaagaagaactattctacantgttc

SEQ ID NO: 34363 - DNA, 473 bp, Zea mays
  unsure (1)..(473): unsure at all n locations
tctcggtatcttcttgggtaaggcactcttatcttgagatgggttaaggggagaatggaagcataagatgaggattagctctaatttgtgatctgtgtttttagagaaaacctttcttaaaaagaaagaaaacacacaagctcagcaatgacaagacttttggttagtagaaccaaatattatgtcatcgacatatatttggcacacaaataggtcgccatcacatgtcttagtgaaaagagttggatcggctttcccaaccttgaaagcattagcaattagaaaatctctaaggcattcataccatgctcttggggcttgcttaagtctatagagcgccttagagagcttacacatgtggtcggggtaccattcatcctcaaagccagngggttgctccacgtacacctnctccttgattggcccgttgagaaaagcgctcttcacattcatttggaacaacctaaaagaat

SEQ ID NO: 34364 - DNA, 385 bp, Zea mays
  unsure (1)..(385): unsure at all n locations
ttgctttcttggtcccttctttattgatgaaccacttttcttttgaaccacaaggggtaacacatggggatatattatctaaatgcgcacaagtgcaagaatgaggttcacatgactttaagtttgcaattacaacctcatgagcaacatcaagcatgatatgtctatccaaaagattatcatgatgataagacaatatatcatattttcagtaagagcaagtttatcatgacttagcaattctacttgcctttgaagcatggcattttccattntaagctgagcaacacaagataaagcatcatcattatttctttgcttaattaanactgaatcataccgttggaccaaatcatcatgaagaagcaccnnntagctcctcatg

SEQ ID NO: 34365 - DNA, 469 bp, Zea mays
  unsure (1)..(469): unsure at all n locations
tgtgaatgcgcgcgcggcggngcagcgagaccagaccctatctatacctatgcgcgtctgcgagagggagcgagagttttgtgtttcgccctgagcaggctggagaaaggcaatgtggggttggccgggaaatgcttacctttaccgtcggatccatccaacggctgcgattgataggcctgaataggctgcagcttgttcgctgcggcttgctgcggctgcaatccggctgcggctgcggcttctacagtatttttctctctatggattgcagctgcagcagtccaaacagctgcaacagtgtcggcttgtagccagccgaacacgcccctggaagccggcgggaagggccttagaattctcagattgngcccgaacagggaaattaatggaccgcanattgcagggtaacatttttctcttttttatgtctacatttataccgataactatatagttataatataat

SEQ ID NO: 34366 - DNA, 355 bp, Zea mays
agcttctcggcttgtccacgggaacatcaagtcttccttcgtttgcttggttcagactttgaggcttgccttacagacaattgcttgtcgctcctcctggaatcatcagaagtcaaagacgatgctgcttacagagcaccagaaaacatgaaatccaacagaatgctaacgcccaaatcagacatatatgcttttggtgtcctcctccttgagctccttagcggaaagccaccgcttgagcattcagtcttggtcgcaagcaatcttcaaacctatgtccagtcagcgagagaggatgaaggagtggacagtgatcacatcacaatgatcgtggacatagccacgagctgcgttc

SEQ ID NO: 34367 - DNA, 473 bp, Zea mays
  unsure (1)..(473): unsure at all n locations
ntaagctctntgacaaataaatcacttcatctagttntatcaattatgcactaaagcatgaatgaatttttgagaagttaaactagatatgaagcagggatatgcatggacatgctttctcttccttttatacaagatatgcaaggaatgtatagaaaaggaagatttaggtacaagtttaaatgaaaggagatagttttacctttatgtacctttacatagggacgctctcttcattgtgctttgtccttggtcttagatgcttaagacctattcttaatgacaatatatggaaatattttgcacaagagagagttctacaactagtgatcttttcaagttattgttagcatatatcanatggatcacaagttgcataaatgtatcatgaattccccttctaacttagtgcatatcaagagagatatcagttgatagtatatacggcactaagaagcatgaattgtgattga

SEQ ID NO: 34368 - DNA, 379 bp, Zea mays
  unsure (1)..(379): unsure at all n locations
agctntatcaaatggacgtgaaaagtgcctttcttaatggaccaatcaaggaagaggtctatgttaagcaacctcccggctttgaagatagtgagtaccctaactatgtatacaaactctctaaggcgctttatgggcttaacaagccccaagagcatggtatgaatgcctaagagattttcttatcactaatgacttcaaagtcggaaaagacgatcctacactctttactaaaacagttgaaaatgatttatttgtatgccaaatttatgttgatgatatcatatttgggtctactaacgaatctacatgtgaagagtttagtaggatcatgacacaaaaatttgagatgtcaatgatgggggagttgaagtacttc

SEQ ID NO: 34369 - DNA, 428 bp, Zea mays
taatgccggaattgccatcaaggaagctccctcactcttctcatcctcccattgcctcatggcaaagggagatgctgaggtaaaaatcatcaccgatttaaatgatataaatgatgatgatgatatcgatgatgttgatgatgatggctattcatatgatgatcttgttagaatgttaggtgaggccgatgactacatgcacaaagaataagaaaaatttaagaccttgaaggaattgtataaaaacctccaagtgtcttttgaggagctcaagacctctcacaatgacctcaaggaaaattgtgagaagcttgcggatgctcaaaaatcatctattgtgcatgaagttgaggtgatcactaacgatgttggagtcacttgtgacttacttgatagtcttacaagtaaaccactaactactaactcta

SEQ ID NO: 34370 - DNA, 436 bp, Zea mays
agctgagaaatatctcgatacagtgcgaagaatggaagcctctttcgaagacttctttgtaaagaatatcccaagaggagaaaatgaacatgcagatctattagccaagttaatggcacaggggctcccattaccttcggaagtattttttgaaacaataacaacaccttcagtcgagctcatggagcgagcagtgcttacaatctcatcagtgcacagtgaagattggaggactaagattgtatccttcctacaaggcaattatcttttggacaacgaagcttatatcaaaagaatggaagctaggacaaggccttatgtaatcatagaaggagaattgtataaacaaagagtttgctctccattgctgaagtgtttgtctagaaccgaaggtcatgagctaatgaaggaaatacatacagagctattgcggagc

SEQ ID NO: 34371 - DNA, 403 bp, Zea mays
  unsure (1)..(403): unsure at all n locations
ngaccattgtaagcattgcgaagcttctagatatgtctaggtgactaatgatgagggtgaattggtagttactaaggtcacagctaaacaacttcgtcggttgcccatcattcctcggctttcaaggttgttcctcaacaaggaaatagctctgcatatgacgtggccaaagaatggtgtacgtctctccagagagtgctgactacgtgagtacgagcagggacaacgatgatgctgtttttcaaccagaagcagcgtcgaagcaagacatagctcaccgattccatgtgaccaatggagaaggccttgaaaatctctggtgggttgcaatcaaagtcaacccacaagtcgtcgctctatagagtgctgactacgtgagtacgaacaaggacaacgatgatgt

SEQ ID NO: 34372 - DNA, 200 bp, Zea mays
agcttctacagacgaagaggtgagatgtctgtctctcaaacggggcctacaaaaccgatcttgggaccgtctgtccggaaggccaaacaagtagaatgatctcatcattattagatggagaagatgacacctgcatcccttgagcagctgccaatgggcgtgattacacgattcgactatcttagcggaagatgatatct

SEQ ID NO: 34373 - DNA, 439 bp, Zea mays
  unsure (1)..(439): unsure at all n locations
agcttgngagcaatacaagttcagaatggatttatcttctttggctgaccaaccgaaacccatgctcttatgtgaggatatatcagagcacaaggtgctattgggatctcaattgtccgaagagcaggaaaaaaccttgataaagtttttgttcaacaataaagatgtttttgcttggtcagctaatgatctttgcggagttaatagggatgttattgagcactcgctcaatgtggatccatccttcagacctaggaaacagaggcttcgaaagatgtctgatgacaaggccgaatgggctcataatgaagtgaaacgactcctcagtgccggagttattagagaggtaaaatacccagaatggttggctaacactgttatggtgaagaacgccaatggtaaatggagaatgtgcatcgattntacttggatctcaata

SEQ ID NO: 34374 - DNA, 375 bp, Zea mays
  unsure (1)..(375): unsure at all n locations
tctacagggagagcacattntaagattaacaaatgtttattttgagaaagacaggatttgtagcgcatgccatgcggtgaagcaagttggagcccatcatccacacaagaacatcatgacgaccgacaggccgcttgagctactccacatggatcgtttcggcccgattgcttacataagcatcggcgggagtaagtattgtcttgtaatactggatgattattctcgcttcacttgggtattctttttacaggaaaaaactcaaagccaagagaccttataaggattcttgatacgggctcaaaatgagttaggcttaaggatcaacagaataacaagcgacaacgggacggagttcaagaactctcacatcga

SEQ ID NO: 34375 - DNA, 420 bp, Zea mays
  unsure (1)..(420): unsure at all n locations
agcttacttcgtgtaactctgacaatattttctgtttatcggctctgtattccattcttgtgtcattgatgcgatatgatgtatgatgtgatgctatgcgaaatgatatgatgatatgatgcaaaatggtaatgaatgccgaagacacatactcacactatcactctggaacacacaatctctgtattcccttaggaacgactggaatctctntgccgtttatttttcggcttcaccgtttatttttcggtgtaagttctgcatccccttaggaatgtcttttgaacttcttcgccttctatttcggcggtataagttctgcatccccttaggaacgtcttttgaacttcttcgccttatatttcggcgttatttggcttcgcattccctttggaacgacttttgagaaaannactacac

SEQ ID NO: 34376 - DNA, 292 bp, Zea mays
tgaaggactgcttcggcaggagagcttccgaacgtgatatcttgttcggtccacggagtcgctttatccgagcgcatgttacttatcgcagaaggtgatgagtgaggtatccgtatcccggaggcgtatgagtccctcggctcggtcagccttggctgcttacgtgtactccgtcgtttacaggatgcgctgtccgaagtagtcaataagcacgaaagacatcctgctgaaaagagatcctttttctaggaaaaattcgacgcagagggggtctccacccttttagcccccg

SEQ ID NO: 34377 - DNA, 418 bp, Zea mays
  unsure (1)..(418): unsure at all n locations
ttgatgaatatccaagaagaataccctcatcacatttcttctcaaatttagaaagccggcttccctttattaaaatataacatttgcaaccgaataccctaaaatatgagatatttggctttctaccaatgagcaattcatatggagttttcttcaaaagcttgtgacaatatagtctatttgatgaatgacaagcggtatttattgcctcggcccaataagaatccgatatattatattccgctaacatagatctagccatatcaatgagagttctattctttctttcaacaataccgttttgttccggggtatatttggaagagaattcatgtttaatacccttctcatcacaatattcatcaattcttggcattttgaattccgacccattatcacttctaacctttnttgatgt

SEQ ID NO: 34378 - DNA, 376 bp, Zea mays
  unsure (1)..(376): unsure at all n locations
nttcacgagcgtgatggcgacgtccgcttgctcgggattggcgtgtcgcggggagacggcgctcgtcttcgtctcaagcgcgaagtcgatacccgatgcgccccccgtcggggtgccggcgctgtcgacccgctcgacagccgacgaggcgctgcctcctgcttggccttggttgccccgccttcccctccgtcngcggngaagagggcaggatgagctcgaaggttgttcttccaccacgcggggaagacgtcgtcgattccggccgtcggcgggcgaactgtcggccaccattgccgttgtcgcccggcggtggaatgagtatcatgtcgtagctgccgtcgagggacatgaactcaagactcccgaaacggag

SEQ ID NO: 34379 - DNA, 428 bp, Zea mays
agcttctccaccatgtcgctgctagccaagttgttgcagctacctccatcaatgatcaaacgatatgaacgctccttaatgacacactttgtttgaaacaacgtatgtcgctgattctgctctgccttctccatttgtgcactaagcacacgctgtacaatgaggctctcataatgctctgcatcatctgcaccaatctgttcttcgggtggttccttagtgcctgcatcatcagccgcaagcaaagcaagtgtagcttcatccaaatcactagcagaggaatacccaccatcgtcttttaccaccaaaacacgctgattaggacaatcacgctgcacgtgtccatagcccttgcatcgataacacagaacatctcttgttctacccgtggaggctactgaagaggcactacctgctggtttctgggc

SEQ ID NO: 34380 - DNA, 417 bp, Zea mays
  unsure (1)..(417): unsure at all n locations
tcaactcttcgaaccatatacagatagttttcaagcttcggatctttagccttgcaactcttgtcaatgtgacccgaaacaacctgggaatcagttttgagtatagcccttctgattcccattgcttttaacttccgaagacctagaagtagggcttcgtactcggcaatgttatttgtgcaactaanatcaagttttgcggcataacaagttttgaccttggaaggtgaaaccaacacagcagccgctcctgctccgaaggttccccaagatccatcacaaaacactatccatgcttcggcgtctttatttgcttcctcctcctgagcccctggcgtccagtcagcaatgaagtctgctaacgcctgggactgaatcgaagatctatgaacatattcaatacaaaaatcattgagc

SEQ ID NO: 34381 - DNA, 457 bp, Zea mays
  unsure (1)..(457): unsure at all n locations
agcttcggtatgacagcagagaaggggaaccgacttattatgaaaaggcgaattagaccctgaagaattctacacgggctgcgtcccttgcctataaatagatgaacagtactcccgtactgttcacgctgacttggcattcgcttttcgcatcacgcctatacctttattttccgtcaatccgaaggtacttttataatttgttattctgaatatgataatgaaaataaaaataagttgatgataatatctatattattccttggattccgtatatgaattcttccttatcatctatcgagcttacaaaggtttcttccttcataaccttcgtccggaattcattatatccgaagggatataatgtcttgaagaatgaaggacttttatatttaacaccttttatgttgccttgttcttaactcttagcaatttggagnnaacaagtccccaaaca

SEQ ID NO: 34382 - DNA, 409 bp, Zea mays
tatcaagtctactttcatatggatccggaattatagtcatatctgttctgaggccgccgtaatcattgttttcttaccgagacatttcctgccttttctgcccatggtgctgcgtcaccctattttggcccaatgggtcgtgtatcaagttaggtccattagggacgcatcctagggttgcagcacgaccccaatacccttgtggtcgtcctcccatgtttataaaccccctagccgccaccaagaacagcgggttttgtttagatcaagtttagctctcgctacttgcttgcaagcgcgcgtgctagttcagccgcccgtcttcttgtcttcggaaccccaccatattgtagtttgatctttaaacctacatttagatctggtaattcagcacttgttctacttgttc

SEQ ID NO: 34383 - DNA, 215 bp, Zea mays
aacttacaaaattcccgattacttccttgggggtcattagtgtatatcttggggtgccaccaattaatcgtacttgagtgggattaagaaaaataagagatcttagaataaccctaaccatttcgtagtcattccatttcttgctcccgaggttgcgcacttgattcaccaaggtcttgagccggatgtacatgttctgtggctcctcccctttg

SEQ ID NO: 34384 - DNA, 421 bp, Zea mays
  unsure (1)..(421): unsure at all n locations
tctggtactctgcctcaagtgctacccgttcttcanaattcttgtcctcaatttcatcgtgttggctctacatcattattacagagaaaaggttgcagttccaaccatgatggttaagtgcaggctaacaaggagaatgaaaagggtttgtgcccccaaagtccgcatcacttgcgagggtaggaaaagaaacaaacaataaactttatgcttggagaccaaataaaaggaaaaggctctgcaactgacctttaacacaatttagctgggttctcacaattaattgttaaaaggggacacgcaaaatggtagttcactgaaatgctcacaacttataaaatctgtctcctcaattatgtgacaaaaatggtaataaagggctcgcatgggatatgaatcactgactcagtgcacaaacaaa

SEQ ID NO: 34385 - DNA, 430 bp, Zea mays
  unsure (1)..(430): unsure at all n locations
gacgtgaaaagtgccttcctcaacttactaatcaangaagaggtctatgttgagcaacctttcggctttgaagacagtgagtaccctaaccatgtctataggctctctaaggcgctntatgggctcaagcaagccccaagagcatggtatgaatgccttatagatttccttatagctaatggtttcaaagtcggcaaagccgatcctacactctttactaaaactcttgaaaatgacttgtntgtatgccaaatttatgttgatgatattatatctgggtctactaacgagtctacttgtgaagagtctagtaagattatgacacagaaattcgagatgtctatgatgggggagttgaagtattttctaggattccaagtcaagcaactccaagagggcaccttcattagccaatacgaagtacaactca

SEQ ID NO: 34386 - DNA, 460 bp, Zea mays
  unsure (1)..(460): unsure at all n locations
ntgaagctcctgtcatggacaaagactactatgttcatcttctactaactgtaacagcacttgaatgtttggtgaggctccatctaatgcaggccacgagacattgcatatgtttatttgatttaagttatgctgcataagttctaatcatggtttttgaggtgtcacctangtgttgaggcttaccccangcgtagcaggatgccacagggttttagttacgccatattgcctaggcatcgcatagtaggcgcctaggcatctagacataccctccagtgccacaggacgccgcaacgcctcaaaaactgtggttctaatgcaggctaaggctcatgcaagcaactaatcacactctaagctacaaacatgacagtacaacgattacaaatgcaaaatgatgcatgccatggatataaaaataaatgaacaatagataccccattcangatactcaaca

SEQ ID NO: 34387 - DNA, 408 bp, Zea mays
  unsure (1)..(408): unsure at all n locations
agctntaaaagaaacatctaactagcactaacttctcttactaaccggtagggattcggggttaaccccttgtaattacgattatacccctatgtaatgggcaatctcaccaacctgagtctgaatacaactcccaacccttattagggttagggtttcattctccaacttggtaccagagctaagtttctctctcctccctcccttcatcctagttgtcacccatgtgcagctccatcccccttgccggccccgccttttccctcatcccggtggcgtagcctccccttagattgtcgtccacgcgcgtctctacgccgtaggccatcggaagctcctccccaaaggcctccgctaggagctcacttgcagtccgcgcccgacggcgtctagctgtgcctaccctga

SEQ ID NO: 34388 - DNA, 458 bp, Zea mays
tcttctccttatcttccctgcattcagcaacacgcctcattatctcttcttcttcacgttgttgctcggcagcaagctcctctcgtcttttttctatcctctctttgtcctctgcatcccacttttgaagattcttcaaccacttcttgtctttctctgatatttctgtgtcaatccactgctcaaaatcacatatcggtggaggagtctacaaaatatgcaattattagtacacaaaaaaacatttacaaaaacattcacaaattgtaaacatattacaagactattctcaccattaaattcatccgacgttgaacaatagttggctcaaatgcaaagttagcacacatccaatacctctgtcgataggtgtcatgatcttcagacttatcgaccttacaaggatcaccacacaaacacatagacactggaacaccacttggcaaatgcagcgggtc

SEQ ID NO: 34389 - DNA, 417 bp, Zea mays
  unsure (1)..(417): unsure at all n locations
agcttgtgaaggttcttcatccncacatgtgtcttagcggcgatgccacagccagcccatgctagtcttagcaattaagcatgcatctagaccggccttctcttttgcaaaatcaactaagtaaagtttgccatctaatacacccttaaaagctagtgaaccatcacttcttctaacgacagacacatctacatttatgaatagacaattatatcccatattgcataattgactaacagataacaaattatatctaagagactcaactaaaaacacattagatatagagtgctcggatgaaatagcaattttacctaacccttttaccttgccttgattcccttcaccgaatattattgaatcttgggaatccttgtttttgacgtaggaggtgaacatcttcttctnccccgtcat

SEQ ID NO: 34390 - DNA, 402 bp, Zea mays
  unsure (1)..(402): unsure at all n locations
taccgcanttgaagcatgatcgcttccccttggtcttattcttgctcggctgtccattgcgaccctttagcaccgtcttgaagcgcttaatgatgagagccatttcttcatcattaagcccggccgcctcaatttgcgccaccttgcttggtagtgcctacttgctcctcgatgccttgagagcaatgggttgaggctcgtggattggaccgttcaacgcgtcatcgacgtaccttgcctacttgatcatcatccgcccgctcacgaattttccaagtacttcttcgggcgtcatcatcgtgtacctgaggttctcacgaatattgttcacgagatgacgatcaagaacggtaaatgacctgagcattatgcggacgacgtcgtgatccgtccaacgcgtgc

SEQ ID NO: 34391 - DNA, 390 bp, Zea mays
  unsure (1)..(390): unsure at all n locations
agcttattttcggagtcgtgcccaggctctanttttctgtccgtgcgccatgggcgaacccctcattttcggcccagacgcaagggcgaacagtcatgccgcccgtcgccttgcgcctccgtgccattntccctccgttccgccatgcccttcacccaagacatacatattaccttcggtgtctttccacacgcttggacttagcttatttccggggccatgcccgaacctcggttttccgcccctgcgccatgggcgaacccctcgttttcggcccaaacgcaaggccgaacagccatgctcgcccgtcgccatcctggccttcacccaaggcatacgtcgcagcttcggtgtccttgcacacgcttggacttggcttgatttttggtc

SEQ ID NO: 34392 - DNA, 363 bp, Zea mays
tagtgcaagcgtgtggaatggagagacaacgaagctaatgttgttgttggctcgagtgaatggcaaggtggaacggagggaaaacgggatgatgcgcgcggcgactggcggcacggctgttcggccttgcgtctgggctgaaaacgaagtgttcgccatggcgcaccggccgaaaacggaggctcgggcacgaactcgaaaataacctaaattcaagcatgtggaaagacaccgaacatacagtgtatgtctttggtgaatggcacagtggaacggagggaaaacgacacggaggcacgctgcgacaggcggcatggctgttcggtcttgcatttgggctgataacgaggcgatcgccatgtc

SEQ ID NO: 34393 - DNA, 441 bp, Zea mays
agctttacatagcaaaacataaaagactacttctttcttctgccgaagcttttacttttacacaacgattcataaaaaaccaattctcttttttgccgaagcaaccactttggtacataaatgctatgaatgaatgcttatgtatgcaaatgccatgatgtaatgtaatgtgcaaatgaatgtccgaagcgtatatccgaagccacactcatccatcattttcttaggagcaaaacacacgtcagctctgcattcccttaggaacgactttggagcatctttgccttttacttaggcagtatcagcgttgacttttcgctgtaagctctgcatccccctagggacgtctttggagcttcttcgtcttttacttagacggtataagctctgcattcccttaggaacgactttggagcttcttcgcctttttactttttcggc

SEQ ID NO: 34394 - DNA, 419 bp, Zea mays
  unsure (1)..(419): unsure at all n locations
tacccatgacgaggcatgtgaccagttaaagggttctctttcatcangcctacatcggcactgtcggtgttttgggtccgaccgcacacccggggttgcccctcaaggtgttttaggagtaagacagtgtcaccgactgtagcaaaatggtttgtgccagatgcacgaggaacaatggacaatgtttacaggttctggccgcttggaaatgcataacaccctacgtcctggcgagtatgctttgtgtatggattacaaagttgctctccaaagcgcanagagttgaggtggatgatggaataataatgaggtcgatcgttctgaaagggtgccccctatgccttatatattcgaccgtggggcattacatgtggatatgcacctataagaatgagaactggttgagtctatctggctat

SEQ ID NO: 34395 - DNA, 404 bp, Zea mays
  unsure (1)..(404): unsure at all n locations
gcaagcttcgaattgtccagaatacacaaagctnaatcnntttcaaagnagagattacgtgctctaacgaatacatgaagttgctaaatggattttatgctttccgatgaagttcttgagttcttaacaccctgttggttcttagcaagagaaaatggattttagtgtccttaaaagaacaagaattacttttgttggcatgcgattataccattaatgaaagttgtactcaaaacgctaaagttgttatctcttatgcaagtttgcattctcatgacagttcataaagcattcatgatcattttattacgtgtcgagcactatgaacaaactgatatcaaataagaatctgttctataactngagtgaccacatgttgtgtatcgtgctactagtgatatcct

SEQ ID NO: 34396 - DNA, 433 bp, Zea mays
ctatcaaatggatgtgaaaagtgccttcctcaatgtacttatcaaggaagaggtctatgttgagcaacctcccggctttgaagacagtgagtaccctaaccatgtctataagctctctaaggcgctttatgggctcaagcaagccccaagagcatggtatgaatgccttatggatttccttattgctaatggattcaaagtcggaaaggccgatcctactctattcactaaaactcttgcaaatgacttgttcgtatgccaaatttatgttgatgatattatatttgggtctactaacgagtctacatgtgaagaatttagtaggatcatgactcacaaatctgagatgtctatgatgggggagttgaagtatctcttacgatttcaagtgaagcaactccaagagggcaccttcattagccaacgaagtaca

SEQ ID NO: 34397 - DNA, 371 bp, Zea mays
  unsure (1)..(371): unsure at all n locations
agctngccaaaagctctctcccctcttaggcttttccttccaattcaccaagctcgtcgcccatacatggccactccaacgctggggcctggatatcggcggaccactgcctacagctcaagggaacctcaagttcaccttcgtcgccgtcgaatatttcacaaagtggattgaggccagcgcaatatccacaataacatcaaaaaccattcaaaaattcttctggcaaaacattgtctgccgcttcggagtcccgtccgaactcacagtcgacaacgacaaacaatttgatagccaagacttcagggatctttgtttttccattggcaccaagcctgtcttcgcctccgtgtaccacccacaatacaacg

SEQ ID NO: 34398 - DNA, 422 bp, Zea mays
  unsure (1)..(422): unsure at all n locations
cttgcgtccttcatcccagacttcttgaatatatcttgaatgtactttgtttgagagaggaatgtcccttccttgagttgcctcacttaaaatccaaggaagtaagtcaactctcccatcatggacatctcgaatttctttgtcatcaccctgctaaactcttcacatgactttgattagtagaaccaaatattatgtcatcgacatatatctggcatataaataaatcatcattgcaagtcttagtgaaaagagtaggaccagtttttcctgaccttgaaagcattagaaataaggaaatctctaaggcattcataccatgctcttggggcttgcttaagtccataaagcgcctagagagcttgcacacatggtcggngtacctgtcatccttgaagccagggggttgttccacgtacacc

SEQ ID NO: 34399 - DNA, 371 bp, Zea mays
  unsure (1)..(371): unsure at all n locations
cacaagtgaagaagaacattgcttatgtaaaacttggtgtgcatatcttgaagacaactggtcaagccaaatatgaaggcaagaagagcttcgaagtatctagtgcatgggaaaaggacaaggacgccgatgaacccatagccacgggcgaaaaagaagatttgcaaagtcaaggattgattgagttgagaaaagatacggtgcactgagaatcactatcaaaggacatgatgtacaactaatgaggtaccatatatggttacatggtgtaagtcataaggctcaagctcaagacatagagcaaagtcactagaaggagtagtagtgtcaaagctagaacctggaagcaacccanaaagagctatagttta

SEQ ID NO: 34400 - DNA, 452 bp, Zea mays
tctatagggagagcgcatcttatgattaacacatgttcatattgagaaagacaggatttgccgcgcgtgccatgcgggaaagcaagatggagtctcatcatccacacaagatcatcatgacgaccgacacgccgctcgagctactccacatggatctattctgccccattgcttacataaacgtccgcgggagtaagtattgtcttgatatcgcggatgattattctcgctacactagagtattctttttacaggataaatctcatacccactataccttatagggattcttgacacgagctcaaaatgagttctgcttaatgatcaggaaaataagaagcgacaacgggacggagttcacgaactctcaaatagaaggcttccttgacgaggagggcatcaagcatgagttctcctcttcctacacgccacaacaaaatggtgtagtggag

SEQ ID NO: 34401 - DNA, 380 bp, Zea mays
  unsure (1)..(380): unsure at all n locations
agccaactcaagttagtcttagcaactaagcaagtgtcgagttcagctctttcaaaatctaccaagtatagctgaccctctaacactcccttaaaagctattgaatcgtcacttcttctaaagacagtaacaccaatatcagtaaaaagacagttgtagcccattttacataattgggatacggaaagcaaattgtaatctaaagaatcaacgagaaaaacattggaaatagaatggtcagaagaaatagcaattttacccaaacctttgaccaacccttgatttccatccccaaatgtgatagctcgttggggatctttgtttntctcatatgaggagaacatccttttctccccggtcatgtggtttggtgcacccgc

SEQ ID NO: 34402 - DNA, 405 bp, Zea mays
tgagagatctggtggcctacctgagctcatatacctgctgagaactttcatcaagctggcagggcagtacagtctgagtgggccaccaccaccgacagatgctgacagcgcacagaggatgtttgtcgactacttagaccgtgaacttggtgcatgataattttcattcgcctgcgttgcattaacactatgcagcatgtggttaacttgggggatagataattgaagacaacttgattgtacttgttccttgttttgtggaaatctttatatgactatcttaccgtccttgacgccttggtggacatgcaacaggatcattttttttgtctcgaacccgcaggagaggtgcacatcattatattagaaagataaaaagggtttaatatagattgggcaaaaaag

SEQ ID NO: 34403 - DNA, 395 bp, Zea mays
  unsure (1)..(395): unsure at all n locations
ttaagccagtggcgagttcaactctattaaaatcaactaagtatagctgaccctttaacactcccttaaatgctattgaatcatcacttcttctaaagacaagaacacctaaatctggaaaaagacagttgtaacccattttgcataattgagaaacagaaagcaaattgtaatctaaagaatctacaagaaaaacattggaaatagaatggtcaggtgatatagcaattttaccaagtccttngaccaaacattgatttccatccccgaatgtgatagctctttggggatcatggtttttctcgtaggaggagaacatccttttctcccgagtcatgtggtttgtgcacccgctatcaattaatccaaactttgagcccccgggatgggcataa

SEQ ID NO: 34404 - DNA, 461 bp, Zea mays
  unsure (1)..(461): unsure at all n locations
taatgatgaattggctagtcttaatgctcaacttaagactagcaagcatgatttcgataaactaaaatntgcaagggatgcctacacaattggtagacacccctcaattaaggatgggcttggcttcaagagggaagccaagaacttaacaagccataaggctcccattcccgccaaggagaaagggaaggcccctatggctagtagtgtgcaaaagaaccatgcttttatgtatcatgataggagacaaactagaaatgcttataagagttataatgcctatgatgattntgactctcatgccatgtttgcttctagttcttcttatatgcatggtagaaatatgtctaggagaaatgatattcatcacgtgcctagaaagaatgttattcatgcccctaggaaagtagtgaatgaaccttctacaatctattgtgctttaaatgcttcctttgctattt

SEQ ID NO: 34405 - DNA, 448 bp, Zea mays
  unsure (1)..(448): unsure at all n locations
tgcagcttctaagggagagcacattttgggactaactatatgttctatttgagaaagacagggtttgtagcacatgtcaagcaggaaagcaagttggttcccatcatccacacaagaacatcatgacgaccaacaggccgctcgagctactccacatggatttattcggcccgatagcttacataagcatcaacgggagtaagtactggctagttattgtagatgattattctcgcttcacttgggtattctttttgcaggaaaaatctcaaacccaagagaatntaaagggattctcgagacgggctcaaaatgagttcaaattaagaatcaaaaagataagaaacaataatgggacggagttcaagaactcacaaatcgaaggctttcttgaggataagggcatcaagaatgagttctcttctccctancacacactcaacaaaat

SEQ ID NO: 34406 - DNA, 436 bp, Zea mays
actatgaaggggccctcccacttgggctccatcttgcccttggactccgtccgagctgttcggatgagtacgaggtcccctcgctgaactccctcgggatgactgcgcggtcgcgccatgctttggtctgggcttgatatttgtttatggcctgtatggcgaagacccggtctccgtcaatgagatcttttgaagttggctcatccacgtcggggacggctgacggaattgtacgcggggacccatgctttatttcttgcggggtcattgcctccgatccgtatagaaggcggaaaggagtgaacccggtcgccctgcactcagttgtgtttagcgcccagactgcctccggtaataaatcggtccatctgccttttctttcatcgaggagcatcttgttgacagctgtgaatattttcccattggcgcgctccac

SEQ ID NO: 34407 - DNA, 453 bp, Zea mays
  unsure (1)..(453): unsure at all n locations
ntaccaaatggacgtgaagagtgccttcctcaatggaccaatcaaggaagaggtctatgttgagcaacctcccggctttgaagatagtgagtaccctaaccatgtgtataaactctctaaggcgctgtatgggctcaagcaagccccaagagcatggtatgaatgccttagagattttcttatcactaatggcttcaaagtcggaaaggccgatcctacactctttaccaaaacacttgaaaatgacttgtttgtatgccaaatttatgttgatgatattatatttgggtctactaacgagtctacatgtgaagaatttagtaggatcatgacacaaaagttcgagatgtctatgatgggggagttgaaatatttcttaggatttcaagtaaagcaactccaagagggcacctttctaagccaaacgaagtatactcaagatattctaagcaa

SEQ ID NO: 34408 - DNA, 449 bp, Zea mays
  unsure (1)..(449): unsure at all n locations
acctgcangctgcaagcttcggtacaccacaacttcattgtcttcagggtgtggacaagtnttttccccttcgtccgccctcacaatggacagatcccggaaataccttcctctcatattaacaagatgattctctttgatagttgatttaccataaactgaatggcttggtcgccaggggcgatcttcggagtcttcgccaccgctgtccatatcataactttcactgtcaccagtatcttcagacagcccctccagaatttccttggtaatcttttctgtgttggacttcgacatcgctataagaaaccctaggttcttctcttcatcaagactcagcttcatctcagcagcagccttcttagcagcttcagacatcttcggaagcgctaaanaactgtttctaaaagccgaagcttcaagctaanaacttagcagatcaccagtgc

SEQ ID NO: 34409 - DNA, 428 bp, Zea mays
  unsure (1)..(428): unsure at all n locations
tctccgccgacgagcctgtcagcgctacccacggaccgacctccggctctttggctntaatgtctggttctcgtcccttgagtggggacgcgaacaagggccttccggcggcagcgtccgtcctgngaccatcgctactgccgcagaggttgctggcgaatcaccaggagtttgtcatcccgcaggctctcctatgtggaggttgttcatacccgcgggggtggaaccggagttccgtctgtaatggcaccttgagtgccggtgtttgttcatcgtggttgtcggggcctgaacatttatgtattttggcgtgaagccatgtttcttcctcatttcaagcactangactcgcctgtcgactaactgaaccgcttaaccaagtgtgagtcgcctcgtgcgaaggtgacgagtgaggtatccgtatcccg

SEQ ID NO: 34410 - DNA, 375 bp, Zea mays
  unsure (1)..(375): unsure at all n locations
agcttctcccccctctgcctctccatgctggtggcctgtangaaagttgttgcattcccgaagactgcgagttgtgctggctgctctgagtattgttggtcctatcatcatttgtattgggattgtgaattgttctgacgttcctggggtggagtcttcctccgaagcccctagtcatctcaaaatacctatatgcttcctcccttcgttagcggaaatcattggtagctcggatgtattcatccatcttctggagaagcttctccaatgtatgtggtagctttcttgcacaatattgtgttgtgggtactggtcggagccccttgatcatggcctcaatgacaatctcattgtgcactatatgcgctngagctc

SEQ ID NO: 34411 - DNA, 392 bp, Zea mays
tatcacccgcagacagacggtcagacagatagaaccatccagattcttgaagatatgttgagagcttgtgctttgcaagacaagttaggttgggacaagaggctactatatgcagaattctcctacaacaacagctaccaagccagtctaaagatgtcaccattccaagcactttatggaaggaattgcaaaacactgttgcattgggaccaacccggtgaaaggcaggtgttcggtccagatattctgcttgaagctgaagagaacattataatggtccgagagaatctaaagacagcacagtctatacagtgaagctatgctgacagccgaagaagagaacagaggtttgaagtgggagattatgtctacttgaaagtgtcaccaatcag

SEQ ID NO: 34412 - DNA, 450 bp, Zea mays
  unsure (1)..(450): unsure at all n locations
ctctggttgaatggactagagctaatagttgactggctaaaataactggagaccaactcgagaagctggttccctgtttaaatacactagagctaatagttgactgctaaaattagctaaagacatccaaacgatgtaactaatagtttagctagacatcaaaacaccttacgtttagctatatattcagcggtgttcttcaggaattatagaatgcagccttgtacgcacgcgagcaaagtaaaatgcgcgggactgagcaacgtttttaaacaaaggaggggtacaatagtcattgtctatgaaaaagttataaaccaattntttaaaactagtggatccaaacatctctatccatttttttttctaaaactcagtttccgaanatctagaaactagttttaataaactagagtggattcaaacaagacccttagaaggtnnactttg

SEQ ID NO: 34413 - DNA, 434 bp, Zea mays
  unsure (1)..(434): unsure at all n locations
taacaagcttctgcaaatggaacatagaagatgacttctttggatcaaggcaagcaaaaccaactagcaactcacttgaaacttcactgaaccgatgacacaactctgtattgattttatcaagaataacaaaaaaatatctcggtgcggtagtagtgaagatttgtgactgtgaatccatctcgccttgatcgacctctaataggtacttctgcatccatgtctaccacaagaatacccttattagcacatcaagtaactccatggcaagaacaatatcaacactcttcctttgcaacatttgagagagctagcggagggcgaaaggagcagcgcctgcagcctgcagttgggggcggcggcggcggcttctcctagatgctagaaaaccacaggcttctagaanaccacggcaaagctaacatgcctcgatc

SEQ ID NO: 34414 - DNA, 442 bp, Zea mays
  unsure (1)..(442): unsure at all n locations
agctntctttgaaagattgactgaagtaacctgttccatgctcaagctttcaaagaaggcttctaataatttggcagcatctgcaatggtatgcatcttcttcgacagcttgactgaagtgaccagccttcttcaagagttcgtgtggtccattctcaatttctgactgtatttactcatattaatgatgactcaaatgcttttgatatctcaatggtatgcaccttcaaccttgaaacaagaattttgtgaacaaataggtttccttattcttagcttttgtaggatgccatatgccagttgaggatggtccgaaggaacgtcaatgtgctagctagggagtactacaattattctttcacattctatcctgattagtgatcgttatcttgttctcctttttacctcctaaattttttgggacatnnatgtgtttgtcttt

SEQ ID NO: 34415 - DNA, 473 bp, Zea mays
  unsure (1)..(473): unsure at all n locations
ttctttgtccagaacaccctacaacaaagtacatcaaattagtatattgttgctacattcgcaaataaaaatacagatgtgatgccttatctacctccactagaagatgttacaaaggaattaacttgcaatcacaattgacaaatatgtaatacaacaattcagcaaaagagaaaagggggaaggtattgaaaagcatatgataatatgacaagtcaggtctctctgctctgcaacatatgcattctagcaatttgtatattaaattccagcatgatgtcatggtgtgatagtggaaacatagtaagaataactataccttgctaagagcataaccacgccgaagttcttctttgattntgctgaaagtactttctgttgtactagaggagcaaaattctggtggaatacagggcaacattatgggcatgagagagcacccatcangaccctcacaaagaactggcggatca

SEQ ID NO: 34416 - DNA, 440 bp, Zea mays
  unsure (1)..(440): unsure at all n locations
tggacgtaaaaagtgcttttctcaacggaccaatcaaggaagaggtctatgttgagcaacctcccggctttgaagacagtgagtatcctaatcatgtctataagctctctaaggcgctttatgggctcaagcaagccccaagagcatggatcatgacacagaaattcgagatgtcgatgatgggggagttgaagtatttcttgggatttcaagtgaagcaactccaagagggcaccttccttagccaaacgaagtatactcaagatattctaagcaagtttgggatgaaggatgccaagcccatcaaaacacccatgggaaccaatgggcatctcgacctcgacacgggaggtaagtccgtggatcaaaaggtataccggtcgatgataggttccttactctatntatgtgcattctcgaccaagatannttatgctttc

SEQ ID NO: 34417 - DNA, 435 bp, Zea mays
ctgatggaacctgaaagtaagatctatccttgtcagtctggcaccttacatgaagagtacaatatattaaaaaaacatgggataacttattatattcagaatcacctttttcagaatgtcttggtcaatattttccttagaactcaacatagaatctactataactttctgaagtttctccactgcgtctgcaaatgcacaatctgcaaaaaacaatcaagtttgtcgaaaatactgattatacaggatagcaacatcataagctgcaaatccagtaaaagtatcatgaatacaggtgacatgactgacttatcaatcaaatcagcaaaaaaaaaggtgtaaagtgtgtcaagcaagccaggagaaatgtggcacaaacctttcatgttaggatctacaatttgaaatgtctgtgtgtcagcatcaacctcagtc

SEQ ID NO: 34418 - DNA, 351 bp, Zea mays
tgcaaactgagcccagcttgcaaattacacttgagaaagcttctgacgggtctttaagaataatgcctggaatttaacagcaagtgcagtcgatcggttaagaacagatttatttactccatttcgagccgagcagccgataaatttacctcgctcatacttgaagatctgatcgaaaacctttctaacacattgatggggagattgacgagctcgaccatatcatagctgtgcatggtgacttctgtgcctgagtggcttctcgagggactgttgtaccttcctgaagctgctggatcatggagattgtaataggccaaattccacttataccatcaatcctggatgaca

SEQ ID NO: 34419 - DNA, 338 bp, Zea mays
gcaagctttgggaactatgcccgtatcttatctgtttgagccggaactataagagcttgccagatgcccccgttcctgtcgaccacgaccagcacccaacataagacttccctagttatttagcccagaccagagccatgatagttctcatggtagcactggtttcccgggtgatcactccatgttccaattaatatgcaataatcttgtttaaccatcgggttaacaacaataatgtaaacctaccatcttggaacattaatatcataagcgggagtgactgcataaagttaagttgtagcaatagcatagctacttgattaaatcataatccccaa

SEQ ID NO: 34420 - DNA, 405 bp, Zea mays
  unsure (1)..(405): unsure at all n locations
nngtgagcttgaacttatgataaaatagtacttttgctgtgtaggattcgactggaaacatacctactgccacgtcctgagcatcctggattgcttcggcctccaggtggttcaccttttcacggttgtaagcctgaccacggactcatggtgcttgctgtggtgctccttggcttactgnggcattgactgctggcggctgctgagctgctttctttggacagttcttcgcctagtgattntgctctccatagtagaagcatgcatgacctcctacttgtgctggggctgcttggccattctggttggttgctatgtcaagaagacgagttgcatggttgttctgacgctggtactgatttcctccaagttgggtgttctgaccgtactgctgctgatgatgat

SEQ ID NO: 34421 - DNA, 451 bp, Zea mays
  unsure (1)..(451): unsure at all n locations
tcgacccggatcttaagcaccgcggctgcaagcttataactttncaggtgagcatcgaatatctcgtgtcttagatatacccttattttcatctccaccaacaataccaacattgtcatcaccagacccatcgccaccaggaacaaactctgtgtctttttcatcatcactttcggcatcttgtataggagggactttcaaccttaatctcttcttcctttccttttcatttttatctaattgctttctcttgttttcaacacggggagagcaacggacagcatgagcgccttgctggcctgatacattctgatcttgatccattataaaaaacactgaaaaatgggaatgcaaaaaacatgagggcacaaacacatggtacagatctcataaccaaaaatggctaatcaacaaactaatacacactaatgctgcacacatacattagtac

SEQ ID NO: 34422 - DNA, 410 bp, Zea mays
  unsure (1)..(410): unsure at all n locations
tcngctatggntgaaattttcaacggcacttcagtgcaatggcaatgaatgatgtggtaccttcacacctacccgtccgtttatatagtgctgcacgtgagaatgtgaatcgccaagtcgcccgctcccgctgaacggtggaccactcggcgcctgagaagtgaatcaacagatcgctcgtacccgttgcgtggtgggccaccttgagttccaaatattctaatcgtttctcggcaacatgctcacggaaggtgttttgcggaccttctgcattccgaagcctttgagatcttttcatggatccagctcgttactaaaaaagatctaacactgcgaaggggctactgttgggggcctgcttcgtcaccgaatgttctctaagcaagttggcacaagcatacataacatga

SEQ ID NO: 34423 - DNA, 335 bp, Zea mays
cttgagcagtaaccggcttcgtctggaacctcttgaaactggtgatcagcatgtccttcagcatctgtcatgatgtgattgttcctggccgaagagaggagtaccaggtttgtgcaacattcttgactaccatgacgaaggattttaccatgactgtagtattgcccccatatgaagatatggttgcttcaaatctgagtgcccatcatacatggggagctgggatgacttgtatgatggggccatagggtagcctccagttctgctgacagaggagaagcatcatcaaaagcaaaatttccatgatggaaatcatcataccattcatcatcatc

SEQ ID NO: 34424 - DNA, 449 bp, Zea mays
  unsure (1)..(449): unsure at all n locations
tctccgccagtctgagcagttcgaacgagatattctagatcttaatgcaaaacttgaagccgaagctcaacaaaattcagatttgagaaagctactgacaggtcttcaagaaaaatgcctggaatttagcaacaagtgcattcaacggttaagaaagattttttacacagttggagccagcagcgaaaaatttaccccctcagctgaagatctaccgaaaaccttcgaacacattgagggggagattgacgagctcgacgaagtcatagctgggcatggtgacttctgtgcctgngtggcttctcgagggactgctgcagccttcctgaaggctggctgtgatcatgggaagattgtcaataggccaaatttcactttatcaccatcaatcctggatgacatccctgatcttgcctgaagtatctcgaacagatttgtaaaaatgatat

SEQ ID NO: 34425 - DNA, 415 bp, Zea mays
agcttggattatctcttatcgtctctattgtcaaatgttggcttcttgtggggagaaaagttgagtatgggaaaaacggggagtttttgaaatctttgatcaatctcttttggaatgactctctttatacttcaacatgtgtgtttgacttacagatagagatttgagtttgatttgcaaaaacaaaccaagtggtggctaaggatgatccatatatgccacaaatgacataaaccaatttgagtttttatttaaagtgattttgcacttgttctagttgctttatgttgtgttggcataaatcaccaaacagggggagattgaaagggaaatgtgcccttgtgccatttctatgtattttggtgatcgagtgccaacacatgtgcctcaatgggaacttatgttcatggatgaa

SEQ ID NO: 34426 - DNA, 493 bp, Zea mays
  unsure (1)..(493): unsure at all n locations
acactcctagaatactaagcttncttgatctcgtaaggtccaatatagcgaggagctaacttgtccttgatcccgaatctctgaacacccttggtgggtgataccttaagatagacatgatctcccacctcatactgtagaggcttccgcctcttatcatgatagctcttttgtatggcctgagcagctttcaagttcttggtaataactctgacttttgcctctgccttgagtaccaagtctggcccaaaaattaccctttctccatcttgataccaatttagtggggtcctacaccttctcccatataatgcctcaaaaggtgccatcttcacactggattgataactgctattgtaagaaaactccgccaaagacagacacttgtgccaatctattccgtagtgtagtgcacatgctcgtaacatgtcttgcaaaacttgaatcacccctttctgtctggccactctgttcgggggagggatgctgagct

SEQ ID NO: 34427 - DNA, 434 bp, Zea mays
  unsure (1)..(434): unsure at all n locations
agcttatcttgacaaaattatgtatattagaaactatcttctcttataataaatcaagcaagaatattttatcaatataaataatgtgtgtgcattacatttttttagtacttatccacgtaaaccaaataaataaataacctacttttgcatttgcatgctagagtttgtttgcatgcttaaattataactgaaagccaaactcaaatttgaaattaatttgaaattgcatttaaatctacaagtagaaatcgagaataaaaaaacaaaggtgaactcgtcagccactcctcctagcatcacctctgcatggcccatgagcaaaatttccattgcttggccatctcctacacgagcaagtgctcagcgtggngtttgtttnttttatcaatatattatttctttattcaccttgccgggcgcttgcgccatcg

SEQ ID NO: 34428 - DNA, 431 bp, Zea mays
  unsure (1)..(431): unsure at all n locations
tactaagctttagtgactagtgagagtgatttgtggagttctcttgagctcttgcgctnggatcgcttcttttctttcgcattctttcttgtgatcaaaacactcacttgtaattgaggcaagagacaccaattgtgtggtggtccttgcgggaagtttgattcccaaagtgatttgagaagagaagctcactcggttcgagggaccgtttgagagagggaaagggttaaaaaagacccggcctttgtggcctcctcaactgggagctggtttgcgagaaccgaacctcggtaaaacaaatccttgtgtctcatcgatttactcgcttgcgatttgtgttacaccctctcgcggactcagttntatttctaatgctaacccgacttgtagttgtgtttatatttgtaaatttcagtttcaccctattcacc

SEQ ID NO: 34429 - DNA, 441 bp, Zea mays
agcttgcaacactctgtgagaaagaaaactttgtgaacaccggatcaagttcatgttatgctgcgtatcaggaaagatggcgaaggtaatatacatcaagccctgttgttcacgacttcaggatatgctggacagaggacaccattgtttcttaaacaacttacataatacattcacaacatggaagatgatatacactgtgaagcagaagcaagcgaacaggagcggtctatctaataatgatgggggttataacataacaccactatagaaaacaaattgaatcataaatatttaagataaaacgtgagaagattcgcgctcgcgtgtcaaggaccacgggagaagaggatccagcgtagaaggcgttcctgcccacctgttgtccatggcgtgttgtgggcacacatcatcgccggtgagcagattggagaatgatga

SEQ ID NO: 34430 - DNA, 486 bp, Zea mays
  unsure (1)..(486): unsure at all n locations
cgctntcttcggcagtgagcaagaatntgcaagaatcgaatatggtacatgcaatgcaatcttgtttagtggtatcacatatccatcagacgattagcaagcagtttttaattgctgccagttagcaactagtaacggttaaaaccagcaatcaaatgaaatctcacagcttacacatgcagggagacatgcaaattactaaattggtgtcatgatgaaatcatatgaatgagaagacatgaaacctgcggcaacagcaacacccgaagcctttgcagctattgacagtaccgagacatgggaaattcgaaatttaagtcattgttagagaaaatgctacataaatcgatattgttgtgtcgtatttgtcgctatttgacaattcagttgccatcacaatntgaataaggtacctgagtagtccgtgtatttatcgattaagcacagacacgcacgcgcgagacggcaaatgatagaataaacaca

SEQ ID NO: 34431 - DNA, 439 bp, Zea mays
  unsure (1)..(439): unsure at all n locations
agcttctaaagggagaacacgtgataggtctaaccatatgttcaattctaaaaagatagaccttgtgcagcttgtcaagcagggaaacaggtgggaggagcgcatcacagcaagaatgtgatgaccacttcaagacccctggagctgctgcatatggacctcttcggacccgtcgcctatctaagcatagggggaagtaagtatggtttagttattgttgatgatntttcccgcttcacttgggtgttctttttgcaggataagtctgaaacccaagggaccctcaaacgctttctcaggagagctcaaaatgagtttgagctcaaagtgaaaaagataagaagcgacaacgggtccgagttcaagaaccttcaagtggaggagttccttgaagaggaagggatcaagcacgagttctccgctccctacacaccacagc

SEQ ID NO: 34432 - DNA, 457 bp, Zea mays
acactctacctgcacgcatgcaagcttggttcaagctacaaatgggatgagtgccactctagcaagactccatgatctctccattcgagaaataatagatcagtgacttcgaattatctttcgctactatatagtcatgagcaacctacttatatgtaaatatgtgacaaccattttttgttactatgtagtgataatcaacctacttagatgtaaatatgtgacagaacagggtttgttccatgaatattatgccagacttatatgttctttttaatgggagctacatgagacaatcttttgtgcctatgcatctatgtatatatctcaaatattgataaactatctattaccaattcttaaccgctacaacctacaatcagatatatttttgttcctgtcaatcaacaacatatgctaggtaatttaccatctatctttattcagtcattttctt

SEQ ID NO: 34433 - DNA, 495 bp, Zea mays
  unsure (1)..(495): unsure at all n locations
cttataaatggacgtgaagagtgccttccttaatggaccaatcaaggaggaggtctatgttgagcaacctcccggctttgaagatagtgagtaccctaaccatgtttataaactctctaaggcgctatatgggctcaagcaagcccctagagcatggtatgaatgcctaagagatattcttatcgctaatggcttcaaagtcagaaaaggtgatcccactctctgtactaaaacaattgccaatgatttgtttgtatgccaaatttatgttgatgatattatatttgtgtctactaacaaatctacatgtgaagagtttagtaggatcatggtacaaanattcgagatgtcaatgatgggggagttgaagtatttcttatgattccaagtcaagcaactccaagaaggcaccttcattagccaaacgaagtacattcaagatattcttaccaagtntgggatcaaagatgccaagcccatcaagacacccatggg

SEQ ID NO: 34434 - DNA, 401 bp, Zea mays
  unsure (1)..(401): unsure at all n locations
ttgcatgtctcttggaatgtttaattataccttattaccaattaaagattgaatggttatgcgcatgatgagtntattaaaaatccatcggtgtcactggtgttaagttgaggtttatttgcgcgtgtgaagtaataatgtgattaatacttaaaactcttattcgatagtagaaattgttttggcttatatagagaggtggtgacatgccaaagtagtcatcgcttcctctatatcttgagtagggtcaatacgcgttatgtgttcatgaattgtgaagtaagcacatgatgtgttcgagttagagaatagtggtttacgggtcgtatgattctgtggatgtgtgaaaatacatgtgaatatgtatgtntatataaatgttgtggtatatgttgtgtctc

SEQ ID NO: 34435 - DNA, 375 bp, Zea mays
  unsure (1)..(375): unsure at all n locations
gcctcgggagtattcttgcaggagcaggattcaatgtgtttgctgtntctaatacaacaactagcacatttaccatcctccttctcttaggaggtatggcagaactcttgtgtgacttcagcgctgttgcttctattgaaagacttagaatccctggggtctttggtacttcttgcagtctcgatctttcagacctatctatagaaaccattggttcaactagctcaaccgaaaatgccttccgcattatagccggctcttcagtcctacgaggaatagtttctcttgattcaacagctgaagaggcctccacgccaaactcatgcaccacagccggttcaatgtaacacagtcggtgggaagtaccttcatctt

SEQ ID NO: 34436 - DNA, 425 bp, Zea mays
agcttcgagtcggacttactttggataagaaatccatgttcgagagaagagaggcctattagcgctctcttggggcacgacaaagcacttgaacctgatgttcatcgtcgttcttacaaatatcgggtcggttcagtcatggtaagttgatttattatttatgttatttggatttatgactggagtaattagatatatggtaatcgtgatgatccctgtatttagcgcacgcgcgttgtggtagtttaaatatatatgaagtacgatggagttagtaatacgaaaggtagattaatttatgtgatattcgggcgagttgatgacgtaaaagatagttttagtatttctatcggttggttaatagattttctagtgttattatgtcgatttggttaattgatgtagtcgatgccctgcttaattag

SEQ ID NO: 34437 - DNA, 419 bp, Zea mays
  unsure (1)..(419): unsure at all n locations
aagcttnggcgaccaagtgatctagctcttcgagttccacaaagttgaagaccctgagcatctgcttggagaaggtaagtgtcttctgacccactatgtcccatatactttataatacactgtcccgcatactatggacaacctaaggatttactagctctctatgtaccttgaccttgatttaccttttggggtactatggttagctacatgctagcgccttactttaatcaatgaacatgatgagatacaatgatgatgctatcattttattctggatatgatgatatacttgtggcatttaaggggactcgagatgtttcccgagtacctctccgtaggacctgttcgttgagagaccacccgggataacagtgcaaccatgagggtgagatgggatgcccttagctcattaatta

SEQ ID NO: 34438 - DNA, 431 bp, Zea mays
agcttataagatcacatgttccacttagcaactccagtagttctctaaaagactcactaaatcaacaatttagatagttaatataaaaactcctctccaacagttctttaaataaacttgctaaatttagcaacttctcgtgtaatcgtattttctttctacatttggcaactatttaataactccctaaacaaaaaatattgactgcattatgtagttaatggagatgattgttgacatttgtaacttttttatgtggatagataaaaaactactaacctatatttaaagaactattggataactcacaattttttactcccgaagttatttagcaacttcttaaatttgtgatttagagagctaaaatttacataactattgaagttgctcttagatcggaaaaaaggttagaatcatttatgccacta

SEQ ID NO: 34439 - DNA, 470 bp, Zea mays
  unsure (1)..(470): unsure at all n locations
tgcattgcatgtntaaattccttgtatcgcatctaagacttgtctaacctagttgagataaccgccaacaaagcgagtgaaaaagcttaactcgggtcaaacctgacaagtcttagttttaagcttttagcacttaaattcttactttctatgcaattattggttcttgaaatatgcatgaggtactgcacttacggggagtattcaaaactcaaatcactcataaaaaccccttagtgcaaaccaaaatgcaaatttcaccatttgcctattttctctaaaaattatctagcctatggcgaaatattttgaaaagtatatgagggtgccaatacctgtcccaacaagtgttattntgtgtgattataagttgggatttggtttggctgggagttagatagaagaattcaaatcttaccaaactctgctctgtctgggctcaccggacagtccggtgtgcaccggacact

SEQ ID NO: 34440 - DNA, 420 bp, Zea mays
agcttgctacatgccttcttctttatctccatagtttaaaccttattggaacactaccccacttaaaaaaatgagggtagaactcttgaatcttggggttttaaactccttgaagtacctcataacaagggtgttacggggccttcttctgctgttgctgcttgagcaggctgcggagaaatgactaacatagagttgattttgggagaaccttcttcttatcttttcttcactatcttcttttttcttctcactgcctctttctttctctttgctcttcccactggaggattctatcaaagactattaccatcatacagaggaggaaaccaaagatgttgaaccatgtacaatagtcttcaacccaagaatcaccaagcattatgatcttatgggcgagggagtgaaaaatggagttgc

SEQ ID NO: 34441 - DNA, 486 bp, Zea mays
  unsure (1)..(486): unsure at all n locations
actaagcttcactcctcctgccccgcttgcgctcctnctatcccacctgctcgcttccgggagcgcgatgagactgaggtgcgtccacttgctgcggatcccangctgtttgatcttcagcgtgctacagcggcacgggtacatcggttcagacacgtacccatggagtcttggttacctgcacagagagaccctgtcgcggcagattcattcagcaccaggatacaagagtctttctacagagcacagttgtcagctcatattgctctgcgagtgcaccggctattagatctccctgccttcctgctagcagccggtgcagactctgaggttcacctctcctatttgcctggacttctgactcttctaactatcaacggcagatatgttgagaaatgggtccgagttttctatgctactatatggatcgaccctgatcaccactggatgagattccgattgagagagaggatgtcactatcatgc

SEQ ID NO: 34442 - DNA, 411 bp, Zea mays
agcttgcaaggatagcgcggctattttattattggtaaccgtaatctacacccgcttatgttatgattttatcatgccagatatatgtacctaaacaaacgatatctttatacacgttacccgatgcaacgggagatgcaaatgctgcacacgtccatggattacgttaaccagaacaaagtataagggcgtgtttaaattcactggcctgattttttggggtaaccaactggattcatacacatttattacgggaatgtcgaatatgatatcccgttgaccattataacaacattgtgaatttctacctttgaggagttttatgatcaaacttggaggtcgcccaccagtgtcatatatgcatatcttttccgggtgcagagtaagaagggaatcctttgatttatgatg

SEQ ID NO: 34443 - DNA, 469 bp, Zea mays
tgccagttcttgtcaaagcaacaacatttgccagcacatcatctgcagaccatacctgtaacatggtcatttgcatgctgggggctggacatgattggacccttcaagaaagctcaaggaggctatactcacgtgttggttgccattgacaagttcaccaaagggatagagtacaagcctattgcttctttaacctcagccaaggcagtggagttcatacaagacataatgttcagatttgggataccaaatagcatcataaccgacctgtgatccaacttcaccagctcagaattctttgatttctgcgaacaacggagtatccagatcaagtatggatcagtaatgcatccaagaccaatggtcatgtggaaagggccaatggaatgatacttgaagcactcacgaagaaagtgttcgtacaaaatgaatagcttacacgatagtggatcagagagctggcatatgt

SEQ ID NO: 34444 - DNA, 401 bp, Zea mays
cagctgcaactcaatgtttagagatatgatgtcctatttatccaaggactctacccgctgcactgaaggccgattctgaagacacccgtctcacaggaatagccatgaacaccctagccattgaagacaatattggataagcatttgaatatttcttccaccatcctaaaacattgaagcattcatctggcttgataaggatcctagggtcctccaagtatgtatccatttctgttcgctctggacgggcattcgcattttgagatgcaaattgagcaaatgcatgttccacccttcttttaccacacagaggtgaagaggtagaaggctcacttctcatctgatcatcgggagtaataaagacatgcaaactatgactcctcatgattttctcgtactct

SEQ ID NO: 34445 - DNA, 371 bp, Zea mays
attcggaccttagaaactaagcttacaccttgaacaactggtgtatgttcttgctgttggcaatagaacctgacctgaagaccttccgctagtggctggaggctgatgactccacactgcctgcatggacttctccacaagttgcttccggtggacgggagaacgcactttatgaggacacctgacgcgcccctcctgtataatacctccccaatgagtgtatagtgagctgattgtctggcaatgcgctctgccgagttcttgtcatctggatcttcttcattctttatatacttaataatcgggtgcctacagtcatcagagtctgacttgggttgatctatgatgttgcactcttctatttatccgtc

SEQ ID NO: 34446 - DNA, 433 bp, Zea mays
  unsure (1)..(433): unsure at all n locations
tggatgaggtgtcgtcatcatcatcatccgagctatcattctaattccattcaactaggtaggctgtgccatcctgcttcttgttgtacaatatcttcttcttcttatcatctccatctttgcccttctttttcttgttagggcaattcatggcaatgtgaccgggttccccacactcaaaacagtttctatcattgaaagcatttcttcttgatgtttggcctcttctaggttgacctctcttcatcttcatgaatttgttgaatttctttacaaatagagccatatctccatcactctcatcttctttcataataaatngctcaaactttcctttgcacacatatagcttggcactcttcacaggtataagtccttcatgaatgtccatgagcttaatccaaatctcatgagcggttgtgagaatcttgat

SEQ ID NO: 34447 - DNA, 433 bp, Zea mays
agcttctaaagggagaacacgtgatacgctggactatcgtgcaattcataaaagattgaccttggacagcttgtcacgcatgtaaacaggtgggaggagcacatcacatcttgaatgtgataaccacatgaaggcccctggagctgttacatatggacctcttcggacctgtcgcctatctaagcgtatggggaagtaagtatggtttagttatagtggatgactattcccgcttcacttgggtgttctttttgcaggataagtctgaaacccaatggaccctcatgcgctttctaaggagagctcataatgagtttgagctcaatgcgataaagataagatacgacaacgggtcccaattcaataatctctaagaggacgagttcctctaggaggaggggatcaagcactagttctccgcttcctacacacc

SEQ ID NO: 34448 - DNA, 437 bp, Zea mays
  unsure (1)..(437): unsure at all n locations
ntaagctctttgacaataaaacctcttcatctagttatatcatagatgcaataatgcatgagtgagatgttaagaggttaaactaggtatgaagcangaataaatgcaaaggacatgctttctcttacttttatacaagatatgcaaagagtgtatatcagatgaagatttaggttcatatgtgaatgataggaattagttttcccctttatgtacctttacttgtagacgctctctccattgagcttatgtccttggtcttgttcgcttaagacctatgcttaatgacagtgtgtgagaatattttgcacaagagagagttcttacaactatgtgatccttggtctaagacatggctaacatatatcaagtggatcacaaattgcataaatgaatcatgaattctctgtttcacctagtgcatatcatgagagata

SEQ ID NO: 34449 - DNA, 437 bp, Zea mays
agcttatgaagattcttcattccaacatgggctagtcggcggtgccagagccaacccatgttagtcttagcaattaagcaagtgtcgagttcagctctatcaaaatctaccaagtatagctgaccctctaacactcccttaaatgctattgaatcatcacttcttctaaagacagtgacacctacatcagtaaatagacagttgtagcccatttgacataattgagatacggaaagcaaattgtaatctaatgaatcaacaagaaaaatattggaaatggaatggtcaggagatatagctattttacccaaacctttgaccaaaccttgatttccatccccgaatgtgatagctcgttggggatcttggtttttctcgtaggaggagaacatcttcttgtcccctgtcatgtggtttgtgcacccgctatcgatgat

SEQ ID NO: 34450 - DNA, 430 bp, Zea mays
  unsure (1)..(430): unsure at all n locations
tctaagggagaacacgtgataggtntgactaacgtgcaattcgaataagatagaccttgtgcagcttgtcaagcaggtaaacaagtgggaggagcgcatcacagcaagaatgtgatgaccacttcaagacccctggagctgctgcatatggacctcttcggacccgtcgcctatctgagcatatgagggagtaagtatggtctagttattgttgatgacttttcccgcttcacttgggtgttctttttgcaggataagtctgaaacccaatgggccctcaagcgcttcctcaggagagctcaaaatgagtttgagctcaaggtgaagaagataaggagcgacaacgggtccgagttcaagaaccttcaagtggaggagttccttgaggaggaagggatcaagcacgagttctcctcttcctacacaccac

SEQ ID NO: 34451 - DNA, 442 bp, Zea mays
  unsure (1)..(442): unsure at all n locations
agctntgtagctccaaacaaccacccccctacctgaccatgcaagttgcttcctctctgaagaattggagtgttgatgaaaaggaaggagatgccccatcaaaaattccttctgttcctaaagttccacaatgtccatgcccccagctacaattaagttgctgatccatatttggactttttatttgatttggtcaatcctagtggatcaatccaacttgtaggcaatttgctgtgtagtcagaattgtgtttttgaacttgtgctaaatagttntacattntggtactctntagtcacaaaagtggtattttggattnttggtcatccgtactgcccctaaaatcaaatattgaaaactattgcctcttctatatatntgtttatgtaaaattccggtagggcaaatgtctcctttgggtgtccactgtccaatctaaaat

SEQ ID NO: 34452 - DNA, 405 bp, Zea mays
  unsure (1)..(405): unsure at all n locations
gaccttgatactcagcttgtcgctccccagtgaggaaaaagaatcatgttggggatccnagataagaggacatgtccatccttgaggaagttgaaatcacctcaacctcgccatttgatgaagatgttgatcccaaagcactagaccttatcatgaagatcaccaaaaggatgttccttaatatgaaagaggatggngcttgaataagaagaagccaagagaaggatcaaaggagaataagcaaaggaaaaaagggaagaagaaattggagttcaatgatgacttggttgagcccttggtttcaaaggtaatgaaaaaggttaacattaacaccaagacttcaccaaccaagaacttataaagggtaacaagtatcattacattcaatttgattattctcacaat

SEQ ID NO: 34453 - DNA, 270 bp, Zea mays
  unsure (1)..(270): unsure at all n locations
cacacatagctcattagaatacctctgatcatatctcctttatatgctatgactaaagnnggntcaagtctatttcaaaccaagtcatatgtatattgaaagggaattggagtcttcggcgaagacaaaggcttccactccgtaactcatgcttcgccatcactccgagcaactctctattccttgtggagaaatgagcatcacagaaaaggacttcatccttggaggagagagttaaagcttcaaagcaaaaggaccggatntcgcctt

SEQ ID NO: 34454 - DNA, 453 bp, Zea mays
  unsure (1)..(453): unsure at all n locations
tcngcatcaaactgcattccgttgtccacggtaatggccttcgtcactccgaagcgacaaacaatatttttccagattaacttttgaacaataaccgaagttattgtggctaaaggctntgcctcaatccatttagaaaaatattccactgccattacaacatatttcaaattcccttgtgctggtgggagtgggcctatcaaatcaaggccccatctttgcaatggccaagtgggctgtattaattgagttagagacgaaggttgttnttgatctcttgcacatttttgacaaccttcgcatttttggactaattctgctgcattcgaagctgccttcggccaatagaatccttgacgaaaaactntacccaacagaggcctggatccaatgtgagatccacacaggcctgcatgtatttctttcatcagctctataccttcagctctggat

SEQ ID NO: 34455 - DNA, 370 bp, Zea mays
agcttcccatggcgcccttccttcttctatctgttgtacatggcgccaggcagcagctccactttccctgaccgcgccctgcttcgagctccgccttttgctctgttgcagctgcgccgtccgacctcgccaggccacacgccatagatcctgtgcgcttgtctgcagccagcgtcgacccgatctgcgcagcggtgccggcccaccacagcagccccgaatcccctccgcatcgcgtgcttcactcgacctgcgcagtcccggccaaggcgtcgcgtgggtgtttggacagccccatgctgcgccgttgatctacgcggttcgactgtctccacgtctcgcttcgccgaatctgcgcaacgccgacgtg

SEQ ID NO: 34456 - DNA, 457 bp, Zea mays
gtgtaccaccacagaggaatcaatagactgcaattctcattctttttagcagtgacacaagttagagacccatgttggatagatcggtcaggcgatatggatgaacatatagcgtgaagccttatgataatagaagggtagctaggcggctaattgagtgagtcctacacgctactataagggatggggatattttccctattccctataagttgatatgaggtcgattaggacgagcatgcatgcatcaattaattcaaactacttggttattggtcaagaaccttaaatgctatgaggcacgactacgatagattaaatacactccgtgaccttatcgtaacctttgagaagccaagcatagatcgcctattattcttataattcttttctttttgcttacgccctatcttacacagatgacttctcacgaatcctcggcaggaggaacacacat

SEQ ID NO: 34457 - DNA, 420 bp, Zea mays
  unsure (1)..(420): unsure at all n locations
agcttggaggcgtcgatggggagtctacttggtgtatactcttctttcttctcctccgntgctttgaatgtgatgggttgcacctcgggtgtggaggtggcgcctcactcgatgatttgtttggagcctttgatcatcaattcaaagctcacaaactttcctataacttcctcgggagacattagcttatatctaggatcaccacgaattagtgagagcacctagagggggggtgaataggtgatcctgtaaaaacttgaaacttaatgccacaaaagttgattaggagttagcacaataacgccaggtggctagagaagagttcttgcaaaacacaataaccacacgaagatcaacacagataggcacagtggtttatcccgtggttcggccaagcccaacacttgcctactccacgtt

SEQ ID NO: 34458 - DNA, 459 bp, Zea mays
  unsure (1)..(459): unsure at all n locations
tggagtaagcatggtccctgggggcaatcatatcggaagccttatgacagccgatttgatcaccacccatacccacagggaaccaggatacccgagtttgcanaagtttcgggtgaccaaagaaagagcacgcgtgagcacataggccagttcctagcacaattaggagaattggccgacaccgaagcattccgtgtgcgtttattttcattatccttaacagggactgcattcacatggtatgccacgctccctcctaattccattttgtcatggggagacttagagcaaaaatttcatgaacatttcttctctggtgattatgagctagatttagtagacttagtggccctacgacaagaaaggatgaatcgttagtgatatatccggagattccaggtacgagaaccgatgctttaaattcattaacagataacagctggcgggaatagctttgat

SEQ ID NO: 34459 - DNA, 366 bp, Zea mays
agcttgtgaagattcttcatcccaacatgggctagtcagcggtgccagagccaacccatgttagtcttagcaattaagcaagtgtcgagttcggctctatcaaagtctaccaagtatagctgaccctctaacactcccttaaatgctactgaatcatcgcttcttctaaagacagtgacacctacatcagtgaatagacagttgtagcccattttgcataattgagaaacggaaagcaaattgtaatctaaagaatctacaagaaaaacattggaaatagaatggtcaggagaatatagcaatttacccaatcctttgaccaaaccttgatttccatccccgaatgtgatagctcgttggggatct

SEQ ID NO: 34460 - DNA, 407 bp, Zea mays
  unsure (1)..(407): unsure at all n locations
taccggccacttgcttcgataactgatgacaggaaactttgtggttttccgataggcaaaattattgcaaccaaagttatcatgcaatccatcttttctagccttcgtctgataatgcagctcatgaactcgacaaaagctgtcggcatacggctccaccgcctggcttcagagggcccagatatagacgctaagcctaacgatagcgttaggagtcagctgatgaaagtagatcccaaacctcttcaatacatctacaataatcccatgcaaggggaatctcaacccagccttaagaaagctcttganaatgactatttcgtccttctctggcttcggagtagtttcttcgcccccgaagcgtagtagctttctctgattttcactgagataacccgacttcacca

SEQ ID NO: 34461 - DNA, 434 bp, Zea mays
  unsure (1)..(434): unsure at all n locations
agcttctaaagggagagcacattttatgactaacaaatgttcattttgagaaagataggatttgtagcgcatgccaagcaaggaagcaagttgacactcatcattcacacaagaacatcatgacgaccgacagaccgcttgagctactccacatggatctattctgcccgatagcttacataaacatcggcgggagtaagtattgtcttgtaattgtggatgattattctcgcttcacttgggtgttctttttgcaggaaaaatctcatacccaagagaccttatagggattcttgagacgggctcanaacaagnttggcttaaggatcaagaaaattagaagcgacaacgggacggagttcaagaactctcaaattgaaggcttccttgaggaggagggcatcaagcatgagttctcttctccctacacccca

SEQ ID NO: 34462 - DNA, 460 bp, Zea mays
  unsure (1)..(460): unsure at all n locations
tggatggtgttctgtgatggttcttgtggaaccttcggtgtatgagcacctgcagtcctagtagcaccttcaaaagtcaaaacatgttttgcagtcaaactggacttcagttgcacaaataatattgctgagtacgaagcacttcttttggggcttcaaaaactaagggcgatgggaataagaagggccatcctaaagactgattctcaagttattgctggacatgtggataagagcagcagggcacgagacccgaagctagaaaaatatctggatgcagtctgaaggttggaagcttcctttaaagggttttccgtcaaaaatattccaagaggtgaaaatgagcatgcggatttgctagccaaatcagcggctcangggctccctttaccctccgaagtatnttntgaaacaataaaatgcaccttgtgtgagctcatggaaagagcagtgctcacta

SEQ ID NO: 34463 - DNA, 418 bp, Zea mays
  unsure (1)..(418): unsure at all n locations
aagcttgngagcactcttaattatttaacctgtcactctgataggctctcccccatcactattctccacaatgcactaaatgtgagtctccctgccaaagaaaatagacatgaattggcacatgcgaatattttgctccttaagagaaattgcaagattgtggaaatatagaactgtttttgtgtggccaanactcatacgaacagtcttgatcatgagtgttgcttatcaaaattttaatacatcgttacaagtataaactaagaaaatttctgtagtgtgcactacagtaatattacaacatcatatacaattaagaccaactgaacaaacctggcagatcatgggaaacatcgttctttgatgtagtgacggttgcaaagaagcgaanactctcagcaacttccacggcctacat

SEQ ID NO: 34464 - DNA, 339 bp, Zea mays
tggtagagaagctgaaggagaggttactttgttgtaatctcattatgtggaaaatgattgagtcactttggttatagtgactgtgatcctgctccaacaccttatgaccctaatgtgctattgagaaagaatccgagaatactaagggatcaattgacatactcccagatccgtggctcactcatgtaccctgcaagtgcaacaaggccatacatctcttatgctgagagtaagctaagacggcttgtgtcgaaaccaggagatgatcactggcgtgctcttgtgagagtgtagccgtatttgataggactatgacatacggtattcattataccggaa

SEQ ID NO: 34465 - DNA, 378 bp, Zea mays
  unsure (1)..(378): unsure at all n locations
agcttagatgtatttatcttctcactgctagggataccttanatattactataatatccatcatcaagaacaagcattatgaaacaaacattttagaggcttatcgagataattggctattttccattcccaaaaaatgacattaaaaaattgccatgcagaagatgtgtatcttgatttctttcccatagtccatatttagctcctctttaagaaaatttgcgaagtgcccaactcattgtgtggaatggcaaagttgcacagttcactctttcaaatggcaaatagtgaattttctcataagtgacatggattgttctgcaaagaacatgacatgaagcacgaacatatgatacatgctactataagaccattact

SEQ ID NO: 34466 - DNA, 314 bp, Zea mays
  unsure (1)..(314): unsure at all n locations
tgtctaccgtgtcaccggaatatcgttgagccattccatcttcgttgaagagttggcacgccgtaggccacgtaaccgcgcgccaagcttctttctgcccttcggccgccaacgcattgcggtcaaattgagagccaccgctctcggagtctataaattgagcccccccctccgcttcgctatgtattntactagctatcgcacccgctcccacacccgattgtacaacagctcgcctgaattttgcacttcccccaaatcggttctccgccgccgtagaagtgaactcaccgtcgccagcccaactccggtca

SEQ ID NO: 34467 - DNA, 443 bp, Zea mays
  unsure (1)..(443): unsure at all n locations
agcttgcggatgctcaaaaatcatctattgtgcatgaagttgaggtggtcactaaggatgttggagtcacttgtgacttacttgatagtcttacaagtgaaccactacctactaactctatttgtgataaatgcaaaatttctctcaatgataatattgctcttgatgaatcaaaaattattgttgagaatgaagtgttagtggatagaataaatactctaactcatgacctagaaaaggcatatggtggtaagaagaaattggatttcatattgngaagtcaacgatgctcccttaaccgtgaaggtcttggatatgttcccaagaaaggaaagaatgcttttgtaaagcaaaagacattgtttgtgaaagaatgtgacaaagtgtgtcacaagtgtcacaaaaagggacatgttaagaaaaattgtcccaagttcaaacat

SEQ ID NO: 34468 - DNA, 407 bp, Zea mays
  unsure (1)..(407): unsure at all n locations
tgcacagtcaacaacactgtgcctgagtcgaagcatatntactaaaatgaatactgtgcctcggccaaggaatatgatgatttgatgtatcttaactctntctgccttttatattttcttgaaaggaaaacaatacatgagggataaattttcaacttgatgtaataatattgtcgttacatcatcgagtatgacagaattaggtttcgaagctataaagtcgttcctaagggagcgcagagtaagttccgaagctacaaagtcattcctaagggagcgtatagtaagtttcgaagctcaaaattcattcctaagggaatgcagagccaaaataccacctaaatcaaatgtgaagaagctccaaagtcgttcctaaggggatgtagagcttaaataccacctaaatc

SEQ ID NO: 34469 - DNA, 422 bp, Zea mays
agcttggaccccttgcaccccatcgcgtggcgtgctctgcgctacgctgcgggcgcgcgaacgaacgggtacaagtacgacgcgggctcttcagaggtctctggagactggagtggagtgatggagcaggcgggcagtgtatacccatacccccctctccttcctactcgtacctgcccgccattatggcgatcggtggcatttggtctggtcgtccggcgcggcgatggccaatgcgggtggctgggtgatggcgcaatgatggggttacgcgcgcgggcggaccgacggacggagaggtaaaaacgtggaagccggaagcggaaggtggagaagcgcctcttgtgagggcgggacggcggcggcggtgggatcgtgggaggtccgagtcttctattgttcgcggcttcgcgcttttcctt

SEQ ID NO: 34470 - DNA, 388 bp, Zea mays
  unsure (1)..(388): unsure at all n locations
gtcttgggtcacttattttggtggtctgaagattaagttatggatgtttaaagtctgaagactgaatctgtccagttctggacagcacaaccttcatagtgtatttcagccttgatacatgttaaaccagccagggatgtttataaataatttgtagaacatttaattagctttctagaaagtctaagatcactntattggatgtctgaatcttcagttgtgaaattttgaagttgcaagtctgaatctgtccaaatctggacagagctgctgtgattgcacttttgaccttgctaagtatttaatcatgctgtgatgaanataccacaattgtagagcactttctaagctntccagaaaagtcctagttgctagttntggattaata

SEQ ID NO: 34471 - DNA, 445 bp, Zea mays
  unsure (1)..(445): unsure at all n locations
agcttgaaatacatcttcacgcacaaagaactcaatctaagacaaataagatggcttgagttaatcaaggactatgatttggaaatacaatatcacccaggaaaagcaaatgtagtggctgatgctttgagccgtaaaggtcaagtgaacagcatcactactcatttgatgtcacacgaattgtgctgggagatggaacaactcaaccttggaatgctcaataatatggaagcaatagttatggaagttgaatctactntagaagaagatattcgtaaaggacaagatactaataagagaatcaaagaaattaaggcacaaattagtttgggaaaagccccagatttcacagaagatgatcaaggcacaatatggtttaaaaagagaatntgtgtaccagaaatcgagcacctacaccaacttatcttaagagaagcccatgatt

SEQ ID NO: 34472 - DNA, 397 bp, Zea mays
  unsure (1)..(397): unsure at all n locations
ctggatatttatcttccgcttagaataggttgcctatggctctatgcatganttctatgtatctatctagggggcaagacaagaccatctcaatttgtccctgatgctatgtaacacaagggcacaggtgctatgtctgcttactcacaataattagctattcccggggactcctgttgggcatgaagccaagaatataatttatatcgatatagatggtcttaacttggaacgattttagaagtttcaatcagagaaaccattgttaaggtgaacattaagctgacccagctaaaaatatagttcgcttgtaacccatccgtaaaaaccagtgaatgttggtttgtacaagtggatcggctggttgatggcctcacgtaacaactactaaccccaa

SEQ ID NO: 34473 - DNA, 443 bp, Zea mays
agcttccagataaccgcagagaagaaatcattccgagtgggacgcatgtcaccgttgaagtcgtcgtctagctcatcgattagcacaaagacattcggtgggaagtttgccgatgcaatccgtcaggcgcccgccgccggaccagcagcatctccaatgcacgtacgcctgtagcagtagcactacttgcagaacgaaaagctaaaataaagaaaggcacacacgttgttctcaaggtttaagtggcggtgttgacgaggcgatggggcacagtcgcagcgccgccacgacggcactcactgcatgcgcgatagactgcgcacctaacaacaagcagctggcttcttcgctttggagcagcacctcagatgctctgacgacgagacggtgagttcttttcgtcgttctcttatgggcggcagatggtgtctgggttaggtgtc

SEQ ID NO: 34474 - DNA, 438 bp, Zea mays
  unsure (1)..(438): unsure at all n locations
tctanaggggagaacacatttgngactaacaaatggttcatttgagaaagacaagatttgtagcgcatgtcatgcagggaagcaagttggtgttcatcatccacacaagaacatcatgacgaccgacaggccgcttgagctactccacatggatctattcggcccgatagcttacataagcatcagcgggagtaagtattgtcttgtgattgtggatgataattctcgcttcacttgggtgttctttntgcaggaaaaatctcatacccaagaaaccttanagggattcttgagacgagctcaaaatgagtttggcttaaggatcaaaaagattagaagcgataacgggacagagttcaagaactctcaaattgaaggctttcttgaggangaagggatcaagcatgagttcttctctccctatacgccacaacaaaa

SEQ ID NO: 34475 - DNA, 448 bp, Zea mays
caagcttcgggcagcagcaaagttcttttctgccgccatcaccaaggggcagaggcgctcttggcttctggggaaggtttggagatcacccaagaaaaatttactgtctattctgtggagaagacaaggaccataccaccaggatgtgccatgtcaccatccagaagcagaaggagatagcagaagcagcagcgcaacaaagtcagccgaagcaggtcatgcacactgcttcgtatcattcgccttatattccagaatatgtaggcaaccaccctgcagcttctgttgctttggcaagccagccttcgccaccgccgacccagcgaggacagcagccagaagggagtcagcacaatcaccttcagagggacttcagagaggggtccgaagctcgcacagtaaatagcactgtgccagagtcgaagcacatttattgataaatatccta

SEQ ID NO: 34476 - DNA, 403 bp, Zea mays
  unsure (1)..(403): unsure at all n locations
agcctactgatgtagactcttctttcttttcctccgtcgccttgaatgcgacgggttgcacctcgggtgtggaggtgccgccttgctccaagttgatgatttgtttggagcctttgatcatcaattcaaagctcacaaacttttctatcacttcctcaggagacattagcttatatctaggatcaccatgtattaattgaacttgtgtaggattgcgaaaaacgagtgatcttagaataaccttgaccatttcatggtcatcccattntgtgctccctatgttgcgcacttgattcaccaaggtcttgagctggttgacatggcttgtggctcctcccttggttgaggatgaacgaccgagctccctcgatcgtatccgcttgggatctggcacctatctctt

SEQ ID NO: 34477 - DNA, 420 bp, Zea mays
agcttagccaaaataattcaagagtaccctcaaatcatgcttctttgggtgggactcattgggaattctgaatttcagaattctgaaattcagaccttgagccaaagatcagggatgttcaccttgatccctaactcgaatcctaatggccccattgacaaaattgtgtctaactaacccctctgtcgtgtgccataagatggcattgggacgcaagccctagacacgacaaaacttgtgatttgcctcgggtttgggcagggagacagaccagatttcctggctccatatctctgcgaccagtatgcaaaatcctatgacccccacacaagaatggtagcttgtaaggaggagaagaggttttgtgcactgacccaggcgagagcatgctcggatgagcgaccacacgcgccatagctt

SEQ ID NO: 34478 - DNA, 484 bp, Zea mays
tatgcaactgctgccagaaatgagaggtgatctgcgtttctctgtctgacactatcttctgtggcacaccatgaagacaaacgatccgagacatatacaattctgccaatactgcactgctgtagttggtcttgataggtatgaagagggctgacttggtcaagcggtccactactacccaaatggaatcgtaaccggctcgagtgcgaggcaatccgactatgaaatctataccgatttcatcccatttccactgagggatctgcaacggttgcaacaatccagcaggtctctggtgctctgccttaattcttcggcaactatcgcacatagccacatgctctgcgatttctctctttattccgtaccaccagaatttcttcttcagatcctgatacatcttctcactgccagggtgaatcgtatatgccgccttatgagctttcctgagaatcaactcccgaatggactggacattgggaca

SEQ ID NO: 34479 - DNA, 414 bp, Zea mays
  unsure (1)..(414): unsure at all n locations
agcttgttggaacttgctctctgctgcaaggggatccaacggngggagtagtgacgtaaacatggttctcgcgcgagatggcaatagctctgttaacctagcctcttaagggcactgtgcgggggtatttataggtatccgagtgcccagcgtcttgtgttaagaacgcatgtgccctcagacacctaggttatccccagaatattcccataaagcggngctacagactgtaattatagaggcgcctttacaaattagacccgtaacacgcagtggccacgcagggcctgcgacaatgggccggatcacccatgggcctccatgctggacgacgtcgcacgatggactgacctcgttgtaggtcttcgcccgatgtcgtatggagcgaagggtgccttcgcccgttgtcttgtc

SEQ ID NO: 34480 - DNA, 431 bp, Zea mays
  unsure (1)..(431): unsure at all n locations
tctatagggagaacatgtgataggtctaactaatgttctattcgaaaaagatagaccttgtgcagctggtcaagcagggaaacaggtgggaggctctcatcacaccaaaaatgtgatgacgacatcaagacccttggagatgctgcatatggacctcttcggacccgtcgcctatctgagcataggtggaagtaagtatggtttagttattgttgatgacttttcccgcttcacttgggtgttctttttgcaggaaaagtctgaaacccaagggaccctcaaacgcttcctcaggagagctcanaatgagtttgagctcanagtaaagaagataaggagcgacaacggatccgagttcaagaaccttcaagtggaagagttccttgaagaggaagggatcaagcacgagttctnncgctcctacacaccac

SEQ ID NO: 34481 - DNA, 415 bp, Zea mays
agcttatgaaattatctacatcttttcttacaaactctaaggttaattctgttgataaaattgcctaaatcttaagagaacagattctgtatagaattaagagactgaaaaactgctataatcaaactgcaataactctctgatctaatgttcgattgaggtgttcttcatggtcacggaaagatctacaaattatctacgacttatatatagactttttattttttggagacctctaagaccacggaaaactgggattaacagaaactgtcgaatctgccattctgcagaaaactaaattcgagatcaaaaccaaaccccacatctaatccaacctctaatcccttaattcccatgatccacaacatccaaaagcacataattacagggaggaacaagtatctcatccatacct

SEQ ID NO: 34482 - DNA, 379 bp, Zea mays
  unsure (1)..(379): unsure at all n locations
ggcattaattntcctccacttgctgagccccgaccataagtgagctgacccttgctaactatttgatcagagggtgatgaagaagacattgatggagatttcgatgagtattgagtacccatgttattttcactttactttgatgacactgtttaagatactattatctcgatgttgtaataaagactactctactctctntacgcctttattgcattgtcttttgatatactacacttgtgttgtcaacatatgtgtggaaaatagatcttggcacacatatgctatgcattcggttttgcccccagaaccgggtgtgacagattgtgatatttttntcttataaatttttgaattctttattttatgtgttatatag

SEQ ID NO: 34483 - DNA, 431 bp, Zea mays
  unsure (1)..(431): unsure at all n locations
agcttgtgaagatacttcattccaacatgggctagtcttgggtgccaaagccaacccaagttagtcttagcaactaagcaagtgtcgagttcagctctttcaaaatctactaagtatagctgaccctctaacacacccttgaatgctatagaatcatcacttcttctaaagacagtgacacctatatcagtaaagagacagttgtagcccatttgacataattgggaaacagaaagcaagttgtaatctaatgaatcaacaagaaaaacattggaaatggaatggtcatgtgaaatagcaattntacccaaacctttgaccaacccttgatttccatccccaaatgtgatagctcgttggggatctttgtttttctcatatgaggagaacatacttttctccccggtcatgtggtttgtgcacccgctgtc

SEQ ID NO: 34484 - DNA, 444 bp, Zea mays
cattcaactataccttccgatcctgccccgacccttagaggagatcgaccttcgacaagggatagaccacttcaatctggtggattttgtttttattcgatcgactgttcaagcacgtgattgaatacttggattggattggaatattcacttgacgatgaattatagatcacataagtaggtgatgactattgcttctctttgttatactaagatattttcaaccatcttatggggtttcacgaccagcggttatgacaatatttacgtgaacaacacaactgttgcgcaaacaagaattctagatctgtcaagtgtcggaagggcatgtaatctatatgaaataatttcatatccaacattaagaagaaaaatcgatgatgatctcattattcggtgattgatgatgagcttgtcacatctattaatgatgagaatactatt

SEQ ID NO: 34485 - DNA, 415 bp, Zea mays
  unsure (1)..(415): unsure at all n locations
agctttagcaagatgactgtcaaagtccttcactcttaaattggcagaaatgtgctgacatatgttgatgatatcataagtaaggtcacaaagcaagaaaatcatgttgctgatttgcaagaaacatttgctaacttcagaagggctgtcttaaactaaatccagagaaatgtgccttcggagtgaagaagggcaaatttcttggtttctttgtaacaacaaagggtatctaagctaatccaagtaagatagaagttatacttcggaaggagccaccaaagtcaagaaagggtgccctaatgatgacagggaggctggcatcattgaacagatttatttcaaggtcagcagagaggaacttgccattctntgaagtgctgaagtcagccgatgtctttcaatggtgaccaactca

SEQ ID NO: 34486 - DNA, 413 bp, Zea mays
cctattgaccttgatacagtagtggtgtggttccacaccacctttattagttcgtctggccattttcctttgcgttggtcgaaaattgacttcattattcctgttattatgattctgtgtgctctttctaccaatccatttgactccagatgtctcactgatgcaaagtgtatttttgtaccaatctggtcacaaaagggtttgaaggtttcagcatcaaactgagttcgggtgtcaactctgatagcctttggcacgccgaagcggcatacaatgttctaacaaaagaatttctatactatggccaacagtattatagctaatggcttttgcttgatccacttagagaaagacttcactgccaccacaacatatcttaagttccctgtgctggtggaagtggtcctacaaat

SEQ ID NO: 34487 - DNA, 351 bp, Zea mays
  unsure (1)..(351): unsure at all n locations
agcttggacaatttttgatgataatgtgtgangatccaacacaaacatacaaccggctcatgacccttatcaacaaaataaggagctaccgaagcacgcgatggacggaccacaacgtcgtctgactgatgctaatggcctttaccagtctcgatcctcatttggtgaataatattcatgagaatcccaagtacaccaaaatgttgcccgaagaagtccttggaaaattccttagcgagcgaatgatgatcaaggaggcaagatacgtggactacgcattaaatggaccaatcaacgagcctcatccccttgctcttaatgcaacaagatgcaaggaagcgctacctaaca

SEQ ID NO: 34488 - DNA, 423 bp, Zea mays
  unsure (1)..(423): unsure at all n locations
ctaagctcgtgtctgacaaaaaaaggattaaatgtcaaatatatgtgctcatcancatcttggcatttgctctcatgtgacaagccaacttcagtaatagcagcatatagaataagccttcacttatcttgccctcttgtgaaacatgttccaaagatatccttcttttctactgacgaagaaagagtgatacacgaaacgtccatgctgcacagagtggtgggtgggaaccggaaggaaggcgcttcttcggggagcgctggatgtggagtaagcgacatatctccactagtgactataaatataacatgatcggcctccttgagaggtacggaagctccataattctntcatgataatcagagccacttcttccatataaatctagtttcgttagaattgcttgatggcgggcttctctac

SEQ ID NO: 34489 - DNA, 443 bp, Zea mays
  unsure (1)..(443): unsure at all n locations
agcttttgaagaaatnttgaatagtcgtggagacatatgtgccttttcgggtgccagggggattgctaccattttggagaggaaaggccgtgaccatgtgaaattcttggcacaatccgaagccgccttatcctctgaagatataaaagacccctcggccgaagcgatcctggttggtggaaaatttttcaccgacatctgggacaatggtggccgggaaatggcccaagaaattatacgaaaaagcgagaaaggcattcatgacgctagaaaagtagcagaggccgctgagaaaagtgcggagctcgaagggcaaataggtattgactagtggttnttgactctttgttgtaattttttgatttcgaacttgtttacgctttgtaacgtagccgtatcttctcctccctcagagcctaccgagccatcgacggacccccacg

SEQ ID NO: 34490 - DNA, 494 bp, Zea mays
  unsure (1)..(494): unsure at all n locations
tctggctttngggtcgcaccgaagggtcaatccccaagctgtgctcaattatggctcggctgactccgaccagatcaagggcagaccaggcgaagacatctttattcttggccaggcagcagagaagtttctcttcttcaagtgaggtgaggtcttcgctgatagttactgtctgcttgggcgtggcctgatcgagggggacagtcttggtcccgtcttggcactgcaactgtgccttgtcgtgctgcttgtctgttgggctggccggcgcatggacctcgcgctgggtcgtgagacagtgtacatttctctgaccgggcacgaagtcccgctctatgttgtgcgccgtctgctggttgccgtaaattgtgatggcgcctatcatgcctggtatcttcatacataggtacaacccgtggatggcagcttctaacttngtgatggagccccggcccatgattggcgtgtatggatataccatgtcgacaatgtcg

SEQ ID NO: 34491 - DNA, 441 bp, Zea mays
agcttctaaagggagagcacattttaggattaacaaatgttcattttgagaaagacaggatttgtagcgcataccaagcagggaagcaagttggtgctcatcatccacataagaacatcatgacgactgataggccactggagctcctacacatggatctattcggcctgatcgcttacataagcatcggcgggagtaagtattgtctagttattgtggatgattattctcgcttcacttgggtattctttttgcaggaaaaatctcatacccaagagaccttaaagggattcttgagacgggctcaaaatgagttcggcttaaggatcaagaaaattagaagcgataacgggacggagttcaagaactcccaaattgaaggctttcttgaggaagagggcatcaagcatgagttctcttctccctacacgccacaacaaa

SEQ ID NO: 34492 - DNA, 450 bp, Zea mays
  unsure (1)..(450): unsure at all n locations
ngcctgcatatgatctttagaggcatntgaattattcttgttaaagacattataatcaagaattgaacatcactctatatatttgttcataccttgtaatatatttttaccttttctttcatgtgtaaattgctttgctgtggacaaaacttataccttntgagccgaaggcgaaaaacaccttcccttcttttcgtacacaatgaagcatatcttgcttctttatgctcatcgaagcattgatatcaaagtcgaagtatctatttgcactttatgttatgatgatgatgatcctacgaatgtctacatgaatgtgtatgaatgcaatgaatgatgtaatgtaatgtgcaaatgaatgtccaaacacacgcacacgaagccacattcagactctgcataccctttgaacgtctttntgggtcttaagctctgcattcccttaagaacatc

SEQ ID NO: 34493 - DNA, 443 bp, Zea mays
  unsure (1)..(443): unsure at all n locations
agcttctaaagggagagcacattntaggattaacgaatgttcattttgagaaagacatgatttgtagcgcatgccaggcagggaagcaagttggagttcatcatccacacaagaacatcatgacgaccgacaggccgcttgagctactccacatggatctattcggcccgattgcttacataagcatcgacgggagtaagtattgtcttgtaatagtggatgattattctcgcttcacttgggtattctttntacaggaaaaatctcaaacccaagagaccttaaagggattcttgagacgggctcanaatgagttcggcttaaggatcaagaaaataagaagcgacaacgggacggagttcaagaactcacaaattgaatgctttcttgaggaggagggcatcaagcatgagttctcctctccctacacgccacaacaaaat

SEQ ID NO: 34494 - DNA, 436 bp, Zea mays
aaccaagtattactggatattattaagtgttataagactggttctatgcagggtttcatgaacgttaaggagcttttagaaatgctgatacttaaggatatcagcataaaatcatcagttcaccaaatgatatttaaggagcttttagaaatgctcatgttcgtggaatccgtggaaatcatacgggtagccccccttcccatatagatcggataaaattatactaccttatctgttttatttgacgccaaatagtgtaaaattaaactacaaaacgtcaaagcacagtaccatggatggtgttgttaggccgaaatatcctctctctctatttttcttcgagaaaagaaactatcgtgacagcaacgtgccaccacctcgagaatgcgttaatacgtaagctagcgtatgcctatggctatgctctatcatgtgt

SEQ ID NO: 34495 - DNA, 445 bp, Zea mays
  unsure (1)..(445): unsure at all n locations
agcttgtatgtgtgcgtgcacacacatatttctatgtttgttttccaaaacatatttgtgtccataatgaacttgcaagtatgcatagaaccttaaaaatgccatcgtataattatgcagaatagttgggatcacagcacatgacaaacaatttggagttttcatttgccagtgttggtaattggacgcttttggacctttttttggaaatcttagaacctggaacaggacttgcatccaatgacgcttttttacttccatgaaaaacttgccgactgaatgtgatagcagcacttcgattntgctagatatgaatttaagttgaagttaaaaacacaacggtttttgtgatatatcatatagtttttagaattctagttctattaccatggcctaacaaaaaaaattgtgatttatgtccactagagcatcaaaagcattaatg

SEQ ID NO: 34496 - DNA, 476 bp, Zea mays
  unsure (1)..(476): unsure at all n locations
tctaagggggaacacattntatgactaaccaatgttncatttgagaaagacaggatttgtagcgcatgccaagccgggaagcaagttggcactcatcatccgcacaagaacatcatgactagtgacaggccactggagctcctacatatggacctattcggcccgatcgcttacataagcatcggcgggagtaagtactgtctagttattgtggatgattattctcgcttcacttgggtattctttttgcaggaaaaatctcaaacccaagagaccttanaaggattcttgagacgggctcaaaatgagttcggcttaaggatcaataaaattagaagcgacaatgggacggagttcaagaactctcannatgaaggcttccttgaggaggagggcatcaagcatgagttctcctctccctatacgccacaacaaaatggtgtggtggagaggaagaatcgaactctattggacat

SEQ ID NO: 34497 - DNA, 416 bp, Zea mays
  unsure (1)..(416): unsure at all n locations
agctntaccaaatggacgtgaagagtgccttcctcaatggaccaatcaaggaagaggtctatgttgagcaacctcccggctntgaagatagtgagtaccctaaccatgtctataggctctctaaggcgctttatgggctcaagcaagccccaagagcatggtatgaatgccttagggatttccttatcactaatggattcaaagtcggaaaggccgatcctactctattcactaaaactcttgaaaatgacttgtttgtatgccaaatttatgttgatgatattatatttgggtctactaacgagtctacatgtgaagaatttagtaggatcatgacacaaaagttcgagatgtctatgatgggggagttgaagtatttcttaggatttcaagtaaagcaactccaagagggcacc

SEQ ID NO: 34498 - DNA, 488 bp, Zea mays
  unsure (1)..(488): unsure at all n locations
tatgtcaatatataaaatgatgttgggtacttattatttacttgtctttaatgctttatatctcgcattactttatataatctttgagagtttaattacgaagattcaaccttcgtaatagtcccgttataaccttcgtccgaagttcattaaatcctcggggaaataatgcttcagtggacgaaggacattaacatntaacactttgtgttgccttgttcttaattcatagcacttgagaacaagtccncaacattggcgcccacctccggtgaactcacttccacttttttgagctgatggcttctgtcaacattcaagctggggctgcttcggctccgaagctggtactcccgataacaggcggttcatgttcagagccagccctcaagatgcagaagaaggaagcacagagaagggtacagcatgtctgggtgaaggacccttcatcaagtcaagatggtctcacattcctattaccttctccg

SEQ ID NO: 34499 - DNA, 431 bp, Zea mays
agcttggcttgaccacatgtccactgccacatccataccacattcagtggatcaatgattcaggcaaggttaaggtaacacacatggtacatgtgcatttctccattggtatgtattctgattatgcggattgcgatgtagtacctatggaagcttgttctcttttgttgggtagaccttgggaatatgatactgatgcatgtcaccatggtaggagaaatacatacacttttaggcataaagataaaaacattactttgctacctttgactcttactgaaattgtacaagctgataaagatagagctgcaagtacccataaggaaccaactaatgagacagaaattcaacaacaaattaaattgaaagctcctgtcatgcttgctactaaatctgatcttcttgaaactcatgctactgatgcttgttgc

SEQ ID NO: 34500 - DNA, 471 bp, Zea mays
  unsure (1)..(471): unsure at all n locations
tattacggacctataaaactcaagcttgacaatctgcanagctcaccaatgagagtgcaaagatttgttagatggatagggtgaggcattatggaagacctgtgggcatcatgttctcttctcaaagacaccgggcaccagtttgagctgagcaattctttcatctttgcatgctcaaatctatgtgctaaaatgatatgagatgcaggtggaatgcggccacaccagtgtatgtggccgcagcagtcatagataaagtggctgcggtggagatctgaggatggatagtgaggtgtcatggaagtgtctggtgtatgcggccacagcaatatagatatggtggcggcagtggcagtggaaatctgtaggaagcatagctctatgcatcagggaagacctaggtgcactgcattcttgtcttcttgaagttaatgggcacctagtcgagcatagcaattccttcatgttcgc

SEQ ID NO: 34501 - DNA, 412 bp, Zea mays
agctttaagagcaggagaggtattcttttcaaactatatttgctctgaggctttttcttctgcggcgttttcttaacattccgcatgcttcatcttagcaagaactgagggccccgccttggctttagcctgcgttgttatagcttcaacatctatttgcttagtatcagctttgggttgcgttttgttagcttcggcaactttccctttgggagtgagacttgtggagtcggttgtctccagtacatctaatacatttaccatcctccttctcctaggagttatggcagaacttttttgtgccctcagcgctgttgcttctgttgaaggacttaatcttcgccatcttttgtatctcttcagttgtttacctttcagccttatctttgtcaaccttctgtttaactagctc
